(19) United States
(12) Patent Application Publication
(10) Pub. No.: US 2004/0123340 A1
(43) Pub. Date: Jun. 24, 2004

(54) Nucleic acid molecules and other molecules associated with plants

(76) Inventors: Jill Deikman, St. Charles, MO (US); Paul C.C. Feng, Wildwood, MO (US); Karen L. Fincher, Pacific, MO (US); Todd E. Ziegler, St. Charles, MO (US)

Correspondence Address: Lawrence M. Lavin, Jr., Patent Department, E2NA, Monsanto Company, 800 N. Lindbergh Boulevard, St. Louis, MO, 63167, US

(21) Appl. No.: 10/021,323

(22) Filed: Dec. 12, 2001

Related U.S. Application Data
(60) Provisional application No. 60/255,619, filed on Dec. 14, 2000.

(51) Int. Cl. C07H 21/04; C12N 9/22; A01H 1/00; C12N 15/82; A01H 5/00

(52) U.S. Cl. 800/278; 800/312; 800/320.1; 800/320.3; 435/199; 536/23.2

(57) ABSTRACT

Expressed Sequence Tags (ESTs) isolated from cotton are disclosed. The ESTs provide a unique molecular tool for the targeting and isolation of novel genes for plant protection and improvement. The disclosed ESTs have utility in the development of new strategies for understanding critical plant developmental and metabolic pathways. The disclosed ESTs have particular utility in isolating genes and promoters, identifying and mapping the genes involved in developmental and metabolic pathways, and determining gene function. Sequence homology analyses using the ESTs provided in the present invention, will result in more efficient gene screening for desirable agronomic traits. An expanding database of these select pieces of the plant genomics puzzle will quickly expand the knowledge necessary for subsequent functional validation, a key limitation in current plant biotechnology efforts.

### CROSS-REFERENCE TO RELATED APPLICATIONS

[0001] This application claims priority under 35 U.S.C. §119(e) of U.S. Provisional Application Serial No. 60/255,619 filed on Dec. 14, 2000, the disclosures of which application is incorporated herein by reference in its entirety.

### INCORPORATION OF SEQUENCE LISTING

[0002] This application contains a sequence listing, which is contained on three identical CD-ROMs: two copies of a sequence listing (Copy 1 and Copy 2) and a sequence listing Computer Readable Form (CRF), all of which are herein incorporated by reference. All three CD-ROMs each contain one file called “pa_{—}00393.rpt” which is 15,421,237 bytes in size and was created on Dec. 05, 2001.

### FIELD OF THE INVENTION

[0003] The present invention is in the field of plant biochemistry. More specifically the invention relates to nucleic acid molecules that encode proteins and fragments of proteins produced in plant cells, in particular, cotton plants. The invention also relates to proteins and fragments of proteins so encoded and antibodies capable of binding the proteins. The invention also relates to methods of using the nucleic acid molecules, proteins and fragments of proteins.

### BACKGROUND OF THE INVENTION

[0004] I. Expressed Sequence Tag Nucleic Acid Molecules

[0005] Expressed sequence tags, or ESTs, are short sequences of randomly selected clones from a cDNA (or complementary DNA) library which are representative of the cDNA inserts of these randomly selected clones. McCombie, et al., Nature Genetics, 1:124-130 (1992); Kurata, et al., Nature Genetics, 8: 365-372 (1994); Okubo, et al., Nature Genetics, 2: 173-179 (1992), all of which references are incorporated herein in their entirety.

[0006] Using conventional methodologies, cDNA libraries can be constructed from the mRNA (messenger RNA) of a given tissue or organism using poly dT primers and reverse transcriptase (Efstratiadis, et al., Cell 7:279-288 (1976); Higuchi, et al., Proc. Natl. Acad. Sci. (U.S.A.) 73:3146-3150 (1976); Maniatis, et al., Cell 8:163 (1976); Land, et al., Nucleic Acids Res. 9:2251-2266 (1981); Okayama, et al., Mol. Cell. Biol. 2:161-170 (1982); Gubler, et al., Gene 25:263 (1983); all of which are herein incorporated by reference in their entirety).

[0007] Several methods may be employed to obtain full-length cDNA constructs. For example, terminal transferase can be used to add homopolymeric tails of dC residues to the free 3′ hydroxyl groups (Land, et al., Nucleic Acids Res. 9:2251-2266 (1981), herein incorporated by reference in its entirety). This tail can then be hybridized by a poly dG oligo which can act as a primer for the synthesis of full length second strand cDNA. Okayama and Berg, report a method for obtaining full length cDNA constructs. This method has been simplified by using synthetic primer-adapters that have both homopolymeric tails for priming the synthesis of the first and second strands and restriction sites for cloning into plasmids (Coleclough, et al., Gene 34:305-314 (1985), herein incorporated by reference in its entirety) and bacteriophage vectors (Krawinkel, et al., Nucleic Acids Res. 14:1913 (1986); and Han, et al., Nucleic Acids Res. 15:6304 (1987); both of which are herein incorporated by reference in their entirety).

[0008] These strategies have been coupled with additional strategies for isolating rare mRNA populations. For example, a typical mammalian cell contains between 10,000 and 30,000 different mRNA sequences. Davidson, Gene Activity in Early Development, 2nd ed., Academic Press, New York (1976). The number of clones required to achieve a given probability that a low-abundance mRNA will be present in a cDNA library is N=(ln(1−P))/(ln(1−1/n)) where N is the number of clones required, P is the probability desired, and 1/n is the fractional proportion of the total mRNA that is represented by a single rare mRNA. (Sambrook, et al., Molecular Cloning: A Laboratory Manual, 2nd ed., Cold Spring Harbor Laboratory Press (1989), herein incorporated by reference in its entirety).

[0009] A method to enrich preparations of mRNA for sequences of interest is to fractionate by size. One such method is to fractionate by electrophoresis through an agarose gel (Pennica, et al., Nature 301:214-221 (1983), herein incorporated by reference in its entirety). Another such method employs sucrose gradient centrifugation in the presence of an agent, such as methylmercuric hydroxide, that denatures secondary structure in RNA (Schweinfest, et al., Proc. Natl. Acad. Sci. (U.S.A.) 79:4997-5000 (1982), herein incorporated by reference in its entirety).

[0010] A frequently adopted method is to construct equalized or normalized cDNA libraries (Ko, Nucleic Acids Res. 18:5705-5711 (1990); Patanjali, S. R. et al., Proc. Natl. Acad. Sci. (U.S.A.) 88:1943-1947 (1991); both of which are herein incorporated by reference in their entirety). Typically, the cDNA population is normalized by subtractive hybridization (Schmid, et al., J. Neurochem. 48:307-312 (1987); Fargnoli, et al., Anal. Biochem. 187:364-373 (1990); Travis, et al., Proc. Natl. Acad. Sci (U.S.A.) 85:1696-1700 (1988); Kato, Eur. J. Neurosci. 2:704 (1990); and Schweinfest, et al., Genet. Anal. Tech. Appl. 7:64 (1990); all of which are herein incorporated by reference in their entirety). Subtraction represents another method for reducing the population of certain sequences in the cDNA library (Swaroop, et al., Nucleic Acids Res. 19:1954 (1991), herein incorporated by reference in its entirety).

[0011] ESTs can be sequenced by a number of methods. Two basic methods may be used for DNA sequencing, the chain termination method of Sanger et al., Proc. Natl. Acad. Sci. (U.S.A.) 74: 5463-5467 (1977), the entirety of which is herein incorporated by reference and the chemical degradation method of Maxam and Gilbert, Proc. Nat. Acad. Sci. (U.S.A.) 74: 560-564 (1977), the entirety of which is herein incorporated by reference. Automation and advances in technology such as the replacement of radioisotopes with fluorescence-based sequencing have reduced the effort required to sequence DNA (Craxton, Methods, 2: 20-26 (1991); Ju et al., Proc. Natl. Acad. Sci. (U.S.A.) 92: 4347-4351 (1995); Tabor and Richardson, Proc. Natl. Acad. Sci. (U.S.A.) 92: 6339-6343 (1995); all of which are herein incorporated by reference in their entirety). Automated sequencers are available from, for example, Pharmacia Biotech, Inc., Piscataway, N.J. (Pharmacia ALF), LI-COR, Inc., Lincoln, Nebr. (LI-COR 4,000) and Millipore, Bedford, Mass. (Millipore BaseStation).

[0012] In addition, advances in capillary gel electrophoresis have also reduced the effort required to sequence DNA and such advances provide a rapid high resolution approach for sequencing DNA samples (Swerdlow and Gesteland, Nucleic Acids Res. 18:1415-1419 (1990); Smith, Nature 349:812-813 (1991); Luckey et al., Methods Enzymol. 218:154-172 (1993); Lu et al., J. Chromatog. A. 680:497-501 (1994); Carson et al., Anal. Chem. 65:3219-3226 (1993); Huang et al., Anal. Chem. 64:2149-2154 (1992); Kheterpal et al., Electrophoresis 17:1852-1859 (1996); Quesada and Zhang, Electrophoresis 17:1841-1851 (1996); Baba, Yakugaku Zasshi 117:265-281 (1997), all of which are herein incorporated by reference in their entirety).

[0013] ESTs longer than 150 bases have been found to be useful for similarity searches and mapping. (Adams, et al., Science 252:1651-1656 (1991), herein incorporated by reference.) EST sequences normally range from 150-450 bases. This is the length of sequence information that is routinely and reliably generated using single run sequence data. Typically, only single run sequence data is obtained from the cDNA library, Adams, et al., Science 252:1651-1656 (1991). Automated single run sequencing typically results in an approximately 2-3% error or base ambiguity rate. (Boguski, et al., Nature Genetics, 4:332-333 (1993), herein incorporated by reference in its entirety).

[0014] EST databases have been constructed or partially constructed from, for example, C. elegans (McCombrie, et al., Nature Genetics 1: 124-131 (1992)), human liver cell line HepG2 (Okubo, et al., Nature Genetics 2:173-179 (1992)), human brain RNA (Adams, et al., Science 252:1651-1656 (1991); Adams, et al., Nature 355:632-635 (1992)), Arabidopsis, (Newman, et al., Plant Physiol. 106:1241-1255 (1994)); and rice (Kurata, et al., Nature Genetics 8:365-372 (1994).

[0015] II. Sequence Comparisons

[0016] A characteristic feature of a protein or DNA sequence is that it can be compared with other known protein or DNA sequences. Sequence comparisons can be undertaken by determining the similarity of the test or query sequence with sequences in publicly available or propriety databases (“similarity analysis”) or by searching for certain motifs (“intrinsic sequence analysis”)(e.g. cis elements)(Coulson, Trends in Biotechnology, 12: 76-80 (1994); Birren, et al., Genome Analysis, 1: 543-559 (1997); both of which are herein incorporated by reference in their entirety).

[0017] Similarity analysis includes database search and alignment. Examples of public databases include the DNA Database of Japan (DDBJ)(http://www.ddbj.nig.acjp/); Genebank (http://www.ncbi.nlm.nih.gov/web/Genbank/Index.htlm); and the European Molecular Biology Laboratory Nucleic Acid Sequence Database (EMBL) (http://www.ebi.ac.uk/ebi_docs/embl_db.html). A number of different search algorithms have been developed, one example of which are the suite of programs referred to as BLAST programs. There are five implementations of BLAST, three designed for nucleotide sequences queries (BLASTN, BLASTX, and TBLASTX) and two designed for protein by sequence queries (BLASTP and TBLASTN) (Coulson, Trends in Biotechnology, 12: 76-80 (1994); Birren, et al., Genome Analysis, 1: 543-559 (1997)).

[0018] BLASTN takes a nucleotide sequence (the query sequence) and its reverse complement and searches them against a nucleotide sequence database. BLASTN was designed for speed, not maximum sensitivity, and may not find distantly related coding sequences. BLASTX takes a nucleotide sequence, translates it in three forward reading frames and three reverse complement reading frames, and then compares the six translations against a protein sequence database. BLASTX is useful for sensitive analysis of preliminary (single-pass) sequence data and is tolerant of sequencing errors (Gish and States, Nature Genetics, 3: 266-272 (1993), herein incorporated by reference). BLASTN and BLASTX may be used in concert for analyzing EST data (Coulson, Trends in Biotechnology, 12: 76-80 (1994); Birren, et al., Genome Analysis, 1: 543-559 (1997)).

[0019] Given a coding nucleotide sequence and the protein it encodes, it is often preferable to use the protein as the query sequence to search a database because of the greatly increased sensitivity to detect more subtle relationships. This is due to the larger alphabet of proteins (20 amino acids) compared with the alphabet of nucleic acid sequences (4 bases), where it is far easier to obtain a match by chance. In addition, with nucleotide alignments, only a match (positive score) or a mismatch (negative score) is obtained, but with proteins, the presence of conservative amino acid substitutions can be taken into account. Here, a mismatch may yield a positive score if the non-identical residue has physical/chemical properties similar to the one it replaced. Various scoring matrices are used to supply the substitution scores of all possible amino acid pairs. A general purpose scoring system is the BLOSUM62 matrix (Henikoff and Henikoff, Proteins, 17: 49-61 (1993), herein incorporated by reference in its entirety), which is currently the default choice for BLAST programs. BLOSUM62 is tailored for alignments of moderately diverged sequences and thus may not yield the best results under all conditions. Altschul, J. Mol. Biol. 36: 290-300 (1993), herein incorporated by reference in its entirety, uses a combination of three matrices to cover all contingencies. This may improve sensitivity, but at the expense of slower searches. In practice, a single BLOSUM62 matrix is often used but others (PAM40 and PAM250) may be attempted when additional analysis is necessary. Low PAM matrices are directed at detecting very strong but localized sequence similarities, whereas high PAM matrices are directed at detecting long but weak alignments between very distantly related sequences.

[0020] Homologues in other organisms are available that can be used for comparative sequence analysis. Multiple alignments are performed to study similarities and differences in a group of related sequences. CLUSTAL W is a multiple sequence alignment package available that performs progressive multiple sequence alignments based on the method of Feng and Doolittle, J. Mol. Evol. 25: 351-360 (1987), the entirety of which is herein incorporated by reference. Each pair of sequences is aligned and the distance between each pair is calculated; from this distance matrix, a guide tree is calculated, and all of the sequences are progressively aligned based on this tree. A feature of the program is its sensitivity to the effect of gaps on the alignment; gap penalties are varied to encourage the insertion of gaps in probable loop regions instead of in the middle of structured regions. Users can specify gap penalties, choose between a number of scoring matrices, or supply their own scoring matrix for both the pairwise alignments and the multiple alignments. CLUSTAL W for UNIX and VMS systems is available at: ftp.ebi.ac.uk. Another program is MACAW (Schuler et al., Proteins, Struct. Func. Genet, 9:180-190 (1991), the entirety of which is herein incorporated by reference, for which both Macintosh and Microsoft Windows versions are available. MACAW uses a graphical interface, provides a choice of several alignment algorithms, and is available by anonymous ftp at: ncbi.nlm.nih.gov (directory/pub/macaw).

[0021] Sequence motifs are derived from multiple alignments and can be used to examine individual sequences or an entire database for subtle patterns. With motifs, it is sometimes possible to detect distant relationships that may not be demonstrable based on comparisons of primary sequences alone. Currently, the largest collection of sequence motifs in the world is PROSITE (Bairoch and Bucher, Nucleic Acid Research, 22: 3583-3589 (1994), the entirety of which is herein incorporated by reference.) PROSITE may be accessed via either the ExPASy server on the World Wide Web or anonymous ftp site. Many commercial sequence analysis packages also provide search programs that use PROSITE data.

[0022] A resource for searching protein motifs is the BLOCKS E-mail server developed by S. Henikoff, Trends Biochem Sci., 18:267-268 (1993); Henikoff and Henikoff, Nucleic Acid Research, 19:6565-6572 (1991); Henikoff and Henikoff, Proteins, 17: 49-61 (1993); all of which are herein incorporated by reference in their entirety). BLOCKS searches a protein or nucleotide sequence against a database of protein motifs or “blocks.” Blocks are defined as short, ungapped multiple alignments that represent highly conserved protein patterns. The blocks themselves are derived from entries in PROSITE as well as other sources. Either a protein or nucleotide query can be submitted to the BLOCKS server; if a nucleotide sequence is submitted, the sequence is translated in all six reading frames and motifs are sought in these conceptual translations. Once the search is completed, the server will return a ranked list of significant matches, along with an alignment of the query sequence to the matched BLOCKS entries.

[0023] Conserved protein domains can be represented by two-dimensional matrices, which measure either the frequency or probability of the occurrences of each amino acid residue and deletions or insertions in each position of the domain. This type of model, when used to search against protein databases, is sensitive and usually yields more accurate results than simple motif searches. Two popular implementations of this approach are profile searches (such as GCG program ProfileSearch) and Hidden Markov Models (HMMs)(Krough et al., J. Mol. Biol. 235:1501-1531 (1994); Eddy, Current Opinion in Structural Biology 6:361-365 (1996), both of which are herein incorporated by reference in their entirety). In both cases, a large number of common protein domains have been converted into profiles, as present in the PROSITE library, or HHM models, as in the Pfam protein domain library (Sonnhammer et al., Proteins 28:405-420 (1997), the entirety of which is herein incorporated by reference). Pfam contains more than 500 HMM models for enzymes, transcription factors, signal transduction molecules, and structural proteins. Protein databases can be queried with these profiles or HMM models, which will identify proteins containing the domain of interest. For example, MSW or HMMFS, two programs in a public domain package called HMMER (Sonnhammer et al., Proteins 28:405-420 (1997)) can be used.

[0024] PROSITE and BLOCKS represent collected families of protein motifs. Thus, searching these databases entails submitting a single sequence to determine whether or not that sequence is similar to the members of an established family. Programs working in the opposite direction compare a collection of sequences with individual entries in the protein databases. An example of such a program is the Motif Search Tool, or MoST (Tatusov et al. Proc. Natl. Acad. Sci. 91: 12091-12095 (1994), the entirety of which is herein incorporated by reference.) On the basis of an aligned set of input sequences, a weight matrix is calculated by using one of four methods (selected by the user); a weight matrix is simply a representation, position by position in an alignment, of how likely a particular amino acid will appear. The calculated weight matrix is then used to search the databases. To increase sensitivity, newly found sequences are added to the original data set, the weight matrix is recalculated, and the search is performed again. This procedure continues until no new sequences are found.

### SUMMARY OF THE INVENTION

[0025] The present invention provides a substantially purified nucleic acid molecule that encodes a cotton protein or fragment thereof comprising a nucleic acid sequence selected from the group consisting of SEQ ID NO: 1 through SEQ ID NO: 17880.

[0026] The present invention also provides one or more substantially purified nucleic acid molecules comprising a nucleic acid sequence selected from the group consisting of SEQ ID NO: 1 through SEQ ID NO: 17880 or complements thereof.

[0027] The present invention also provides a substantially purified cotton protein or fragment thereof, wherein said cotton protein is encoded by a nucleic acid molecule that comprises a nucleic acid sequence selected from the group consisting of SEQ ID NO: 1 through SEQ ID NO: 17880.

[0028] The present invention further provides a substantially purified protein, peptide, or fragment thereof encoded by a nucleic acid sequence which specifically hybridizes to a nucleic acid molecule comprising a nucleic acid sequence selected from the group consisting of a complement of SEQ ID NO: 1 through SEQ ID NO: 17880.

[0029] The present invention further provides a substantially purified antibody capable of specifically binding to a protein or fragment thereof encoded by a nucleic acid sequence which specifically hybridizes to a nucleic acid molecule having a nucleic acid sequence selected from the group consisting of a complement of SEQ ID NO: 1 through SEQ ID NO: 17880.

[0030] The present invention also provides a transformed plant transformed to contain a nucleic acid molecule which comprises: (A) an exogeneous promoter region which functions in plant cells to cause the production of an mRNA molecule; which is linked to (B) a structural nucleic acid molecule, wherein said structural nucleic acid molecule comprises a nucleic acid molecule that encodes a protein, peptide, or fragment thereof which hybridizes to a nucleic acid sequence selected from the group consisting of a complement of SEQ ID NO: 1 through SEQ ID NO: 17880 expressed in an effective amount to produce a desirable agronomic effect; which is linked to (C) a 3′ non-translated sequence that functions in plant cells to cause the termination of transcription and the addition of polyadenylated ribonucleotides to the 3′ end of the mRNA sequence.

[0031] The present invention also provides a transformed plant cell containing a nucleic acid molecule whose non-transcribed strand encodes a protein or fragment thereof, wherein the transcribed strand of said nucleic acid is complementary to a nucleic acid molecule that encodes a protein or fragment thereof. The present invention also provides bacterial, viral, microbial, and plant cells comprising a nucleic acid molecule of the present invention

[0032] The present invention also provides a method of producing a plant containing one or more proteins encoded by sequences comprising SEQ ID NO: 1 or complement thereof through SEQ ID NO: 17880 or complements thereof, expressed in a sufficient amount and/or fashion to produce a desirable agronomic effect.

[0033] In accomplishing the foregoing, there is provided, in accordance with one aspect of the present invention, methods of producing genetically transformed plants, comprising the steps of:

[0034] (a) inserting into the genome of a plant cell a recombinant, double-stranded DNA molecule comprising

[0035] (i) a promoter which functions in plant cells to cause the production of an RNA sequence,

[0036] (ii) a structural DNA sequence that causes the production of an RNA sequence which encodes a desired protein.

[0037] (iii) a 3′ non-translated DNA sequence which functions in plant cells to cause the addition of polyadenylated nucleotides to the 3′ end of RNA sequence; where the promoter is homologous or heterologous with respect to the coding sequence and adapted to cause sufficient expression of a protein in desired plant tissues to enhance the agronomic utility of a plant transformed with said gene.

[0038] (b) obtaining a transformed plant cell with said nucleic acid molecule that encodes one or more proteins, wherein said nucleic acid molecule is transcribed and results in expression of said protein(s); and

[0039] (c) regenerating from the transformed plant cell a genetically transformed plant

[0040] The present invention also encompasses differentiated plants, seeds, and progeny comprising said transformed plant cells and which exhibit novel properties of agronomic significance.

[0041] The present invention also provides a method of producing a plant containing reduced levels of a protein comprising: (A) transforming a plant cell with a nucleic acid molecule that encodes a protein, wherein said nucleic acid molecule is transcribed and results in co-suppression of endogenous protein synthesis activity, and (B) regenerating plants and producing subsequent progeny from the transformed plant.

[0042] The present invention also provides a method of determining an association between a polymorphism and a plant trait comprising: (A) hybridizing a nucleic acid molecule specific for a polymorphism to genetic material of a plant, wherein said nucleic acid molecule comprising a nucleic acid sequence selected from the group consisting of SEQ ID NO: 1 through SEQ ID NO: 17880 or complements thereof; and (B) calculating the degree of association between the polymorphism and the plant trait.

[0043] The present invention also provides a method of isolating a genetic region, or nucleic acid that encodes a protein or fragment thereof comprising: (A) incubating under conditions permitting nucleic acid hybridization: a marker nucleic acid molecule, preferably an EST, with a complementary nucleic acid molecule obtained from a plant cell or plant tissue; (B) permitting hybridization between said marker nucleic acid molecule, preferably an EST, and said complementary nucleic acid molecule obtained from said plant cell or plant tissue; and (C) isolating said complementary nucleic acid molecule.

[0044] The present invention also provides a method for determining a level or pattern in a plant cell of a protein in a plant comprising: (A) incubating, under conditions permitting nucleic acid hybridization, a marker nucleic acid molecule, the marker nucleic acid molecule selected from the group of marker nucleic acid molecules which specifically hybridize to a nucleic acid molecule having the nucleic acid sequence selected from the group consisting of SEQ ID NO: 1 through SEQ ID NO: 17880 or complements thereof or fragments of either, with a complementary nucleic acid molecule obtained from the plant cell or plant tissue, wherein nucleic acid hybridization between the marker nucleic acid molecule and the complementary nucleic acid molecule obtained from the plant cell or plant tissue permits the detection of an mRNA for the enzyme; (B) permitting hybridization between the marker nucleic acid molecule and the complementary nucleic acid molecule obtained from the plant cell or plant tissue; and (C) detecting the level or pattern of the complementary nucleic acid, wherein the detection of the complementary nucleic acid is predictive of the level or pattern of the protein.

[0045] The present invention also provides a method for determining the level or pattern of a protein in a plant cell or plant tissue comprising: (A) incubating under conditions permitting nucleic acid hybridization: a marker nucleic acid molecule, the marker nucleic acid molecule comprising a nucleotide sequence selected from the group consisting of SEQ ID NO: 1 through SEQ ID NO: 17880 or complements thereof, with a complementary nucleic acid molecule obtained from a plant cell or plant tissue, wherein nucleic acid hybridization between the marker nucleic acid molecule, and the complementary nucleic acid molecule obtained from the plant cell or plant tissue permits the detection of said protein; (B) permitting hybridization between the marker nucleic acid molecule and the complementary nucleic acid molecule obtained from the plant cell or plant tissue; and (C) detecting the level or pattern of the complementary nucleic acid, wherein the detection of said complementary nucleic acid is predictive of the level or pattern of the protein synthesis.

[0046] The present invention also provides a method for determining a level or pattern of a protein in a plant cell or plant tissue which comprises assaying the concentration of a molecule, whose concentration is dependent upon the expression of a gene, the gene having a nucleic acid sequence which specifically hybridizes to a protein marker nucleic acid molecule, the molecule being present in a plant cell or plant tissue, in comparison to the concentration of that molecule present in a plant cell or plant tissue with a known level or pattern of said protein, wherein an assayed concentration of the molecule is compared to the assayed concentration of the molecule in a plant cell or plant tissue with a known level or pattern of said protein.

[0047] The present invention also provides a method of determining a mutation in a plant whose presence is predictive of a mutation affecting a level or pattern of a protein comprising the steps: (A) incubating, under conditions permitting nucleic acid hybridization, a marker nucleic acid, the marker nucleic acid selected from the group of marker nucleic acid molecules which specifically hybridize to a nucleic acid molecule consisting of the nucleic acid sequence selected from the group consisting of SEQ ID NO: 1 through SEQ ID NO: 17880 or complements thereof or fragments of either and a complementary nucleic acid molecule obtained from the plant, wherein nucleic acid hybridization between the marker nucleic acid molecule and the complementary nucleic acid molecule obtained from the plant permits the detection of a polymorphism whose presence is predictive of a mutation affecting the level or pattern of the protein in the plant; (B) permitting hybridization between the marker nucleic acid molecule and the complementary nucleic acid molecule obtained from the plant; and (C) detecting the presence of the polymorphism, wherein the detection of the polymorphism is predictive of the mutation.

[0048] The present invention also provides a method for determining a mutation in a plant whose presence is predictive of a mutation affecting the level or pattern of protein synthesis comprising the steps: (A) incubating under conditions permitting nucleic acid hybridization: a marker nucleic acid molecule, the marker nucleic acid molecule comprising a nucleic acid molecule that is linked to gene, the gene having a nucleic acid sequence which specifically hybridizes to a sequence selected from the group consisting of SEQ ID NO: 1 through SEQ ID NO: 17880 and complements thereof, and a complementary nucleic acid molecule obtained from a plant tissue or plant cell of the plant, wherein nucleic acid hybridization between the marker nucleic acid molecule and the complementary nucleic acid molecule obtained from the plant permits the detection of a polymorphism whose presence is predictive of a mutation affecting said level or pattern of a protein synthesis in the plant; (B) permitting hybridization between said marker nucleic acid molecule and said complementary nucleic acid molecule obtained from said plant; and; (C) detecting the presence of the polymorphism, wherein the detection of the polymorphism is predictive of the mutation.

[0049] The present invention also provides a method for reducing expression of a protein in a plant cell, the method comprising: growing a transformed plant cell containing a nucleic acid molecule whose non-transcribed strand encodes a protein or fragment thereof, wherein the transcribed strand of said nucleic acid is complementary to a nucleic acid molecule that encodes the protein in said plant cell, and whereby the strand that is complementary to the nucleic acid molecule that encodes the protein reduces or depresses expression of the protein.

[0050] The present invention provides cotton nucleic acid molecules for use as molecular tags to isolate genetic regions (i.e. promoters and flanking sequences), isolate genes, map genes, and determine gene function. The present invention further provides cotton nucleic acid molecules for use in determining if genes are members of a particular gene family.

[0051] The present invention also provides a method of obtaining full length genes using cotton ESTs or complements thereof or fragments of either.

[0052] The present invention also provides a method of isolating promoters and flanking sequences using cotton ESTs or complements thereof or fragments of either.

[0053] The present invention also provides cotton ESTs or complements thereof or fragments of either for use in marker-assisted breeding programs.

[0054] The present invention also provides a method of identifying tissues comprising hybridizing nucleic acids from the tissue with cotton ESTs or complements thereof or fragments of either.

[0055] The present invention also provides a method for production of antibodies targeted against the proteins, peptides, or fragments produced by the disclosed or complements thereof or fragments of either.

[0056] The present invention also provides a method for the transformation and regeneration of plants comprising sequences hybridizable to the disclosed ESTs or complements thereof or fragments of either.

[0057] The present invention also provides a method of modifying plant protein expression by inserting in a chimeric gene sense or antisense constructs of the cotton ESTs.

### DETAILED DESCRIPTION OF THE INVENTION

[0058] Agents of the Present Invention

[0059] (a) Nucleic Acid Molecules

[0060] Agents of the present invention include substantially purified (or isolated) nucleic acid molecules and more specifically EST nucleic acid molecules or nucleic acid fragment molecules thereof. Fragment EST nucleic acid molecules may encode significant portion(s) of, or indeed most of, the EST nucleic acid molecule. Alternatively, the fragments may comprise smaller oligonucleotides (having from about 15 to about 250 nucleotide residues, and more preferably, about 15 to about 30 nucleotide residues).

[0061] A subset of the nucleic acid molecules of the present invention includes nucleic acid molecules that are marker molecules. Another subset of the nucleic acid molecules of the present invention include nucleic acid molecules that encode a protein or fragment thereof. Another subset of the nucleic acid molecules of the present invention are EST molecules.

[0062] The agents of the present invention may also be recombinant. As used herein, the term recombinant, refers to a) molecules that are constructed outside of living cells by joining natural or synthetic DNA segments to DNA molecules that can replicate in a living cell or b) molecules that result from the replication or expression of those molecules described above or c) amino acid molecules from different sources which are joined together.

[0063] The term “nucleic acid molecule” or “nucleic acid” refers to a single or double-stranded polymer of deoxyribonucleotide or ribonucleotide bases read from the 5′ to the 3′ end. Nucleic acid molecules may also optionally contain synthetic, non-natural or altered nucleotide bases that permit correct read through by a polymerase and do not alter expression of a polypeptide encoded by that nucleic acid molecule.

[0064] As used herein “a substantially purified nucleic acid” or “an isolated nucleic acid” refers to a nucleic acid that is no longer accompanied by some of materials with which it is associated in its natural state or to a nucleic acid the structure of which is not identical to that of any of naturally occurring nucleic acid. Examples of a substantially purified nucleic acid include: (1) DNAs which have the sequence of part of a naturally occurring genomic DNA molecules but are not flanked by two coding sequences that flank that part of the molecule in the genome of the organism in which it naturally occurs; (2) a nucleic acid incorporated into a vector or into the genomic DNA of a prokaryote or eukaryote in a manner such that the resulting molecule is not identical to any naturally occurring vector or genomic DNA; (3) a separate molecule such as a cDNA, a genomic fragment, a fragment produced by polymerase chain reaction (PCR), or a restriction fragment; (4) recombinant DNAs; and (5) synthetic DNAs. A substantially purified nucleic acid may also be comprised of one or more segments of cDNA, genomic DNA or synthetic DNA.

[0065] It is also contemplated by the inventors that the substantially purified (or isolated) nucleic acids of the present invention also include known types of modifications, for example, labels which are known in the art, methylation, “caps”, substitution of one or more of the naturally occurring nucleotides with an analog. Other known modifications include internucleotide modifications, for example, those with uncharged linkages (methyl phosphonates, phosphotriesters, phosphoamidates, carbamates, etc.) and with charged linkages (phosphorothioates, phosphorodithioates, etc.), those containing pendant moieties, such as, proteins (including nucleases, toxins, antibodies, signal peptides, poly-L-lysine, etc.), those with intercalators (acridine, psoralen, etc.), those containing chelators (metals, radioactive metals, boron, oxidative metals, etc.), those containing alkylators, and those with modified linkages.

[0066] It is understood that the agents of the present invention may be labeled with reagents that facilitate detection of the agent (e.g. fluorescent labels (Prober, et al., Science 238:336-340 (1987), Albarella et al., EP 144914), chemical labels (Sheldon et al., U.S. Pat. No. 4,582,789; Albarella et al., U.S. Pat. No. 4,563,417), modified bases (Miyoshi et al., EP 119448).

[0067] The term “nucleotide sequence” or “nucleic acid sequence” refers to both the sense and antisense strands of a nucleic acid as either individual single strands or in the duplex. It includes, but is not limited to, self-replicating plasmids, chromosomal sequences, and infectious polymers of DNA or RNA.

[0068] A “coding sequence”, “structural nucleotide sequence” or “structural nucleic acid molecule” is a nucleotide sequence which is translated into a polypeptide, usually via mRNA, when placed under the control of appropriate regulatory sequences. The boundaries of the coding sequence are determined by a translation start codon at the 5′-terminus and a translation stop codon at the 3′-terminus. A coding sequence can include, but is not limited to, genomic DNA, cDNA, and recombinant nucleotide sequences.

[0069] The term “recombinant DNAs” refers to DNAs that contains a genetically engineered modification through manipulation via mutagenesis, restriction enzymes, and the like.

[0070] The term “synthetic DNAs” refers to DNAs assembled from oligonucleotide building blocks that are chemically synthesized using procedures known to those skilled in the art. These building blocks are ligated and annealed to form DNA segments which are then enzymatically assembled to construct the entire DNA. “Chemically synthesized”, as related to a sequence of DNA, means that the component nucleotides were assembled in vitro. Manual chemical synthesis of DNA may be accomplished using well established procedures, or automated chemical synthesis can be performed using one of a number of commercially available machines.

[0071] The agents of the present invention will preferably be “biologically active” with respect to either a structural attribute, such as the capacity of a nucleic acid to hybridize to another nucleic acid molecule, or the ability of a protein to be bound by antibody (or to compete with another molecule for such binding). Alternatively, such an attribute may be catalytic, and thus involve the capacity of the agent to mediate a chemical reaction or response.

[0072] It is further understood, that the present invention provides bacterial, viral, microbial, and plant cells comprising the agents of the present invention.

[0073] Nucleic acid molecules or fragment thereof of the present invention are capable of specifically hybridizing to other nucleic acid molecules under certain circumstances. As used herein, two nucleic acid molecules are said to be capable of specifically hybridizing to one another if the two molecules are capable of forming an anti-parallel, double-stranded nucleic acid structure. A nucleic acid molecule is said to be the “complement” of another nucleic acid molecule if they exhibit complete complementarity. As used herein, molecules are said to exhibit “complete complementarity” when every nucleotide of one of the molecules is complementary to a nucleotide of the other. Two molecules are said to be “minimally complementary” if they can hybridize to one another with sufficient stability to permit them to remain annealed to one another under at least conventional “low-stringency” conditions. Similarly, the molecules are said to be “complementary” if they can hybridize to one another with sufficient stability to permit them to remain annealed to one another under conventional “high-stringency” conditions. Conventional stringency conditions are described by Sambrook, et al., In: Molecular Cloning, A Laboratory Manual, 2nd Edition, Cold Spring Harbor Press, Cold Spring Harbor, N.Y. (1989), and by Haymes, et al. In: Nucleic Acid Hybridization, A Practical Approach, IRL Press, Washington, D.C. (1985), the entirety of which is herein incorporated by reference. Departures from complete complementarity are therefore permissible, as long as such departures do not completely preclude the capacity of the molecules to form a double-stranded structure. Thus, in order for an nucleic acid molecule or fragment of the present invention to serve as a primer or probe it need only be sufficiently complementary in sequence to be able to form a stable double-stranded structure under the particular solvent and salt concentrations employed.

[0074] Appropriate stringency conditions which promote DNA hybridization are, for example, 6.0× sodium chloride/sodium citrate (SSC) at about 45° C., followed by a wash of 2.0×SSC at 50° C., are known to those skilled in the art or can be found in Current Protocols in Molecular Biology, John Wiley & Sons, N.Y. (1989), 6.3.1-6.3.6, herein incorporated by reference in its entirety. For example, the salt concentration in the wash step can be selected from a low stringency of about 2.0×SSC at 50° C. to a high stringency of about 0.2×SSC at 50° C. In addition, the temperature in the wash step can be increased from low stringency conditions at room temperature, about 22° C., to high stringency conditions at about 65° C. Both temperature and salt may be varied, or either the temperature or the salt concentration may be held constant while the other variable is changed.

[0075] In a preferred embodiment, a nucleic acid of the present invention will specifically hybridize to one or more of the nucleic acid molecules set forth in SEQ ID NO: 1 through SEQ ID NO: 17880 or complements thereof under moderately stringent conditions, for example, at about 2.0×SSC and about 65° C.

[0076] In a particularly preferred embodiment, a nucleic acid of the present invention will include those nucleic acid molecules that specifically hybridize to one or more of the nucleic acid molecules set forth in SEQ ID NO: 1 through SEQ ID NO: 17880 or complements thereof under high stringency conditions.

[0077] In one aspect of the present invention, the nucleic acid molecules of the present invention have one or more of the nucleic acid sequences set forth in SEQ ID NO: 1 through SEQ ID NO: 17880 or complements thereof. In another aspect of the present invention, one or more of the nucleic acid molecules of the present invention share between 100% and 90% sequence identity with one or more of the nucleic acid sequences set forth in SEQ ID NO: 1 through SEQ ID NO: 17880 or complements thereof. In a further aspect of the present invention, one or more of the nucleic acid molecules of the present invention share between 100% and 95% sequence identity with one or more of the nucleic acid sequences set forth in SEQ ID NO: 1 through SEQ ID NO: 17880 or complements thereof. In a more preferred aspect of the present invention, one or more of the nucleic acid molecules of the present invention share between 100% and 98% sequence identity with one or more of the nucleic acid sequences set forth in SEQ ID NO: 1 through SEQ ID NO: 17880 or complements thereof. In an even more preferred aspect of the present invention, one or more of the nucleic acid molecules of the present invention share between 100% and 99% sequence identity with one or more of the sequences set forth in SEQ ID NO: 1 through SEQ ID NO: 17880 or complements thereof. In a further, even more preferred aspect of the present invention, one or more of the nucleic acid molecules of the present invention exhibit 100% sequence identity with one or more nucleic acid molecules present within the cDNA libraries designated LIB3825, LIB3826, LIB3827, LIB3828, LIB3829, LIB3830, and LIB3831 (Monsanto Company, St. Louis, Mo., United States of America).

[0078] “Percentage of sequence identity” is determined by comparing two optimally aligned sequences over a comparison window, wherein the portion of the polynucleotide sequence in the comparison window may comprise additions or deletions (i.e., gaps) as compared to the reference sequence (which does not comprise additions or deletions) for optimal alignment of the two sequences. The percentage is calculated by determining the number of positions at which the identical nucleic acid base or amino acid residue occurs in both sequences to yield the number of matched positions, dividing the number of matched positions by the total number of positions in the window of comparison and multiplying the result by 100 to yield the percentage of sequence identity. Methods commonly employed to determine percentage sequence identity between two sequences include, but are not limited to, those disclosed in Guide to Huge Computers, Martin J. Bishop, ed., Academic Press, San Diego, 1994, and Carillo, H., and Lipton, D.;Siam, J Applied Math (1988) 48:1073, herein incorporated by reference in their entirety. Methods to determine percentage sequence identity are codified in computer programs. Preferred computer programs for determining percentage sequence identity between two sequences include, but are not limited to, the BLAST suite of programs publicly available from NCBI and other sources (BLAST Manual, Altschul et al., Natl. Cent. Biotechnol. Inf., Natl. Library Med. (NCBI NLM) NIH, Bethesda, Md. 20894; Altschul et al., J. Mol. Biol. 215:403-410 (1990), Pearson et al., Proc. Natl. Acad. Sci. U.S.A. 85:2444-2448 (1988), the FAST programs (Pearson et al., Proc. Natl. Acad. Sci. U.S.A. 85:2444-2448 (1988), the GAP and BESTFIT programs found in the GCG program package,(Madison, Wis.) and Cross_Match (Phi Green, University of Washington). Another preferred method to determine identity, is by the method of DNASTAR protein alignment protocol using the Jotun-Hein algorithm (Hein et al., Methods Enzymol. 183:626-645 (1990)).

[0079] Polypeptides which are “substantially similar” share sequences as noted above except that residue positions which are not identical may differ by conservative amino acid changes. Conservative amino acid substitutions refer to the interchangeability of residues having similar side chains. “Conservative amino acid substitutions” refer to substitutions of one or more amino acids in a native amino acid sequence with another amino acid(s) having similar side chains, resulting in a silent change. Conserved substitutes for an amino acid within a native amino acid sequence can be selected from other members of the group to which the naturally occurring amino acid belongs. For example, a group of amino acids having aliphatic side chains is glycine, alanine, valine, leucine, and isoleucine; a group of amino acids having aliphatic-hydroxyl side chains is serine and threonine; a group of amino acids having amide-containing side chains is asparagine and glutamine; a group of amino acids having aromatic side chains is phenylalanine, tyrosine, and tryptophan; a group of amino acids having basic side chains is lysine, arginine, and histidine; and a group of amino acids having sulfur-containing side chains is cysteine and methionine. Preferred conservative amino acids substitution groups are: valine-leucine, valine-isoleucine, phenylalanine-tyrosine, lysine-arginine, alanine-valine, aspartic acid-glutamic acid, and asparagine-glutamine.

[0080] Optimal alignment of sequences for comparison can use any means to analyze sequence identity (homology) known in the art, e.g., by the progressive alignment method of termed “PILEUP” (Morrison, Mol. Biol. Evol. 14:428-441 (1997), as an example of the use of PILEUP); by the local homology algorithm of Smith & Waterman (Adv. Appl. Math. 2: 482 (1981)); by the homology alignment algorithm of Needleman & Wunsch (J. Mol. Biol. 48:443 (1970)); by the search for similarity method of Pearson (Proc. Natl. Acad. Sci. USA 85: 2444 (1988)); by computerized implementations of these algorithms (e.g., GAP, BESTFIT, FASTA, and TFASTA in the Wisconsin Genetics Software Package, Genetics Computer Group, 575 Science Dr., Madison, Wis.); ClustalW (CLUSTAL in the PC/Gene program by Intelligenetics, Mountain View, Calif., described by, e.g., Higgins, Gene 73: 237-244 (1988); Corpet, Nucleic Acids Res. 16:10881-10890 (1988); Huang, Computer Applications in the Biosciences 8:155-165 (1992); and Pearson, Methods in Mol. Biol. 24:307-331 (1994); Pfam (Sonnhammer, Nucleic Acids Res. 26:322-325 (1998); TreeAlign (Hein, Methods Mol. Biol. 25:349-364 (1994); MEG-ALIGN, and SAM sequence alignment computer programs; or, by manual visual inspection.

[0081] Another example of algorithm that is suitable for determining sequence similarity is the BLAST algorithm, which is described in Altschul et al, J. Mol. Biol. 215: 403-410 (1990). Software for performing BLAST analyses is publicly available through the National Center for Biotechnology Information, http://www.ncbi.nlm.nih.gov/; see also Zhang, Genome Res. 7:649-656 (1997) for the “PowerBLAST” variation. This algorithm involves first identifying high scoring sequence pairs (HSPs) by identifying short words of length W in the query sequence that either match or satisfy some positive valued threshold score T when aligned with a word of the same length in a database sequence. T is referred to as the neighborhood word score threshold (Altschul et al, J. Mol. Biol. 215: 403-410 (1990)). These initial neighborhood word hits act as seeds for initiating searches to find longer HSPs containing them. The word hits are extended in both directions along each sequence for as far as the cumulative alignment score can be increased. Extension of the word hits in each direction are halted when: the cumulative alignment score falls off by the quantity X from its maximum achieved value; the cumulative score goes to zero or below, due to the accumulation of one or more negative-scoring residue alignments; or the end of either sequence is reached. The BLAST algorithm parameters W, T and X determine the sensitivity and speed of the alignment. The BLAST program uses as defaults a wordlength (W) of 11, the BLOSUM62 scoring matrix (see Henikoff, Proc. Natl. Acad. Sci. USA 89:10915-10919 (1992)) alignments (B) of 50, expectation (E) of 10, M=5, N=4, and a comparison of both strands. The term BLAST refers to the BLAST algorithm which performs a statistical analysis of the similarity between two sequences; see, e.g., Karlin, Proc. Natl. Acad. Sci. USA 90:5873-5787 (1993). One measure of similarity provided by the BLAST algorithm is the smallest sum probability (P(N)), which provides an indication of the probability by which a match between two nucleotide or amino acid sequences would occur by chance. For example, a nucleic acid is considered similar to a reference sequence if the smallest sum probability in a comparison of the test nucleic acid to the reference nucleic acid is less than about 0.1, more preferably less than about 0.01, and most preferably less than about 0.001.

[0082] In a preferred embodiment of the present invention, a cotton protein or fragment thereof of the present invention is a homologue of another plant protein. In another preferred embodiment of the present invention, a cotton protein or fragment thereof of the present invention is a homologue of a fungal protein. In another preferred embodiment of the present invention, a cotton protein or fragment thereof of the present invention is a homologue of mammalian protein. In another preferred embodiment of the present invention, a cotton protein or fragment thereof of the present invention is a homologue of a bacterial protein. In another preferred embodiment of the present invention, a cotton protein or fragment thereof of the present invention is a homologue of an algal protein. In another preferred embodiment of the present invention, a cotton protein or fragment thereof of the present invention is a homologue of a soybean, maize, wheat, or sorghum protein.

[0083] In a preferred embodiment of the present invention, the nucleic molecule of the present invention encodes a cotton protein or fragment thereof where a cotton protein or fragment thereof exhibits a BLAST probability score of greater than 1E-12, preferably a BLAST probability score of between about 1E-30 and about 1E-12, even more preferably a BLAST probability score of greater than 1E-30 with its homologue.

[0084] In another preferred embodiment of the present invention, the nucleic acid molecule encoding a cotton protein or fragment thereof exhibits a percentage sequence identity with its homologue of between about 25% and about 40%, more preferably of between about 40 and about 70%, even more preferably of between about 70% and about 90% and even more preferably between about 90% and 99%. In another preferred embodiment, of the present invention, a cotton protein or fragment thereof exhibits a percentage sequence identity with its homologue of 100%.

[0085] In a preferred embodiment of the present invention, the nucleic molecule of the present invention encodes a cotton protein or fragment thereof where the cotton protein exhibits a BLAST score of greater than 120, preferably a BLAST score of between about 1450 and about 120, even more preferably a BLAST score of greater than 1450 with its homologue.

[0086] Nucleic acid molecules of the present invention also include non-cotton homologues. Preferred non-cotton homologues are selected from the group consisting of alfalfa, Arabidopsis, barley, Brassica, broccoli, cabbage, citrus, garlic, maize, oat, oilseed rape, onion, canola, flax, an ornamental plant, pea, peanut, pepper, potato, rice, rye, sorghum, soybean, strawberry, sugarcane, sugarbeet, tomato, wheat, poplar, pine, fir, eucalyptus, apple, lettuce, lentils, grape, banana, tea, turf grasses, sunflower, oil palm and Phaseolus.

[0087] The degeneracy of the genetic code, which allows different nucleic acid sequences to code for the same protein or peptide, is known in the literature. (U.S. Pat. No. 4,757,006, the entirety of which is herein incorporated by reference).

[0088] In an aspect of the present invention, one or more of the nucleic acid molecules of the present invention differ in nucleic acid sequence from those encoding a cotton protein or fragment thereof in SEQ ID NO: 1 through SEQ ID NO: 17880 due to the degeneracy in the genetic code in that they encode the same protein but differ in nucleic acid sequence.

[0089] In another further aspect of the present invention, nucleic acid molecules of the present invention can comprise sequences, which differ from those encoding a protein or fragment thereof in SEQ ID NO: 1 through SEQ ID NO: 17880 due to fact that the different nucleic acid sequence encodes a protein having one or more conservative amino acid changes. It is understood that codons capable of coding for such conservative amino acid substitutions are known in the art.

[0090] It is well known in the art that one or more amino acids in a native sequence can be substituted with another amino acid(s), the charge and polarity of which are similar to that of the native amino acid, i.e., a conservative amino acid substitution, resulting in a silent change. Biologically functional equivalents of the proteins or fragments thereof of the present invention can have 10 or fewer conservative amino acid changes, more preferably seven or fewer conservative amino acid changes, and most preferably five or fewer conservative amino acid changes. The encoding nucleotide sequence will thus have corresponding base substitutions, permitting it to encode biologically functional equivalent forms of the proteins or fragments of the present invention.

[0091] It is understood that certain amino acids may be substituted for other amino acids in a protein structure without appreciable loss of interactive binding capacity with structures such as, for example, antigent-binding regions of antibodies or binding sites on substrate molecules. Because it is the interactive capacity and nature of a protein that defines that protein's biological functional activity, certain amino acid sequence substitutions can be made in a protein sequence and, of course, its underlying DNA coding sequence and, nevertheless, obtain a protein with like properties. It is thus contemplated by the inventors that various changes may be made in the peptide sequences of the proteins or fragments of the present invention, or corresponding DNA sequences that encode said peptides, without appreciable loss of their biological utility or activity. It is understood that codons capable of coding for such amino acid changes are known in the art.

[0092] In making such changes, the hydropathic index of amino acids may be considered. The importance of the hydropathic amino acid index in conferring interactive biological function on a protein is generally understood in the art (Kyte and Doolittle, J. Mol. Biol. 157, 105-132 (1982), herein incorporated by reference in its entirety). It is accepted that the relative hydropathic character of the amino acid contributes to the secondary structure of the resultant protein, which in turn defines the interaction of the protein with other molecules, for example, enzymes, substrates, receptors, DNA, antibodies, antigens, and the like.

[0093] Each amino acid has been assigned a hydropathic index on the basis of its hydrophobicity and charge characteristics (Kyte and Doolittle, 1982); these are isoleucine (+4.5), valine (+4.2), leucine (+3.8), phenylalanine (+2.8), cysteine/cystine (+2.5), methionine (+1.9), alanine (+1.8), glycine (−0.4), threonine (−0.7), serine (−0.8), tryptophan (−0.9), tyrosine (−1.3), proline (−1.6), histidine (−3.2), glutamate (−3.5), glutamine (−3.5), aspartate (−3.5), asparagine (−3.5), lysine (−3.9), and arginine (−4.5).

[0094] In making such changes, the substitution of amino acids whose hydropathic indices are within ±2 is preferred, those which are within ±1 are particularly preferred, and those within 10.5 are even more particularly preferred.

[0095] It is also understood in the art that the substitution of like amino acids can be made effectively on the basis of hydrophilicity. U.S. Pat. No. 4,554,101, incorporated herein by reference in its entirety, states that the greatest local average hydrophilicity of a protein, as govern by the hydrophilicity of its adjacent amino acids, correlates with a biological property of the protein.

[0096] As detailed in U.S. Pat. No. 4,554,101, the following hydrophilicity values have been assigned to amino acid residues: arginine (+3.0), lysine (+3.0), aspartate (+3.0±1), glutamate (+3.0±1), serine (+0.3), asparagine (+0.2), glutamine (+0.2), glycine (0), threonine (−0.4), proline (−0.5±1), alanine (−0.5), histidine (−0.5), cysteine (−1.0), methionine (−1.3), valine (−1.5), leucine (−1.8), isoleucine (−1.8), tyrosine (−2.3), phenylalanine (−2.5), and tryptophan (−3.4).

[0097] In making such changes, the substitution of amino acids whose hydrophilicity values are within ±2 is preferred, those which are within ±1 are particularly preferred, and those within ±0.5 are even more particularly preferred.

[0098] In a further aspect of the present invention, one or more of the nucleic acid molecules of the present invention differ in nucleic acid sequence from those encoding a cotton protein or fragment thereof set forth in SEQ ID NO: 1 through SEQ ID NO: 17880 or fragment thereof due to the fact that one or more codons encoding an amino acid has been substituted for a codon that encodes a nonessential substitution of the amino acid originally encoded.

[0099] Isolation and identification of nucleic acids of the present invention are described in detail in Examples. All or a substantial portion of the nucleic acids of the present invention may be used to isolate cDNAs and nucleic acids-encoding cotton protein homologues or fragments thereof from the same or other species.

[0100] A “substantial portion” of a nucleotide sequence comprises enough of the sequence to afford specific identification and/or isolation of a nucleic acid fragment comprising the sequence. In general, gene specific oligonucleotide probes comprising 20-30 contiguous nucleotides may be used in sequence-dependent methods of gene identification (e.g., Southern hybridization) and isolation (e.g., in situ hybridization of bacterial colonies or bacteriophage plaques). In addition, short oligonucleotides of 12-15 bases may be used as amplification primers in PCR in order to obtain a particular nucleic acid fragment comprising the primers. The skilled artisan, having the benefit of the sequences as reported herein, may now use all or a substantial portion of the disclosed sequences for purposes known to those skilled in this art. Accordingly, the instant invention comprises the complete sequences as reported in the accompanying Sequence Listing, as well as substantial portions of those sequences as defined above.

[0101] Isolation of nucleic acids encoding protein homologues using sequence-dependent protocols is well known in the art. Examples of sequence-dependent protocols include, but are not limited to, methods of nucleic acid hybridization, and methods of DNA and RNA amplification as exemplified by various uses of nucleic acid amplification technologies (e.g., polymerase chain reaction, ligase chain reaction).

[0102] For example, structural nucleic acids encoding a cotton protein or fragment thereof, either as cDNAs or genomic DNAs, could be isolated directly by using all or a portion of the nucleic acids of the present invention as DNA hybridization probes to screen cDNA or genomic libraries from any desired species employing methodology well known to those skilled in the art. Methods for forming such libraries are well known in the art. Specific oligonucleotide probes based upon the nucleic acids of the present invention can be designed and synthesized by methods known in the art. Moreover, the entire sequences of the nucleic acids can be used directly to synthesize DNA probes by methods known to the skilled artisan such as random primer DNA labeling, nick translation, or end-labeling techniques, or RNA probes using available in vitro transcription systems. In addition, specific primers can be designed and used to amplify a part or all of the sequences. The resulting amplification products can be labeled directly during amplification reactions or labeled after amplification reactions, and used as probes to isolate full length cDNA or genomic DNAs under conditions of appropriate stringency.

[0103] Alternatively, the nucleic acids of interest can be amplified from nucleic acid samples using amplification techniques. For instance, the disclosed nucleic acids may be used to define a pair of primers that can be used with the polymerase chain reaction (Mullis, et al., Cold Spring Harbor Symp. Quant. Biol. 51:263-273 (1986); Erlich et al., EP 50,424; EP 84,796, EP 258,017, EP 237,362; Mullis, EP 201,184; Mullis et al., U.S. Pat. No. 4,683,202; Erlich, U.S. Pat. No. 4,582,788; and Saiki, R. et al., U.S. Pat. No. 4,683,194) to amplify and obtain any desired nucleic acid or fragment directly from mRNA, from cDNA, from genomic libraries or cDNA libraries. PCR and other in vitro amplification methods may also be useful, for example, to clone nucleic acid sequences that code for proteins to be expressed, to make nucleic acids to use as probes for detecting the presence of the desired mRNA in samples, for nucleic acid sequencing, or for other purposes.

[0104] In addition, two short segments of the nucleic acids of the present invention may be used in polymerase chain reaction protocols to amplify longer nucleic acids encoding cotton protein homologues from DNA or RNA. For example, the skilled artisan can follow the RACE protocol (Frohman et al., Proc. Natl. Acad. Sci. USA 85:8998 (1988)) to generate cDNAs by using PCR to amplify copies of the region between a single point in the transcript and the 3′ or 5′ end. Primers oriented in the 3′ and 5′ directions can be designed from the nucleic acids of the present invention. Using commercially available 3′RACE or 5′RACE systems (Gibco BRL, Life Technologies, Gaithersburg, Md. U.S.A.), specific 3′ or 5′ cDNA fragments can be isolated (Ohara et al., Proc. Natl. Acad. Sci. USA 86:5673 (1989); Loh et al., Science 243:217 (1989)). Products generated by the 3′ and 5′ RACE procedures can be combined to generate full-length cDNAs (Frohman and Martin, Techniques 1: 165 (1989)).

[0105] Nucleic acids of interest may also be synthesized, either completely or in part, especially where it is desirable to provide plant-preferred sequences, by well-known techniques as described in the technical literature. See, e.g., Carruthers et al., Cold Spring Harbor Symp. Quant. Biol. 47:411-418 (1982), and Adams et al., J. Am. Chem. Soc. 105:661 (1983). Thus, all or a portion of the nucleic acids of the present invention may be synthesized using codons preferred by a selected host. Species-preferred codons may be determined, for example, from the codons used most frequently in the proteins expressed in a particular host species. Other modifications of the nucleotide sequences may result in mutants having slightly altered activity.

[0106] Availability of the nucleotide sequences encoding cotton proteins or fragments thereof facilitates immunological screening of cDNA expression libraries. Synthetic polypeptides representing portions of the amino acid sequences of cotton proteins or fragments thereof may be synthesized. These polypeptides can be used to immunize animals to produce polyclonal or monoclonal antibodies with specificity for polypeptides or proteins comprising the amino acid sequences. These antibodies can be then be used to screen cDNA expression libraries to isolate full-length cDNA clones of interest (Lemer, Adv. ImmunoL 36: 1 (1984); Sambrook et al., Molecular Cloning: A Laboratory Manual; Cold Spring Harbor Laboratory Press: Cold Spring Harbor, (1989)). It is understood that people skilled in the art are familiar with the standard resource materials which describe specific conditions and procedures for the construction, manipulation and isolation of antibodies (see, for example, Harlow and Lane, In Antibodies: A Laboratory Manual, Cold Spring Harbor Press, Cold Spring Harbor, N.Y. (1988)).

[0107] Another aspect of the present invention relates to a method for obtaining a nucleic acid comprising a nucleotide sequence encoding a cotton protein homologue. In a preferred embodiment, the method of the present invention for obtaining a nucleic acid encoding all or a substantial portion of the amino acid sequence of a cotton protein comprising: (a) probing a cDNA or genomic library with a hybridization probe comprising all or a portion of a nucleotide sequence selected from the group consisting of SEQ ID NO:1 through SEQ ID NO:17880; (b) identifying a DNA clone that hybridizes with the hybridization probe; (c) isolating the DNA clone identified in step (b); and (d) sequencing the cDNA or genomic fragment that comprises the clone isolated in step (c) wherein the sequenced nucleic acid molecule encodes all or a substantial portion of the amino acid sequence of the cotton protein homologue.

[0108] In another preferred embodiment, the method of the present invention for obtaining a nucleic acid fragment encoding a substantial portion of the amino acid sequence of a cotton protein homologue comprising: (a) synthesizing a first and a second oligonucleotide primers corresponding to a portion of one of the sequences set forth in SEQ ID NO:1 through SEQ ID NO:17880; and (b) amplifying a cDNA insert present in a cloning vector using the first and second oligonucleotide primers of step (a) wherein the amplified nucleic acid molecule encodes all or a substantial portion of the amino acid sequence of the cotton protein homologue.

[0109] One aspect of the present invention concerns markers that include nucleic acid molecules SEQ ID NO: 1 through SEQ ID NO: 17880 or complements thereof or fragments of either that can act as markers or other nucleic acid molecules of the present invention that can act as markers. Genetic markers of the present invention include “dominant” or “codominant” markers “Codominant markers” reveal the presence of two or more alleles (two per diploid individual) at a locus. “Dominant markers” reveal the presence of only a single allele per locus. The presence of the dominant marker phenotype (e.g., a band of DNA) is an indication that one allele is present in either the homozygous or heterozygous condition. The absence of the dominant marker phenotype (e.g. absence of a DNA band) is merely evidence that “some other” undefined allele is present. In the case of populations where individuals are predominantly homozygous and loci are predominately dimorphic, dominant and codominant markers can be equally valuable. As populations become more heterozygous and multi-allelic, codominant markers often become more informative of the genotype than dominant markers. Marker molecules can be, for example, capable of detecting polymorphisms such as single nucleotide polymorphisms (SNPs).

[0110] SNPs are single base changes in genomic DNA sequence. They occur at greater frequency and are spaced with a greater uniformity throughout a genome than other reported forms of polymorphism. The greater frequency and uniformity of SNPs means that there is greater probability that such a polymorphism will be found near or in a genetic locus of interest than would be the case for other polymorphisms. SNPs are located in protein-coding regions and noncoding regions of a genome. Some of these SNPs may result in defective or variant protein expression (e.g., as a results of mutations or defective splicing). Analysis (genotyping) of characterized SNPs can require only a plus/minus assay rather than a lengthy measurement, permitting easier automation.

[0111] SNPs can be characterized using any of a variety of methods. Such methods include the direct or indirect sequencing of the site, the use of restriction enzymes (Botstein et al., Am. J. Hum. Genet. 32:314-331 (1980); Konieczny and Ausubel, Plant J. 4:403-410 (1993); both of which are herein incorporated by reference in their entirety), enzymatic and chemical mismatch assays (Myers et al., Nature 313:495-498 (1985), herein incorporated by reference in its entirety), allele-specific PCR (Newton et al., Nucl. Acids Res. 17:2503-2516 (1989); Wu et al., Proc. Natl. Acad. Sci. (U.S.A.) 86:2757-2760 (1989); both of which are herein incorporated by reference in their entirety), ligase chain reaction (Barany, Proc. Natl. Acad. Sci. (U.S.A.) 88:189-193 (1991), herein incorporated by reference in its entirety), single-strand conformation polymorphism analysis (Labrune et al., Am. J. Hum. Genet. 48: 1115-1120 (1991), herein incorporated by reference in its entirety), primer-directed nucleotide incorporation assays (Kuppuswami et al., Proc. Natl. Acad. Sci. USA 88:1143-1147 (1991), herein incorporated by reference in its entirety), dideoxy fingerprinting (Sarkar et al., Genomics 13:441-443 (1992), herein incorporated by reference in its entirety), solid-phase ELISA-based oligonucleotide ligation assays (Nikiforov et al., Nucl. Acids Res. 22:4167-4175 (1994), herein incorporated by reference in its entirety), oligonucleotide fluorescence-quenching assays (Livak et al., PCR Methods Appl. 4:357-362 (1995), herein incorporated by reference in its entirety), 5′-nuclease allele-specific hybridization TaqMan assay (Livak et al., Nature Genet. 9:341-342 (1995), herein incorporated by reference in its entirety), template-directed dye-terminator incorporation (TDI) assay (Chen and Kwok, Nucl. Acids Res. 25:347-353 (1997), herein incorporated by reference in its entirety), allele-specific molecular beacon assay (Tyagi et al., Nature Biotech. 16: 49-53 (1998), herein incorporated by reference in its entirety), PinPoint assay (Haff and Smirnov, Genome Res. 7: 378-388 (1997), herein incorporated by reference in its entirety) and dCAPS analysis (Neff et al., Plant J. 14:387-392 (1998), herein incorporated by reference in its entirety).

[0112] Additional markers, such as AFLP markers, RFLP markers and RAPD markers, can be utilized (Walton, Seed World 22-29 (July, 1993); Burow and Blake, Molecular Dissection of Complex Traits, 13-29, Paterson (ed.), CRC Press, New York (1988); both of which are herein incorporated by reference in their entirety). DNA markers can be developed from nucleic acid molecules using restriction endonucleases, the PCR and/or DNA sequence information. RFLP markers result from single base changes or insertions/deletions. These codominant markers are highly abundant in plant genomes, have a medium level of polymorphism and are developed by a combination of restriction endonuclease digestion and Southern blotting hybridization. CAPS are similarly developed from restriction nuclease digestion but only of specific PCR products. These markers are also codominant, have a medium level of polymorphism and are highly abundant in the genome. The CAPS result from single base changes and insertions/deletions.

[0113] Another marker type, RAPDs, are developed from DNA amplification with random primers and result from single base changes and insertions/deletions in plant genomes. They are dominant markers with a medium level of polymorphisms and are highly abundant. AFLP markers require using the PCR on a subset of restriction fragments from extended adapter primers. These markers are both dominant and codominant are highly abundant in genomes and exhibit a medium level of polymorphism.

[0114] SSRs require DNA sequence information. These codominant markers result from repeat length changes, are highly polymorphic and do not exhibit as high a degree of abundance in the genome as CAPS, AFLPs and RAPDs, SNPs also require DNA sequence information. These codominant markers result from single base substitutions. They are highly abundant and exhibit a medium of polymorphism (Rafalski et al., In: Nonmammalian Genomic Analysis, Birren and Lai (ed.), Academic Press, San Diego, Calif., pp. 75-134 (1996), herein incorporated by reference in its entirety). It is understood that a nucleic acid molecule of the present invention may be used as a marker.

[0115] A PCR probe is a nucleic acid molecule capable of initiating a polymerase activity while in a double-stranded structure with another nucleic acid. Various methods for determining the structure of PCR probes and PCR techniques exist in the art. Computer generated searches using programs such as Primer3 (www-genome.wi.mit.edu/cgi-bin/primer/primer3.cgi), STSPipeline (www-genome.wi.mit.edu/cgi-bin/www-STS_Pipeline), or GeneUp (Pesole et al., BioTechniques 25:112-123 (1998) the entirety of which is herein incorporated by reference), for example, can be used to identify potential PCR primers.

[0116] It is understood that a fragment of one or more of the nucleic acid molecules of the present invention may be a probe and specifically a PCR probe.

[0117] (b) Protein and Peptide Molecules

[0118] A class of agents comprises one or more of the substantially purified protein or peptide molecules encoded by SEQ ID NO: 1 through SEQ ID NO: 17880 or one or more of the protein or fragment thereof or peptide molecules encoded by other nucleic acid agents of the present invention. Protein and peptide molecules can be identified using known protein or peptide molecules as a target sequence or target motif in the BLAST programs of the present invention.

[0119] The term “substantially purified protein or peptide molecule”, as used herein, refers to a protein or peptide molecule separated from substantially all other molecules normally associated with it in its native state. More preferably a substantially purified molecule is the predominant species present in a preparation. A substantially purified molecule may be greater than 60% free, preferably 75% free, more preferably 90% free, and most preferably 95% free from the other molecules (exclusive of solvent) present in the natural mixture.

[0120] The term “polypeptide”, “peptide”, or “protein”, as used herein, refers to a polymer composed of amino acids connected by peptide bonds. The term applies to any amino acid polymers in which one or more amino acid residue is an artificial chemical analogue of a corresponding naturally occurring amino acid, as well as to any naturally occurring amino acid polymers. The essential nature of such analogues of naturally occurring amino acids is that, when incorporated into a protein, that protein is specifically reactive to antibodies elicited to the same protein but consisting entirely of naturally occurring amino acids. It is well known in the art that proteins or polypeptides may undergo modification, including but not limited to, disulfide bond formation, gamma-carboxylation of glutamic acid residues, glycosylation, lipid attachment, phosphorylation, oligomerization, hydroxylation and ADP-ribosylation. Exemplary modifications are described in most basic texts, such as, for example, Proteins—Structure and Molecular Properties, 2nd ed., T. E. Creighton, W. H. Freeman and Company, New York (1993). Many detailed reviews are available on this subject, such as, for example, those provided by Wold, F., Post-translational Protein Modifications. Perspectives and Prospects, pp. 1-12 in Post-translational Covalent Modification of Proteins, B. C. Johnson, Ed., Academic Press, New York (1983); Seifter et al., Meth. Enzymol. 182:626-M (1990) and Rattan et al., Protein Synthesis: Post-translational Modifications and Aging, Ann. N.Y. Acad. Sci. 663:48-62 (1992). Modifications can occur anywhere in a polypeptide, including the peptide backbone, the amino acid side-chains and the amino or carboxyl termini. In fact, blockage of the amino or carboxyl group in a polypeptide, or both, by a covalent modification, is common in naturally occurring and synthetic polypeptides and such modifications may be present in polypeptides of the present invention, as well. For instance, the amino terminal residue of polypeptides made in E coli or other cells, prior to proteolytic processing, almost invariably will be N-formylmethionine. During post-translational modification of the polypeptide, a methionine residue at the NH₂ terminus may be deleted. Accordingly, this invention contemplates the use of both the methionine-containing and the methionin-less amino terminal variants of the protein of the invention. Thus, as used herein, the term “protein” or “polypeptide” includes any protein or polypeptide that is modified by any biological or non-biological process. The terms “amino acid” and “amino acids” refer to all naturally occurring amino acids and, unless otherwise limited, known analogs of natural amino acids that can function in a similar manner as naturally occurring amino acids. This definition is meant to include norleucine, ornithine, homocysteine, and homoserine.

[0121] One or more of the protein or fragment of peptide molecules may be produced via chemical synthesis, or more preferably, by expression in a suitable bacterial or eukaryotic host. Suitable methods for expression are described by Sambrook, et al., (In: Molecular Cloning, A Laboratory Manual, 2nd Edition, Cold Spring Harbor Press, Cold Spring Harbor, N.Y. (1989)), or similar texts.

[0122] A “protein fragment” is a peptide or polypeptide molecule whose amino acid sequence comprises a subset of the amino acid sequence of that protein. A protein or fragment thereof that comprises one or more additional peptide regions not derived from that protein is a “fusion” protein. Such molecules may be derivatized to contain carbohydrate or other moieties (such as keyhole limpet hemocyanin, etc.). Fusion protein or peptide molecule of the present invention are preferably produced via recombinant means.

[0123] Another class of agents comprise protein or peptide molecules encoded by SEQ ID NO: 1 through SEQ ID NO: 17880 or complements thereof or, fragments or fusions thereof in which non-essential, or not relevant, amino acid residues have been added, replaced, or deleted. An example of such a homologue is the homologue protein of all non-cotton plant species, including but not limited to alfalfa, Arabidopsis, barley, Brassica, broccoli, cabbage, citrus, garlic, maize, oat, oilseed rape, onion, canola, flax, an ornamental plant, pea, peanut, pepper, potato, rice, rye, sorghum, soybean, strawberry, sugarcane, sugarbeet, tomato, wheat, poplar, pine, fir, eukalyptus, apple, lettuce, peas, lentils, grape, banana, tea, turf grasses, etc. Particularly preferred non-cotton plants to utilize for the isolation of homologues would include alfalfa, Arabidopsis, barley, oat, oilseed rape, rice, canola, maize, ornamentals, soybean, sorghum, sugarcane, sugarbeet, tomato, potato, wheat, and turf grasses. Such a homologue can be obtained by any of a variety of methods. Most preferably, as indicated above, one or more of the disclosed sequences (SEQ ID NO: 1 through SEQ ID NO: 17880 or complements thereof) will be used to define a pair of primers that may be used to isolate the homologue-encoding nucleic acid molecules from any desired species. Such molecules can be expressed to yield homologues by recombinant means.

[0124] (c) Antibodies

[0125] One aspect of the present invention concerns antibodies, single-chain antigen binding molecules, or other proteins that specifically bind to one or more of the protein or peptide molecules of the present invention and their homologues, fusions or fragments. Such antibodies may be used to quantitatively or qualitatively detect the protein or peptide molecules of the present invention. As used herein, an antibody or peptide is said to “specifically bind” to a protein or peptide molecule of the present invention if such binding is not competitively inhibited by the presence of non-related molecules.

[0126] Nucleic acid molecules that encode all or part of the protein of the present invention can be expressed, via recombinant means, to yield protein or peptides that can in turn be used to elicit antibodies that are capable of binding the expressed protein or peptide. Such antibodies may be used in immunoassays for that protein. Such protein-encoding molecules, or their fragments may be a “fusion” molecule (i.e., a part of a larger nucleic acid molecule) such that, upon expression, a fusion protein is produced. It is understood that any of the nucleic acid molecules of the present invention may be expressed, via recombinant means, to yield proteins or peptides encoded by these nucleic acid molecules.

[0127] The antibodies that specifically bind proteins and protein fragments of the present invention may be polyclonal or monoclonal, and may comprise intact immunoglobulins, or antigen binding portions of immunoglobulins (such as (F(ab′), F(ab′)₂) fragments, or single-chain immunoglobulins producible, for example, via recombinant means). It is understood that practitioners are familiar with the standard resource materials which describe specific conditions and procedures for the construction, manipulation and isolation of antibodies (see, for example, Harlow and Lane, In Antibodies: A Laboratory Manual, Cold Spring Harbor Press, Cold Spring Harbor, N.Y. (1988), the entirety of which is herein incorporated by reference).

[0128] Murine monoclonal antibodies are particularly preferred. BALB/c mice are preferred for this purpose, however, equivalent strains may also be used. The animals are preferably immunized with approximately 25 μg of purified protein (or fragment thereof) that has been emulsified a suitable adjuvant (such as TiterMax adjuvant (Vaxcel, Norcross, Ga.)). Immunization is preferably conducted at two intramuscular sites, one intraperitoneal site, and one subcutaneous site at the base of the tail. An additional i.v. injection of approximately 25 μg of antigen is preferably given in normal saline three weeks later. After approximately 11 days following the second injection, the mice may be bled and the blood screened for the presence of anti-protein or peptide antibodies. Preferably, a direct binding Enzyme-Linked Immunoassay (ELISA) is employed for this purpose.

[0129] More preferably, the mouse having the highest antibody titer is given a third i.v. injection of approximately 25 μg of the same protein or fragment. The splenic leukocytes from this animal may be recovered 3 days later, and are then permitted to fuse, most preferably, using polyethylene glycol, with cells of a suitable myeloma cell line (such as, for example, the P3X63Ag8.653 myeloma cell line). Hybridoma cells are selected by culturing the cells under “HAT” (hypoxanthine-aminopterin-thymine) selection for about one week. The resulting clones may then be screened for their capacity to produce monoclonal antibodies (“mAbs), preferably by direct ELISA.

[0130] In one embodiment, anti-protein or peptide monoclonal antibodies are isolated using a fusion of a protein, protein fragment, or peptide of the present invention, or conjugate of a protein, protein fragment, or peptide of the present invention, as immunogens. Thus, for example, a group of mice can be immunized using a fusion protein emulsified in Freund's complete adjuvant (e.g. approximately 50 μg of antigen per immunization). At three week intervals, an identical amount of antigen is emulsified in Freund's incomplete adjuvant and used to immunize the animals. Ten days following the third immunization, serum samples are taken and evaluated for the presence of antibody. If antibody titers are too low, a fourth booster can be employed. Polysera capable of binding the protein or peptide can also be obtained using this method.

[0131] In a preferred procedure for obtaining monoclonal antibodies, the spleens of the above-described immunized mice are removed, disrupted, and immune splenocytes are isolated over a ficoll gradient. The isolated splenocytes are fused, using polyethylene glycol with BALB/c-derived HGPRT (hypoxanthine guanine phosphoribosyl transferase) deficient P3x63xAg8.653 plasmacytoma cells. The fused cells are plated into 96-well microtiter plates and screened for hybridoma fusion cells by their capacity to grow in culture medium supplemented with hypothanthine, aminopterin and thymidine for approximately 2-3 weeks.

[0132] Hybridoma cells that arise from such incubation are preferably screened for their capacity to produce an immunoglobulin that binds to a protein of interest. An indirect ELISA may be used for this purpose. In brief, the supernatants of hybridomas are incubated in microtiter wells that contain immobilized protein. After washing, the titer of bound immunoglobulin can be determined using, for example, a goat anti-mouse antibody conjugated to horseradish peroxidase. After additional washing, the amount of immobilized enzyme is determined (for example through the use of a chromogenic substrate). Such screening is performed as quickly as possible after the identification of the hybridoma in order to ensure that a desired clone is not overgrown by non-secreting neighbors. Desirably, the fusion plates are screened several times since the rates of hybridoma growth vary. In a preferred sub-embodiment, a different antigenic form of immunogen may be used to screen the hybridoma. Thus, for example, the splenocytes may be immunized with one immunogen, but the resulting hybridomas can be screened using a different immunogen. It is understood that any of the protein or peptide molecules of the present invention may be used to raise antibodies.

[0133] As discussed below, such antibody molecules or their fragments may be used for diagnostic purposes. Where the antibodies are intended for diagnostic purposes, it may be desirable to derivatize them, for example with a ligand group (such as biotin) or a detectable marker group (such as a fluorescent group, a radioisotope or an enzyme).

[0134] The ability to produce antibodies that bind the protein or peptide molecules of the present invention permits the identification of mimetic compounds of those molecules. A “mimetic compound” is a compound that is not that compound, or a fragment of that compound, but which nonetheless exhibits an ability to specifically bind to antibodies directed against that compound.

[0135] It is understood that any of the agents of the present invention can be substantially purified and/or be biologically active and/or recombinant.

[0136] Uses of the Agents of the Invention

[0137] The nucleic acid molecules and fragments thereof of the present invention from the cDNA libraries LIB3825 and LIB3826 are isolated from cotton primed and non-primed seeds which are hydrated at 25° C. for about 2.5 hours. The ESTs of the present invention can enable the acquisition of, including but not limited to, genes involved in seed germination, seedling development, and regulation of growth and development. Therefore, the ESTs of the present invention will find great use in the isolation of a variety of agronomically significant genes, including but not limited to, genes that regulate the synthesis and activity of proteins, amino acids, sterols, oils, minerals, isoflavones, saponins, trypsin inhibitors, vitamins, tocopherols, antinutrient components, carbohydrates, and starch metabolism. Such genes are associated with plant growth, quality, yield, and could also serve as links in metabolic and catabolic pathways. The ESTs of the present invention will also find great use in the identification of genes important in initiating and maintaining seed germination, including but not limited to, genes encoding transcription factors and components of signal transduction including receptors and ion transporters and channels. The ESTs of the present invention will also further find great use in the identification of genes that may be used to mitigate stresses encountered during seed germination, including but not limited to, genes that encode heat shock factors, cold-induced proteins, and proteins required for anaerobic respiration and desiccation tolerance, and genes that regulate the synthesis and activity of those proteins. The ESTs of the present invention can also enable the acquisition of promoters and cis-regulatory elements which will be useful to express agronomically significant genes in these tissues and/or other tissues. The ESTs of the present invention can also enable the acquisition of molecular markers, which can be used in, including but not limited to, breeding schemes, genetic and molecular mapping, and cloning of agronomically significant genes.

[0138] The nucleic acid molecules and fragments thereof of the present invention from the cDNA library LIB3827 are isolated from cotton seeds. Seed libraries can enable acquisition of, including but not limited to, genes that store food and seed regulatory elements, therefore, the ESTs of the present invention will find great use in the isolation of a variety of agronomically significant genes, including but not limited to genes that regulate protein, amino acids, sterols, oils, minerals, isoflavones, saponins, trypsin inhibitors, vitamins, tocopherols, antinutrient components, carbohydrates, starch metabolism and seed regulatory elements. Such crucial genes are associated with plant growth, yield and fiber quality, and could also serve as links in important metabolic and catabolic pathways. The ESTs of the present invention also can enable the acquisition of promoters and cis-regulatory elements which will be useful to express agronomically significant genes in these tissues and/or other tissues. The ESTs of the present invention also can enable the acquisition of molecular markers, which can be used in, including but not limited to, breeding schemes, genetic and molecular mapping, and cloning of agronomically significant genes.

[0139] The nucleic acid molecules and fragments thereof of the present invention from the cDNA library LIB3828 are isolated from cotton male reproductive tissue (androecium) from ⅓ grown squares (˜0.4 cm floral buds). The ESTs of the present invention can enable the acquisition of, including but not limited to, genes involved in floral and square development, reproduction, male gamete production and development, pollination, seed production, fiber production and development, and boll development therefore, the ESTs of the present invention will find great use in the isolation of a variety of agronomically significant genes, including but not limited to, non-regulatory genes and genes that regulate microsporogenesis, meiosis, cell cycle, signal transduction, cell-cell communication, carotenoids, floral biogenesis, fibers, proteins, amino acids, sterols, oils, minerals, isoflavones, saponins, vitamins, tocopherols, antinutrient components, carbohydrates, starch metabolism, and seed composition and function. Such genes are associated with plant growth, yield and fiber quality, and could also serve as links in important developmental, metabolic, and catabolic pathways. Libraries from this tissue can enable the acquisition of a variety of agronomically significant genes involved in the synthesis and catabolism of commercially important traits. The ESTs of the present invention also can enable the acquisition of promoters and cis-regulatory elements which will be useful to express agronomically significant genes in these tissues and/or other tissues. The ESTs of the present invention also can enable the acquisition of molecular markers, which can be used in, including but not limited to, breeding schemes, genetic and molecular mapping, and cloning of agronomically significant genes.

[0140] The nucleic acid molecules and fragments of the present invention from the cDNA library LIB3829 are isolated from cotton floral reproductive tissue (gynoecium). Libraries from this tissue can enable acquisition of, including but not limited to, genes that are involved in reproduction, female production and development (ovarylovule development), and pathogen resistance or suceptibility; therefore, the ESTs of the present invention will find great use in the isolation of a variety of agronomically significant genes, including but not limited to, non-regulatory genes and genes that regulate megasporogenesis, meiosis, cell cycle, signal transduction, cell-cell communication, carotenoids, floral biogenesis, embryogenesis, protein, amino acids, sterols, oils, minerals, isoflavones, saponins, vitamins, tocopherols, antinutrient components, carbohydrates, starch metabolism and seed composition and function. Such genes are associated with plant growth, quality, yield, and could also serve as links in important developmental, metabolic, and catabolic pathways. Libraries from this tissue can enable the acquisition of a variety of agronomically significant genes involved in the synthesis and catabolism of commercially important traits. The ESTs of the present invention also can enable the acquisition of promoters and cis-regulatory elements which will be useful to express agronomically significant genes in these tissues and/or other tissues. The ESTs of the present invention also can enable the acquisition of molecular markers, which can be used in, including but not limited to, breeding schemes, genetic and molecular mapping, and cloning of agronomically significant genes.

[0141] The nucleic acid molecules and fragments thereof of the present invention from the cDNA library LIB3830 are isolated from developing fibers from 23-28 dpa (days post anthesis) bolls, which are harvested from cotton plants. The ESTs of the present invention can enable the acquisition of genes expressed in epidermal cells of seed coats and those expressed during the process of cell elongation. The ESTs of the present invention will find great use in the isolation of a variety of agronomically significant genes, including but not limited to, genes that regulate receptors, signal transducers, transcription factors, translation factors, cellulose, enzymes, and structural proteins, and genes that regulate cell cycle, signal transduction, cell-cell communication, carotenoids, fibers, proteins, amino acids, sterols, isoflavones, carbohydrates, and starch metabolism. Such genes are associated with fiber quality and yield. Libraries from this tissue can enable the acquisition of a variety of agronomically significant genes involved in the synthesis and catabolism of commercially important traits. The ESTs of the present invention also can enable the acquisition of promoters and cis-regulatory elements which will be useful to express agronomically significant genes in these tissues and/or other tissues. The ESTs of the present invention also can enable the acquisition of molecular markers, which can be used in, including but not limited to, breeding schemes, genetic and molecular mapping, and cloning of agronomically significant genes.

[0142] The nucleic acid molecules and fragments thereof of the present invention from the cDNA library LIB3831 are isolated from carpel walls and septa collected from 1-10 dpa (days post anthesis) bolls from cotton plants. The ESTs of the present invention can enable the acquisition of, including but not limited to, genes involved in floral and square development, reproduction, female production and development (ovary/ovule development, stigma development and style development), pollen production and development, seed production, fiber production and development, boll development, therefore, the ESTs of the present invention will find great use in the isolation of a variety of agronomically significant genes, including but not limited to, non-regulatory genes and genes that regulate microsporogenesis, meiosis, cell cycle, signal transduction, cell-cell communication, carotenoids, floral biogenesis, embryogenesis, fibers, proteins, amino acids, sterols, oils, minerals, isoflavones, saponins, vitamins, tocopherols, antinutrient components, carbohydrates, starch metabolism, and seed composition and function. Such genes are associated with plant growth, yield and fiber quality, and could also serve as links in important developmental, metabolic, and catabolic pathways. Libraries from this tissue can enable the acquisition of a variety of agronomically significant genes involved in the synthesis and catabolism of commercially important traits. The ESTs of the present invention also can enable the acquisition of promoters and cis-regulatory elements which will be useful to express agronomically significant genes in these tissues and/or other tissues. The ESTs of the present invention also can enable the acquisition of molecular markers, which can be used in, including but not limited to, breeding schemes, genetic and molecular mapping, and cloning of agronomically significant genes.

[0143] Nucleic acid molecules and fragments thereof of the present invention may be employed to obtain other nucleic acid molecules. Such molecules include the nucleic acid molecules of other plants or other organisms (e.g., alfalfa, rice, potato, cotton, oat, rye, barley, maize, soybean, wheat, Arabidopsis, Brassica, etc.) including the nucleic acid molecules that encode, in whole or in part, protein homologues of other plant species or other organisms, and sequences of genetic elements such as promoters and transcriptional regulatory elements. Such molecules can be readily obtained by using the above-described nucleic acid molecules or fragments thereof to screen cDNA or genomic libraries obtained from such plant species. Methods for forming such libraries are well known in the art. Such homologue molecules may differ in their nucleotide sequences from those found in one or more of SEQ ID NO: 1 through SEQ ID NO: 17880 or complements thereof because complete complementarity is not needed for stable hybridization. The nucleic acid molecules of the present invention therefore also include molecules that, although capable of specifically hybridizing with the nucleic acid molecules may lack “complete complementarity.”

[0144] Any of a variety of methods may be used to obtain one or more of the above-described nucleic acid molecules (Zamechik et al., Proc. Natl. Acad. Sci. (U.S.A.) 83:4143-4146 (1986); Goodchild et al., Proc. Natl. Acad. Sci. (U.S.A.) 85:5507-5511 (1988); Wickstrom et al., Proc. Natl. Acad. Sci. (U.S.A.) 85:1028-1032 (1988); Holt, et al., Molec. Cell. Biol. 8:963-973 (1988); Gerwirtz, et al., Science 242:1303-1306 (1988); Anfossi, et al., Proc. Natl. Acad. Sci. (U.S.A.) 86:3379-3383 (1989); Becker, et al., EMBO J. 8:3685-3691 (1989); all of which are herein incorporated by reference in their entirety). Automated nucleic acid synthesizers may be employed for this purpose. In lieu of such synthesis, the disclosed nucleic acid molecules may be used to define a pair of primers that can be used with the polymerase chain reaction (Mullis, et al., Cold Spring Harbor Symp. Quant. Biol. 51:263-273 (1986); Erlich et al., EP 50,424; EP 84,796, EP 258,017, EP 237,362; Mullis, EP 201,184; Mullis et al., U.S. Pat. No. 4,683,202; Erlich, U.S. Pat. No. 4,582,788; and Saiki, R. et al., U.S. Pat. No. 4,683,194, all of which are hereby incorporated by reference in their entirety) to amplify and obtain any desired nucleic acid molecule or fragment.

[0145] Promoter sequence(s) and other genetic elements including but not limited to transcriptional regulatory elements associated with one or more of the disclosed nucleic acid sequences can also be obtained using the disclosed nucleic acid sequences provided herein.

[0146] In one embodiment, such sequences are obtained by incubating EST nucleic acid molecules or preferably fragments thereof with members of genomic libraries (e.g. cotton, maize and soybean) and recovering clones that hybridize to the EST nucleic acid molecule or fragment thereof. In a second embodiment, methods of “chromosome walking,” or inverse PCR may be used to obtain such sequences (Frohman, et al., Proc. Natl. Acad. Sci. (U.S.A.) 85:8998-9002 (1988); Ohara, et al., Proc. Natl. Acad. Sci. (U.S.A.) 86: 5673-5677 (1989); Pang et al., Biotechniques, 22(6); 1046-1048 (1977); Huang et al., Methods Mol. Biol. 69: 89-96 (1977); Hartl et al., Methods Mol. Biol. 58: 293-301 (1996), all of which are hereby incorporated by reference in their entirety). In one embodiment, the disclosed nucleic acid molecules are used to identify cDNAs whose analogous genes contain promoters with desirable expression patterns. The nucleic acid molecules isolated from the library of the present invention are used to isolate promoters of tissue-enhanced, tissue-specific, developmentally- or environmentally-regulated expression profiles. Isolation and functional analysis of the 5′ flanking promoter sequences of these genes from genomic libraries, for example, using genomic screening methods and PCR techniques would result in the isolation of useful promoters and transcriptional regulatory elements. These methods are known to those of skill in the art and have been described (See for example Birren et al., Genome Analysis:Analyzing DNA, 1, (1997), Cold Spring Harbor Laboratory Press, Cold Spring Harbor, N.Y., the entirety of which is herein incorporated by reference).

[0147] Promoters obtained utilizing the nucleic acid molecules of the present invention could also be modified to affect their control characteristics. Examples of such modifications would include but are not limited to enhancer sequences as reported by Kay et al., Science 236:1299 (1987), herein incorporated by reference in its entirety. Such genetic elements could be used to enhance gene expression of new and existing traits for crop improvements.

[0148] The nucleic acid molecules of the present invention may be used to isolate promoters of tissue-enhanced, tissue-specific, cell-specific, cell-type, developmentally or environmentally regulated expression profiles. Isolation and functional analysis of the 5′ flanking promoter sequences of these genes from genomic libraries, for example, using genomic screening methods and PCR techniques would result in the isolation of useful promoters and transcriptional regulatory elements. These methods are known to those of skill in the art and have been described (See, for example, Birren et. al., Genome Analysis: Analyzing DNA, 1, Cold Spring Harbor Laboratory Press, Cold Spring Harbor, N.Y. (1997), herein incorporated by reference in its entirety). Promoters obtained utilizing the nucleic acid molecules of the present invention could also be modified to affect their control characteristics. Examples of such modifications would include but are not limited to enhancer sequences as reported by Kay, et al Science 236:1299 (1987), herein incorporated reference in its entirety. Such genetic elements could be used to enhance gene expression of new and existing traits for crop improvements.

[0149] In an aspect of the present invention, one or more of the nucleic molecules of the present invention are used to determine whether a plant (preferably cotton) has a mutation affecting the level (i.e., the concentration of mRNA in a sample, etc.) or pattern (i.e., the kinetics of expression, rate of decomposition, stability profile, etc.) of the expression encoded in part or whole by one or more of the nucleic acid molecules of the present invention (collectively, the “Expression Response” of a cell or tissue). As used herein, the Expression Response manifested by a cell or tissue is said to be “altered” if it differs from the Expression Response of cells or tissues of plants not exhibiting the phenotype. To determine whether a Expression Response is altered, the Expression Response manifested by the cell or tissue of the plant exhibiting the phenotype is compared with that of a similar cell or tissue sample of a plant not exhibiting the phenotype. As will be appreciated, it is not necessary to re-determine the Expression Response of the cell or tissue sample of plants not exhibiting the phenotype each time such a comparison is made; rather, the Expression Response of a particular plant may be compared with previously obtained values of normal plants. As used herein, the phenotype of the organism is any of one or more characteristics of an organism (e.g. disease resistance, pest tolerance, environmental tolerance, male sterility, yield, quality improvements, etc.). A change in genotype or phenotype may be transient or permanent. Also as used herein, a tissue sample is any sample that comprises more than one cell. In a preferred aspect, a tissue sample comprises cells that share a common characteristic (e.g. derived from leaf, root, or pollen etc).

[0150] In one sub-aspect, such an analysis is conducted by determining the presence and/or identity of polymorphism(s) by one or more of the nucleic acid molecules of the present invention and more specifically, one or more of the EST nucleic acid molecules or fragments thereof which are associated with phenotype, or a predisposition to phenotype.

[0151] Any of a variety of molecules can be used to identify such polymorphism(s). In one embodiment, one or more of the EST nucleic acid molecules (or a sub-fragment thereof) may be employed as a marker nucleic acid molecule to identify such polymorphism(s). Alternatively, such polymorphisms can be detected through the use of a marker nucleic acid molecule or a marker protein that is genetically linked to (i.e., a polynucleotide that co-segregates with) such polymorphism(s).

[0152] In an alternative embodiment, such polymorphisms can be detected through the use of a marker nucleic acid molecule that is physically linked to such polymorphism(s). For this purpose, marker nucleic acid molecules comprising a nucleotide sequence of a polynucleotide located within 1 mb of the polymorphism(s), and more preferably within 100 kb of the polymorphism(s), and most preferably within 10 kb of the polymorphism(s) can be employed.

[0153] The genomes of animals and plants naturally undergo spontaneous mutation in the course of their continuing evolution (Gusella, Ann. Rev. Biochem. 55:831-854 (1986)). A “polymorphism” is a variation or difference in the sequence of the gene or its flanking regions that arises in some of the members of a species. The variant sequence and the “original” sequence co-exist in the species' population. In some instances, such co-existence is in stable or quasi-stable equilibrium.

[0154] A polymorphism is thus said to be “allelic,” in that, due to the existence of the polymorphism, some members of a species may have the original sequence (i.e., the original “allele”) whereas other members may have the variant sequence (i.e., the variant “allele”). In the simplest case, only one variant sequence may exist, and the polymorphism is thus said to be di-allelic. In other cases, the species' population may contain multiple alleles, and the polymorphism is termed tri-allelic, etc. A single gene may have multiple different unrelated polymorphisms. For example, it may have a di-allelic polymorphism at one site, and a multi-allelic polymorphism at another site.

[0155] The variation that defines the polymorphism may range from a single nucleotide variation to the insertion or deletion of extended regions within a gene. In some cases, the DNA sequence variations are in regions of the genome that are characterized by short tandem repeats (STRs) that include tandem di- or tri-nucleotide repeated motifs of nucleotides. Polymorphisms characterized by such tandem repeats are referred to as “variable number tandem repeat” (“VNTR”) polymorphisms. VNTRs have been used in identity analysis (Weber, U.S. Pat. No. 5,075,217; Armour, et al., FEBS Lett. 307:113-115 (1992); Jones, et al., Eur. J. Haematol. 39:144-147 (1987); Horn, et al., PCT Application WO91/14003; Jeffreys, European Patent Application 370,719; Jeffreys, U.S. Pat. No. 5,699,082; Jeffreys. et al., Amer. J. Hum. Genet. 39:11-24 (1986); Jeffreys. et al., Nature 316:76-79 (1985); Gray, et al., Proc. R. Acad. Soc. Lond. 243:241-253 (1991); Moore, et al., Genomics 10:654-660 (1991); Jeffreys, et al., Anim. Genet. 18:1-15 (1987); Hillel, et al., Anim. Genet. 20:145-155 (1989); Hillel, et al., Genet. 124:783-789 (1990), all of which are herein incorporated by reference in their entirety).

[0156] The detection of polymorphic sites in a sample of DNA may be facilitated through the use of nucleic acid amplification methods. Such methods specifically increase the concentration of polynucleotides that span the polymorphic site, or include that site and sequences located either distal or proximal to it. Such amplified molecules can be readily detected by gel electrophoresis or other means.

[0157] The most preferred method of achieving such amplification employs the polymerase chain reaction (“PCR”) (Mullis, et al., Cold Spring Harbor Symp. Quant. Biol. 51:263-273 (1986); Erlich, et al., European Patent Appln. 50,424; European Patent Appln. 84,796, European Patent Application 258,017, European Patent Appln. 237,362; Mullis, European Patent Appln. 201,184; Mullis, et al., U.S. Pat. No. 4,683,202; Erlich., U.S. Pat. No. 4,582,788; and Saiki, et al., U.S. Pat. No. 4,683,194, all of which are herein incorporated by reference), using primer pairs that are capable of hybridizing to the proximal sequences that define a polymorphism in its double-stranded form.

[0158] In lieu of PCR, alternative methods, such as the “Ligase Chain Reaction” (“LCR”) may be used (Barany, Proc. Natl. Acad. Sci. (U.S.A.) 88:189-193 (1991), the entirety of which is herein incorporated by reference). LCR uses two pairs of oligonucleotide probes to exponentially amplify a specific target. The sequences of each pair of oligonucleotides is selected to permit the pair to hybridize to abutting sequences of the same strand of the target. Such hybridization forms a substrate for a template-dependent ligase. As with PCR, the resulting products thus serve as a template in subsequent cycles and an exponential amplification of the desired sequence is obtained.

[0159] LCR can be performed with oligonucleotides having the proximal and distal sequences of the same strand of a polymorphic site. In one embodiment, either oligonucleotide will be designed to include the actual polymorphic site of the polymorphism. In such an embodiment, the reaction conditions are selected such that the oligonucleotides can be ligated together only if the target molecule either contains or lacks the specific nucleotide that is complementary to the polymorphic site present on the oligonucleotide. Alternatively, the oligonucleotides may be selected such that they do not include the polymorphic site (see, Segev, PCT Application WO 90/01069, the entirety of which is herein incorporated by reference).

[0160] The “Oligonucleotide Ligation Assay” (“OLA”) may alternatively be employed (Landegren, et al, Science 241:1077-1080 (1988), herein incorporated by reference in its entirety). The OLA protocol uses two oligonucleotides which are designed to be capable of hybridizing to abutting sequences of a single strand of a target. OLA, like LCR, is particularly suited for the detection of point mutations. Unlike LCR, however, OLA results in “linear” rather than exponential amplification of the target sequence.

[0161] Nickerson, et al. have described a nucleic acid detection assay that combines attributes of PCR and OLA (Nickerson, et al., Proc. Natl. Acad. Sci. (U.S.A.) 87:8923-8927 (1990), the entirety of which is herein incorporated by reference). In this method, PCR is used to achieve the exponential amplification of target DNA, which is then detected using OLA. In addition to requiring multiple, and separate, processing steps, one problem associated with such combinations is that they inherit all of the problems associated with PCR and OLA.

[0162] Schemes based on ligation of two (or more) oligonucleotides in the presence of nucleic acid having the sequence of the resulting “di-oligonucleotide”, thereby amplifying the di-oligonucleotide, are also known (Wu, et al., Genomics 4:560 (1989), the entirety of which is herein incorporated by reference), and may be readily adapted to the purposes of the present invention.

[0163] Other known nucleic acid amplification procedures, such as allele-specific oligomers, branched DNA technology, transcription-based amplification systems, or isothermal amplification methods may also be used to amplify and analyze such polymorphisms (Malek, et al., U.S. Pat. No. 5,130,238; Davey, et al., European Patent Application 329,822; Schuster et al., U.S. Pat. No. 5,169,766; Miller, et al., PCT Application WO 89/06700; Kwoh, et al., Proc. Natl. Acad. Sci. (U.S.A.) 86:1173-1177 (1989); Gingeras, et al., PCT Application WO 88/10315; Walker, et al., Proc. Natl. Acad. Sci. (U.S.A.) 89:392-396 (1992), all of which are herein incorporated by reference in their entirety).

[0164] The identification of a polymorphism can be determined in a variety of ways. By correlating the presence or absence of it in a plant with the presence or absence of a phenotype, it is possible to predict the phenotype of that plant. If a polymorphism creates or destroys a restriction endonuclease cleavage site, or if it results in the loss or insertion of DNA (e.g., a VNTR polymorphism), it will alter the size or profile of the DNA fragments that are generated by digestion with that restriction endonuclease. As such, individuals that possess a variant sequence can be distinguished from those having the original sequence by restriction fragment analysis. Polymorphisms that can be identified in this manner are termed “restriction fragment length polymorphisms” (“RFLPs”). RFLPs have been widely used in human and plant genetic analyses (Glassberg, UK Patent Application 2135774; Skolnick, et al., Cytogen. Cell Genet. 32:58-67 (1982); Botstein, et al., Ann. J. Hum. Genet. 32:314-331 (1980); Fischer, et al. (PCT Application WO90/13668); Uhlen, PCT Application WO90/11369).

[0165] Polymorphisms can also be identified by Single Strand Conformation Polymorphism (SSCP) analysis. The SSCP technique is a method capable of identifying most sequence variations in a single strand of DNA, typically between 150 and 250 nucleotides in length (Elles, Methods in Molecular Medicine: Molecular Diagnosis of Genetic Diseases, Humana Press (1996); Orita et al., Genomics 5: 874-879 (1989); both of which are herein incorporated by reference in their entirety). Under denaturing conditions a single strand of DNA will adopt a conformation that is uniquely dependent on its sequence conformation. This conformation usually will be different, even if only a single base is changed. Most conformations have been reported to alter the physical configuration or size sufficiently to be detectable by electrophoresis. A number of protocols have been described for SSCP including, but not limited to Lee et al., Anal. Biochem. 205: 289-293 (1992), the entirety of which is herein incorporated by reference; Suzuki et al., Anal. Biochem. 192: 82-84 (1991), the entirety of which is herein incorporated by reference; Lo et al., Nucleic Acids Research 20: 1005-1009 (1992), the entirety of which is herein incorporated by reference; Sarkar et al., Genomics 13: 441-443 (1992), the entirety of which is herein incorporated by reference). It is understood that one or more of the nucleic acids of the present invention, may be utilized as markers or probes to detect polymorphisms by SSCP analysis.

[0166] Polymorphisms may also be found using a DNA fingerprinting technique called amplified fragment length polymorphism (AFLP), which is based on the selective PCR amplification of restriction fragments from a total digest of genomic DNA to profile that DNA. Vos, et al., Nucleic Acids Res. 23:4407-4414 (1995), the entirety of which is herein incorporated by reference. This method allows for the specific co-amplification of high numbers of restriction fragments, which can be visualized by PCR without knowledge of the nucleic acid sequence.

[0167] AFLP employs basically three steps. Initially, a sample of genomic DNA is cut with restriction enzymes and oligonucleotide adapters are ligated to the restriction fragments of the DNA. The restriction fragments are then amplified using PCR by using the adapter and restriction sequence as target sites for primer annealing. The selective amplification is achieved by the use of primers that extend into the restriction fragments, amplifying only those fragments in which the primer extensions match the nucleotide flanking the restriction sites. These amplified fragments are then visualized on a denaturing polyacrylamide gel.

[0168] AFLP analysis has been performed on Salix (Beismann, et al., Mol. Ecol. 6:989-993 (1997), herein incorporated by reference in its entirety); Acinetobacter (Janssen, et al., Int. J. Syst. Bacteriol 47:1179-1187 (1997), herein incorporated by reference in its entirety), Aeromonas popoffi (Huys, et al., Int. J. Syst. Bacteriol. 47:1165-1171 (1997), herein incorporated by reference in its entirety), rice (McCouch, et al., Plant Mol. Biol. 35:89-99 (1997); Nandi, et al., Mol. Gen. Genet. 255:1-8 (1997); Cho, et al., Genome 39:373-378 (1996), all of which are herein incorporated by reference in their entirety), barley (Hordeum vulgare) (Simons, et al., Genomics 44:61-70 (1997); Waugh, et al., Mol. Gen. Genet. 255:311-321 (1997); Qi, et al., Mol. Gen Genet. 254:330-336 (1997); Becker, et al., Mol. Gen. Genet. 249:65-73 (1995), all of which are herein incorporated by reference in their entirety), potato (Van der Voort, et al., Mol. Gen. Genet. 255:438-447 (1997); Meksem, et al., Mol. Gen. Genet. 249:74-81 (1995), both of which are herein incorporated by reference in their entirety), Phytophthora infestans (Van der Lee, et al., Fungal Genet. Biol. 21:278-291 (1997), herein incorporated by reference in its entirety), Bacillus anthracis (Keim, et al., J. Bacteriol. 179:818-824 (1997), herein incorporated by reference in its entirety), Astragalus cremnophylax (Travis, et al., Mol. Ecol. 5:735-745 (1996), herein incorporated by reference in its entirety), Arabidopsis (Cnops, et al., Mol. Gen. Genet. 253:32-41 (1996), herein incorporated by reference in its entirety), Escherichia coli (Lin, et al., Nucleic Acids Res. 24:3649-3650 (1996), herein incorporated by reference in its entirety), Aeromonas (Huys, et al., Int. J. Syst. Bacteriol. 46:572-580 (1996), herein incorporated by reference in its entirety), nematode (Folkertsma, et al., Mol. Plant Microbe Interact. 9:47-54 (1996), herein incorporated by reference in its entirety), tomato (Thomas, et al., Plant J. 8:785-794 (1995), herein incorporated by reference in its entirety), and human (Latorra, et al., PCR Methods Appl. 3:351-358 (1994), herein incorporated by reference in its entirety). AFLP analysis has also been used for fingerprinting mRNA (Money, et al., Nucleic Acids Res. 24:2616-2617 (1996); Bachem, et al., Plant J. 9:745-753 (1996), both of which are herein incorporated by reference in their entirety). It is understood that one or more of the nucleic acids of the present invention, may be utilized as markers or probes to detect polymorphisms by AFLP analysis for fingerprinting mRNA.

[0169] Polymorphisms may also be found using random amplified polymorphic DNA (RAPD) (Williams et al., Nucl. Acids Res. 18: 6531-6535 (1990), herein incorporated by reference in its entirety) and cleaveable amplified polymorphic sequences (CAPS) (Lyamichev et al., Science 260: 778-783 (1993), herein incorporated by reference in its entirety). It is understood that one or more of the nucleic acids of the present invention, may be utilized as markers or probes to detect polymorphisms by RAPD or CAPS analysis.

[0170] Polymorphisms are useful, through linkage analysis, to define the genetic distances or physical distances between polymorphic traits. A physical map or ordered array of genomic DNA fragments in the desired region containing the gene may be used to characterize and isolate genes corresponding to desirable traits. For this purpose, yeast artificial chromosomes (YACs), bacterial artificial chromosomes (BACs), and cosmids are appropriate vectors for cloning large segments of DNA molecules. Although fewer clones are needed to make a contig for a specific genomic region by using YACs (Agyare et al., Genome Res. 7: 1-9 (1997); James et al., Genomics 32: 425-430 (1996), both of which are herein incorporated by reference in their entirety), chimerism in the inserted DNA fragment can arise. Cosmids are convenient for handling smaller-size DNA molecules and may be used for transformation in developing transgenic plants. BACs also carry DNA fragments and are less prone to chimerism.

[0171] Through genetic mapping, a fine scale linkage map can be developed using DNA markers and, then, a genomic DNA library of large-sized fragments can be screened with molecular markers linked to the desired trait. Molecular markers are advantageous for agronomic traits that are otherwise difficult to tag, such as resistance to pathogens, insects and nematodes, tolerance to abiotic stress, quality parameters and quantitative traits such as high yield potential.

[0172] The essential requirements for marker-assisted selection in a plant breeding program are: (1) the marker(s) should co-segregate or be closely linked with the desired trait; (2) an efficient means of screening large populations for the molecular marker(s) should be available; and (3) the screening technique should have high reproducibility across laboratories and preferably be economical to use and be user-friendly.

[0173] The genetic linkage of marker molecules can be established by a gene mapping model such as, without limitation, the flanking marker model reported by Lander and Botstein, Genetics 121:185-199 (1989) and the interval mapping, based on maximum likelihood methods described by Lander and Botstein, Genetics 121:185-199 (1989) and implemented in the software package MAPMAKER/QTL (Lincoln and Lander, Mapping Genes Controlling Quantitative Traits Using MAPMAKER/QTL, Whitehead Institute for Biomedical Research, Massachusetts, (1990). Additional software includes Qgene, Version 2.23 (1996), Department of Plant Breeding and Biometry, 266 Emerson Hall, Cornell University, Ithaca, N.Y., the manual of which is herein incorporated by reference in its entirety). Use of Qgene software is a particularly preferred approach.

[0174] A maximum likelihood estimate (MLE) for the presence of a marker is calculated, together with an MLE assuming no QTL effect, to avoid false positives. A log₁₀ of an odds ratio (LOD) is then calculated as: LOD=log₁₀ (MLE for the presence of a QTL/MLE given no linked QTL).

[0175] The LOD score essentially indicates how much more likely the data are to have arisen assuming the presence of a QTL than in its absence. The LOD threshold value for avoiding a false positive with a given confidence, say 95%, depends on the number of markers and the length of the genome. Graphs indicating LOD thresholds are set forth in Lander and Botstein, Genetics 121:185-199 (1989) the entirety of which is herein incorporated by reference and further described by Arús and Moreno-González, Plant Breeding, Hayward et al., (eds.) Chapman & Hall, London, pp. 314-331 (1993), the entirety of which is herein incorporated by reference.

[0176] Additional models can be used. Many modifications and alternative approaches to interval mapping have been reported, including the use of non-parametric methods (Kruglyak and Lander, Genetics 139:1421-1428 (1995), the entirety of which is herein incorporated by reference). Multiple regression methods or models can be also be used, in which the trait is regressed on a large number of markers (Jansen, Biometrics in Plant Breeding, van Oijen and Jansen (eds.), Proceedings of the Ninth Meeting of the Eucarpia Section Biometrics in Plant Breeding, The Netherlands, pp. 116-124 (1994); Weber and Wricke, Advances in Plant Breeding, Blackwell, Berlin, 16 (1994), both of which are herein incorporated by reference in their entirety). Procedures combining interval mapping with regression analysis, whereby the phenotype is regressed onto a single putative QTL at a given marker interval and at the same time onto a number of markers that serve as ‘cofactors,’ have been reported by Jansen and Stam, Genetics 136:1447-1455 (1994), the entirety of which is herein incorporated by reference and Zeng, Genetics 136:1457-1468 (1994) the entirety of which is herein incorporated by reference. Generally, the use of cofactors reduces the bias and sampling error of the estimated QTL positions (Utz and Melchinger, Biometrics in Plant Breeding, van Oijen and Jansen (eds.) Proceedings of the Ninth Meeting of the Eucarpia Section Biometrics in Plant Breeding, The Netherlands, pp.195-204 (1994), the entirety of which is herein incorporated by reference, thereby improving the precision and efficiency of QTL mapping (Zeng, Genetics 136:1457-1468 (1994)). These models can be extended to multi-environment experiments to analyze genotype-environment interactions (Jansen et al., Theo. Appl. Genet. 91:33-37 (1995), the entirety of which is herein incorporated by reference).

[0177] Selection of an appropriate mapping population is important to map construction. The choice of an appropriate mapping population depends on the type of marker systems employed (Tanksley et al., Molecular mapping plant chromosomes. Chromosome structure and function: Impact of new concepts, Gustafson and Appels (eds.), Plenum Press, New York, pp 157-173 (1988), the entirety of which is herein incorporated by reference). Consideration must be given to the source of parents (adapted vs. exotic) used in the mapping population. Chromosome pairing and recombination rates can be severely disturbed (suppressed) in wide crosses (adapted×exotic) and generally yield greatly reduced linkage distances. Wide crosses will usually provide segregating populations with a relatively large array of polymorphisms when compared to progeny in a narrow cross (adapted×adapted).

[0178] An F₂ population is the first generation of selfing after the hybrid seed is produced. Usually a single F₁ plant is selfed to generate a population segregating for all the genes in Mendelian (1:2:1) fashion. Maximum genetic information is obtained from a completely classified F₂ population using a codominant marker system (Mather, Measurement of Linkage in Heredity, Methuen and Co., (1938), the entirety of which is herein incorporated by reference). In the case of dominant markers, progeny tests (e.g. F₃, BCF₂) are required to identify the heterozygotes, thus making it equivalent to a completely classified F₂ population. However, this procedure is often prohibitive because of the cost and time involved in progeny testing. Progeny testing of F₂ individuals is often used in map construction where phenotypes do not consistently reflect genotype (e.g. disease resistance) or where trait expression is controlled by a QTL. Segregation data from progeny test populations (e.g. F₃ or BCF₂) can be used in map construction. Marker-assisted selection can then be applied to cross progeny based on marker-trait map associations (F₂, F₃), where linkage groups have not been completely disassociated by recombination events (i.e., maximum disequillibrium).

[0179] Recombinant inbred lines (RIL) (genetically related lines; usually >F₅, developed from continuously selfing F₂ lines towards homozygosity) can be used as a mapping population. Information obtained from dominant markers can be maxiiized by using RIL because all loci are homozygous or nearly so. Under conditions of tight linkage (i.e., about <10% recombination), dominant and co-dominant markers evaluated in RIL populations provide more information per individual than either marker type in backcross populations (Reiter et al., Proc. Natl. Acad. Sci. (U.S.A.) 89:1477-1481 (1992), the entirety of which is herein incorporated by reference). However, as the distance between markers becomes larger (i.e., loci become more independent), the information in RIL populations decreases dramatically when compared to codominant markers.

[0180] Backcross populations (e.g., generated from a cross between a successful variety (recurrent parent) and another variety (donor parent) carrying a trait not present in the former) can be utilized as a mapping population. A series of backcrosses to the recurrent parent can be made to recover most of its desirable traits. Thus a population is created consisting of individuals nearly like the recurrent parent but each individual carries varying amounts or mosaic of genomic regions from the donor parent. Backcross populations can be useful for mapping dominant markers if all loci in the recurrent parent are homozygous and the donor and recurrent parent have contrasting polymorphic marker alleles (Reiter et al., Proc. Natl. Acad. Sci. (U.S.A.) 89:1477-1481 (1992)). Information obtained from backcross populations using either codominant or dominant markers is less than that obtained from F₂ populations because one, rather than two, recombinant gametes are sampled per plant. Backcross populations, however, are more informative (at low marker saturation) when compared to RILs as the distance between linked loci increases in RIL populations (i.e. about 15% recombination). Increased recombination can be beneficial for resolution of tight linkages, but may be undesirable in the construction of maps with low marker saturation.

[0181] Near-isogenic lines (NIL) created by many backcrosses to produce an array of individuals that are nearly identical in genetic composition except for the trait or genomic region under interrogation can be used as a mapping population. In mapping with NILs, only a portion of the polymorphic loci are expected to map to a selected region.

[0182] Bulk segregant analysis (BSA) is a method developed for the rapid identification of linkage between markers and traits of interest (Michelmore et al., Proc. Natl. Acad. Sci. (U.S.A.) 88:9828-9832 (1991), the entirety of which is herein incorporated by reference). In BSA, two bulked DNA samples are drawn from a segregating population originating from a single cross. These bulks contain individuals that are identical for a particular trait (resistant or susceptible to particular disease) or genomic region but arbitrary at unlinked regions (i.e. heterozygous). Regions unlinked to the target region will not differ between the bulked samples of many individuals in BSA.

[0183] It is understood that one or more of the nucleic acid molecules of the present invention may be used as molecular markers. It is also understood that one or more of the protein molecules of the present invention may be used as molecular markers.

[0184] In accordance with this aspect of the present invention, a sample nucleic acid is obtained from plants cells or tissues. Any source of nucleic acid may be used. Preferably, the nucleic acid is genomic DNA. The nucleic acid is subjected to restriction endonuclease digestion. For example, one or more EST nucleic acid molecule or fragment thereof can be used as a probe in accordance with the above-described polymorphic methods. The polymorphism obtained in this approach can then be cloned to identify the mutation at the coding region which alters the protein's structure or regulatory region of the gene which affects its expression level.

[0185] In one aspect of the present invention, an evaluation can be conducted to determine whether a particular mRNA molecule is present. One or more of the nucleic acid molecules of the present invention, preferably one or more of the EST nucleic acid molecules of the present invention are utilized to detect the presence or quantity of the mRNA species. Such molecules are then incubated with cell or tissue extracts of a plant under conditions sufficient to permit nucleic acid hybridization. The detection of double-stranded probe-mRNA hybrid molecules is indicative of the presence of the mRNA; the amount of such hybrid formed is proportional to the amount of mnRNA. Thus, such probes may be used to ascertain the level and extent of the mRNA production in a plant's cells or tissues. Such nucleic acid hybridization may be conducted under quantitative conditions (thereby providing a numerical value of the amount of the mRNA present). Alternatively, the assay may be conducted as a qualitative assay that indicates either that the mRNA is present, or that its level exceeds a user set, predefined value.

[0186] A principle of in situ hybridization is that a labeled, single-stranded nucleic acid probe will hybridize to a complementary strand of cellular DNA or RNA and, under the appropriate conditions, these molecules will form a stable hybrid. When nucleic acid hybridization is combined with histological techniques, specific DNA or RNA sequences can be identified within a single cell. An advantage of in situ hybridization over more conventional techniques for the detection of nucleic acids is that it allows an investigator to determine the precise spatial population (Angerer et al., Dev. Biol. 101: 477-484 (1984); Angerer et al., Dev. Biol. 112: 157-166 (1985); Dixon et al., EMBO J. 10: 1317-1324 (1991), all of which are herein incorporated by reference in their entirety). In situ hybridization may be used to measure the steady-state level of RNA accumulation. It is a sensitive technique and RNA sequences present in as few as 5-10 copies per cell can be detected (Hardin et al., J. Mol. Biol. 202: 417-431.(1989), the entirety of which is herein incorporated by reference). A number of protocols have been devised for in situ hybridization, each with tissue preparation, hybridization, and washing conditions (Meyerowitz, Plant Mol. Biol. Rep. 5: 242-250 (1987); Cox and Goldberg, In: Plant Molecular Biology: A Practical Approach (ed. C. H. Shaw), pp. 1-35. IRL Press, Oxford (1988); Raikhel et al., In situ RNA hybridization in plant tissues. In Plant Molecular Biology Manual, vol. B9: 1-32. Kluwer Academic Publisher, Dordrecht, Belgium (1989), all of which are herein incorporated by reference in their entirety).

[0187] In situ hybridization also allows for the localization of proteins within a tissue or cell (Wilkinson, In Situ Hybridization, Oxford University Press, Oxford (1992); Langdale, In Situ Hybridization 165-179 In: The Maize Handbook, eds. Freeling and Walbot, Springer-Verlag, New York (1994), both of which are herein incorporated by reference in their entirety). It is understood that one or more of the molecules of the present invention, preferably one or more of the EST nucleic acid molecules of the present invention or one or more of the antibodies of the present invention may be utilized to detect the level or pattern of a protein or fragment thereof by in situ hybridization.

[0188] Fluorescent in situ hybridization also enables the localization of a particular DNA sequence along a chromosome which is useful, among other uses, for gene mapping, following chromosomes in hybrid lines or detecting chromosomes with translocations, transversions or deletions. In situ hybridization has been used to identify chromosomes in several plant species (Griffor et al., Plant Mol. Biol. 17: 101-109 (1991); Gustafson et al., Proc. Nat'l. Acad. Sci. (U.S.A). 87: 1899-1902 (1990); Mukai and Gill, Genome 34: 448-452. (1991); Schwarzacher and Heslop-Harrison, Genome 34: 317-323 (1991); Wang et al., Jpn. J. Genet. 66: 313-316(1991); Parra and Windle, Nature Genetics, 5: 17-21 (1993), all of which are herein incorporated by reference in their entirety). It is understood that the nucleic acid molecules of the present invention may be used as probes or markers to localize sequences along a chromosome.

[0189] It is also understood that one or more of the molecules of the present invention, preferably one or more of the EST nucleic acid molecules of the present invention or one or more of the antibodies of the present invention may be utilized to detect the expression level or pattern of a protein or mRNA thereof by in situ hybridization.

[0190] Another method to localize the expression of a molecule is tissue printing. Tissue printing provides a way to screen, at the same time on the same membrane many tissue sections from different plants or different developmental stages. Tissue-printing procedures utilize films designed to immobilize proteins and nucleic acids. In essence, a freshly cut section of an organ is pressed gently onto nitrocellulose paper, nylon membrane or polyvinylidene difluoride membrane. Such membranes are commercially available (e.g. Millipore, Bedford, Massachusetts). The contents of the cut cell transfer onto the membrane, and the molecules are immobilized to the membrane. The immobilized molecules form a latent print that can be visualized with appropriate probes. When a plant tissue print is made on nitrocellulose paper, the cell walls leave a physical print that makes the anatomy visible without further treatment (Varner and Taylor, Plant Physiol. 91: 31-33 (1989), the entirety of which is herein incorporated by reference).

[0191] Tissue printing on substrate films is described by Daoust, Exp. Cell Res. 12: 203-211 (1957), the entirety of which is herein incorporated by reference, who detected amylase, protease, ribonuclease, and deoxyribonuclease in animal tissues using starch, gelatin, and agar films. These techniques can be applied to plant tissues (Yomo and Taylor, Planta 112:35-43 (1973); Harris and Chrispeels, Plant Physiol. 56: 292-299 (1975). Advances in membrane technology have increased the range of applications of Daoust's tissue-printing techniques allowing (Cassab and Varner, J. Cell. Biol. 105: 2581-2588 (1987), the entirety of which is herein incorporated by reference; the histochemical localization of various plant enzymes and deoxyribonuclease on nitrocellulose paper and nylon (Spruce et al., Phytochemistry, 26: 2901-2903 (1987); Barres et al. Neuron 5: 527-544 (1990); Reid and Pont-Lezica, Tissue Printing: Tools for the Study of Anatomy, Histochemistry, and Gene Expression, Academic Press, New York, N.Y. (1992); Reid et al. Plant Physiol. 93: 160-165 (1990); Ye et al. Plant J. 1: 175-183 (1991), all of which are herein incorporated by reference in their entirety).

[0192] It is understood that one or more of the molecules of the present invention, preferably one or more of the EST nucleic acid molecules of the present invention or one or more of the antibodies of the present invention may be utilized to detect the presence or quantity of a protein by tissue printing.

[0193] Further, it is also understood that any of the nucleic acid molecules of the present invention may be used as marker nucleic acids and or probes in connection with methods that require probes or marker nucleic acids. As used herein, a probe is an agent that is utilized to determine an attribute or feature (e.g. presence or absence, location, correlation, etc.) or a molecule, cell, tissue or plant. As used herein, a marker nucleic acid is a nucleic acid molecule that is utilized to determine an attribute or feature (e.g., presence or absence, location, correlation, etc.) or a molecule, cell, tissue or plant.

[0194] A microarray-based method for high-throughput monitoring of gene expression may be utilized to measure expression response Schena et al., Science 270:467-470 (1995); http://cmgm.stanford.edu/pbrown/array.html; Shalon, Ph.D. Thesis, Stanford University (1996). This approach is based on using arrays of DNA targets (e.g. cDNA inserts, colonies, or polymerase chain reaction products) for hybridization to a “complex probe” prepared with RNA extracted from a given cell line or tissue. The probe may be produced by reverse transcription of mRNA or total RNA and labeled with radioactive or fluorescent labeling. The probe is complex in that it contains many different sequences in various amounts, corresponding to the numbers of copies of the original mRNA species extracted from the sample.

[0195] The initial RNA source will typically be derived from a physiological source. The physiological source may be derived from a variety of eukaryotic sources, with physiological sources of interest including sources derived from single celled organisms such as yeast and multicellular organisms, including plants and animals, particularly plants, where the physiological sources from multicellular organisms may be derived from particular organs or tissues of the multicellular organism, or from isolated cells derived therefrom. The physiological sources may be derived from multicellular organisms at different developmental stages (e.g., 10-day-old seedlings), grown under different environmental conditions (e.g., drought-stressed plants) or treated with chemicals.

[0196] In obtaining the sample of RNAs to be analyzed from the physiological source from which it is derived, the physiological source may be subjected to a number of different processing steps, where such processing steps might include tissue homogenation, cell isolation and cytoplasmic extraction, nucleic acid extraction and the like, where such processing steps are known to the those of skill in the art. Methods of isolating RNA from cells, tissues, organs or whole organisms are known to those of skill in the art and are described in Maniatis et al., Molecular Cloning: A Laboratory Manual (Cold Spring Harbor Press) (1989).

[0197] The DNA may be placed on nylon or glass “microarrays” regularly arranged with a spot spacing of 1 mm or less. Expression levels can be measured for hundreds or thousands of genes, by using less than 2 micrograms of polyA+RNA and determining the relative mRNA abundances down to one in ten thousand or less (Granjeaud et. al., BioEssays 21:781-790 (1999)).

[0198] As disclosed in U.S. Pat. No. 5,445,934 arrays with nucleic acid molecules can comprise a substrate with a surface comprising 10³ or more groups of oligonucleotides with different, known sequences covalently attached to the surface in discrete known regions, e.g. 10⁴ or 10⁵ or 10⁶ or more different groups of known sequences in discrete known regions. In preferred arrays 10³ or more groups of oligonucleotides accupy a total area of less than 1 cm². In preferred embodiments the groups of oligonucleotides are at least 50% pure within the discrete known regions.

[0199] In addition to arrays of cDNA clones or inserts, arrays of oligonucleotides are also used to study differential gene expression. In an oligonucleotide array, the genes of interest are represented by a series of approximately 20 nucleotide oligomers that are unique to each gene. Labeled mRNA is prepared and hybridization signals are detected from specific sets of oligos that represent different genes supplemented by a set of control oligonucleotides. Potential advantages of the oligonucleotide array include enhanced specificity and sensitivity through the parallel analysis of “perfect match” oligos and “mismatch” oligos for each gene. The hybridization conditions can be adjusted to distinguish a perfect heteroduplex from a single base mismatch, thus allowing subtraction of nonspecific hybridization signals from specific hybridization signals. A disadvantage of oligonucleotide arrays relative to cDNA arrays is the limitation of the technology to genes of known sequence (Granjeaud et. al., BioEssays 21:781-790 (1991); Carulli et al., Journal of Cellular Biochemistry Supplements 30/31:286-296 (1998)).

[0200] These techniques have been successfully used to characterize patterns of gene expression associated with, for example, various important physiological changes in yeast, including the mitotic cell cycle, the heat shock response, and comparison between mating types. Once a set of comparable expression profiles is obtained, e.g. for cells at different time points or at different cellular states, a clustering algorithm generally is used to group sets of genes which share similar expression patterns. The clusters obtained can then be analyzed in the light of available functional annotations, often leading to associations of poorly characterized genes with genes whose function and regulation are better understood.

[0201] Regulatory networks that control gene expression can be characterized using microarray technology (DeRisi et al., Science 278: 680-686 (1997); Winzler et al. Science 28: 1194-1197 (1998); Cho et al. Mol Cell 2: 65-73 (1998); Spellman et al. Mol Biol Cell 95: 14863-14868 (1998). For example, it is has been reported that both cDNA and oligonucleotide arrays have been used to monitor gene expression in synchronized cell cultures. Analysis of the corresponding temporal patterns of gene expression resulted in the identification of over 400 cell cycle-regulated genes. In order to identify possible common regulatory mechanisms accounting for co-expression, consensus motifs in putative regulatory sequences upstream of the corresponding ORFs were examined. This resulted in the identification of several new potential binding sites for known factors or complexes involved in the coordinated transcription of genes during specific phases of the cell cycle (Thieffry, D. BioEssays 21: 895-899 (1999)).

[0202] The microarray approach may be used with polypeptide targets (U.S. Pat. No. 5,445,934; U.S. Pat. No. 5,143,854; U.S. Pat. No. 5,079,600; U.S. Pat. No. 4,923,901) synthesized on a substrate (microarray) and these polypeptides can be screened with either (Fodor et al., Science 251:767-773 (1991)). It is understood that one or more of the nucleic acid molecules or protein or fragments thereof of the invention may be utilized in a microarray-based method.

[0203] In a preferred embodiment of the present invention microarrays may be prepared that comprise nucleic acid molecules where preferably at least 10%, preferably at least 25%, more preferably at least 50% and even more preferably at least 75%, 80%, 85%, 90% or 95% of the nucleic acid molecules located on that array are selected from the group of nucleic acid molecules that specifically hybridize to one or more nucleic acid molecule having a nucleic acid sequence selected from the group of SEQ ID NO: 1 through SEQ ID NO: 17880 or complement thereof or fragments of either.

[0204] A particular preferred microarray embodiment of the present invention is a microarray comprising nucleic acid molecules encoding genes or fragments thereof that are homologues of known genes or nucleic acid molecules that comprise genes or fragment thereof that elicit only limited or no matches to known genes. A further preferred microarray embodiment of the present invention is a microarray comprising nucleic acid molecules having genes or fragments thereof that are homologues of known genes and nucleic acid molecules that comprise genes or fragment thereof that elicit only limited or no matches to known genes. Site-directed mutagenesis may be utilized to modify nucleic acid sequences, particularly as it is a technique that allows one or more of the amino acids encoded by a nucleic acid molecule to be altered (e.g. a threonine to be replaced by a methionine). Three basic methods for site-directed mutagenesis are often employed. These are cassette mutagenesis (Wells et al., Gene 34:315-23 (1985), the entirety of which is herein incorporated by reference), primer extension (Gilliam et al., Gene 12:129-137 (1980), the entirety of which is herein incorporated by reference); Zoller and Smith, Methods Enzymol. 100:468-500 (1983), the entirety of which is herein incorporated by reference; and Dalbadie-McFarland et al., Proc. Natl. Acad. Sci. (U.S.A.) 79:6409-6413 (1982), the entirety of which is herein incorporated by reference) and methods based upon PCR (Scharf et al., Science 233:1076-1078 (1986), the entirety of which is herein incorporated by reference; Higuchi et al., Nucleic Acids Res. 16:7351-7367 (1988), the entirety of which is herein incorporated by reference). Site-directed mutagenesis approaches are also described in European Patent 0 385 962, the entirety of which is herein incorporated by reference, European Patent 0 359 472, the entirety of which is herein incorporated by reference, and PCT Patent Application WO 93/07278, the entirety of which is herein incorporated by reference.

[0205] Site-directed mutagenesis strategies have been applied to plants for both in vitro as well as in vivo site-directed mutagenesis (Lanz et al., J. Biol. Chem. 266:9971-6 (1991); Kovgan and Zhdanov, Biotekhnologiya 5:148-154; No. 207160n, Chemical Abstracts 110:225 (1989); Ge et al., Proc. Natl. Acad. Sci. (U.S.A.) 86:4037-4041 (1989); Zhu et al., J. Biol. Chem. 271:18494-18498 (1996); Chu et al., Biochemistry 33:6150-6157 (1994); Small et al., EMBO J. 11: 1291-1296 (1992); Cho et al., Mol. Biotechnol. 8:13-16 (1997); Kita et al., J. Biol. Chem. 271:26529-26535 (1996); Jin et al., Mol. Microbiol. 7:555-562 (1993); Hatfield and Vierstra, J. Biol. Chem. 267:14799-14803 (1992); Zhao et al., Biochemistry 31:5093-5099 (1992), all of which are herein incorporated by reference in their entirety).

[0206] Any of the nucleic acid molecules of the present invention may either be modified by site-directed mutagenesis or used as, for example, nucleic acid molecules that are used to target other nucleic acid molecules for modification. It is understood that mutants with more than one altered nucleotide can be constructed using techniques that practitioners skilled in the art are familiar with such as isolating restriction fragments and ligating such fragments into an expression vector (see, for example, Sambrook et al., Molecular Cloning: A Laboratory Manual, Cold Spring Harbor Press (1989)).

[0207] Sequence-specific DNA-binding proteins play a role in the regulation of transcription. The isolation of recombinant cDNAs encoding these proteins facilitates the biochemical analysis of their structural and functional properties. Genes encoding such DNA-binding proteins have been isolated using classical genetics (Vollbrecht et al., Nature 350: 241-243 (1991), the entirety of which is herein incorporated by reference) and molecular biochemical approaches, including the screening of recombinant cDNA libraries with antibodies (Landschulz et al., Genes Dev. 2: 786-800 (1988), the entirety of which is herein incorporated by reference) or DNA probes (Bodner et al., Cell 55: 505-518 (1988), the entirety of which is herein incorporated by reference). In addition, an in situ screening procedure has been used and has facilitated the isolation of sequence-specific DNA-binding proteins from various plant species (Gilmartin et al., Plant Cell 4: 839-849 (1992); Schindler et al., EMBO J. 11: 1261-1273 (1992), both of which are herein incorporated by reference in their entirety). An in situ screening protocol does not require the purification of the protein of interest (Vinson et al., Genes Dev. 2: 801-806 (1988); Singh et al., Cell 52: 415-423 (1988), both of which are herein incorporated by reference in their entirety).

[0208] Steps may be employed to characterize DNA-protein interactions. The first is to identify promoter fragments that interact with DNA-binding proteins, to titrate binding activity, to determine the specificity of binding, and to determine whether a given DNA-binding activity can interact with related DNA sequences (Sambrook et al., Molecular Cloning: A Laboratory Manual, 2^{nd} edition. Cold Spring Harbor Laboratory Press, Cold Spring Harbor, N.Y. (1989). Electrophoretic mobility-shift assay is a widely used assay. The assay provides a simple, rapid, and sensitive method for detecting DNA-binding proteins based on the observation that the mobility of a DNA fragment through a nondenaturing, low-ionic strength polyacrylamide gel is retarded upon association with a DNA-binding protein (Fried and Crother, Nucleic Acids Res. 9: 6505-6525 (1981), the entirety of which is herein incorporated by reference). When one or more specific binding activities have been identified, the exact sequence of the DNA bound by the protein may be determined. Several procedures for characterizing protein/DNA-binding sites are used, including methylation and ethylation interference assays (Maxam and Gilbert, Methods Enzymol. 65: 499-560 (1980); Wissman and Hillen, Methods Enzymol. 208: 365-379 (1991), both of which are herein incorporated by reference in their entirety) and footprinting techniques employing DNase I (Galas and Schmitz, Nucleic Acids Res. 5: 3157-3170 (1978), herein incorporated by reference in its entirety), 1,10-phenanthroline-copper ion methods (Sigman et al., Methods Enzymol. 208: 365-379 (1991), herein incorporated by reference in its entirety) or hydroxyl radical methods (Dixon et al., Methods Enzymol. 208: 380-413 (1991), herein incorporated by reference in its entirety). It is understood that one or more of the nucleic acid molecules of the present invention, preferably one or more of the EST nucleic acid molecules of the present invention may be utilized to identify a protein or fragment thereof that specifically binds to a nucleic acid molecule of the present invention. It is also understood that one or more of the protein molecules or fragments thereof of the present invention may be utilized to identify a nucleic acid molecule that specifically binds to it.

[0209] The two-hybrid system is based on the fact that many cellular functions are carried out by proteins that interact (physically) with one another. Two-hybrid systems have been used to probe the function of new proteins (Chien et al., Proc. Natl. Acad. Sci. (U.S.A.) 88: 9578-9582 (1991); Durfee et al., Genes Dev. 7: 555-569 (1993); Choi et al., Cell 78: 499-512 (1994); Kranz et al., Genes Dev. 8: 313-327 (1994), all of which are herein incorporated by reference in their entirety).

[0210] Interaction mating techniques have facilitated a number of two-hybrid studies of protein-protein interaction. Interaction mating has been used to examine interactions between small sets of tens of proteins (Finley and Brent, Proc. Natl. Acad. Sci. (U.S.A.) 91: 12098-12984 (1994), herein incorporated by reference in its entirety), larger sets of hundreds of proteins, (Bendixen et al., Nucl. Acids Res. 22: 1778-1779 (1994), herein incorporated by reference in its entirety) and to comprehensively map proteins encoded by a small genome (Bartel et al., Nature Genetics 12: 72-77 (1996), herein incorporated by reference in its entirety). This technique utilizes proteins fused to the DNA-binding domain and proteins fused to the activation domain. They are expressed in two different haploid yeast strains of opposite mating type, and the strains are mated to determine if the two proteins interact. Mating occurs when haploid yeast strains come into contact and result in the fusion of the two haploids into a diploid yeast strain. An interaction can be determined by the activation of a two-hybrid reporter gene in the diploid strain. The primary advantage of this technique is that it reduces the number of yeast transformations needed to test individual interactions. It is understood that the protein-protein interactions of protein or fragments thereof of the present invention may be investigated using the two-hybrid system and that any of the nucleic acid molecules of the present invention that encode such proteins or fragments thereof may be used to transform yeast in the two-hybrid system.

[0211] Synechocystis 6803 is a photosynthetic Cyanobacterium capable of oxygenic photosynthesis as well as heterotrophic growth in the absence of light. The entire genome has been sequenced, and it is reported to have a circular genome size of 3.57 Mbp containing 3168 potential open reading frames. Open reading frames (ORFs) were identified based upon their homology to other reported ORFs and by using ORF identification computer programs. Sixteen hundred potential ORFs were assigned based on their homology to previously identified ORFs.

[0212] Of these 1600 ORFs, 145 were identical to reported ORFs (Kaneko et al., DNA Research 3:109-36 (1996), herein incorporated by reference in its entirety).

[0213] Several prokaryote promoters have been used in Synechocystis to express heterologous genes including the tac, lac, and lambda phage promoters (Bryant (ed.), The Molecular Biology of Cyanobacteria, Kluwer Academic Publishers, (1994); Ferino and Chauvat, Gene 84:257-266 (1989), both of which are herein incorporated by reference in their entirety). Several bacterial origins of replication such as RSF1010 and ACYC are reported to replicate in Synechocystis (Mermet-Bouvier and Chauvat, Current Microbiology 28:145-148 (1994); Kuhlemeier et al., Mol. Gen. Genet. 184:249-254 (1981), both of which are herein incorporated by reference in their entirety).

[0214] Synechocystis has been used to study gene regulation by gene replacement through homologous recombination or by gene disruption using antibiotic resistance markers (Pakrasi et al., EMBO 7:325-332 (1988), herein incorporated by reference in its entirety). In such gene regulation studies, double reciprocal homologous regions of the host genome flanking the gene of interest recombine to stably integrate the gene of interest into the genome. The gene of interest can be expressed once that gene has been stably integrated into the genome. Biochemical analysis can be performed to study the effect of the replaced or deleted gene.

[0215] It is understood that the agents of the present invention may be employed in a Synechocystis system.

[0216] Exogenous genetic material may be transferred into a plant cell and the plant cell regenerated into a whole, fertile or sterile plant. Exogenous genetic material is any genetic material, whether naturally occurring or otherwise, from any source that is capable of being inserted into any organism. Such genetic material may be transferred into either monocotyledons and dicotyledons including but not limited to the crops, maize and soybean (See specifically, Chistou, Particle Bombardment for Genetic Engineering of Plants, pp 63-69 (maize), pp50-60 (soybean), Biotechnology Intelligence Unit. Academic Press, San Diego, Calif. (1996), the entirety of which is herein incorporated by reference and generally Chistou, Particle Bombardment for Genetic Engineering of Plants, Biotechnology Intelligence Unit. Academic Press, San Diego, Calif. (1996), the entirety of which is herein incorporated by reference).

[0217] Transfer of a nucleic acid that encodes for a protein can result in overexpression of that protein in a transformed cell or transgenic plant. One or more of the proteins or fragments thereof encoded by nucleic acid molecules of the present invention may be overexpressed in a transformed cell or transformed plant. Such overexpression may be the result of transient or stable transfer of the exogenous material.

[0218] Exogenous genetic material may be transferred into a plant cell by the use of a DNA vector or construct designed for such a purpose. Design of such a vector is generally within the skill of the art (See, Plant Molecular Biology: A Laboratory Manual eds. Clark, Springer, New York (1997), herein incorporated by reference in its entirety).

[0219] A construct or vector may include a plant promoter to express the protein or protein fragment of choice. A number of promoters which are active in plant cells have been described in the literature. These include the nopaline synthase (NOS) promoter (Ebert et al., Proc. Natl. Acad. Sci. (U.S.A.) 84:5745-5749 (1987), herein incorporated by reference in its entirety), the octopine synthase (OCS) promoter (which are carried on tumor-inducing plasmids of Agrobacterium tumefaciens), the caulimovirus promoters such as the cauliflower mosaic virus (CaMV) 19S promoter (Lawton et al., Plant Mol. Biol. 9:315-324 (1987), herein incorporated by reference in its entirety) and the CAMV 35S promoter (Odell et al., Nature 313:810-812 (1985), herein incorporated by reference in its entirety), the figwort mosaic virus 35S-promoter, the light-inducible promoter from the small subunit of ribulose-1,5-bis-phosphate carboxylase (ssRUBISCO), the Adh promoter (Walker et al., Proc. Natl. Acad. Sci. (U.S.A.) 84:6624-6628 (1987), herein incorporated by reference in its entirety), the sucrose synthase promoter (Yang et al., Proc. Natl. Acad. Sci. (U.S.A.) 87:4144-4148 (1990), herein incorporated by reference in its entirety), the R gene complex promoter (Chandler et al., The Plant Cell 1: 1175-1183 (1989), herein incorporated by reference in its entirety), and the chlorophyll a/b binding protein gene promoter, etc. These promoters have been used to create DNA constructs which have been expressed in plants; see, e.g., PCT publication WO 84/02913, herein incorporated by reference in its entirety.

[0220] Promoters which are known or are found to cause transcription of DNA in plant cells can be used in the present invention. Such promoters may be obtained from a variety of sources such as plants and plant viruses. It is preferred that the particular promoter selected should be capable of causing sufficient expression to result in the production of an effective amount of a protein to cause the desired phenotype. In addition to promoters which are known to cause transcription of DNA in plant cells, other promoters may be identified for use in the current invention by screening a plant cDNA library for genes which are selectively or preferably expressed in the target tissues or cells.

[0221] For the purpose of expression in source tissues of the plant, such as the leaf, seed, root or stem, it is preferred that the promoters utilized in the present invention have relatively high expression in these specific tissues. For this purpose, one may choose from a number of promoters for genes with tissue- or cell-specific or -enhanced expression. Examples of such promoters reported in the literature include the chloroplast glutamine synthetase GS2 promoter from pea (Edwards et al., Proc. Natl. Acad. Sci. (U.S.A.) 87:3459-3463 (1990), herein incorporated by reference in its entirety), the chloroplast fructose-1,6-biphosphatase (FBPase) promoter from wheat (Lloyd et al., Mol. Gen. Genet. 225:209-216 (1991), herein incorporated by reference in its entirety), the nuclear photosynthetic ST-LS1 promoter from potato (Stockhaus et al., EMBO J. 8:2445-2451 (1989), herein incorporated by reference in its entirety), the phenylalanine ammonia-lyase (PAL) promoter and the chalcone synthase (CHS) promoter from Arabidopsis thaliana. Also reported to be active in photosynthetically active tissues are the ribulose-1,5-bisphosphate carboxylase (RbcS) promoter from eastern larch (Larix laricina), the promoter for the cab gene, cab6, from pine (Yamamoto et al., Plant Cell Physiol. 35:773-778 (1994), herein incorporated by reference in its entirety), the promoter for the Cab-1 gene from wheat (Fejes et al., Plant Mol. Biol. 15:921-932 (1990), herein incorporated by reference in its entirety), the promoter for the CAB-1 gene from spinach (Lubberstedt et al., Plant Physiol. 104:997-1006 (1994), herein incorporated by reference in its entirety), the promoter for the cablR gene from rice (Luan et al., Plant Cell. 4:971-981 (1992), herein incorporated by reference in its entirety), the pyruvate, orthophosphate dikinase (PPDK) promoter from maize (Matsuoka et al., Proc. Natl. Acad. Sci. (U.S.A.) 90: 9586-9590 (1993), herein incorporated by reference in its entirety), the promoter for the tobacco Lhcb1*2 gene (Cerdan et al., Plant Mol. Biol. 33: 245-255. (1997), herein incorporated by reference in its entirety), the Arabidopsis thaliana SUC2 sucrose-H+symporter promoter (Truernit et al., Planta. 196: 564-570 (1995), herein incorporated by reference in its entirety), and the promoter for the thylacoid membrane proteins from spinach (psaD, psaF, psaE, PC, FNR, atpC, atpD, cab, rbcS). Other promoters for the chlorophyl a/b-binding proteins may also be utilized in the present invention, such as the promoters for LhcB gene and PsbP gene from white mustard (Sinapis alba; Kretsch et al., Plant Mol. Biol. 28: 219-229 (1995), herein incorporated by reference in its entirety).

[0222] For the purpose of expression in sink tissues of the plant, such as the tuber of the potato plant, the fruit of tomato, or the seed of maize, wheat, rice, and barley, it is preferred that the promoters utilized in the present invention have relatively high expression in these specific tissues. A number of promoters for genes with tuber-specific or -enhanced expression are known, including the class I patatin promoter (Bevan et al., EMBO J. 8: 1899-1906 (1986); Jefferson et al., Plant Mol. Biol. 14: 995-1006 (1990), both of which are herein incorporated by reference in their entirety), the promoter for the potato tuber ADPGPP genes, both the large and small subunits, the sucrose synthase promoter (Salanoubat and Belliard, Gene. 60: 47-56 (1987), Salanoubat and Belliard, Gene. 84: 181-185 (1989), both of which are incorporated by reference in their entirety), the promoter for the major tuber proteins including the 22 kd protein complexes and proteinase inhibitors (Hannapel, Plant Physiol. 101: 703-704 (1993), herein incorporated by reference in its entirety), the promoter for the granule bound starch synthase gene (GBSS) (Visser et al., Plant Mol. Biol. 17: 691-699 (1991), herein incorporated by reference in its entirety), and other class I and II patatins promoters (Koster-Topfer et al., Mol Gen Genet. 219: 390-396 (1989); Mignery et al., Gene. 62: 27-44 (1988), both of which are herein incorporated by reference in their entirety).

[0223] Other promoters can also be used to express a fructose 1,6 bisphosphate aldolase gene in specific tissues, such as seeds or fruits. The promoter for β-conglycinin (Chen et al., Dev. Genet. 10: 112-122 (1989), herein incorporated by reference in its entirety) or other seed-specific promoters such as the napin and phaseolin promoters, can be used. The zeins are a group of storage proteins found in maize endosperm. Genomic clones for zein genes have been isolated (Pedersen et al., Cell 29: 1015-1026 (1982), herein incorporated by reference in its entierty), and the promoters from these clones, including the 15 kD, 16 kD, 19 kD, 22 kD, 27 kD, and gamma genes, could also be used. Other promoters known to function, for example, in maize, include the promoters for the following genes: waxy, Brittle, Shrunken 2, Branching enzymes I and II, starch synthases, debranching enzymes, oleosins, glutelins, and sucrose synthases. A particularly preferred promoter for maize endosperm expression is the promoter for the glutelin gene from rice, more particularly the Osgt-1 promoter (Zheng et al., Mol. Cell Biol. 13: 5829-5842 (1993), herein incorporated by reference in its entirety). Examples of promoters suitable for expression in wheat include those promoters for the ADPglucose pyrophosphorylase (ADPGPP) subunits, the granule bound and other starch synthases, the branching and debranching enzymes, the embryogenesis-abundant proteins, the gliadins, and the glutenins. Examples of such promoters in rice include those promoters for the ADPGPP subunits, the granule bound and other starch synthases, the branching enzymes, the debranching enzymes, sucrose synthases, and the glutelins. A particularly preferred promoter is the promoter for rice glutelin, Osgt-1. Examples of such promoters for barley include those for the ADPGPP subunits, the granule bound and other starch synthases, the branching enzymes, the debranching enzymes, sucrose synthases, the hordeins, the embryo globulins, and the aleurone specific proteins.

[0224] Root specific promoters may also be used. An example of such a promoter is the promoter for the acid chitinase gene (Samac et al., Plant Mol. Biol. 25: 587-596 (1994), herein incorporated by reference in its entirety). Expression in root tissue could also be accomplished by utilizing the root specific subdomains of the CaMV35S promoter that have been identified (Lam et al., Proc. Natl. Acad. Sci. (U.S.A.) 86:7890-7894 (1989), herein incorporated by reference in its entirety). Other root cell specific promoters include those reported by Conkling et al. (Conkling et al., Plant Physiol. 93:1203-1211 (1990), herein incorporated by reference in its entirety).

[0225] Additional promoters that may be utilized are described, for example, in U.S. Pat. Nos. 5,378,619, 5,391,725, 5,428,147, 5,447,858, 5,608,144, 5,608,144, 5,614,399, 5,633,441, 5,633,435, and 4,633,436, all of which are herein incorporated in their entirety. In addition, a tissue specific enhancer may be used (Fromm et al., The Plant Cell 1:977-984 (1989), herein incorporated by reference in its entirety).

[0226] Constructs or vectors may also include, with the coding region of interest, a nucleic acid sequence that acts, in whole or in part, to terminate transcription of that region. For example, such sequences have been isolated including the Tr7 3′ sequence and the nos 3′ sequence (Ingelbrecht et al., The Plant Cell 1:671-680 (1989); Bevan et al., Nucleic Acids Res. 11:369-385 (1983), all of which are herein incorporated by reference in their entirety), or the like.

[0227] A vector or construct may also include regulatory elements. Examples of such include the Adh intron 1 (Callis et al., Genes and Develop. 1:1183-1200 (1987), herein incorporated by reference in its entirety), the sucrose synthase intron (Vasil et al., Plant Physiol. 91:1575-1579 (1989), herein incorporated by reference in its entirety) and the TMV omega element (Gallie et al., The Plant Cell 1:301-311 (1989), herein incorporated by reference in its entirety). These and other regulatory elements may be included when appropriate.

[0228] A vector or construct may also include a selectable marker. Selectable markers may also be used to select for plants or plant cells that contain the exogenous genetic material. Examples of such include, but are not limited to, a neo gene (Potrykus et al., Mol. Gen. Genet. 199:183-188 (1985), herein incorporated by reference in its entirety) which codes for kanamycin resistance and can be selected for using kanamycin, G418, etc.; a bar gene which codes for bialaphos resistance; a mutant EPSP synthase gene (Hinchee et al., Bio/Technology 6:915-922 (1988), herein incorporated by reference in its entirety) which encodes glyphosate resistance; a nitrilase gene which confers resistance to bromoxynil (Stalker et al., J. Biol. Chem. 263:6310-6314 (1988), herein incorporated by reference in its entirety); a mutant acetolactate synthase gene (ALS) which confers imidazolinone or sulphonylurea resistance (European Patent Application 154,204 (Sep. 11, 1985), herein incorporated by reference in its entirety); and a methotrexate resistant DHFR gene (Thillet et al., J. Biol. Chem. 263:12500-12508 (1988), herein incorporated by reference in its entirety).

[0229] A vector or construct may also include a transit peptide. Incorporation of a suitable chloroplast transit peptide may also be employed (European Patent Application Publication Number 0218571, herein incorporated by reference in its entirety). Translational enhancers may also be incorporated as part of the vector DNA. DNA constructs could contain one or more 5′ non-translated leader sequences which may serve to enhance expression of the gene products from the resulting mRNA transcripts. Such sequences may be derived from the promoter selected to express the gene or can be specifically modified to increase translation of the mRNA. Such regions may also be obtained from viral RNAs, from suitable eukaryotic genes, or from a synthetic gene sequence. For a review of optimizing expression of transgenes, see Koziel et al., Plant Mol. Biol. 32:393-405 (1996), herein incorporated by reference in its entirety.

[0230] A vector or construct may also include a screenable marker. Screenable markers may be used to monitor expression. Exemplary screenable markers include a β-glucuronidase or uidA gene (GUS) which encodes an enzyme for which various chromogenic substrates are known (Jefferson, Plant Mol. Biol, Rep. 5: 387-405 (1987); Jefferson et al., EMBO J. 6: 3901-3907 (1987), both of which are herein incorporated by reference in their entirety); an R-locus gene, which encodes a product that regulates the production of anthocyanin pigments (red color) in plant tissues ((Dellaporta et al., Stadler Symposium 11:263-282 (1988), herein incorporated by reference in its entirety); a β-lactamase gene (Sutcliffe et al., Proc. Natl. Acad. Sci. (U.S.A.) 75: 3737-3741 (1978), herein incorporated by reference in its entirety), a gene which encodes an enzyme for which various chromogenic substrates are known (e.g., PADAC, a chromogenic cephalosporin); a luciferase gene (Ow et al., Science 234: 856-859 (1986), herein incorporated by reference in its entirety) a xylE gene (Zukowsky et al., Proc. Natl. Acad. Sci. (U.S.A.) 80:1101-1105 (1983), herein incorporated by reference in its entirety) which encodes a catechol id diozygenase that can convert chromogenic catechols; an α-amylase gene (Ikatu et al., Bio/Technol. 8:241-242 (1990), herein incorporated by reference in its entirety); a tyrosinase gene (Katz et al., J. Gen. Microbiol. 129:2703-2714 (1983), herein incorporated by reference in its entirety) which encodes an enzyme capable of oxidizing tyrosine to DOPA and dopaquinone which in turn condenses to melanin; an α-galactosidase, which will turn a chromogenic α-galactose substrate.

[0231] Included within the terms “selectable or screenable marker genes” are also genes which encode a scriptable marker whose secretion can be detected as a means of identifying or selecting for transformed cells. Examples include markers which encode a secretable antigen that can be identified by antibody interaction, or even secretable enzymes which can be detected catalytically. Secretable proteins fall into a number of classes, including small, diffusible proteins detectable, e.g., by ELISA, small active enzymes detectable in extracellular solution (e.g., α-amylase, β-lactamase, phosphinothricin transferase), or proteins which are inserted or trapped in the cell wall (such as proteins which include a leader sequence such as that found in the expression unit of extension or tobacco PR-S). Other possible selectable and/or screenable marker genes will be apparent to those of skill in the art.

[0232] Methods and compositions for transforming a bacteria and other microorganisms are known in the art (see for example Sambrook et al., Molecular Cloning: A Laboratory Manual, Second Edition, Cold Spring Harbor Laboratory Press, Cold Spring Harbor, N.Y., (1989), the entirety of which is herein incorporated by reference).

[0233] There are many methods for introducing transforming nucleic acid molecules into plant cells. Suitable methods are believed to include virtually any method by which nucleic acid molecules may be introduced into a cell, such as by Agrobacterium infection or direct delivery of nucleic acid molecules such as, for example, by PEG-mediated transformation, by electroporation or by acceleration of DNA coated particles, etc. (Pottykus, Ann. Rev. Plant Physiol. Plant Mol. Biol. 42:205-225 (1991); Vasil, Plant Mol. Biol. 25: 925-937 (1994), both of which are herein incorporated by reference in their entirety). For example, electroporation has been used to transform maize protoplasts (Fromm et al., Nature 312:791-793 (1986), herein incorporated by reference in its entirety).

[0234] Other vector systems suitable for introducing transforming DNA into a host plant cell includes but is not limited to binary artificial chromosome (BIBAC) vectors (Hamilton et al., Gene 200:107-116, (1997), herein incorporated by reference in its entirety, and transfection with RNA viral vectors (Della-Cioppa et al., Ann. N.Y Acad. Sci. (1996), 792 (Engineering Plants for Commercial Products and Applications), 57-61, the entirety of which is herein incorporated by reference.

[0235] Technology for introduction of DNA into cells is well known to those of skill in the art. Four general methods for delivering a gene into cells have been described: (1) chemical methods (Graham and van der Eb, Virology, 54:536-539 (1973), the entirety of which is herein incorporated by reference); (2) physical methods such as microinjection (Capecchi, Cell 22:479-488 (1980), electroporation (Wong and Neumann, Biochem. Biophys. Res. Commun., 107:584-587 (1982); Fromm et al., Proc. Natl. Acad. Sci. USA, 82:5824-5828 (1985); U.S. Pat. No. 5,384,253; and the gene gun (Johnston and Tang, Methods Cell Biol. 43:353-365 (1994), all of which the entirety is herein incorporated by reference; (3) viral vectors (Clapp, Clin. Perinatol., 20:155-168 (1993); Lu et al., J. Exp. Med., 178:2089-2096 (1993); Eglitis and Anderson, Biotechniques, 6:608-614 (1988), all of which the entirety is herein incorporated by reference); and (4) receptor-mediated mechanisms (Curiel et al., Hum. Gen. Ther., 3:147-154 (1992); Wagner et al., Proc. Natl. Acad. Sci. USA, 89:6099-6103 (1992), all of which the entirety is herein incorporated by reference).

[0236] Acceleration methods that may be used include, for example, microprojectile bombardment and the like. One example of a method for delivering transforming nucleic acid molecules to plant cells is microprojectile bombardment. This method has been reviewed by Yang and Christou, eds., Particle Bombardment Technology for Gene Transfer, Oxford Press, Oxford, England (1994), the entirety of which is herein incorporated by reference). Non-biological particles (microprojectiles) that may be coated with nucleic acids and delivered into cells by a propelling force. Exemplary particles include those comprised of tungsten, gold, platinum, and the like.

[0237] A particular advantage of microprojectile bombardment, in addition to it being an effective means of reproducibly, and stably transforming monocotyledons, is that neither the isolation of protoplasts (Cristou et al., Plant Physiol. 87:671-674 (1988), herein incorporated by reference in its entirety) nor the susceptibility of Agrobacterium infection is required. An illustrative embodiment of a method for delivering DNA into maize cells by acceleration is a biolistics g-particle delivery system, which can be used to propel particles coated with DNA through a screen, such as a stainless steel or Nytex screen, onto a filter surface covered with corn cells cultured in suspension. Gordon-Kamm et al., describes the basic procedure for coating tungsten particles with DNA (Gordon-Kamm et al., Plant Cell 2: 603-618 (1990), herein incorporated by reference in its entirety). The screen disperses the tungsten nucleic acid particles so that they are not delivered to the recipient cells in large aggregates. A particle delivery system suitable for use with the present invention is the helium acceleration PDS-1000/He gun which is available from Bio-Rad Laboratories (Bio-Rad, Hercules, Calif.)(Sanford et al., Technique 3:3-16 (1991), herein incorporated by reference in its entirety).

[0238] For the bombardment, cells in suspension may be concentrated on filters. Filters containing the cells to be bombarded are positioned at an appropriate distance below the microprojectile stopping plate. If desired, one or more screens are also positioned between the gun and the cells to be bombarded.

[0239] Alternatively, immature embryos or other target cells may be arranged on solid culture medium. The cells to be bombarded are positioned at an appropriate distance below the macroprojectile stopping plate. If desired, one or more screens are also positioned between the acceleration device and the cells to be bombarded. Through the use of techniques set forth herein one may obtain up to 1000 or more foci of cells transiently expressing a marker gene. The number of cells in a focus which express the exogenous gene product 48 hours post-bombardment often range from one to ten and average one to three.

[0240] In bombardment transformation, one may optimize the prebombardment culturing conditions and the bombardment parameters to yield the maximum numbers of stable transformants. Both the physical and biological parameters for bombardment are important in this technology. Physical factors are those that involve manipulating the DNA/microprojectile precipitate or those that affect the flight and velocity of either the macro- or microprojectiles. Biological factors include all steps involved in manipulation of cells before and immediately after bombardment, the osmotic adjustment of target cells to help alleviate the trauma associated with bombardment, and also the nature of the transforming DNA, such as linearized DNA or intact supercoiled plasmids. It is believed that pre-bombardment manipulations are especially important for successful transformation of immature embryos. In another alternative embodiment, plastids can be stably transformed. Methods disclosed for plastid transformation in higher plants include the particle gun delivery of DNA containing a selectable marker and targeting of the DNA to the plastid genome through homologous recombination (Svab et al., Proc. Natl. Acad. Sci. (U.S.A.) 87:8526-8530 (1990); Svab and Maliga, Proc. Natl. Acad. Sci. (U.S.A.) 90:913-917 (1993); Staub and Maliga, EMBO J. 12:601-606 (1993); U.S. Pat. Nos. 5,451,513 and 5,545,818, all of which are herein incorporated by reference in their entirety).

[0241] Accordingly, it is contemplated that one may wish to adjust various aspects of the bombardment parameters in small scale studies to fully optimize the conditions. One may particularly wish to adjust physical parameters such as gap distance, flight distance, tissue distance, and helium pressure. One may also minimize the trauma reduction factors by modifying conditions which influence the physiological state of the recipient cells and which may therefore influence transformation and integration efficiencies. For example, the osmotic state, tissue hydration and the subculture stage or cell cycle of the recipient cells may be adjusted for optimum transformation. The execution of other routine adjustments will be known to those of skill in the art in light of the present disclosure.

[0242] Agrobacterium-mediated transfer is a widely applicable system for introducing genes into plant cells because the DNA can be introduced into whole plant tissues, thereby bypassing the need for regeneration of an intact plant from a protoplast. The use of Agrobacterium-mediated plant integrating vectors to introduce DNA into plant cells is well known in the art. See, for example the methods described (Fraley et al., Biotechnology 3:629-635 (1985); Rogers et al., Meth. In Enzymol, 153:253-277 (1987), both of which are herein incorporated by reference in their entirety. Further, the integration of the Ti-DNA is a relatively precise process resulting in few rearrangements. The region of DNA to be transferred is defined by the border sequences, and intervening DNA is usually inserted into the plant genome as described (Spielmann et al., Mol. Gen. Genet., 205:34 (1986), the entirety of which is herein incorporated by reference).

[0243] Modern Agrobacterium transformation vectors are capable of replication in E. coli as well as Agrobacterium, allowing for convenient manipulations as described (Klee et al., In: Plant DNA Infectious Agents, T. Hohn and J. Schell, eds., Springer-Verlag, New York, pp. 179-203 (1985), the entirety of which is herein incorporated by reference. Moreover, recent technological advances in vectors for Agrobacterium-mediated gene transfer have improved the arrangement of genes and restriction sites in the vectors to facilitate construction of vectors capable of expressing various polypeptide coding genes. The vectors described have convenient multi-linker regions flanked by a promoter and a polyadenylation site for direct expression of inserted polypeptide coding genes and are suitable for present purposes (Rogers et al., Meth. In Enzymol., 153:253-277 (1987), the entirety of which is herein incorporated by reference). In addition, Agrobacterium containing both armed and disarmed Ti genes can be used for the transformations. In those plant strains where Agrobacterium-mediated transformation is efficient, it is the method of choice because of the facile and defined nature of the gene transfer.

[0244] A transgenic plant formed using Agrobacterium transformation methods typically contains a single gene on one chromosome. Such transgenic plants can be referred to as being heterozygous for the added gene. More preferred is a transgenic plant that is homozygous for the added structural gene; i.e., a transgenic plant that contains two added genes, one gene at the same locus on each chromosome of a chromosome pair. A homozygous transgenic plant can be obtained by sexually mating (selfing) an independent segregant transgenic plant that contains a single added gene, germinating some of the seed produced and analyzing the resulting plants produced for the gene of interest.

[0245] It is also to be understood that two different transgenic plants can also be mated to produce offspring that contain two independently segregating added, exogenous genes. Selfing of appropriate progeny can produce plants that are homozygous for both added, exogenous genes that encode a polypeptide of interest. Back-crossing to a parental plant and out-crossing with a non-transgenic plant are also contemplated, as is vegetative propagation.

[0246] Transformation of plant protoplasts can be achieved using methods based on calcium phosphate precipitation, polyethylene glycol treatment, electroporation, and combinations of these treatments. See for example (Potrykas et al., Mol. Gen. Genet., 205: 193-200 (1986); Lorz et al., Mol. Gen. Genet., 199:178, (1985); Fromm et al., Nature, 319:791,(1986); Uchimiya et al., Mol. Gen. Genet.:204:204, (1986); Callis et al., Genes and Development, 1183,(1987); Marcotte et al., Nature, 335:454, (1988), all of which are herein incorporated by reference in their entirety).

[0247] Application of these systems to different plant strains depends upon the ability to regenerate that particular plant strain from protoplasts. Illustrative methods for the regeneration of cereals from protoplasts are described (Fujimura et al., Plant Tissue Culture Letters, 2:74,(1985); Toriyama et al., Theor Appl. Genet. 205:34. (1986); Yamada et al., Plant Cell Rep., 4:85, (1986); Abdullah et al., Biotechnology, 4:1087, (1986), all of which are herein incorporated by reference in their entirety).

[0248] To transform plant strains that cannot be successfully regenerated from protoplasts, other ways to introduce DNA into intact cells or tissues can be utilized. For example, regeneration of cereals from immature embryos or explants can be effected as described (Vasil, Biotechnology, 6:397,(1988), herein incorporated by reference in its entirety). In addition, “particle gun” or high-velocity microprojectile technology can be utilized (Vasil et al., Bio/Technology 10:667, (1992), herein incorporated by reference in its entirety).

[0249] Using the latter technology, DNA is carried through the cell wall and into the cytoplasm on the surface of small met al particles as described (Klein et al., Nature, 328:70, (1987); Klein et al., Proc. Natl. Acad. Sci. USA, 85:8502-8505, (1988); McCabe et al., Biotechnology, 6:923, (1988), all of which are herein incorporated by reference in their entirety). The met al particles penetrate through several layers of cells and thus allow the transformation of cells within tissue explants.

[0250] Other methods of cell transformation can also be used and include but are not limited to introduction of DNA into plants by direct DNA transfer into pollen (Hess et al., Intern Rev. Cytol., 107:367, (1987); Luo et al., Plant Mol Biol. Reporter, 6:165, (1988), all of which are herein incorporated by reference in their entirety), by direct injection of DNA into reproductive organs of a plant (Pena et al., Nature, 325:274, (1987), herein incorporated by reference in its entirety), or by direct injection of DNA into the cells of immature embryos followed by the rehydration of dessicated embryos (Neuhaus et al., Theor. Appl. Genet., 75:30, (1987), herein incorporated by reference in its entirety).

[0251] The regeneration, development, and cultivation of plants from single plant protoplast transformants or from various transformed explants is well known in the art (Weissbach and Weissbach, In: Methods for Plant Molecular Biology, (Eds.), Academic Press, Inc. San Diego, Calif., (1988), herein incorporated by reference in its entirety). This regeneration and growth process typically includes the steps of selection of transformed cells, culturing those individualized cells through the usual stages of embryonic development through the rooted plantlet stage. Transgenic embryos and seeds are similarly regenerated. The resulting transgenic rooted shoots are thereafter planted in an appropriate plant growth medium such as soil.

[0252] The development or regeneration of plants containing the foreign, exogenous gene that encodes a protein of interest is well known in the art. Preferably, the regenerated plants are self-pollinated to provide homozygous transgenic plants, as discussed before. Otherwise, pollen obtained from the regenerated plants is crossed to seed-grown plants of agronomically important lines. Conversely, pollen from plants of these important lines is used to pollinate regenerated plants. A transgenic plant of the present invention containing a desired polypeptide is cultivated using methods well known to one skilled in the art.

[0253] There are a variety of methods for the regeneration of plants from plant tissue. The particular method of regeneration will depend on the starting plant tissue and the particular plant species to be regenerated.

[0254] Methods for transforming dicots, primarily by use of Agrobacterium tumefaciens, and obtaining transgenic plants have been published for cotton (U.S. Pat. No. 5,004,863, U.S. Pat. No. 5,159,135, U.S. Pat. No. 5,518,908, all of which herein incorporated by reference in their entirety); soybean (U.S. Pat. No. 5,569,834, U.S. Pat. No. 5,416,011, McCabe et al., Biotechnology 6:923, (1988), Christou et al., Plant Physiol., 87:671-674 (1988), all of which are herein incorporated by reference in their entirety); Brassica (U.S. Pat. No. 5,463,174, herein incorporated by reference in its entirety); peanut (Cheng et al., Plant Cell Rep. 15: 653-657 (1996); McKently et al., Plant Cell Rep. 14:699-703 (1995), all of which are herein incorporated by reference in their entirety); papaya (Yang et al., (1996), herein incorporated by reference in its entirety); pea (Grant et al., Plant Cell Rep. 15:254-258, (1995), herein incorporated by reference in its entirety).

[0255] Transformation of monocotyledons using electroporation, particle bombardment, and Agrobacterium have also been reported. Transformation and plant regeneration have been achieved in asparagus (Bytebier et al., Proc. Natl. Acad. Sci. USA 84:5345, (1987), herein incorporated by reference in its entirety); barley (Wan and Lemaux, Plant Physiol 104:37, (1994), herein incorporated by reference in its entirety); maize (Rhodes et al., Science 240: 204, (1988), Gordon-Kamm et al., Plant Cell, 2:603, (1990), Fromm et al., Bio/Technology 8:833, (1990), Koziel et al., Bio/Technology 11: 194, (1993), Armstrong et al., Crop Science 35:550-557, (1995), all of which are herein incorporated by reference in their entirety); oat (Somers et al., Bio/Technology, 10: 1589, (1992), herein incorporated by reference in its entirety); orchardgrass (Horn et al.,Plant Cell Rep. 7:469, (1988), herein incorporated by reference in its entirety); rice (Toriyama et al., Theor Appl. Genet. 205:34, (1986); Park et al., Plant Mol. Biol.,32: 1135-1148, (1996); Abedimia et al., Aust. J. Plant Physiol.24: 133-141, (1997); Zhang and Wu, Theor. Appl. Genet. 76:835, (1988); Zhang et al. Plant Cell Rep. 7:379, (1988); Battraw and Hall, Plant Sci. 86:191-202, (1992); Christou et al., Bio/Technology 9:957, (1991), all of which are herein incorporated by reference in their entirety); sugarcane (Bower and Birch, Plant J. 2:409, (1992), herein incorporated by reference in its entirety); tall fescue (Wang et al., Bio/Technology 10:691, (1992), herein incorporated by reference in its entirety), and wheat (Vasil et al., Bio/Technology 10:667, (1992); U.S. Pat. No. 5,631,152, both of which are herein incorporated by reference in their entirety).

[0256] Assays for gene expression based on the transient expression of cloned nucleic acid constructs have been developed by introducing the nucleic acid molecules into plant cells by polyethylene glycol treatment, electroporation, or particle bombardment (Marcotte, et al., Nature, 335: 454-457 (1988); Marcotte, et al., Plant Cell, 1: 523-532 (1989); McCarty, et al., Cell 66: 895-905 (1991); Hattori, et al., Genes Dev. 6: 609-618 (1992); Goff, et al., EMBO J. 9: 2517-2522 (1990), all of which are herein incorporated by reference in their entirety). Transient expression systems may be used to functionally dissect gene constructs (See generally, Mailga et al., Methods in Plant Molecular Biology, Cold Spring Harbor Press (1995)).

[0257] Any of the nucleic acid molecules of the present invention may be introduced into a plant cell in a permanent or transient manner in combination with other genetic elements such as vectors, promoters enhancers etc. Further any of the nucleic acid molecules of the present invention may be introduced into a plant cell in a manner that allows for over expression of the protein or fragment thereof encoded by the nucleic acid molecule.

[0258] Cosuppression is the reduction in expression levels, usually at the level of RNA, of a particular endogenous gene or gene family by the expression of a homologous sense construct that is capable of transcribing mRNA of the same strandedness as the transcript of the endogenous gene (Napoli et al., Plant Cell 2: 279-289 (1990); van der Krol et al., Plant Cell 2: 291-299 (1990), both of which are herein incorporated by reference in their entirety). Cosuppression may result from stable transformation with a single copy nucleic acid molecule that is homologous to a nucleic acid sequence found with the cell (Prolls and Meyer, Plant J. 2:465-475 (1992), herein incorporated by reference in its entirety) or with multiple copies of a nucleic acid molecule that is homologous to a nucleic acid sequence found with the cell (Mittlesten et al., Mol. Gen. Genet. 244: 325-330 (1994), herein incorporated by reference in its entirety). Genes, even though different, linked to homologous promoters may result in the cosuppression of the linked genes (Vaucheret, CR. Acad. Sci. III 316: 1471-1483 (1993), herein incorporated by reference in its entirety).

[0259] This technique has, for example been applied to generate white flowers from red petunia and tomatoes that do not ripen on the vine. Up to 50% of petunia transformants that contained a sense copy of the chalcone synthase (CHS) gene produced white flowers or floral sectors; this was as a result of the post-transcriptional loss of mRNA encoding CHS (Flavell, Proc. Natl. Acad. Sci. (U.S.A.) 91:3490-3496 (1994)), herein incorporated by reference in its entirety). Cosuppression may require the coordinate transcription of the transgene and the endogenous gene, and can be reset by a developmental control mechanism (Jorgensen, Trends Biotechnol, 8:340-344 (1990); Meins and Kunz, In: Gene Inactivation and Homologous Recombination in Plants (Paszkowski, J., ed.), pp. 335-348. Kluwer Academic, Netherlands (1994), both of which are herein incorporated by reference in their entirety).

[0260] It is understood that one or more of the nucleic acids of the present invention including those comprising SEQ ID NO: 1 through SEQ ID NO: 17880 or complement thereof or fragments of either or other nucleic acid molecules of the present invention may be introduced into a plant cell and transcribed using an appropriate promoter with such transcription resulting in the co-suppression of an endogenous protein.

[0261] Antisense approaches are a way of preventing or reducing gene function by targeting the genetic material (Mol et al., FEBS Lett. 268: 427-430 (1990), herein incorporated by reference in its entirety). The objective of the antisense approach is to use a sequence complementary to the target gene to block its expression and create a mutant cell line or organism in which the level of a single chosen protein is selectively reduced or abolished. Antisense techniques have several advantages over other ‘reverse genetic’ approaches. The site of inactivation and its developmental effect can be manipulated by the choice of promoter for antisense genes or by the timing of external application or microinjection. Antisense can manipulate its specificity by selecting either unique regions of the target gene or regions where it shares homology to other related genes (Hiatt et al., In Genetic Engineering, Setlow (ed.), Vol. 11, New York: Plenum 49-63 (1989), the entirety of which is herein incorporated by reference).

[0262] The principle of regulation by antisense RNA is that RNA that is complementary to the target mRNA is introduced into cells, resulting in specific RNA:RNA duplexes being formed by base pairing between the antisense substrate and the target mRNA (Green et al., Annu. Rev. Biochem. 55: 569-597 (1986), herein incorporated by reference in its entirety). Under one embodiment, the process involves the introduction and expression of an antisense gene sequence. Such a sequence is one in which part or all of the normal gene sequences are placed under a promoter in inverted orientation so that the ‘wrong’ or complementary strand is transcribed into a noncoding antisense RNA that hybridizes with the target mRNA and interferes with its expression (Takayama and Inouye, Crit. Rev. Biochem. Mol. Biol. 25: 155-184 (1990), herein incorporated by reference in its entirety). An antisense vector is constructed by standard procedures and introduced into cells by transformation, transfection, electroporation, nmicroinjection, or by infection, etc. The type of transformation and choice of vector will determine whether expression is transient or stable. The promoter used for the antisense gene may influence the level, timing, tissue, specificity, or inducibility of the antisense inhibition.

[0263] It is understood that protein synthesis activity in a plant cell may be reduced or depressed by growing a transformed plant cell containing a nucleic acid molecule whose non-transcribed strand encodes a protein or fragment thereof.

[0264] Antibodies have been expressed in plants (Hiatt et al., Nature 342:76-78 (1989); Conrad and Fielder, Plant Mol. Biol. 26: 1023-1030 (1994), both of which are herein incorporated by reference in their entirety). Cytoplamic expression of a scFv (single-chain Fv antibodies) has been reported to delay infection by artichoke mottled crinkle virus. Transgenic plants that express antibodies directed against endogenous proteins may exhibit a physiological effect (Philips et al., EMBO J. 16: 4489-4496 (1997); Marion-Poll, Trends in Plant Science 2: 447-448 (1997), both of which are herein incorporated by reference in their entirety). For example, expressed anti-abscisic antibodies reportedly result in a general perturbation of seed development (Philips et al., EMBO J. 16: 4489-4496 (1997)). Antibodies that are catalytic may also be expressed in plants (abzymes). The principle behind abzymes is that since antibodies may be raised against many molecules, this recognition ability can be directed toward generating antibodies that bind transition states to force a chemical reaction forward (Persidas, Nature Biotechnology 15:1313-1315 (1997); Baca et al., Ann. Rev. Biophys. Biomol. Struct. 26:461-493 (1997), both of which are herein incorporated by reference in their entirety). The catalytic abilities of abzymes may be enhanced by site directed mutagensis. Examples of abzymes are, for example, set forth in U.S. Pat. No. 5,658,753; U.S. Pat. No. 5,632,990; U.S. Pat. No. 5,631,137; U.S. Pat. No. 5,602,015; U.S. Pat. No. 5,559,538; U.S. Pat. No. 5,576,174; U.S. Pat. No. 5,500,358; U.S. Pat. No. 5,318,897; U.S. Pat. No. 5,298,409; U.S. Pat. No. 5,258,289 and U.S. Pat. No. 5,194,585, all of which are herein incorporated in their entirety.

[0265] It is understood that any of the antibodies of the present invention may be expressed in plants and that such expression can result in a physiological effect. It is also understood that any of the expressed antibodies may be catalytic.

[0266] In addition to the above discussed procedures, practitioners are familiar with the standard resource materials which describe specific conditions and procedures for the construction, manipulation and isolation of macromolecules (e.g., DNA molecules, plasmids, etc.), generation of recombinant organisms and the screening and isolating of clones, (see for example, Sambrook et al., Molecular Cloning: A Laboratory Manual, Cold Spring Harbor Press (1989); Mailga et al., Methods in Plant Molecular Biology, Cold Spring Harbor Press (1995); Birren et al., Genome Analysis: Analyzing DNA, 1, Cold Spring Harbor, N.Y., all of which are herein incorporated by reference in their entirety).

[0267] The nucleotide sequence provided in SEQ ID NO: 1, through SEQ ID NO: 17880 or fragment thereof, or complement thereof, or a nucleotide sequence at least 90% identical, preferably 95%, identical even more preferably 99% or 100% identical to the sequence provided in SEQ ID NO: 1 through SEQ ID NO: 17880 or fragment thereof, or complement thereof, can be “provided” in a variety of mediums to facilitate use fragment thereof. Such a medium can also provide a subset thereof in a form that allows a skilled artisan to examine the sequences.

[0268] In one application of this embodiment, a nucleotide sequence of the present invention can be recorded on computer readable media. As used herein, “computer readable media” refers to any medium that can be read and accessed directly by a computer. Such media include, but are not limited to: magnetic storage media, such as floppy discs, hard disc, storage medium, and magnetic tape: optical storage media such as CD-ROM; electrical storage media such as RAM and ROM; and hybrids of these categories such as magnetic/optical storage media. A skilled artisan can readily appreciate how any of the presently known computer readable mediums can be used to create a manufacture comprising computer readable medium having recorded thereon a nucleotide sequence of the present invention.

[0269] As used herein, “recorded” refers to a process for storing information on computer readable medium. A skilled artisan can readily adopt any of the presently known methods for recording information on computer readable medium to generate media comprising the nucleotide sequence information of the present invention. A variety of data storage structures are available to a skilled artisan for creating a computer readable medium having recorded thereon a nucleotide sequence of the present invention. The choice of the data storage structure will generally be based on the means chosen to access the stored information. In addition, a variety of data processor programs and formats can be used to store the nucleotide sequence information of the present invention on computer readable medium. The sequence information can be represented in a word processing text file, formatted in commercially-available software such as WordPerfect and Microsoft Word, or represented in the form of an ASCII file, stored in a database application, such as DB2, Sybase, Oracle, or the like. A skilled artisan can readily adapt any number of data processor structuring formats (e.g. text file or database) in order to obtain computer readable medium having recorded thereon the nucleotide sequence information of the present invention.

[0270] By providing one or more of nucleotide sequences of the present invention, a skilled artisan can routinely access the sequence information for a variety of purposes. Computer software is publicly available which allows a skilled artisan to access sequence information provided in a computer readable medium. The examples which follow demonstrate how software which implements the BLAST (Altschul et al., J. Mol. Biol. 215:403-410 (1990)) and BLAZE (Brutlag et al., Comp. Chem. 17:203-207 (1993), the entirety of which is herein incorporated by reference) search algorithms on a Sybase system can be used to identify open reading frames (ORFs) within the genome that contain homology to ORFs or proteins from other organisms. Such ORFs are protein-encoding fragments within the sequences of the present invention and are useful in producing commercially important proteins such as enzymes used in amino acid biosynthesis, metabolism, transcription, translation, RNA processing, nucleic acid and a protein degradation, protein modification, and DNA replication, restriction, modification, recombination, and repair.

[0271] The present invention further provides systems, particularly computer-based systems, which contain the sequence information described herein. Such systems are designed to identify commercially important fragments of the nucleic acid molecule of the present invention. As used herein, “a computer-based system” refers to the hardware means, software means, and data storage means used to analyze the nucleotide sequence information of the present invention. The minimum hardware means of the computer-based systems of the present invention comprises a central processing unit (CPU), input means, output means, and data storage means. A skilled artisan can readily appreciate that any one of the currently available computer-based system are suitable for use in the present invention.

[0272] As indicated above, the computer-based systems of the present invention comprise a data storage means having stored therein a nucleotide sequence of the present invention and the necessary hardware means and software means for supporting and implementing a search means. As used herein, “data storage means” refers to memory that can store nucleotide sequence information of the present invention, or a memory access means which can access manufactures having recorded thereon the nucleotide sequence information of the present invention. As used herein, “search means” refers to one or more programs which are implemented on the computer-based system to compare a target sequence or target structural motif with the sequence information stored within the data storage means. Search means are used to identify fragments or regions of the sequence of the present invention that match a particular target sequence or target motif. A variety of known algorithms are disclosed publicly and a variety of commercially available software for conducting search means are available and can be used in the computer-based systems of the present invention. Examples of such software include, but are not limited to, MacPattern (EMBL), BLASTIN and BLASTIX (NCBIA). One of the available algorithms or implementing software packages for conducting homology searches can be adapted for use in the present computer-based systems.

[0273] The most preferred sequence length of a target sequence is from about 10 to 100 amino acids or from about 30 to 300 nucleotide residues. However, it is well recognized that during searches for conmmercially important fragments of the nucleic acid molecules of the present invention, such as sequence fragments involved in gene expression and protein processing, may be of shorter length.

[0274] As used herein, “a target structural motif,” or “target motif,” refers to any rationally selected sequence or combination of sequences in which the sequences or sequence(s) are chosen based on a three-dimensional configuration which is formed upon the folding of the target motif. There are a variety of target motifs known in the art. Protein target motifs include, but are not limited to, enzymatic active sites and signal sequences. Nucleic acid target motifs include, but are not limited to, promoter sequences, cis elements, hairpin structures and inducible expression elements (protein binding sequences).

[0275] Thus, the present invention further provides an input means for receiving a target sequence, a data storage means for storing the target sequences of the present invention sequence identified using a search means as described above, and an output means for outputting the identified homologous sequences. A variety of structural formats for the input and output means can be used to input and output information in the computer-based systems of the present invention. A preferred format for an output means ranks fragments of the sequence of the present invention by varying degrees of homology to the target sequence or target motif. Such presentation provides a skilled artisan with a ranking of sequences which contain various amounts of the target sequence or target motif and identifies the degree of homology contained in the identified fragment.

[0276] A variety of comparing means can be used to compare a target sequence or target motif with the data storage means to identify sequence fragments sequence of the present invention. For example, implementing software which implement the BLAST and BLAZE algorithms (Altschul et al., J. Mol. Biol. 215:403-410 (1990)) can be used to identify open frames within the nucleic acid molecules of the present invention. A skilled artisan can readily recognize that any one of the publicly available homology search programs can be used as the search means for the computer-based systems of the present invention. Having now generally described the invention, the same will be more readily understood through reference to the following examples which are provided by way of illustration, and are not intended to be limiting of the present invention, unless specified.

### EXAMPLE 1

[0277] The LIB3825 cDNA library is generated from primed seeds. The Gossypium hirsutum variety DP50B is used for collection. The seeds are subjected to Solid Matrix Priming, a proprietary process that enhances the germination and cold vigor of cotton seeds. The primed seeds are then dried down to its original moisture and stored at 4° C. After storage at 4° C., the primed seeds are hydrated at 25° C. for about 2.5 hours. A cut is made at the broad side of the hull and the seed is squeezed out directly into a test tube immersed in liquid nitrogen and stored at −80° C. until total RNA preparation. The RNA is prepared from the stored tissue and the cDNA library is constructed as described in Example 2.

[0278] The LIB3826 cDNA library is generated from non-primed seeds. The Gossypium hirsutum variety DP50B is used for collection. The non-primed seed are hydrated at 25° C. for about 2.5 hours. A cut is made at the broad side of the hull and the seed is squeezed out directly into a test tube immersed in liquid nitrogen and stored at −80° C. until total RNA preparation. The RNA is prepared from the stored tissue and the cDNA library is constructed as described in Example 2.

[0279] The LIB3827 cDNA library is generated from mature seeds. The Gossypium hirsutum variety Coker 312 Boswell 96 Field is used for collection. The mature seeds are frozen in liquid nitrogen and stored at −80° C. until total RNA preparation. The RNA is prepared from the stored tissue and the cDNA library is constructed as described in Example 2.

[0280] The LIB3828 cDNA library is generated from androecium tissue harvested from cotton plants. The Gossypium hirsutum variety Nucotton33B is used for collection. Seeds are planted in trays containing Metromix 350 potting soil premixed with fertilizers. Plants are grown in a greenhouse in 16 hr day/8 hr night cycles with an average relative humidity of ca. 50%. Daytime and night time temperature are 90° F. and 74° F. respectively. Daytime light levels are measured at 600-1000 mEinsteins/m². Plants are watered daily in the morning and as needed in the afternoon. Plants receive 1 or 2 applications of Pix to control excessive growth. ⅓ grown squares (˜0.4 cm floral buds) are harvested from the plants and dissected to separate androecium tissue from other tissues. The harvested androecium tissue is immediately frozen in liquid nitrogen and then stored at −80° C. until total RNA preparation. The RNA is prepared from the stored tissue and the cDNA library is constructed as described in Example 2.

[0281] The LIB3829 cDNA library is generated from gynoecium tissue harvested from cotton plants. The Gossypium hirsutum variety Nucotton33B is used for collection. Seeds are planted in trays containing Metromix 350 potting soil premixed with fertilizers. Plants are grown in a greenhouse in 16 hr day/8 hr night cycles with an average relative humidity of ca. 50%. Daytime and night time temperature are 90° F. and 74° F. respectively. Daytime light levels are measured at 600-1000 mEinsteins/m². Plants are watered daily in the morning and as needed in the afternoon. Plants receive 1 or 2 applications of Pix to control excessive growth. ⅓ grown squares (˜0.4 cm floral buds) are harvested from the plants and dissected to separate gynoecium tissue from other tissues. The harvested gynoecium tissue is immediately frozen in liquid nitrogen and then stored at −80° C. until total RNA preparation. The RNA is prepared from the stored tissue and the cDNA library is constructed as described in Example 2.

[0282] The LIB3830 cDNA library is generated from developing fibers collected from cotton plants. The Gossypium hirsutum variety Nucotton33B is used for collection. Seeds are planted in trays containing Metromix 350 potting soil premixed with fertilizers. Plants are grown in a greenhouse in 16 hr day/8 hr night cycles with an average relative humidity of ca. 50%. Daytime and night time temperature are 90° F. and 74° F. respectively. Daytime light levels are measured at 600-1000 mEinsteins/m². Plants are watered daily in the morning and as needed in the afternoon. Plants receive 1 or 2 applications of Pix to control excessive growth. Bolls 23-28 dpa (days post anthesis) are removed from the plant and dissected to separate fibers from other tissues. This sample contains the fibers and may also contain unfertilized ovules. The harvested tissue is immediately frozen in liquid nitrogen and then stored at −80° C. until total RNA preparation. The RNA is prepared from the stored tissue and the cDNA library is constructed as described in Example 2.

[0283] The LIB3831 cDNA library is generated from carpel walls and septa collected from cotton plants. The Gossypium hirsutum variety Nucotton33B is used for collection. Seeds are planted in trays containing Metrornix 350 potting soil premixed with fertilizers. Plants are grown in a greenhouse in 16 hr day/8 hr night cycles with an average relative humidity of ca. 50%. Daytime and night time temperature are 90° F. and 74° F. respectively. Daytime light levels are measured at 600-1000 mEinsteins/m². Plants are watered daily in the morning and as needed in the afternoon. Plants receive 1 or 2 applications of Pix to control excessive growth. Bolls 1-10 dpa (days post anthesis) are removed from the plant and dissected to separate carpel walls and septa from other tissues. The harvested tissue is immediately frozen in liquid nitrogen and then stored at −80° C. until total RNA preparation. The RNA is prepared from the stored tissue and the cDNA library is constructed as described in Example 2.

### EXAMPLE 2

[0284] For RNA preparation, the stored cotton tissue is grounded thoroughly in liquid nitrogen and then incubated with a high SDS solution (about 2.5% SDS by weight, 0.1 M Tris-HCl (pH 7.5), 2.5 M sodium perchlorate, 0.1% b-mercaptoethanol by volume) and insoluble PVPP (about 8.5% by weight) for about 30 minutes at the room temperature. Nucleic acids are then precipitated after filtration. The total RNA is isolated from the precipitate using Trizol reagent from Life Technologies (Gibco BRL, Life Technologies, Gaithersburg, Md. U.S.A.), essentially as recommended by the manufacturer. Poly A+RNA (mRNA) is purified using magnetic oligo dT beads essentially as recommended by the manufacturer (Dynabeads, Dynal Corporation, Lake Success, New York U.S.A.).

[0285] Construction of plant cDNA libraries is well-known in the art and a number of cloning strategies exist. A number of cDNA library construction kits are commercially available. The Superscripts Plasmid System for cDNA synthesis and Plasmid Cloning (Gibco BRL, Life Technologies, Gaithersburg, Md. U.S.A.) is used, following the conditions suggested by the manufacturer.

### EXAMPLE 3

[0286] The cDNA libraries are plated on LB agar containing the appropriate antibiotics for selection and incubated at 37° for a sufficient time to allow the growth of individual colonies. Single colonies are individually placed in each well of a 96-well microtiter plates containing LB liquid including the selective antibiotics. The plates are incubated overnight at approximately 37° C. with gentle shaking to promote growth of the cultures. The plasmid DNA is isolated from each clone using Qiaprep plasmid isolation kits, using the conditions recommended by the manufacturer (Qiagen Inc., Santa Clara, Calif. U.S.A.).

[0287] The template plasmid DNA clones are used for subsequent sequencing. For sequencing the cDNA libraries LIB3825, LIB3826, LIB3827, LIB3828, LIB3829, LIB3830, and LIB3831, a commercially available sequencing kit, such as the ABI PRISM dRhodamine Terminator Cycle Sequencing Ready Reaction Kit with AmpliTaq® DNA Polymerase, FS, is used under the conditions recommended by the manufacturer (PE Applied Biosystems, Foster City, Calif.). The ESTs of the present invention are generated by sequencing initiated from the 5′ end of each cDNA clone.

[0288] A number of sequencing techniques are known in the art, including fluorescence-based sequencing methodologies. These methods have the detection, automation and instrumentation capability necessary for the analysis of large volumes of sequence data. Currently, the 377 DNA Sequencer (Perkin-Elmer Corp., Applied Biosystems Div., Foster City, Calif.) allows the most rapid electrophoresis and data collection. With these types of automated systems, fluorescent dye-labeled sequence reaction products are detected and data entered directly into the computer, producing a chromatogram that is subsequently viewed, stored, and analyzed using the corresponding software programs. These methods are known to those of skill in the art and have been described and reviewed (Birren et al., Genome Analysis: Analyzing DNA, 1, Cold Spring Harbor, N.Y., the entirety of which is herein incorporated by reference).

We claim:

1. An isolated nucleic acid molecule that encodes a plant protein or fragment thereof comprising a nucleic acid sequence selected from the group consisting of SEQ ID NO: 1 through SEQ ID NO: 17880.

2. The isolated nucleic acid molecule according to claim 1, wherein said plant protein is a cotton protein.

3. A substantially purified cotton protein or fragment thereof, wherein said cotton protein is encoded by a nucleic acid molecule that comprises a nucleic acid sequence selected from the group consisting of SEQ ID NO: 1 through SEQ ID NO: 17880.

4. A transformed plant having a nucleic acid molecule which comprises:
(a) an exogenous promoter region which functions in a plant cell to cause the production of a mRNA molecule;
(b) a structural nucleic acid molecule comprising a nucleic acid sequence selected from the group consisting of SEQ ID NO: 1 through SEQ ID NO: 17880 or complements thereof;
(c) a 3′ non-translated sequence that functions in said plant cell to cause termination of transcription and addition of polyadenylated ribonucleotides to a 3′ end of said mRNA molecule.

5. The transformed plant according to claim 3, wherein said structural nucleic acid molecule is a complement of any of the nucleic acid sequences of SEQ ID NO: 1 through SEQ ID NO: 17880.

6. The transformed plant according to claim 4, wherein said plant is soybean, wheat, cotton or maize.

7. The transformed plant according to claim 4, wherein said plant is maize.

8. The transformed plant according to claim 4, wherein said plant is soybean.

9. The transformed plant according to claim 4, wherein said plant is wheat.

10. The transformed plant according to claim 4, wherein said plant is cotton.

The application's sequence listing, which the Patent Office published only in electronic form, follows.

SEQUENCE LISTING (17880 sequences)

SEQ ID NO: 1 - DNA, 574 bp, Gossypium hirsutum
  Clone ID: LIB3825-002-Q1-N6-A11
ttttttttttttttttttttttttttttttttttttttttttttttttttttttttttttttttattttttttaaatttttattttgttttatattaaaaaataaaaaaaaaaaaaaaaagaaaaaaaaaaaaaaaaaaaaaaaaaaaaaaaaaaaaaaaaaaaaaaaaaattccgtcgttaaaaaaaaaaaaaaaaaaaaaaaaaaaaaaaaaaaaaccccccccaaaaaaaaaaagaaaaaaaaaaaaaaaaaaaaaaaacacaaaaaaaaaaaaaagaaccgtaaaagcgcctcacaaaaccaaaggaataaaaaaaagaccagaacttaaaaaaaagacatggacaagaaaaacaggaacacctaaaaaaaaaagagccccaaaaagacgaaaaaaatggggaaagaaatggattacaaaacgggcggaacacaaaattgtccggacgcttggaaggacccgagaatcgcggccggaacccggaagcgtaccagcttgccaagaagggagtccaaaaagaaattggccctaggcttggcaaaaggggggaaaaggggaaaaacgttgtcc

SEQ ID NO: 2 - DNA, 357 bp, Gossypium hirsutum
  Clone ID: LIB3825-002-Q1-N6-A3
cctacaagagataaattttttaagttcaagtttttgggcgggtttaggttacaaccccaatttgtttccatgggtcatttttaaagggttacaacgggaatttttactcatttcacaacaccacaattaattttttcctttttttttccggccccctggaactcaataagtaatcaaaaaactccatgggggtttttaacactaaatttgtcacatgagcttcaacctcaaatagctttttttttttggcccttttttttttactttaaatcagcttcatttttttttaggcagccccctttttggatgttacagagttgacaattgtagcaaattccggccccttcaaggaagccc

SEQ ID NO: 3 - DNA, 524 bp, Gossypium hirsutum
  Clone ID: LIB3825-002-Q1-N6-A4
aatgattattgatatatttatagtagaagatgaagagctatagattcgaaatggaactgctaggctgttttgagctggcttcgacaccgtcagtcggtacaccttgattagcccaagtagagatgttggtagtggcaatcgcgaatggaccggggaaaaacatgggagtgagccccccactttcgacgttaaaatctgccgacaaaaaaaatcccttttcgactcctttgcacatttgatctactttggctgcggtcgttttttgcgccttcttgtattctgcaaccgccaatgctttcctcacgacttctttactgtgccactgggcgtcttctagttcttccttatccacgtttatttcaagagatttagcgtatgcaaagaacccgaccatcaactggcatggtatgctactcggaccaaccggccatggctgagaactatgataaacaacttctccgacttcaataccggcctcttcatatgtttctctcctcactgcttcttctaagctttcccctggc

SEQ ID NO: 4 - DNA, 588 bp, Gossypium hirsutum
  Clone ID: LIB3825-002-Q1-N6-A5
atgcttaaactcagcgggtaatcccgcctgacctggggtcgcgatgcgagcaccgtccttgcgatgccgaaagggttcaagggtctcgatcgacggacgcgcacgactccgaacgaggttgcttgcagcattaccaccgatcgtcgcgacgatgatgtcgcctaggactcgaatttaggccaaccgctggctgtgagcgcaccccaccccaatttccgcccgcggtccaaccgaggctaaaaaactcatggttggatgggggcgacgatgcgtgacacccaggcagacgtgccctcggcctaatggcttggggcgcaacttgcgttcaaagactcgatggttcacgggattctgcaattcacaccaagtatcgcatttcgctacgttcttcatcgatgcgagagccgagatatccgttgccgagagtcgttctgtatattttgcgacaagagaacaacatcactgaagcatcgacaccgcgaacggtgcggcgacagaagacgtgccccttctttcgtttcgattccttggcgcgattcgcgccgggggtttgttcgctttgcctcgaagagttgatcccggcatcta

SEQ ID NO: 5 - DNA, 531 bp, Gossypium hirsutum
  unsure (1)..(531): unsure at all n locations; Clone ID: LIB3825-002-Q1-N6-A6
ggaataattgaagcagggtatcattattgcactcaaatctacatacctgtgtcttaaacaactagtgtttcatttactatatgtttacattgaagcaaaattgaaaaggccgtgaccattctttcaagtttcatccatcccatcacttacctantagcatctgcttcgaattaatttgatgtatttcaaggatcccacgaaggtcctccatcgaacatcttcagcaaaaaaacagtctccttctctgtccagataagtgagtttaaagctcttttgcccattctcatcagatatatcaaacattctcatcagggtggttgtgagcgattcaaaggagtggtgaagactaatgtcaattttcctggcaattgcatttccttccatctttaccttcacgtacgttgaacttgaagccctaccaccacagctattctccaccgccgcccttacattggctacgcggngccgcacctttttcctccatgctttcactggtggccaccccactaaaccctctccatcattcttgaa

SEQ ID NO: 6 - DNA, 582 bp, Gossypium hirsutum
  Clone ID: LIB3825-002-Q1-N6-A7
attaattaggaccataagcgtaaaacttatagtatatgagactttatttcagttatggcacacagatcaaaaggatcaacaataagtttatgcttccgaaacaactagatgatggcctttctacatttcagtcctttactcatcctccgcaactccatgtctaatttttttgtctcacattgaggcgagatgctaacttctgacccactgcctatcagcctgagaccagtatgagatccatatgctagcgaatttcatgagtcacacgtggatcagacaaggcatcaacccagcggcagatgaatcgttcttgcctgtctgctgcccaggaccggtatctctctccgggctgtttgaagttgttctccttctcaatgatgcacttctctcgccttccagtgcaaacagcaggtgggatagggaacatctctgcatgacgaacaggatcgtaccttgaagggaagtaatttatctcctcatccctgtgcatgaaattcataaaaccttcgtggtgattgttgtgatgagcacacttgggagcattggctgggagttgcagatagtttggcccaagtctgtgcc

SEQ ID NO: 7 - DNA, 528 bp, Gossypium hirsutum
  Clone ID: LIB3825-002-Q1-N6-A9
aactgatgatcacatttctttatttttctctaattattcccaacttttattgatttatagaactgccctggctaaccctataacattacaacaggaccaaacttctttttatatggtacaacagtacgatcttgaaaaagaaaaaagtagaagcaaacaaacaactaacacagactcaaggcagtagcagagcacaaaaactcgctcctttcatttaataggatcgataataaggatcatcctgggtacctccgcgggtgttccttctagtcccagcattgttagacgccgcatttgggaagtcttggttccccgttgtaccgtaagcaccctctgtatctccgccaaaccccatactgctgaggtcatcttgcctgcctgtatcatacccactacctgcggtggggtacccacggttgtcatgtccaccggtaccgccatagccaccagtgtcgcctatgttgtacccagctgtggtgtagccagtgccaccaataccaccaccaccagcatggccagctgtggcgt

SEQ ID NO: 8 - DNA, 348 bp, Gossypium hirsutum
  Clone ID: LIB3825-002-Q1-N6-B1
accaaacaatctagtgtttttgattttgtaataaaatttaaaaaattttaaaaaagggggctacaaaaaaaaaaaaaaaattttttttttaaccaacactaacaaccccaaaaaaaaagcaacaacccccccccccaaaaagaaacaaccaacaatctaaaaaaaaaaggccgcccgggggaaactaaagagacaatggaggaaatcagtcgccatacccaccaccccaaccacactaggctggatttaatgcataaaagccgaaaaaaaatccccactatcttcattttcctcaagcttcactgaaaatacaaaacttaacccacgcctccggggacgcacggggaa

SEQ ID NO: 9 - DNA, 585 bp, Gossypium hirsutum
  Clone ID: LIB3825-002-Q1-N6-B10
ggcactaaaatcatttcaggtataacagtgaaattggtaaaaaacgaaagagagagagagagagacacaggtaaataaaaaaagcgtgaaggcaatggaatttcgttctttaaacgcagtagacattttcataatcttcccggattaactttccatttttttaggggattcacctcattgacataactaatatagggttaatgcccacaaaattagcaacaaggagtggaggccgaaccaatgattaaaaagacggatagaataaagtctaggatctcacatttcccgcttattacaatgtagtccggcgtaactgacaggtgaatgctgaaacttatgtcctccagaaagcctttttgatcattcgtgaaccaaactaacccagcattactgcacccttgaacttcccccctgcatatcaggaatggccaatacggacatgcaaggcttccccccatggcgataaaacaattagcttttcaattaaatttattccatgtgcttgtgcagggcatacacaagaaacaaatgagctttagcatatgttaccgtacaacaatttgacatttccatttctattgcata

SEQ ID NO: 10 - DNA, 356 bp, Gossypium hirsutum
  unsure (1)..(356): unsure at all n locations; Clone ID: LIB3825-002-Q1-N6-B11
caagggttatcaatggtgctccttggtcctttaataatcatctcttgattttacataggaatggggaaaatgaagatacaatgtctgttcctttggtgtattctaactggtggattcagattcatgatttgcccccaggtctctttagagattccatggctgngctanntggtaactttattggaagatttctggagtatgatacgaaacccctggcaattggtaatatgaactatatgcgtatacgtgttcagcttgatgttcgaatgccccttcctttnacctgcagagtatttgggcggccaagggattacttctgaaaggtttgggctgggggattagtaatggcaagcatg

SEQ ID NO: 11 - DNA, 580 bp, Gossypium hirsutum
  Clone ID: LIB3825-002-Q1-N6-B12
aaattaaaactgggtggccaatctttttattgtcacaactatttacccttcattaatacaaacattaaagtcttaagcataatcatatcaaacataacattaccctaatttaaactttttaatttctaataaaagagctgaggctgttgttgatgatgtgtcactaggtgatcaagcatccaaaggttcactgactcaggctcagcgcccccactcaactcagttgtcatctcatcaggctccaaaaccaggaaggactccagactcgagatttgctccttcagctccatctcgctttccattgcttcactcggcctgtaaactccattctcgtaaccaaaacccataaaaggttgtggggttggtgggctcttggtttcagaactcggtggagtcaactcaggagccatcatacaccttttcttagcaggaggctgagttaggcgtggagtttgagggaagttgagcttggctttgtccccgcggatgcgcttggcggcttcatcgtaggctcgagccgcttcttcagccgtgttgtatgtaccgagccagattcggacacctttgtgaggatctctta

SEQ ID NO: 12 - DNA, 512 bp, Gossypium hirsutum
  Clone ID: LIB3825-002-Q1-N6-B2
caccctaatttttttttataatataattgttagttactttcttaataatatttcttctaacaaggcaaagaaataaagaaaaaagattgaaatacaaagaacttaaaccccatttcattatactactaaaatttgttccctctacgtaattgtttgttgattggattttttttttcttaggggttagcctataagtctacgtcaaatacggccccccttcgtacttttaagaaaatacttgggaagaagaccgccttattctcatagactaaaagctgtttcccttcaattcctctctacgtatgtcagtcaccgccgttatcagggcttggaaaccgaggctgcgccaccttcaaggccaccgttacccatggtggctgactggactgtcaacacggacatgctaggcgaggaaggtccatcgccgccgcttgattgaatcaaaaggtggctgccgttggccgggttttcatggttgatcatggggttccttgaacgagacgtggcgcttg

SEQ ID NO: 13 - DNA, 609 bp, Gossypium hirsutum
  unsure (1)..(609): unsure at all n locations; Clone ID: LIB3825-002-Q1-N6-B5
ggtaatgaaatcaaacttttttatttattcagacatggggatgtttgagaataactcaagaacgggaatgtaacatcatgtttttgaattcttgaaaatcaaccatgccgtctgaattggtgtcgtaataccaaatcatgctcctgcagtcttttccactattttcacctcacatacccagtcttcccagcacgtattcaagctcctcacatccccccaacccatccccattcaagtcaaacactttaaaagccttcgcaaggtcactgtcttcttcttcaccgccgccgtgaatgaccaattcctcctcctcctcttcgtcaccaccatgtgccagtgggttcgagatggattcataaaagaacaagaattcatccaagttcaaacatggttttcccactaagggctccaattcttcaaggctgaattggacagacccgattctctggagcaaccaattcagctcctccagactaacgaagccatctccattcttgtcgagcttctcgaatacgcgttgcaagtcggtcttactaaggggggacattttaccaccaaagaggatatgatcaccattaacatcaaaccttgaagctntacaaattaagg

SEQ ID NO: 14 - DNA, 349 bp, Gossypium hirsutum
  unsure (1)..(349): unsure at all n locations; Clone ID: LIB3825-002-Q1-N6-B6
aaaagagaaaaaaagggggggggggaaaaaacccctccaataaattttgggggggttaaaaaaaaggggaaaggggcggccaccctgggtggttttttgaaaatagaaaagggagggaaagggggttagtatgaaaagggggaaaantnngagaaaaattttttaaagggatttttggggaggggaaacgggaaaggggggggggggggggggaatttttttgaacaaaaaaaaaggaaaaaatttttggggggggggggggggtatttttccccccaaaatatccgggggggggaaaaaaaaggagggggccccggggggggaaaacccgaaaaaaggaaaatttttt

SEQ ID NO: 15 - DNA, 605 bp, Gossypium hirsutum
  Clone ID: LIB3825-002-Q1-N6-B7
gcaaatagcaccacttttgactataaattaaattagaccaaaatacatgtattacgacatacgactattctaatattatataaatatatattgggacatggacattggtcggtggtctttccatcccaaggctcatgcatttcccatatttgggaaaaatgcatgttttttttacttcaacacatcttttatatgcaccttcccccataatgccctcacaaacaaacttcaacccttgagatgcccacttataaacttcatgacttggctgcctccaccatatgaatgtctgctaaacaaagttagtcccagtacttaatcaagccatcccagccacaagtagcaactttactttgctccaaaggatgccactcacacccaatgcaaactccctcgtggcacttgagagtcctaaaaactttgcagctcttccagtcccagaaccagcacttaccctctccatctccagacataacaaagcgtccatctggtgaaaagttgacttggcaagcatagccggccacaatgtgcccagcaaacctttttttcttattaagctgaaatctttctctggtactgtaaataagaatttggttatccaaact

SEQ ID NO: 16 - DNA, 415 bp, Gossypium hirsutum
  Clone ID: LIB3825-002-Q1-N6-B8
gaagaagtaaatatatagaatagtactaaaagcttctcatagcatatctatacacaaaagacactgacaaaaaactactacactatatgctatatatatttgtgacatttgtacttgcatatagtactaactggttaaggttacattttgcagtaaatgaataagaaaaaaactttgtacatttttcgaaattcacacattgaacgtcaactaagatgttttccctatggtgggtataagaaacctccatgtgaagagatagtcttttgactggcaagataatctcactacatcacaaaaagctgtgatcgaccctttgttgttgttattgttcccttcatttccccattcaatcctcacccaacaagagaacccttttgatttaacaggcacccttgaattagatagattaagc

SEQ ID NO: 17 - DNA, 344 bp, Gossypium hirsutum
  unsure (1)..(344): unsure at all n locations; Clone ID: LIB3825-002-Q1-N6-B9
aaaaatcaacatanctggaattagaatccnggttttacatatgataagaaaaaccaagctccggctggtaaccgagctccatagctcttctcctatgtcattccagcaactntaccttccaatttctttttgcatccaacaatagtccagccagccatcacagtttttttttcatcaaacaccttctttaagtaaagccaagaacaaccttctccgcctttgggtattccaacattgaactttacgaaaaaactaagggcttccaacccttggaagggggggttcctggcttgaatgggtggttgccaaatcaaccttttctttttttttttaagaatttaaaa

SEQ ID NO: 18 - DNA, 542 bp, Gossypium hirsutum
  Clone ID: LIB3825-002-Q1-N6-C1
accacgtacaactcatggttttttttttttgtatttataataataataacttccaaaaattaaggaaaaaaaaccattttcaagtcggtcttaggataaataagagatgattttgaagaaagagaaacagacggttaataaattaatgtctacccgctcaacgtcactaatccatttacatagagcgaaatcagtgtccaatttgtctaaaaccatacacaaaacgatcaaatttttattgaattttgatgttctctattccctaaactgattttcccttttttaaatcttcggcatgtgaaattgaaaatgttttatggcacaaccaataagttaaatgaaacatactaaaatttaagaatagcagcaccacttgaaggctttgaagcaaacacatagagaccaaggtcattctggtttatcacacctttgtcaatcctagacttgtagaattgttccttcaaattgaggatgaactgtggtacaatactctcttttaccaaggccacgggacaaccaccccattcagctcccgtaagcct

SEQ ID NO: 19 - DNA, 275 bp, Gossypium hirsutum
  unsure (1)..(275): unsure at all n locations; Clone ID: LIB3825-002-Q1-N6-C10
aataaaccaaagggcaagggggccgacaacccagaaaaaaacaacacgagaccaggagggggggaaaacaaaaaaaaggaaagagtccctcactcaagcgcaaaaaaaaaccaagaaaagtgtacaggccccccccccccaaatgaacgtgaaaagaagggataaaaaaaaaaaaaaaaagggaaaagaaaaaaggggggggaaaaaaagaaaaaaaggggaagggaagggggggaggggaaatttggttnaagggggaagaaagaggaggaaaa

SEQ ID NO: 20 - DNA, 499 bp, Gossypium hirsutum
  Clone ID: LIB3825-002-Q1-N6-C12
cgaaaggcaaccacccacctgtttggttaaggggtatcccagttttacccatttatttccaaaaccttactttaacgggaagaaaaacttgtaagtttggcaagaaataaaatcaccttgacaaaaaaaaataaccttgctagctaaagcaaccccacccaaaataatttgggggcaggggctacaaaaaaatcttttgaatctaaaacgctccaatatttatggggcaaccataggaaataggtttcaaaaaaaaaaccgttttgatttcgatgccacccaaagtaagcatgagtcctgttttaaatttccagttttccatgaccgaaactagcttaacaaaaccccaagaagttcggctgtggctctgtaatcctgttaaaaaaaacaaacatttttaaccaatccttccaaatttcctccatctccaagggtcaagtacactggaccaaagggatcctttatgggagtgcacaatccattaacaatgttataccca

SEQ ID NO: 21 - DNA, 572 bp, Gossypium hirsutum
  unsure (1)..(572): unsure at all n locations; Clone ID: LIB3825-002-Q1-N6-C2
aagaaaattattatatgtatatgaaacagaaaaaatatatacatnatttttttgtcaagatactctagtatatatatattctttagtgccacgaaaaccaacgatgcacaccagaaggaaacttgtcgctaccgttacattcaccaatactagtcgtcttctattttttaggagtagggtaattgagttacagatgctaatacagtcgagctggtatacagatttacatattacttcatgcggattcatatctaattcaaagctttatagcgtcaacatgccctttacgagcagtttgtgtcatagcttgcaagccccagcagctcaggaccttccagtcggggatttttctcaaagccaattagacaagcacaatgacagagtccatcaaactgtgcttccatcaaagccagttcaagaagagatgatgtagaaacctataggcagattatcgataataaacacttaaaaatgatagaagctatactcgcccaagactcatccccgtgcactatggtgtaaaggatatcagaacacagaagatatttttgcaaaagtgtccattaacaacc

SEQ ID NO: 22 - DNA, 556 bp, Gossypium hirsutum
  Clone ID: LIB3825-002-Q1-N6-C4
aaaagttcaagcataattcaaactaaataaaattcatgataatgggccggtacgtacaactgtacacaagttcacacagtacagcacacaccgctgataaatcattcaaagcatatttacagaaatttgattattcttctttcatctaaaaaccgcggcccttaaagaaagtgaccatttcagcccctccctttaaatttactaaagtaaattaagctgcttccttaactacctttcaatcaccccatatgtacaaatatgtcccaacatctgctcaactttttcacatatacagatagcagtgttcccctccccaataaaagctatctacagaacatatcaacgccaccataaacataattactactcggggcggaagtttaccagattagggagaccagctgactgaagcctccttatgtcatttgctgtgaccttgcaagcctccaaggtcagagatctttaagttcttcaggggctttagatgtctcaatcctgcacttgtcacagggaatttgaaacgttcaagagatcaatcctgtcacccggagatcat

SEQ ID NO: 23 - DNA, 398 bp, Gossypium hirsutum
  Clone ID: LIB3825-002-Q1-N6-C5
aaaaaaaaggcccccccccaaaaaaggggggggtataaaaaaaaaaaaaaaaaagggggggccccgaattttttgggggggattgtggggaaggacccaattttttttaaaaagggggatataaggggggggggaaaaagggggaaaacttctttttgggggaaaaaattttttccccccaatccccccaaaaaaaaaagcggaaagaaaaaaaaaaaaaaagcgggggggccctgggggggggccccccccttttttgggggggggggggtttccccttttttaaggggaaaaaaacgcgggggccgttcttttataaaattcccccaccggggcgggagggggggttttttttttgtcgcccccggttttttttttttctaaaaagggaggggaaa

SEQ ID NO: 24 - DNA, 500 bp, Gossypium hirsutum
  Clone ID: LIB3825-002-Q1-N6-C6
aatctcatcagcaagaagtttatttaacagtacattgcaatccagaacaaaaagtagtctccagagcctataaaacaatcaacacaaagggaaagaaaccatatcatgaaatctccatcatctcagctaaagctttgcttgcagcagcttaatagactttttttttaacgaacattcctttcttggccttttctgattctccctcccccgtgtatttcccgagctgagcgagtgagttggctttggcacggacaaggagcgtattctgagcagccttaacgttctcgggtctgccttcccatgtcttcaaacaagtgttctggagagctctggcataccaaaaccagacctgccatgggtttggagattggttcattgcgttcaaattgagggttgcttcaacctcggattgtccaccagacaagaacatgattccaggaacagctggggggattctcctgtggagaagcttgagggtgtaatcagcaacttgctgtggg

SEQ ID NO: 25 - DNA, 549 bp, Gossypium hirsutum
  Clone ID: LIB3825-002-Q1-N6-C8
ccatgtataaaatatcaaaatctccattctaattctagattttatatattaccccatatcctttaatatggagaattgtccgggccataagtttgtaagagaagtaggacaattaagcttcaaaagcccaaccacgaactagtttgtttggtccccaatttcttcctgttggatagagttgagtccaagggaacatgacatcattaacttgtccaaattcaggatgttgtactttattgtggttctctaaacctcttgtgagacttaaatgctcctcaacatttatttcttcttcattcaggagatcagtggaatgtggtggtaagatttcagctatagctggtgcctcatctataattgatgcacaccctggaggaagaagaccatttgaatccaaaaagttcaagaaatggttggagatactgctggaacttgctgtaacaaagccatttacatctccagcatttggtggaagttttacctttgtagttggcggaggaccaggagaagtatatttttcctctaaacttgcttgtgtaagcgcacttg

SEQ ID NO: 26 - DNA, 575 bp, Gossypium hirsutum
  Clone ID: LIB3825-002-Q1-N6-C9
attatgttatatttttatatcctatcatatttttaaattgtgtacctaaaattagcctcttatacatattgatattattgagggacaatctacacactaccactactaaactaccataaagtgctagccgtccccttttttgggattgggtgtgaattttttgccaatcaaagcagggttatactgagaagctaatgttgtaccgcgcactggggtgggaccattaccctgttcctttcaagcagttcacgctgttaatgtttatctccaggagacttccacggtttcgcacactgatcttatgatatatatgtatataagggaatgcaaatgtactgagtgttcctcacccttcactcaactgctccattgaatttgttttttttctgtgttttccacacagaagaagcaaaacaaaggaagaatacaaaattgggtacaatgttgaaagagttaccttctttgtctactattctctccgcttatgcttctatttcagccatggctatgttaatccgaaccatcttaaatgaaatgctccctgaaaggatgacaaactacatcttctctatgat

SEQ ID NO: 27 - DNA, 243 bp, Gossypium hirsutum
  Clone ID: LIB3825-002-Q1-N6-D1
acaaaacccttttttaataatccctaattaaaggtccggcttagataaacggccctgggggggaacattaaataactttttttttggagaagggcttagccttgggttttccaggttggaggggttggattctccacttcacctttaattttttgggaaaaaagttttttgccgtttgttttggccgccaaaattaaaaggggggcctgggtgtttccttttttattaaaaaaaacccttgtt

SEQ ID NO: 28 - DNA, 586 bp, Gossypium hirsutum
  Clone ID: LIB3825-002-Q1-N6-D10
caccctaatttttttttataatataattgttagttactttcttaataatatttcttctaacaaggcaaagaaataaagaaaaaagattgaaatacaaagaacttaaaccccatttcattatactactaaaatttgttccctctacgtaattgtttgttgattggactagtcagtcttaggggttagcctataagtctacgtcaaatacccccctcgtttcgtacttttaagaaaatacttggaaaaaaaaccgccttattctcatagactaaaagctgtttcccttcaattcctctctacgtatgtcagtcaccgccgttatcagggcttggaaaccgaggctgcgccaccttcaaggccaccgttacccatggtggctgactggactgtcaacacggacatgctaggcgaggaaggtccatcgccgccgcttgattgaatcaaaaggtggctgccgttggccgggttttcatggttgatcatggggttccttgaacgagacgtggcgcttgagatggcggtggcgagagagatcggcatgaggcacagacccttctcttgcagatactgcatggcggagcccatg

SEQ ID NO: 29 - DNA, 526 bp, Gossypium hirsutum
  unsure (1)..(526): unsure at all n locations; Clone ID: LIB3825-002-Q1-N6-D12
aacagctgaaatttatttactttttcttaagaacagttgcgaactttacaaaactatgcttaaatatatatttacagattgggaaaggaggaagtggaccgtggaagatgccaaatatttgacccaataaaatagagaaacatatatttgtaaatatgtaaatataaatgtaaatcttcagaaagctgcctctggcttcagaaagttgtgatattccagctgagtcatttccccaccattcaccggatcaaaatngcatcggtagaagcgattattgatggtttgtttcaacccattcttttgataccattattggtcttttcttttttctttctacctttcatcatgccaagaattaccactgtattcttttggtgaccgaaagcaacaaggtactgagaaccttcaaccagcggaactgagccactgaccattctgaaactgagtactttggtaacacaccttttgataaagaagagatgaatgggaagatnnacacaggctcgatgtacttcgtgattgggta

SEQ ID NO: 30 - DNA, 608 bp, Gossypium hirsutum
  Clone ID: LIB3825-002-Q1-N6-D3
gccaaaaaaagtcgattcaatattgtcgatttggaggaaatttggttcagctgcaattttcaccttcatggttgagcatctatataactgtttttttccctagaaatagtaaagaagagtaaacaatgggagcagcagcagcaattaaaatgcagagtcatgcacaaaagggtaatcattacaacaggaaacatctctcatctctcatctcttggaagaaaaaatgcaaccaattactagataattcctgagctaaagtaggaaatgtgacaaaacactgttcgtctctaaaaactatggccagcccaaaatccgggcaaaatcaggatgtgaactcaaaaggctgagggggctgaggttcatcatcaacagccatagctgatgaggaactctgttgacctgctgctgatccacctgctggagatgctgctaatgcaggcgcatctgttagggacagtgcctctggttcatcagggcgcaggtctctaagaagaacaaaccctgatggtgccaacttcacgggcgcatatcggctgtcttctagaaacttaatgaacttctcctgagcaggaaccactcttgctgggttggtcaaaatctcaaatgat

SEQ ID NO: 31 - DNA, 511 bp, Gossypium hirsutum
  Clone ID: LIB3825-002-Q1-N6-D4
gggcttaaatattactcgactgcctggttaaaactttaataacaatcgatcgagatcatcaaaatgcttaaatgggtacaaaaattgtttccatgacttgcatgccaaggaagattatttttatttatatggggtatagaaaaaactcatcctgcaaaaatcttcacagcaaaatttggcctttaacaaagcactccatgtgtactttacatctccaattccaggtttaccgttgtaggggaccatcagtactgatcagggagctccctccagcaacgcttttaaaaaccagcattagcacctaacttatccattaaacagcaagaaaaaaaaggcaaatttatctgcaaagttctatattgcatgagcagttttcagctcataccatgccatcaatgggatcagaaaaaccagaaagagtcgatcctccttcataggcacatctggaatatcaaacctgtcttcctctatagttctattgatcacagaaacaggtgatcctaataccata

SEQ ID NO: 32 - DNA, 594 bp, Gossypium hirsutum
  Clone ID: LIB3825-002-Q1-N6-D6
ggaaccacaaacagtacgccattgacattacttggggtatgagtcaacactacaactaaaagagttgggagaaaaaatcatatattctatagtaaagaagggattagaaatgtagacgtatctatagactaatctcaagttaaataacaaacaaactgcatttttttgtaaccccctaaactgtttacttttcagggatgcttcaaaatcgttcttcaatggggttggaagatacatttccttctgaaacaaaactgtactgtaaacttctcaagagatcagccaacatgcatgcaaatcaggaaaaaggtgaacactatcttacatcccgtcatgcctgcaatggcacagctgcagtatttgcatgagttgagctgtccttgactttcttatgtaagcgtgaatggtctccagatttgtgagatttcctctttttcccagaggcctttggtttctgctcttcggaaacttgcttttgatcttcttcggcattatcttccatatttttctcggaatgtaataaagattttggtcttcaaatcatcctgagtccgtgggttcaataacggacattcgaattagaggtgtagtcca

SEQ ID NO: 33 - DNA, 446 bp, Gossypium hirsutum
  Clone ID: LIB3825-002-Q1-N6-D8
ggttttttttttttttttttttttttttttttttttttttttttttttttttttttttttttttttttttggtttttttgtgttttttgtggttaaggggggggggaaaaagaaataaaaaaaaagggaaaggtttaaaaggtttggggggggggaggaaagaaaaaaaaaaaatcgtcccctggggggaaaaaaaaaaaaaagggggatgtggggggggacaacctaggggggggggggggggggggaaaaaggaggaaaaagggggggggaaaagttggttttgggggggtggggaagggaaaaaaaaggaaggggggaggggggggggaaaaaaaaaaaaaaggggggggggggaaagggaaaaaattttaaggggggaaaggaaaaaggggggaaaaaaaggggggggggggggggggatttttgggggggggggggggggg

SEQ ID NO: 34 - DNA, 507 bp, Gossypium hirsutum
  Clone ID: LIB3825-002-Q1-N6-E10
gatagaactcaactttcaatttatcaaacacttctttcagctcttttttctggtttcacagaagcaggctgattcagtatttgtacacttatattatacatcttccaaacttaacaatacaacattatttcaccaatatacagaaacatgaattctgccttctttttaattacaatttgggataattttcatgttccagccttcttatctttactcctattagccatttcactagcaatgcgaccccttcttgcaaacgagtgcacccgctcctgctgtgagtgagctcaccagtgatgacgggctcgcacccaagctcgacgccttggcataacttgaagaagccccggttccggatgcggtgaagaaggctccattcaacatcaaatccccttctgatctccaattccaatgcttccattgattttgcggcgcatcctcatgttttgtcacctctttgttgtctgcatcatttggtgcaagaaatctattgccttggctgttgat

SEQ ID NO: 35 - DNA, 569 bp, Gossypium hirsutum
  Clone ID: LIB3825-002-Q1-N6-E11
ggctaaagcaaactttttttcttgctgaatcatctcccaagttttttgttccatcattggcatgattaagaacaccaaaaacacaaaacgggaattaccaacatatcataaccaatccgaattcataaacatttcggagtttacatacactggcaaattgctttatgtaagaaaaggcaaccccccatgcaaaacctacatataatgaacacagcaactcattacagctttgctatattttttccccttattattaattatcgttataggcctcaaattctaatgggaactgccttccaaatgggttagataaaacatctacagttgcctggaaccaaaaacaaaggttagtggaatctccaaaatcagctgctttcaggttattctaacgacacccattgttactgttttcctttccgcatcgctacaatggagattttagcaacttctttagtgttattactatattaccaaaagacggccgttgagcgggatcactgcaaaagtgcacatatagcaactatcatcaggaatttttagtattctcaaatataactccagcaaatcca

SEQ ID NO: 36 - DNA, 395 bp, Gossypium hirsutum
  unsure (1)..(395): unsure at all n locations; Clone ID: LIB3825-002-Q1-N6-E12
aaaaatgggggggtagaaaaaaaaaaaaaaaatttgctctttaaaaaaaaaaaaaaaaacaacaatattttaagaagagccccccattgaagaaaatgaaaaacttgaaaaaaaaaaaaatgaacatggaaaaagtttgaccaatgttaaaaaaaaaaaaccaacataaaaaagaaaaaacaggtaagagggaaatataaaaaatattaacattgggaagaaaaaaaaaaaaaaaaaggatgatgacgaacttgttttgaaaaaaaaaaacaatataagaaagggagggcaaaccaaccgagcttggtttaatgggaaaagcgttttccgccaaaaaaaaaaaaacgcgggnccctcttcttgtttgtataaaaagaatttttggacgggggggg

SEQ ID NO: 37 - DNA, 580 bp, Gossypium hirsutum
  unsure (1)..(580): unsure at all n locations; Clone ID: LIB3825-002-Q1-N6-E2
aatggttagagggggggaactgcttcattaaacaggaataaatcactagaaagtgcaaaagctgacatcggaaaagtgaaaggattgtgatgttaccctgattagggtaaaaaaccaagttcttacttatagaaccatcaagtagtgagatataccttggcgtcgaaagcatcaaaagaaaaaaaaaagaaccagcaagtaattgctgggctcactctatgtaaaacttcttattaatgggtggaagtattttgccggaaggtttgcttatcttaacatcaaactcaacctccattaatctatggttttccttaaaacggttcattgaaaaagaaacatcgagattgatctcttcatcaacatgaacgggaggatgcaacataaaaatctgttgtccccaatgagtgccattatttgaactaggagcagttgttaactcaatctttttttgagcaggatcctccccttttcctcggaaatggacatcaaaccatcctgcaaatccacagagngcgagtgggcgccatactgatagctgatgaaaaacttgatttgacttcaaggatgtcatttactgaaa

SEQ ID NO: 38 - DNA, 586 bp, Gossypium hirsutum
  Clone ID: LIB3825-002-Q1-N6-E3
aaatatctctgtttctgtttcttttacattgaagaaaaaccagaagtattgtctctggtaaaaagttagtcacaatggagaagataacatagtaaatgacatgacatgaacaaatctatgaggagttccaattagcaaaagcttagctatattcccttctatcagtagaaaattcaagttccaaaatgtttggtaacagccctgaaatgcctggaaaactatggcgtagccaaaggataaatgtaggtttaggggtagtgtggaaagaagcataaggaaaatatcaatcagattcatcattactgctgtcaaccatgataacttgtttgttggccttcttcagcttctttctaggaggtcttatttcactgctttcttcttcattcaacacctcattatttggatgctctgcattaccatacttttttacttcttcaagaattctccccccatacttctctgtcttcaactttccaataatcttttccaactcttcaattgaatttggtaaatgggcgcttatgctactgatctgttggcttgacaacacagaatgagggaatattcccttgtcatgagaagcgag

SEQ ID NO: 39 - DNA, 607 bp, Gossypium hirsutum
  Clone ID: LIB3825-002-Q1-N6-E4
caagaaacaaacttgtatgcaaaataatgttaaaactgtccggcatgaggaatataacagctgagaaaaatttaacacaacaataccagaaaattttaagttatctttatgtctcgtagaagtcgggcagccatcgagccgtatcttcttgcataccattcactaagcttcccatcagggagtcttgtcaccaggagatcatcaaccgaagaactaatttcagtcttgttaacttggtcgtcaattccccaatccgttttctcctgcttctctgtgcaaactgcactgtctgccgtaacaggtgggggctttagtcccataatgaagagttgaatactcggatgttggtacttactgtccatcttggcttttgagacaatcttcacttcaaagaaatttttccaggtcagaagcatctgctcgtggacactagtagaacggatctcatgacccaacataattgtggttttggggcctgataatgtgattattgtctgcaataaaggtcccacgagatgctccgcgtaaacaacatctgtaccaataacatagtcaaatggtggaccaacagcttttatatgatcttcatttccccagtccaactcca

SEQ ID NO: 40 - DNA, 599 bp, Gossypium hirsutum
  Clone ID: LIB3825-002-Q1-N6-E5
gaaaagaaaagcataccctttttttatatatatttatataaattatatttggtacaaattttctcgagaaaattatgaaaatgttcttaaggggtggtgggtttagggttattagattgcttgaaagcgacagtgggagcaatcctacaactccgcctctgatgttcaagcacgagttgagcggcgaaaccatcgagtttctcgaagttggtttggtcggccagccttttgcctccgaacaacacggactctacgttcttctgcttcagcatttcctcggctatggcgatcagcatctttacgttgctggggctggggtctgtgtctacgtttgggccacaccgtctaaaactggtcccatttgcctgaattcttacgtagttgctgcttctggattgtccgaaagccatggcaacggcttggtccaccgagtcggctgagccgtcaccggatattcgagccatcggtttagcccaatccttgaccttccaattcttgactttttcatattcgtagcttatctcgagtagcgaacccgtccccagtgacaacactaatatatcctcgacccctctaacaaaagggaactcctgtttatt

SEQ ID NO: 41 - DNA, 415 bp, Gossypium hirsutum
  unsure (1)..(415): unsure at all n locations; Clone ID: LIB3825-002-Q1-N6-E6
ttttttttttttttttttttttttttttttttttttttttttttttaatttttttttttttttaatttttttttttttttttgttttttttggggttttttttttaatttttttttttaaaaataaaaatctttttttttttttggggggagaaaattaaaaaaaaaaaaaataccctccgataccaccaaaaaaatagctctaaaaaaaaaaaacagcacccccccgggttattttttttttttttttggaaaaaaaaaaaaaaaaaaaaaaaaacctttttaatttcttttgaaaaaaaaancccaaaaagagtaaaaaaaaaaccctaaaaaaaaaaaaaaaagccccctttctttttctttttttattccccccccccccccccccgggaaaagctctcccccctcccccc

SEQ ID NO: 42 - DNA, 564 bp, Gossypium hirsutum
  Clone ID: LIB3825-002-Q1-N6-E7
aatgggccaacatacatctagaagtaaaagagccttgctacaaacattgcatggttgattgcagaagaaagcagaacactgcttgaaatactttatccattgtaaatgtgagctcaaagacttcaatgccaatctgttccacatgcctgcaaaggataaaagagcacaatggcgtacatttatgaagaaacaacaattgtctgaaaaatccaaacaccaaaagaaacactaagcaatgtcttaagtgactgctgttcgtataggagccaaaagctgtcatcgatcttaatagcttgttcatatctgaacaagcttgaattgatcaaaggctaaagtggagactgagtcagacagcttggaacagctttagtctaaaaaatccccaggttcagtaacacattaagcccacggctcatttctgacgaggagaaatggattgatctcctgacccattactaccaagccactgcttactacttgatctttcaagtctgtctggttcatctgcattcaatttgctatttgggtgagtgcccttcatcactgtcaaattttggtaaatat

SEQ ID NO: 43 - DNA, 598 bp, Gossypium hirsutum
  unsure (1)..(598): unsure at all n locations; Clone ID: LIB3825-002-Q1-N6-E8
aaataattacgacatcgttataatgaattttctttttgtgaattacaaatagtgactagcgtaactcgaatccaggtcacacctagagcgatgaacactcttgatcgaccaattttagcccgggcctagcactaaaagtaaacagtttaaaaacacaaaaaaaatgagaaaagtaaaccaaaaggatgtccacagtccaagtccctagtacaaaacaacccaaatacactatacaagcccaacattcaagaccctaaaaccaaattaacaaatccttaacccaaaatacgggcccaaacggcccaaaagactaaaccaaattttagcaaaccctagccctagcagccgagcccctccagcgcctccgtacgctccagtgtttcagcagccacgcgcgcctccgtacgccagctcctgtacccgagcaccagcacaccccgtacctgggaaatacgccgtaaacctccttctgctttgttgaagtcaaagctaggaggagatcttgaggctgaaaaatcatcttctgggcctaaggggncaggttgttgcctgggggatgggaatcggggctttggttgttgatcttagggttcgtctg

SEQ ID NO: 44 - DNA, 596 bp, Gossypium hirsutum
  unsure (1)..(596): unsure at all n locations; Clone ID: LIB3825-002-Q1-N6-F1
aagaacaaattttttatatcttttctttaactattttaatataacaatctgatttcatattagtagtaaaatcagagatcaacccttacacgaaaaaacagaaggggatttaaacagttaactataattttatgattctctaataacccaaatgggaaaagagaagacccaaaaatatatatatatcaaaagtcaaaattttcttggttcatcttcgattactgaagctaaaccagtcacgaacgtaatcccaatctgcgagctcttgggttttatttcaggtggcttccactcttctttctccaccttttccttctcttcttcttcagagctctcagacaaagcaaatatggactcacccaactcagcatcttcaaccgagtatttgtcctcggaattcaattcagtaaaaggttgctggtctttctctttagctttggaatcaaattcagattctctaagtgtaccanttgtgggtgtgggtgtgggtgtgggaagtaattgggaggaaggaaacggcgtggctcngttattaggagagagccatttggcgctgacatactcagctntacgccatggaggaatatgcattccct

SEQ ID NO: 45 - DNA, 497 bp, Gossypium hirsutum
  Clone ID: LIB3825-002-Q1-N6-F10
ggaattaaataagattatctcaaacactctcattaaaccagaacttcattagtccataataattaaagttgcagggaaatgttgggggcaggaactatcattagaacttgcaatcctcccctgcctagggtggggaaattggaactccacatttacaccaaaacccccccttccattaccatgacaggttttcctaaaaaaaaaactctttggttttgctcatcgaaatggatcttcactattcctcctctaggggatgccgcatgcgcaacaaaatctaactttcccagcttttggctccaatagggggccaaggcacagtgtgcacttccgcaaaccggatcctttttaataccatacttaggacagaagaaccgactaataaaatcaaattcagaatctggaggggcagctcctgaaacaattaagcctcgtccaggacatttcagtatgtcatcgaaccgtggctccatttcgataacagattttccagatgg

SEQ ID NO: 46 - DNA, 403 bp, Gossypium hirsutum
  Clone ID: LIB3825-002-Q1-N6-F12
ggactaatgccatttctttcataacttaaaaaagatgaaagtttccaactagttctatagttttttagtaggggatcgcaacaaagcaaaagggggacccggttatcagatcacaagagcttggcaacaaaatggtggttaattacacatttaagctggcacgttttttacctaatttcccccccccccacctaaatgggggcaggtttcaatggtgaacaaaatgattcatggggtttcttaaacatgaaggggtaaattccaatattctcaaattacacttttttggttatttgaacaacattttcattctcaagttcatgaaccttgccaactctttgagggttgtgttttacccttgatccccatacaagggcatacttaaattgtttaagcatgtctt

SEQ ID NO: 47 - DNA, 485 bp, Gossypium hirsutum
  Clone ID: LIB3825-002-Q1-N6-F2
agaaaaatgggaaactcatttactaagaacttttccatgagagtttacaacaacaggcgcagacagggataattttatacaataagggtaaaaagaattgtgtcaaaaagacaaaaaaaaaaggttgaaaaggaatgaaaaagcaatggaaaggagatgaaatatttacaatttgggttcatgggtggccagggaaaactttttgtttcaagaaattggtgaaacgattagcatacagctcgggttccacgacagatattgtcggggggccaaatttcactgatttgtatgcatgctctgcctttttttttgcattgtattcctgtaaaatatcaataattcccatatagagaatcacattatttacctcaaagagttcgacttcggctgaatcggactcattttggggaagcttgtgattagcccgtgccggcatgtttacttctaattgcacccgtaacctttcagtaccgggcaccataata

SEQ ID NO: 48 - DNA, 378 bp, Gossypium hirsutum
  Clone ID: LIB3825-002-Q1-N6-F3
ggggggctggaaattttccctaaaagggttaaacgggggcccgggaactccccaaaaaggggggaaacaaaccccaccggggccaaaaaaaaaagggggggaaaaccaaacagggcgggaccaggaattgaccggggaccaacggtcccggtcccaagagagaaaggggacccaccccggccggggcccggggggccccccgggaaacccggaccgggccccgaaggggcaccacctttcccgggaaggggggggatcaaagggggggggggaaacgggcaaaagtgccccccgggggaaaagggggtgcccccacaagtccccccagggggcgccccggggggagaaaggggaaaacctgggggggccaaaggaggg

SEQ ID NO: 49 - DNA, 541 bp, Gossypium hirsutum
  Clone ID: LIB3825-002-Q1-N6-F4
aaagaaagtattttagttaatagtattttacaataaagcattctcaccattgtttcaaagcaaacaaagagacgagaagaggagtacatcagtaattacttctaaatggcatgtccatggtatacctaccacttcaaaccacaagcattagatcaaagcagaacacaagtgatcatctcaatgactaaaactacaagccttttggaaattataaatttccagttctgtaattctaaaagcgaaattgtagttaatttcaacgcagtttgttgcctttattaccactgtgaacagccaaaccggccatgttaggagttgtagcagcaacaaactgtagatcagacaaggaataagaccggcaaggaggctttggtcgagcagttaatgatgatgatgatggtttgatgatggtagttgattttttacactgtggatgcagaggtggaaggcagttagacggcgatgatgccattgatattttagttccaatgtttcccaaagattggttggtttcttgttcaatgaagaactgcgagctaat

SEQ ID NO: 50 - DNA, 375 bp, Gossypium hirsutum
  Clone ID: LIB3825-002-Q1-N6-F5
atggaaatgatgctgcagaaacgcatcgcctcttctgcaacaaactttccgttaatacacataaagctacaccagatacttgggtatgatactactgcaaaaacaaagtcccgatttttttcctaacccgaaaaagtacccttttttttaattcttttaatttttttattttttaaaaaattaaaattcccctaattaagcttgccgggccaacaccaccccccgaaacaaaatttcttaaattcccttaccaaaaggtgggaccaggttggtaaaattgcccagtccattaaatttaatggccccacaaaaaaatggggtttttaaaaacttaaaaaaaaatttcttccaaattttacttcattttaactttct

SEQ ID NO: 51 - DNA, 492 bp, Gossypium hirsutum
  Clone ID: LIB3825-002-Q1-N6-F6
actcttaatctctttatttttcatctattttcattttagaattttatccttcatctcttcaattccagaaaggtgcctttctctttaatatttttggcatgttcagtaggaaataaatttactatgaaaagttaaaatcagaagaatttttttggttaaaaacttaaaactggcagttcatcacacccatactcaactgaccgacttaattataatgctaataccataaccataaatttcccaaaagaccgaaaccctaagacataccctaaagtaatttatcataaggcgatgagtactcacctcattaaatggaggcggctgcgaaagcattgaaccgattgcagtcgaagccgcacccacactgtggagactcgtaaaagttatcactagggaagttagcggaggcgatccctacggagaattccatctcgtccccatcatggatgacttgggacgatgtcaagccagaagaagagaaccttaacgctc

SEQ ID NO: 52 - DNA, 565 bp, Gossypium hirsutum
  Clone ID: LIB3825-002-Q1-N6-F7
ttttttttttttttttttttttttttttttttttttttttcccaaaattttttgggtttaccccttaattttttttaatatttttagacatgtttttttcaatgtttaacccaccccaaaaaagaagggggggccccccaaatgcccgggaagaaaataaaacaagaaccaccatggctaaataaaaattgcccaaaaaaacacaccaaagggcccaaaaccccccccaaaaaaaaaaaagcccccctggctaaaaaaaaacaaagcaaaaaaccccccggggaaaaaaaaaaaatgccccaaaaaaaaaaaaggaccccccccaaataaggaaaaaagggaaaaaaacttccccccgcaagaaaaaacaagggggattgggaggccaaaacccgcccccgggaaaaaaaattggggaaaacaacaaagaccaaaaaaaaaaaaaaaggcctaaaggccaaaattaagcccccaaccaaggaactggggaaaaaaatagaaaaaaaaaaattcatctaaacccggacattcaaaaaaaaatcccaaaaatggggggctttcggcc

SEQ ID NO: 53 - DNA, 526 bp, Gossypium hirsutum
  Clone ID: LIB3825-002-Q1-N6-F9
ctaattaaaccctcctttaccattacttcagaaaaaaaaatgaatacttgcaatatcagttcatggaaaatttgagcctttctttcttcaacctttttcattctcatttccattttatatttatttcccctttttttttacctcctttattccccctgtccactaccaaaatgattttttttatcccccccataactcaacaccaatttaaaaaaagaaagaaaaagaaaaagacattttttttctcttcttcccctactcgattttgctaattccaatacgcttaacaacagcgtttttaatagcttccgtttgtaaacaaagctcattttgctcaatccccgccatgtaactcctcacttcttttcttatcatctctttcattactgcaaaaaactcggcactgaaaaactgcttctccaccggagctgggaccggtgccgaagcctgtgtggtcacttgggtcgggttgaatccgggtggagaaacaggttcggtaaagtcagaaccgggtaacgagaggctg

SEQ ID NO: 54 - DNA, 316 bp, Gossypium hirsutum
  unsure (1)..(316): unsure at all n locations; Clone ID: LIB3825-002-Q1-N6-G10
ggggntaaactattttggggcgattattgggcaaccccaaatgggttagaaagactacccgcaaaaaggggggcgcgcgggggcgcccggggatttcggggcggggcccgggggggggccacccttccccataaagagtgccctccataaccggggggggaaaggggataggggttttctgggggccccccctatttggggtgaattttnnagggaataaaaaaaaaaagggtaaaaagggaaaaggggggggggtaaagagggagggaaaagacaaaaaaaggggggggatgacaggggggtttttagaggggga

SEQ ID NO: 55 - DNA, 583 bp, Gossypium hirsutum
  Clone ID: LIB3825-002-Q1-N6-G11
atactaattctttttaatcgaaataacatttagaagaatcgcacatttgctcccaagactacatgcattcaaccttatttaatgaactaatcctatcaaagatgtttgatgatattttaaaataaaaattgataattaggaggatatcacccatgtgatttggttttttgcaagtctttaatatggatatgcgttaatacaattatgttccccccttgtctaaagttttcatatatttgcatgaaaaattggacatacccatatatgttgtggatcaaagactcagtccattaagttcttgagatgcagtattttggatgacttgctgcaaacattgaatgacatgggagaagggagggcgttcagaagcctcacgagcccaacactgttcaatcaaggaagctacaactcggtttacatggcttgggatctcaagcctttcacctttgaaacctacagccgccacaacctgtggtgggtttaaatgcttccatggttgctggagtgtcataagttcccacagaaccactccaaagctataaacatcggatttctcatttgaattctcattgcatagaacttc

SEQ ID NO: 56 - DNA, 565 bp, Gossypium hirsutum
  Clone ID: LIB3825-002-Q1-N6-G12
aagacgatcaatgttgactcaaatacatttcatcaaaacaataaaaattaacaacacagatggagagcgaagtacattgtaaaaaccgtctgaaaaggactgaaatgaccttgcatgataagacagtatgggtgaaggttctttaaactactaacaagaacattaagagacagacaccgaaaacaaaaaattgcagcagaaaatatagcggcagaagctgagttattctcaaccttacagtttgtcctcgtactcagaaagtggggtcatctgctccttcaatcccttcctcttacggatctcagcaacatgggctgctgcttgggaaccaggttccaatggatctgatgacatcatatcccagtgatcaaacacacattgtgggaaagcctgtccggaggttgcagccctcagagtgctggagaatccaaaagactcaataactggaaggtaggccttgatgttgtaaagtggagtaccaggcctctgcatctcctcaaacacatgtccacgcttctggttaagaacactgtaaataccaccaagtgcctgctcaggggcttga

SEQ ID NO: 57 - DNA, 201 bp, Gossypium hirsutum
  Clone ID: LIB3825-002-Q1-N6-G3
ggaagagataatacatgtgtttatttcgctaaaaacagttacaaatggttactttcagaccccacatttcaaaggggggactcaacacaaacgataaatcaaaagaaatcttacaacattttttggaacctgaagggggcaagcaaaacaaaaattgcagtttggcgaataatacacagttatattcctactttaagcaat

SEQ ID NO: 58 - DNA, 583 bp, Gossypium hirsutum
  Clone ID: LIB3825-002-Q1-N6-G6
atatcaaattaaaattggttactctattctctttcaaaaggaaccacactacaacaagcagatttgcgtatggaatacataagtgaagacaacaataaattacatttcctgcaaactctgtcttattgaacaatgttaagtatttcataaacctaagctttaaacaaggattactcctcattccgagtctgaaatggcttatatgtcttaaggctttgaattagtccttcaacagatccagctgctgctataagtgatattatcaagcaaacccagcttagtattttcaaacatacccacctgaatgaatactttggtattttcgcttgcgcaatgtgcatctcgatcgggaagtaaaccgttaatggccaaaacgaaccagctccgatcaaacccaagaaatcgttgaagaaagggaatatcattgctagcacagctgttactataacgtacgctgtcctccatactaatctgaagaagttgagatagtaaacgccgcagaacggaacatcattagcgtgttcgcgggttatgaaccttgttgtcgggataatgtatggggcacaagctttcgacgaaccca

SEQ ID NO: 59 - DNA, 583 bp, Gossypium hirsutum
  Clone ID: LIB3825-002-Q1-N6-G7
aaatcgcgaatcgattttgagcttcgaaaacgaaacgtgatcgagcttgagccgaacttcaagtctcacactttgaatgaaaagctcatagtttcatacggtttgaatacagttcggctcaaccccagataacatccttcatactaaaaacaaacgtgcatattttggcatttcaataaattctaagatagtttgcctctagaagattacgttcaactaataagacagcaaccagcttaggaagttctttagagctgacaaaccttgcattgtgtgtaaagatatccgctttagtccttatatttcattgcttctttctcaaaaccaatagtcggaaactgttttgcgtactcctccacttcttgtcggagcttagcgatttcggattgaaagtttgtatccgactgtaaggttgctacaaaatccttcaactttgttccttccgtctgggccttgattttcaaggctaatttcacagcagcgtcaaagaagtcagctaccttctcgaaatcttcctcaatgaaacccctagatgtgagagctggggttcccatgcggataccaccaggaaccatagcagaca

SEQ ID NO: 60 - DNA, 548 bp, Gossypium hirsutum
  Clone ID: LIB3825-002-Q1-N6-G8
aacaatcgtggttaaagaagctagtatacaaggacaaatgaagagacttggacgagaaaaaataacattcacatggacattcattttaaaggaccccattttggtgccttattttgttaaacagaaattgaaaatttgaacttacagcgacctttaaaagattatttttttgcgaacgggcacttgattgggcttttcaagaaacctcaaactgatatgctgtatttggaggctgatgctttttgcaacttcaaccatgggttgacttgcttcaccagaaacaagggcttgcacttaaacctttaaccacaaactcaatgtctgtctctttctttgttgcgaaagcagtatgccctttctgccatagaaattcacgactcctacaataaagcatctagttagcggtgcaaaatacatcctcaaatattttaaataaaaactctatcttgtcatctaaaataatctacacatctgtgaacattaacaactaatgctgagaaaatacgcactttatgcatggaatgtatatagaattttccatgatctga

SEQ ID NO: 61 - DNA, 88 bp, Gossypium hirsutum
  Clone ID: LIB3825-002-Q1-N6-H1
ataatagaggctaatgcctgaaattttattgaacccgagtgagtggactattgaccttgtttccttcattaaacgcagcagcaaccat

SEQ ID NO: 62 - DNA, 543 bp, Gossypium hirsutum
  Clone ID: LIB3825-002-Q1-N6-H10
gttgaaacgctagaattactttcatgacaaggcaaatagataaactcattgcagccattattttttatacaggctgttggcaaagcaactatgataacatctcagtcatcaaattattctctatatacaagcacgctagctagttgaccatcttagagcccagctgcccaggaattgaagtggcgagtgagaaagaacaaggattcaccatcttagttttgctgggaagtacttttctatgagggagagatagtatggcttcaccttttcgacatcgatgcgaactttgctcttgctgtaaagatcatatttgttgaatatttcgagccacttgagattctcgacatcctccccgttcatcagttgcttgtatgaccctgacctatgcaaggcatagaatgaatggtatctgataatgaaaagggctgctgatggcagagttgtatcgttctctttagccaccagatacatgtagtcatcatgcccccatgacatcataacattgttaagtccacagccctctgagtacactccatatttaat

SEQ ID NO: 63 - DNA, 586 bp, Gossypium hirsutum
  Clone ID: LIB3825-002-Q1-N6-H11
agcaattcataactagagtagaatactcacaactgatgatgtaccatgttatttttgcagttaattgaaaaacgaaaagaatggaaacaactaaaagtctcaaaccagatgagcatttgaattcaattgggatcacctgcatgccaagcgaaacaaatagaaatgtcatccatcagcagtactattcaaattataagagcttatcacctgctgagacaatatttacaaacatatatcatgctgaaacgagttaatttcatgtttggcccttaaactataacctaatatgcaatttggtatttataccaaaaaaatgtgtgaatgtgtagtatgtaacttcaacctaacaggctaacacgttgtgcacagtgttagacctttggggtcgaatgtatcacggtaaaatagaacggctacaattacagagttacacattatatttagtgcagatacctcattgcacattcgattgattgaagttcagagccaaaatttttttatatatttgaccaatagagcattctcaaacagcaaacaagataatctttcttgaaacattactctcttagagaaatgacggcaaata

SEQ ID NO: 64 - DNA, 537 bp, Gossypium hirsutum
  Clone ID: LIB3825-002-Q1-N6-H12
ataaacctagtgacttgaatgaaaactttcgaataatacattaaaaaccaacactgaaataaaacatcatctacaataccttattgaaccatttcccttaaaaacccacagtgaaaatgacgattatgattatttgcttatttagcaatggcactatttttttttttctatttaaaccccatagttctaagatttcatggaagcttcatcaaagcctagaagaaacatcctttggatgatgaatgacaatgtaattataagcatcaagtgtcaaaaactcatccaaagttgaagcagtgcattggcgagtaaaaatcttgcatgcttctttatacattcctttcttaaacttctcttttccgacctcacgttcgatccgagccatttcttcttcaaccactcgcccgaacacatggttgactcgaaccccaagtccatcaccgtctaattcaacaccatatttcaaccactgccagatttgaaccctactgatctcggctgtcgcagcatcttccattaggttataaagcgggaccg

SEQ ID NO: 65 - DNA, 407 bp, Gossypium hirsutum
  Clone ID: LIB3825-002-Q1-N6-H3
acaaaagggcaattaaaaccgggaatttttgttaaaaaacaaccctctttggaaaatgacattgtgccccaataaacctgaaagggggaggaaccccctacataattccgttttcttttaccaggggaaaccaaaaaaaaactttaacctccaaaagttaggccaaaggccctatgcgtaaaaaacccaaggttcaccccccgattggatccccggattagttcattggggcgaacaaaaggcctggtcttcttaccccacaatatatggggccatggaaaaactacatttgcccaaataataccccgccgggtaactagaaaccaaggcgcccggtttatggtttccccaccggatatcaaaacaagacccgaatgtgacaaaaccaaaacccccgttattcccca

SEQ ID NO: 66 - DNA, 435 bp, Gossypium hirsutum
  Clone ID: LIB3825-002-Q1-N6-H5
ggagggaaaggggggtttgcattaaatttggaaaaaagccccaagggctcctcattgggaaaaagataaacagaaatgcttaaaattttttaaatttgcaaaaacacaaaccctgcaaactggtgttttaaggaaagaattacatgcttgggctttacaggggaaatgggggggaaaaattttaatgttgagggagcgacggttttttttccaacaactcgtaatggacaaaaaaattatccttggggattatttaaaatgagtggggaacaaaaaagggggatgaacccctctcggatgggttgggcttaactaggggctccacattggggacccttatgaaccaaaatcggaactccttggggaaaaaccagcctttattataaagttcatttgcagcatataattgggcttcgttttttggcatgctggaaa

SEQ ID NO: 67 - DNA, 581 bp, Gossypium hirsutum
  Clone ID: LIB3825-002-Q1-N6-H6
ggcatgaaccatgcagtaaagtttttaaatttctagctttaatagtatgataaaaacttcaacttgagttcaattcttttccatttggattgagtgacattgaaagttacaacttacaagtggaaatggtgacccaaatggcctccattttttgttgaatttattaggtaattaaaaactgcaaattctggcttcatatgcacaggaacgacaaccttcatttgttcctaaaagatcagtttttcttcgccttttactgtccgtgaatgttgcgaattataccgggtcaattctaccgaactagtatactgtcgcaaagggcttgaacgacttgagatcgagaacaaccccggcaatcgaaccggcagctgcggcaatggtgataaagagacaagcaatgctaaggatttgaagacaaacccatcttgtgctccacttaggtatcttcttttgtgaaatgtacatctcaactgggaaataaactgttaatggccaaaatccaagtgccccaaggagtccaacaatgtcattaaagaaaggaagaagcatggagatcaatgttgtaatgatcacaaaaattg

SEQ ID NO: 68 - DNA, 573 bp, Gossypium hirsutum
  Clone ID: LIB3825-002-Q1-N6-H7
ttttttttttttttttttttttttttttttttttttttttttttttttttttttttttttttttttttttttttttttttttttttttttttttttttttttttttttttttttttttttttttttgggccccggggggcccccggggaattcgggcccggccccgggggggtttttttttttccctaagggggggggattaaaagctgggggaaaacccgcccaaaggggttcccgggggaaaatgggtttccaaaaaaaattccaaaaaaaaaaaaacccggaaaaaaaaagggaaaagccgggggggccaaaggggggggccaacccaaattaatggggggggcccaacggcccgttttcaagggggaaaacctgtggggccagttgttttaaaaaatcggccacccccgggggaaggggggtttgttttttggcccccaggggggttttttttttccccggggaaaggggaaaaaggtgtttgcccttaacccccgggccctaaaaaaattgaaaaaaggggcccaccctggttgcccccacaggggaaaaaccctttttggggggggg

SEQ ID NO: 69 - DNA, 582 bp, Gossypium hirsutum
  unsure (1)..(582): unsure at all n locations; Clone ID: LIB3825-002-Q1-N6-H8
aattccaaatataacacatttcagtttcttctgtattttaagccaaaaattctattcccgacaattccgcactgaaaggggttaatagtaatatacataagatcacctaaaactgagagaatttgttaacaaatgattgcactagcatactacaaatggtgggatgaatttttttagaggttaaacaagataccaaagaaaaggaaaaacatgaccctctggtgcacatatccgtggatgaaccaacctcacaaattttgggggaaattgtttatttgtctttcttccaaaacatctttgttgttcgtcttgtacgctatccttacgcgcatgaccaacgatttcttcccatgttggctattagtgaccttcaaattttgtgtgatggatccatcaccgcttgcaggcaaagtgttgctgctagctggatccaagtgcaactgaagaaactttggaactgctgcctggaaaagaaatcattgtnaacattagatgacaaatttgtaaaagtagcctggatcaacgttgtttgagggcttcctcgttgctttgaaaagttgaacatcactcttaangagctgc

SEQ ID NO: 70 - DNA, 580 bp, Gossypium hirsutum
  Clone ID: LIB3825-002-Q1-N6-H9
gaaaagaagatacttcattccatttttatgattttaagagaacagtaacaacatcgatcaaaaaagagagaacccaaaccaaacagtaatagagaaacttaaaattactaactactaaacccaaaccaaacccataacaatataggcccaagcccactttgaaacctaaacttaagacctccagctgccttcagatgcaccgccgccttttgagtaacgagatccgccgtcaccatatcctccttcacggcgtccacctccgtacccaccaccaccataccctccaccatttccgtatccaccttcacggcgtccgccaccatatcctccttggcgaccaccatatccgccgccgcctccaccgcggctgtaaccaccgtttcctcctccaaatcctccgccaccgcctccacttttgcgcgattgggcttcgttgacggtgatgttccttccatcaagattttgaccgttcattccttcgatcgcgtccctcatagctttctcgtcacggaaagtaacgaatccaaagcctcgggatcttccagtctcacgatcattaatgatcttcgattcgacgatt

SEQ ID NO: 71 - DNA, 580 bp, Gossypium hirsutum
  unsure (1)..(580): unsure at all n locations; Clone ID: LIB3825-001-Q1-K6-A1
aagaaaaatggttctgctagagaaactttgggatgatgtagtggccggacctcaaccggaacgtggccttggccggctgaggaagatcacaaccaccccacccttgtccaccaaagatgaggcttcatcaatggcgatgccgacgagtccgacgacacctgggacaccgtcgacgccggtgtcggctcgtagggacaacgtgtggaggagcgtgttcaatccaggtagcaaccttgcaaccaaaggctttacagcggggagacccggagcaagcatcaccgctgattgggcgatggctgacggcggcggagggtagcaaaaccactagcagaaggttgctgctactgaaggagcaggatttgcatgtaaatatatatatcgttctttttaaaagtttttcaatgggtcaattaagtagtagtagtagtaagtaagatgtttaaaagagtaagcggcagcgcagggtggtcgatgaccttatgtcattcaagattccggccgtgagcggcggcagctgctgctatattaaattattattaaataaagggaaggggtattgtacgaaananaaaannnnnaa

SEQ ID NO: 72 - DNA, 642 bp, Gossypium hirsutum
  Clone ID: LIB3825-001-Q1-K6-A10
gtcaggtttgatcgtaatggtcctgctgctattgcaaagtaccaggcagataattcgattcctggcaagaatgatggctgtaactcgatcggcccaactccacacaccttgcaagaacttcaagatacaactcttggttctcttttgtctgcactgatgcaacactgtgatcctcctcaaaggcgattccctttagagaaaggcgttcccccaccatggtggcctactggaaatgaagaatggtggccacaactaggattgcccgaagatcaaggccctcctccctataagaaacctcatgacttgaagaaggcttggaaagtgggggttctcacagctgtgatcaagcatatatctcctgatattgccaagattcgcaagcttgtaaggcagtccaagtgcttacaggacaaaatgacagcaaaggagagttcaacttggcttgccatcattaaccaggaggaagccttggcccgagaactttaccctgattcctgcccacctttgtcctcaggtggtggaaatgtatctttggttataaatgactgcagtgagtatgatgttgaaggtgttgaagatgagccgaacttcgatgtgcaagagcgcaaacccaggactatcagttctaatttggtcatggag

SEQ ID NO: 73 - DNA, 627 bp, Gossypium hirsutum
  Clone ID: LIB3825-001-Q1-K6-A11
tccgaaaaaaaaaaaaaaaaaaaaaaaaaaaaaaaaaaaaaaaaaaaaaaaaaaaaaaaaaaaaaaaaaaaaaaaaaaaaaaaaaaaaaaaaaaaaaaaaaaaaaaaaaaaaaaaaaaaaaaaaaaaaaaaaaaaaaaaaaaaaaaaaaaaaaaaaaaaagggggggggcttttttggggttcaaatttttggtcccggtttttgcaaattttttttttttttttgggggccctaaatttaatttagggggccgggtttttaaaccttgggggtgggaaaaacctggggtttcccaattttattgggtttggggaaattcccttttttgcaggtggggttttttggaaaggggcccgaccgattgccttttcaaaaaatttggcaaccttttttggtaatggggccccccttttttgggggttttttagggggggggggttggggtttccccccagggggccctttttttttggaggggctttgggggcggtttttttggtttttttccttttttttttggaacttttgggggtttttcccgttaagtttttaatggggggctcccttttggggttcaattttattgttttggggctctttcccccaaaaaaatttttttggggggt

SEQ ID NO: 74 - DNA, 644 bp, Gossypium hirsutum
  unsure (1)..(644): unsure at all n locations; Clone ID: LIB3825-001-Q1-K6-A12
aaggtcttgcttacacggtgcagtcctatatgtttgccaaagttgttcaaggacttgaaggataagaagatagatactatccttcatagtattgatatgggcccgttgttgcaaatgaaatctcgatcaatgaggagggaggtcataatatacttgattgagaggttcgatgctgaaaattgtgctataaaagttgacagtcataatattactctcactgttgaagatgtggccagtatcttggatctaaagatgatgggatcgatgtgtccactgttttgaggaggaatcaaggacataaattgagtatcccaaaggatgttaggtttgttaaattagtgcagcatatgatcactttggaggctgaatctgctaaattaaaggccatggtgcttgcatttatcatcggatgtttcttgtgtccatcagtcttccctttcccagcgaggagtactagaattgtttgtgcgatgaaggcctcaacggtaagttgaattgggcaaaacacacgcatgaggttctgattcaaggattaagaaattatgtcttcggcaataggattggaaagaaatccagtttattgcagattcggttntacaattacctggctggattggagagcaagaaatttggcaattctgaac

SEQ ID NO: 75 - DNA, 651 bp, Gossypium hirsutum
  unsure (1)..(651): unsure at all n locations; Clone ID: LIB3825-001-Q1-K6-A2
cggacgcgtgggttgaaattgaaaccctagcctcctattatttccttcagccgacccttagtgtcaactcttaagcgccgagtcgccaccatgaacggcgaccagcgtgcgcgaacctcgagattactttttcagccttaagattccctctatacctcgattttaacggagcagaaggaatcccatggaatttgtaaggtaagcttttcacttcccttctccctttcagcccatctgcgggcttcatcggcgctgaaagcgcctccacccaagacgcgattttaaacagatccctaaggatctaaaatcttggaccggagaagtgaacaatgaatagatcgacccccgaatcaggtaagtaaaccctttccccttttttatatatctttatgcaatagatttgaaatcaataaaaagaaaaaaaaacgatgaacaaaagagacacatttaagatgtttgcctccgattgtttcttcttctgtttttttttatttccagtgttcgtgtccaacgattacaaagaacataggacttttatatagtcgaaaataaaaatgaaaatacaataagttttccttttttctctttttttttcttactgggtgttttgctgggctgntcttggcctttgtttgtcttcttttacaggta

SEQ ID NO: 76 - DNA, 651 bp, Gossypium hirsutum
  Clone ID: LIB3825-001-Q1-K6-A3
aaagctttgataatggctgccagaaggatttcctctctcttatcttcttctgcaacttctttgggaaggttttcaagttggggaagaagaattaatagctttagtactgctgctgctgcgattgatgaacctatacatccatctattcaagtagatcatactcagcttctcatcaatggacaatttattgatgctgcatcaggaagaaccttccctacagttgatcctaggacaggagatgtaattgctcgagttgcagaaggagatctcgaagatgtaaatcgtgcggttgctgcagctcgtaaagctttcgacgaaggaccatggcctaagatgactgcttatgaaaggtcgcgtataatgttgcgtttcgccgatttgctcgagaagcacactgaagaggtagcgaaacttgaaacttgggacaatgggaagccttatgagcaagctgctaagattgagataccgatggttgtgcgaatgttccgatattatgccgggtgggcggacaagattcatggattcacagttccagctgatggacaacatcatgttcaaacactgcatgaaccatatggtgtatgtgggctgatcattccatggaattttcctcttttattgtattcctggaaagttggtccggcattagct

SEQ ID NO: 77 - DNA, 629 bp, Gossypium hirsutum
  Clone ID: LIB3825-001-Q1-K6-A4
ctttctctcatgctctcatcacctgaaatggaggagaaagaagcagaagtagtagaagcaccaaaaccagctgactggttcaataccttagtatctcttcaagctgatctcctttacaactgtttcaccactctttcttcccctttcttcaccctcttatgggcggcctttgagtcctaccgccgtgccgaagagacgacagccaactgtctaaacggtggttcaaaagctaccttccagcatcacccacggtagcaccgtcttggtcaagagagttgggttaggacttgttggtgctgctcaaatgtgcatggtgttggtttttctgatggttttggctgcttttgtgggaatttggttggtgcaactttgggcggaggagcctgttttcgttagagaaaaattgttctttgattacacagaggtgaatcctacggcggtgttttgtgctggtggaggtggatttgatggcagctgttataggaagaagcagatgggtgttcccgttggtcatacctttcatgtttatttgcttcttttgatgcctgaatctgatttcaacagagaaattggaatgtttcagttgaatgcagaactgctatcaatcaatggagatgtaattggtgagt

SEQ ID NO: 78 - DNA, 645 bp, Gossypium hirsutum
  Clone ID: LIB3825-001-Q1-K6-A5
cttttcttctatttcttttccccaaatgcagcctctattttagatcaaaagaaattccagcctttaaaatcaaattttttagggtttcctccacttgactgccaaaccaccatgattttaggtgattaccagtaagcgagacgtgcccaatcttgccgttaaaggaactcgaccagatctaaaaggattcggtaagtattttcccttctttcttctttatttgaatgaagctttcaaatctcatgttatttaaaaaaaataaaaatagatttgtaaaatgaatagatttccactattatgtgacctctcgcccttatactcgcatgacaaatttagggctttcatcagcctttagttgcataaaaaggagcaaacaaataagaaaataaagagaaaagaaaaaacaggggaaaaaaatcggaagagaaaaaaaatgaaatcacctctattgatctaaatgcacctttctctcttttctgtgcgtgcatacagatattgtatgcgtagagtctattctgtgtgcgtagagtgtgtaatctcctccctttacaaagattaaaagctgggcttttgtagtcgaaaaaggaaatcaaccgaaaatatacaatatatttgtttccattcgcttgcctgttttgttctttc

SEQ ID NO: 79 - DNA, 619 bp, Gossypium hirsutum
  Clone ID: LIB3825-001-Q1-K6-A6
gctgagtttaagcatatcaataagcggaggaaaagaaacttaccaggattcccctagtaacggcgagcgaaccgggaaaagcccagcttgagaatcggtcgccatcggcgtccgaattgtagtctggagaagcgtcctcagcgacggaccgggcccaagtcccctggaaaggggcgccggagagggtgagagccccgtcgtgcccggaccctgtcgcaccaagaggcgctgtctacgagtcgggttgtttgggaatgcagccctaatcgggcggtaaattccgtccaaggctaaatacgggcgagagaccgatagcgaacaagtaccgcgagggaaagatgaaaaggactttgaaaagagagtcaaagagtgcttgaaattgtcgggagggaagcggatgggggccggcgatgcgccccggtcggatgtggaacggcgagagccggtccgccgatcggctcggggcgtggaccgacgcgggtcgtggcggcggcccaagcccgggcctttgatacgcccgtggagacgtcgtcgcctcgatcgtgggattcagcacgcgccgcctcggcgtgcttcggcacctgcgtgctccgggcgtcggcctgcgggctccccattc

SEQ ID NO: 80 - DNA, 615 bp, Gossypium hirsutum
  unsure (1)..(615): unsure at all n locations; Clone ID: LIB3825-001-Q1-K6-A7
cctttgatcagctcatgggaacactgccagctgccagttataaagctttgcctgaagaatatgggaaactgatgactgatccatcatcacctatctataatttctatcccaccgattttgagattgacatgcatggaaaacgctttgcatggcagggtgttgtcaaattgccattcattgatgagaagaagttgctttctgcaactattatatcttgaagctactttaacggctgaagagcagattcggaacagtgtgatgcttgatctgctatatgtccatccccttcatcctttggcttctcaagtgatttcgtattatcaaatgtaccatcatgttcgcccccatgaaagattcttatggccaatcgacacaaatgctagtggtggaatgaatggatttctttggttatctgaaaggaatggttggcaacatgtagtctcttcccctgtcaagggtttgccgcatatagaatttaaccaagtgttgaatgttacatatcttaatccttcacaccatagacacattccaagacttccacagggtgttttggtacccaaaaaggttctaacaccattggacatcaaaccttttnctgtattatggcatgaagac

SEQ ID NO: 81 - DNA, 633 bp, Gossypium hirsutum
  unsure (1)..(633): unsure at all n locations; Clone ID: LIB3825-001-Q1-K6-A8
accctaccaaacgctcccttacgccaccgaaacggcggagcctcctctctttttttcctctcaaattttccttcgctttctcgatctttcctctctctctctctctctctctctgttcttcaacatcgtgtttagatccgttcctccatccttgaaagattccgtctttgacccttcttcgttgaatctatcaaacaaattagggttccgatctgttacctcttgtgttcgtttttaaaaaaagaaattttttttgcctcaaaaattcatcttccaaaaaggaaaaaaagaagagagagaggtttcgattttccttgattttgcttgagatttatgttctaatctgaaattcattaccttagtgatttgctatatcggttcgatctccattacgattgcttgattttgttttggatttggggttaaatccaagcttgcgttttttttgagggtctggttagtggtgaaaccgatggagactcagagcccgaacggatctttgcagaaacaatcactgcctccgaagaattatggaatcacgaaaccaatatcactcgcggngcctagtgaggctgatattcagcggaatacggaattagagaagtttctgatagagtcggngctttacgagag

SEQ ID NO: 82 - DNA, 325 bp, Gossypium hirsutum
  Clone ID: LIB3825-001-Q1-K6-A9
gaacccatttggagaatgcaacaagggttcaagaacaagaatcgaacaacaaattaataccttagggacaatgctgggctttgtgggcgtggggaacaaataagcaattgctttgggttaataaagtcagattagagggagacaagtaagggaagcatttatctgctcgttcatggtgggtctaaggaatagagctacagaagttataatactattgacaatatatagtagcttaattagtgcgtcagagaatcatattataattcgagtctcttattttaactttcttttacaatttagcattaacacctttcggctttttctt

SEQ ID NO: 83 - DNA, 655 bp, Gossypium hirsutum
  Clone ID: LIB3825-001-Q1-K6-B10
gcagaaaatcgcgcaaaatttatcgtcttccactcaaaacaaaccagaagagaatctaccatggcgcccaaagccgagaagaagcctgctgagaagaagccggccgaggagaaaaagactaccgtcgctgagaaatcccttgccgagaagaagccgaaggccggtaagaagcttcccaaagaaggcggcgcggccggagacaagaagaagaagaaggccaagaagagcgtggagacctacaagatctacatcttcaaggtccttaagcaagtccatcctgatatcgggatctcaagcaaggctatggggatcatgaacagtttcatcaacgatatcttcgagaagcttgctcaggaggcttctagactcgcgaggtacaacaagaagccaacgattacttccagggaaatccagaccgcagttaggcttgtacttcccggagagctcgccaaacacgccgtctctgaaggtactaaggcggttaccaagtttactagctcttgaaatttgaccttagggttttttttctctctgtaatttggcggaattcgataaatttaggattagggttttatggaatcttaaattgttgttgttacccttgtgttggttgatgtggttttgttgtaattacaagttgctaatggaatttgga

SEQ ID NO: 84 - DNA, 641 bp, Gossypium hirsutum
  Clone ID: LIB3825-001-Q1-K6-B11
ggaaagaggggccaaaattgttggtgttttgcatggagatgaagctgctgttatattgcaaacaaatcgtggaaatctggagtgcatctatccaagaaaattggtgctagcctcaattgtcaatgctttgaaccaaagacgctttagggatgcacttcttatggttaggcggcacaggattgattttaatgtgattgttgattattgtgggttgcaagtgtttactcaattagcttccgagtttgtcaagcaggtcaaaaatttgagttacataactgactttgtttgtgctattaaacatgaaaatgtgacggagaaactttacaaaaagtttctctctccacctagctgcaaggagcaaaaggatctgttaactaatgatttcaagggttctgatgctagtttagatgcaaataacaaggtctcattggtgcttctggccataagaagggcacttgatgaacaagtacctgaaagtcctgcaagggagctctgtattttgaccactctggctcgtagtgatccccctgctcttgaagaggctttggagagggtaaaagtaatccgggagatggagttatcaggttctgacgacccaagacaagtaaattgcccttctgctgaagaagctctaaaacatc

SEQ ID NO: 85 - DNA, 644 bp, Gossypium hirsutum
  Clone ID: LIB3825-001-Q1-K6-B2
gctaactcaagatagtggtatgagagggtgttggtttagagctcgtataattaagaagcacagaaataagatgaagttgcaataccaagacatccaggatgcagctaatgaagctaacaaattagaggaatggattttagcaaccaaggttgccacttctgatgaagtgggtattcgtgtttctggccggacaactattcgaccgtcttcacaattcaccaaaggtagtacttcatgtattggtgttgggtctgttgttgatgtctggtggcatgatggttggtgggaaggccttgttgttcaggagttggaagataaatttcgtgttcatttcccaggagaaaagcgggaatcagtctttggtatcggtgatataagacaatctcaggaatggataggaaatcggtggataaatatgaaggaaaggcatgatcttgtgagtaccatcatccaggccggaaagcaagaggcaagcaaatcctataatttcaataccgacaaaaacaccatttgtgtgagtggacagtgtggtaaagaagccactgagtgtaaaggttctgctgttgaaccaggaaatgagagggcacaagatgcgagtgttgttccagatctttcaaaggatggtcggctttctcagttgaagt

SEQ ID NO: 86 - DNA, 606 bp, Gossypium hirsutum
  Clone ID: LIB3825-001-Q1-K6-B4
tctgtcaactgagaaagtgaaagaaaaagtcaacattgaggtaccatggaagaaacttttgttccattccgtggaatcaagaatgatctgaaaggaaggcttttatgctacaagcaagactggactggtggcttaagtgcaggtatcaggattcttgctccaacgacatatatattctttgcttcggcaattccagttatatccttcggagagcagttggaaagaaatacagatggaagtttgactgcagtacaaactcttgcatcgacagcactttgtggaatcattcattcacttgttggaggacagcccttgctcatacttggagttgcagagccaacagtattgatgtatacgtttatgttcaactttgcaaaggaccgaaaagatttggggcataaactcttcttagcctggactggatgcaagctattcggggaattgtggaggagtttggcattcctcacagagaaaatcctgagcaaacagcattgcaggcttcttggcgatttgggaatggaatgtttgcactggttctgtcctttgggctcctccttactgcactaaagagccgtaaagcaagatcctggcgctatggaacaggct

SEQ ID NO: 87 - DNA, 111 bp, Gossypium hirsutum
  Clone ID: LIB3825-001-Q1-K6-B5
cggacgcgtggggaaagttcgatgtatgttatctaatgctggattagatagaaagttttgggctgaggctgtgacgtacgctcaacatctcatcaatcatttgccatcatc

SEQ ID NO: 88 - DNA, 628 bp, Gossypium hirsutum
  Clone ID: LIB3825-001-Q1-K6-B8
tcggagtcgtgcgcgtccgtcgatcgagacccttgaaccctttcggcatcgcaaggacggtgctcgcatcgcgaccccaggtcaggcgggattacccgctgagtttaagcatatcaataagcggaggaaaagaaacttaccaggattcccctagtaacggcgagcgaaccgggaaaagcccagcttgagaatcggtcgccatcggcgtccgaattgtagtctggagaagcgtcctcagcgacggaccgggcccaagtcccctggaaaggggcgccggagagggtgagagccccgtcgtgcccggaccctgtcgcaccaagaggcgctgtctacgagtcgggttgtttgggaatgcagccctaatcgggcggtaaattccgtccaaggctaaatacgggcgagagaccgatagcgaacaagtaccgcgagggaaagatgaaaaggactttgaaaagagagtcaaagagtgcttgaaattgtcgggagggaagcggatgggggccggcgatgcgccccggtcggatgtggaacggcgagagccggtccgccgatcggctcggggcgtggaccgacgcgggtcgtggcggcggcccaagcccgggcctttgatacgcccgtggagacgtcg

SEQ ID NO: 89 - DNA, 646 bp, Gossypium hirsutum
  Clone ID: LIB3825-001-Q1-K6-C10
gattcttccaccgtcgttaagttgcaaagcgccatcaagttcaacggcggaggtcatatcaaccactcaattttttggaagaatcttgcccctattcgtgaaggaggaggtgagcctccacatggttctttgggttgggccattgataccaactttggttcattggaatcattgattcagaagatgaatgctgagggtgctgctttgcaaggctctggttgggtgtggcttggactggacaaggagttgaagaagcttgtggtcgaaaccactgcaaatcaggatccacttgtgaccaacgggccaaatttagttcccttgcttgggatagatgtttgggagcatgcatattatctacagtacaagaacgttagaccagattacttgaagaacgtatggaaggtcataaattggaaatatgcaagtgaagtgtacgagaaagaaagtgcttgaggtttgatgtagagaattaagaggcaacttgtcggatgttgtatggcaaagagaataacaagaagaatagtgtatgtgttgtatgaaagttaataaatattaagcttaatgcttaaaaattagatggcgtcttgtaccactggtgaattacatttacatttacccttgagtgacccttgcttttgggtttttc

SEQ ID NO: 90 - DNA, 577 bp, Gossypium hirsutum
  Clone ID: LIB3825-001-Q1-K6-C11
ctttttgtcaggcaaaagacttggatttattcttcaatagtcacttctgggttgaatcaaagtctaacaaaatgccgtggtctttcgtcaactgcgtgcgcttagttgttttctttcttgtcatactgtaattttatttgtttctggtgaatttcgattgaattttaaaggggatacggttccttcaactttcgtttgcaattggaaaattttgggttggaggtgtgaggatgtacatttcggtaaccataaagagatatcgagcaattaaggaagttgggaaaattaaaatgagcgttggtgttattgcatactataagctagttcaagtttgtcaggcagagtatttccgtcagttgcttaagcctgttacgtagtctggtattacagaactcttggaaattgggatctgggagagtgccgttcaattgtgttatgtgtaaggctgtgacagaatggaacatctgattgtgttgatggcaaatttgggataggtagctttgacatattgtaatggcgatccagtagtttagatttttgtctcaccgtaatttagttataaatcttcttccaactt

SEQ ID NO: 91 - DNA, 241 bp, Gossypium hirsutum
  Clone ID: LIB3825-001-Q1-K6-C2
gtgggacccacgtcgttcgcggacgcgtgggttgaaattgaaaccctagcctgctatagttttcttgagccgacccttagtgattactttagagcgccagagtcgccagcatgaacggggaccagcgtgcgcggacctataggtgacattttcaggctgaagagaccctgtatacctcttttttcacggagcagaagggactccctggtattggtgaggtaagcttggcacatcccttgta

SEQ ID NO: 92 - DNA, 619 bp, Gossypium hirsutum
  Clone ID: LIB3825-001-Q1-K6-C3
gacattgcatactaaatgaggtgttggtttgtattcgattgttaagttagaaaatttaacatggagaatgaatctcttagtaaagtggaggataatgcggccgttcgtgcatggtcagagaagttgcaaaccgagaaaggggatagcttgatagaaggatatacatcagagttacagaactttacccgcattattgtaacacagaactaagctgcaagagttgaaggatatatggactagttgggatgagggcactaaacagttgttctaccagagttatggtgatataccgtacttgctcgatgttaaggtggataagcgattgttccgaggtatggctcaattttggaatgctgcttataattgttttacatttggagaagtagatttggttcctaccttagaagaatacactactttgttgaggagtccaaaggcccaagccaggaaaatttatgctaagcttactaatagtcaaacttttgcgaagaggttggtgaatatttcagggatgagtgaatcttgggtcactgctcaaattcaacaaaagggggatagcaagtgtattccttaggaaaatttgagagatttgattttgacgcacccggatgagaagaaa

SEQ ID NO: 93 - DNA, 552 bp, Gossypium hirsutum
  unsure (1)..(552): unsure at all n locations; Clone ID: LIB3825-001-Q1-K6-C5
tttttttttttttttttttttttttttttttttttttttttttttttttttttttttttttttttttttttttttttttttttttttttttttttttttaaaaaaaaaataaaaaaaaaaaattaaaaaaaaaaaaaaaaaaaaaaaaaaaaaaaaaaaatataaatttttttttaaaaaaaaaaaaaaaaaaaaaaaaaaaaaaaaaaaaaaaaaaagggtgaaaaaaaaaaaagggaaaaaaaaaaaaaaaaaaaaaaaaaattttaaaaaaaaaaaaaaaaaaattaaaaaaaaaaaaaaaaaaaggggggggaaaaaaaaaaaaaaaaaaaaaaaaaagggaagaaaaaaaaaattttttgaaaaaaaaaaaagggagggttaaaaaaaaaaaaaatttaaaanntttttttttggaggtttaatgtgnntnaaaaaaaaaatatttttnaaaaaaaaaaaaaaaaaaggggagaaaaaaaaaaaaaaaaaaagggagaaaaaaanntttttttttttttttttttaaaaaaaaaannnnnggggggg

SEQ ID NO: 94 - DNA, 638 bp, Gossypium hirsutum
  Clone ID: LIB3825-001-Q1-K6-C7
caaacttttgtcataactattgtttgccatgttttgggtcatttttttggtattgtcaataaccttaaagattatgtagaaatttttgtgtctagtttcttaaccacataggacaatcatgttccattcctaattcgtatggcccagagctttgcttgcagatgatactgtatgacactccaggtgttattgagaagaaaatgcacattttttattctatgatgatgaagaatgtccgaagtgctgccttgaatgctgactgtgtacttgttattgttgatgcatgtaaagtgcctgaaaatatcaatgaagtgttagaagaaggcgtaggagattttaagtgtacactgccaactttactggttttgaataagaaagatctgataaaacctggtgaaattgcaaaaaagcttgagtggtatgagaaatttactgatgttgacgaggttatacctgtgagtgcaaagtatggacatggggtagatgatatcaaggattggatactgtcaaaacttcctactgggccaccttactatccaaaggacattgtaagtgaacacccagaaaggttctttgtatctgaaattgtcagagaaaagatatttatgcagtatcgcaatgaggttccttacgcatgt

SEQ ID NO: 95 - DNA, 324 bp, Gossypium hirsutum
  Clone ID: LIB3825-001-Q1-K6-C8
gaacccatttggagaatgcaacaagggttcaagaacaagaatcgaacaacaaattaataccttagggacaatgctgggctttgtgggcgtggggaacaaataagcaattgctttgggttaataaagtcagattagagggagacaagtaagggaagcatttatctgctcgttcatggtgggtctaaggaatagagctacagaagttattatttattgacaatatatagtagcttaattagtgcgtcagagaatcatattataattcgagtctcttattttaactttcttttacaatttagcattaacacctttcggctttttctt

SEQ ID NO: 96 - DNA, 617 bp, Gossypium hirsutum
  Clone ID: LIB3825-001-Q1-K6-C9
gaaacatataacacttgccaacacatcgtttaacttcagccatcttcacataatcagtattttgtctgatcatccattattctcctaatttcacttcacaaataactcatctactcattacattaccgtcgcccaaaatcttcgtggtctacccacttcgatggaagtagagaaagggaaaggaaccgacgtttcagacgtacagggcgaagatgacctcgacgaggaacctggggaggaaattgaatcagctccgcctcttaaggttggtgaggagagagagttgggtaattccggtatcaagaaaaaactcctcaacaatggtatccattgggaaacgcccgagttcggcgacgaagtcacgggtgatttccattatatttatttcaagacttcaatttcttttaaaaaaaatatccttgttttgggtttatttttagtttttgagtaaacagtgatcgaaactatgcagttcatttcgtgggtactttgcttaacgggataaagttttgttccacaagggataatggtgaaccgataacttttgagcttggtgaaggtaaagtggctaaaggtttggataatgggattacaactatgaaagagggggaacgtgt

SEQ ID NO: 97 - DNA, 617 bp, Gossypium hirsutum
  Clone ID: LIB3825-001-Q1-K6-D1
cggacgcgtgggtaaatttggcattgttgagggtcttatgaccactgttcattctattactgctacacaaaagactgttgatggtccttccatgaaggactggagaggtggtagagctgcttccttcaatatcattcctagcagcactggagctgccaaggccgtcggcaaagttttgccagcactgaatggcaagctgactggaatggctttccgtgttcccactgttgatgtctctgtggttgacctcactgtgagacttgagaagaaggctacatatgatgaaattaaggctgctatcaaggcggaatctgaaggcaacttgaagggaattcttggttatgtggacgaagatttagtctcaactgacttcatcggagacaacaggtcaagcatttttgatgccaaggctggaattgctttgaatgacaactttgttaagcttgtgacttggtatgacaacgaatggggttacagttcccgtgttatcgacttgatccgacacatgtctaaggcttaagtgagtgagtgaatgtgctttgtgtatccaagctttagcaattttaatttagaagagatgttatgagagaattaacgaattgtacggagcatatttt

SEQ ID NO: 98 - DNA, 483 bp, Gossypium hirsutum
  Clone ID: LIB3825-001-Q1-K6-D10
agatactctaattaaggaggttgaaaaagttttcagtgcaaaccatcccgatcctgtggagattgagaaagcaaagaaagtgttgaatgaacatgagcaagccctagttgatgcaattgctagactcgaagatgcttccgatggtgaaagtgcttaaaagcagatggggagcatccgtatctctcaaggacaatcaatggatcgaccaaggccatggagaaaactgcagtttgacgataatgatatatgccattttagccatagcatattttatgcattcagcagcagaagctttttttgtaccttgttttatgatactcttatatcagctaggctaaaatgcctttttttcttttggtacataatctttttaggcagaaggttcatcggatttagtctcatttgtaacttgacttttagcttgaaaaatgctttgtataaaatttttttaaatgctagtgaatgataatattctgaccttgt

SEQ ID NO: 99 - DNA, 641 bp, Gossypium hirsutum
  Clone ID: LIB3825-001-Q1-K6-D11
gttctttccttgtatgccagcggccgtacaaccggtattgttttggactctggggatggtgtgagccacactgtccctatctatgaaggctatgctcttccacatgccatcttgcgtctcgacctagccggtcgtgatctcactgatgctctcatgaaaatattaacggagcgtggttattctttcacaactacggctgagcgggaaattgtgagagacatgaaggagaaactagcttacattgctcttgactatgaacaagagttggagacagcaaaaaccagctctgccgttgagaaaagctatgagctacctgatggacaggtcattaccattggggctgaacgattccgttgtccagaagtcctcttcctgccatccatgatcgggatggaagctgctggcattcatgaaacgacatacaactccatcatgaagtgtgacgtggatattaggaaggatctctacggaaacattgtcctcagtggtggcaccactatgttccctggaatcgctgacaggatgagcaaggaaatcaaagcattagccccaagcagcatgaagattaaagtggttgcaccaccagagaggaagtatagtgtttggataggaggctccattttggcatccctcagcacctt

SEQ ID NO: 100 - DNA, 645 bp, Gossypium hirsutum
  Clone ID: LIB3825-001-Q1-K6-D3
cttcccttattgactcagtcgcagggttcacacatgatacagggttggctgtcgaatggtccgttgacgagcagtacgtattgaaggagggccttgaaaaatataaaaaggaaccaaatattatgaagtacataaagattgcggctacattgcctgataaaactgtacgtgatgttgcattgaggagtaggtggatgcaaagaaagcgaaggaaacctgaagaacttaatgcgggtaaaagggttaacaataggaaggataagctggtggaatcatcttcaaagatgaatatgccttcagatttgccacaaaacacagctccatatcctctcacaatgcaccctctagaccagaatgggagaataccttctgaaggaatatttggtacaactatgcatcttctgaagcaaaattctcaagtacttagtcaaatcacatccaacctttctgcatacaagttacaggataacgttgatctcttttgtcatgcaaagaacaatattactgccatgctaaaagacatgagagatatgccgggtttaatgagccatatgctgccattgcctgtgtctgttagtgaggatttagcaaatagcatgttttgtagtgcaactcaggcaacgattctcgggatcaatctcaagc

SEQ ID NO: 101 - DNA, 626 bp, Gossypium hirsutum
  Clone ID: LIB3825-001-Q1-K6-D5
cccacgcgtccggttcatccaatagaattacacaaattgaacttccgatcaacggaactatgagccaggaacaaccacaaaggcctggggctagtcaggaacccatcaagtatggtgatgtctttaacgtcaccggtgaactggcttcaaaacctattggaccaaaagatgccgccgccatgcagtcagctgagaacaagatccttggagaaacaccaaaaggtggtgcagcagctgccatgcaatctgcagccatcgccaatgaaagagcaggcgtcgttagtcacaaccaagctgacgttgctggagaccaaggcgtcgccgtcattaagtctgacgcagatggcgatgttatgatcacagaagccgttgctggacagattgtggggcaatacaggcaaccagatgtttcagcggtgactactccagcaatgttggttgatccaggatcaattacgattggagaggctttagaggcggcggccatctctgctgctgataaaccgattgatcagagcgatgcggctgcaattcaagctgctgaaatgagagccactggcagcagcgagataactccggggcggtattgcatccgaagctcagtctgcagccactcggaatgctcg

SEQ ID NO: 102 - DNA, 596 bp, Gossypium hirsutum
  Clone ID: LIB3825-001-Q1-K6-D6
aaaaaacagaagagaccccccattttcctctgctagggttttgaaacccatttcgcagatcgccgaaagctccgccaatatctggcctcacagctttagcccgagcttcgattgcgacgaagcgagcaaggtttcaatcggcgctccgctaaggtgaatcatttccctttttctctctatttacaaaaatcaatagtaataaccatgcatcgatggaacagagaagaaaaaagcagaaaaaaaccttcaagaaacttttgatcttttgtattgatttcgtgtctgtgtgcgtaaccttacaagaatgaagcaatcggccctttatattgccgaatattacaaaaatggttttttcctcttttttttctattatttcttcccttttttatatctgctggcctattgttgttgttgttttgctgtgttgttttcgtcttctttgcaggtacggtggccagctggtgtatggagccgtacggtgacgtggcgcggaggctcgatgcatgctgaaggtaggagcggtggctgagtttagggttttggtctctagggtttgctggtaattttctctggtttgggctgcgagtatttgggct

SEQ ID NO: 103 - DNA, 114 bp, Gossypium hirsutum
  unsure (1)..(114): unsure at all n locations; Clone ID: LIB3825-001-Q1-K6-D7
aaaaaaaaaaaaaaaaaaaaaaaaaaaaaaaaaaaaaaaaatttttttttttttttttgtgagnaaaaaaaaaaaaaaaaaaaaaaaaaatttttttttttttttttttttttt

SEQ ID NO: 104 - DNA, 620 bp, Gossypium hirsutum
  unsure (1)..(620): unsure at all n locations; Clone ID: LIB3825-001-Q1-K6-D8
gctgctcggagctccatacacgatccgaaaccgatagagattcaaattaaaggagaatgtgcggggacgttacaaactgggacgaagaagcatatagggagagtatattaagggaaagagagatccaaactcgaaccgtattccgaaccgtttgggctccttcctttaaccctaaccccgaatgcgtcgtggtcgcctccagcgacggttccatcgcttcttactccatttcttcctgtgtttccaaacacccgattggtttctgcagtgctagggctcaacggttgttaccggctgagccggagggtttccttgaagggcatgatggacctgcgtatgacgtgaaattctacggcaatggcgaagattctttgttgttaagttgtggtgacgatggtaaaattaaaggatggcggtggaaggaatttactgaatctgaggtgcctattacctttcaaggaaaccatatgaagccagtgcttgatttgatcaatccacaagataaaggtccatggnggtgctctctctccaattcctgagaataatgccattgctgttgatcctcaggggggatccatcttttctgctgctggtgattcttatgcatattgctgggatgt

SEQ ID NO: 105 - DNA, 638 bp, Gossypium hirsutum
  Clone ID: LIB3825-001-Q1-K6-E10
cccacgcgtccggggacggtttattctcatacagcaacctcacagttcccagcccttaactcatccaaaaaggaacccaactgaaaggctgaatctttagagcttttttcttttcaagaaacaaaaaccaaaaattaaaaaaaatgcgagcttggttctcaggcggcagtagtgggaatgaggaggagcggggaaaagaagggtcatctcttttatcagattggaactcatatgctgcttcaaaagaagcagaagagggaactacaactgtgtttgggtttgatcttgagtctgctgcgaggtccgccaatgatactgtcactggtaccttcaatgttgtttcaaaaggggtgagagatctccctgggaatctccaatctgccacaagtagtgtcccttcaggaaaagcattcatctactttggtttatttctggcagctggggtctttttttgtttttattgcttttaccatgtttcttccagtcatggtgctcatgccccaaaaatttgcaatttgctttacccttggatgtggctttatcattggatcattctttgctctcagaggcccaaagaatcagttggcccacatgtcatcgaaagagaggcttccttttacattaggatttattggaag

SEQ ID NO: 106 - DNA, 646 bp, Gossypium hirsutum
  Clone ID: LIB3825-001-Q1-K6-E11
cccacgcgtccggagagagtgtatgtgtgtaagaaaaagaacagaaaaagaggcagccatagccaaaagagctcttgtcggcttcgaccgaacattgacgcaaacaaacttatttacactattgaacagagagcactcaaagcacagggtttccattgagtgatttcttttggagggcgtttctatggcttttccggcatcagatattccatctgctgaacaacaagcagatgatcctttatatcgtgaactatggcatgcctgtgctggacctcttgtcacacttcctcgtgtaggggagcgtgtttattacttcccacaaggtcacatggaacaacttgaggcgtcaatgcatcaagggttagaacaccaaatgccttcattcgatctgccatctaaaatactttgcaaagtggcttctgttcagcgtaaggctgaacctgatacagatgaagtttatgcccaaataactctggtacctgaagtagatcaaagtgaggttatgagcccagatgatccacttcaagaacctgaaaggtgcatagtccattcattttgcaagactcttactgcttctgacactagcacccatggtggattctcagttttgcgccggcatgcagatgattgtctgcccccgctggaa

SEQ ID NO: 107 - DNA, 119 bp, Gossypium hirsutum
  Clone ID: LIB3825-001-Q1-K6-E12
ttttactgtctcctccaacaccaaaaactacaagaaagttgcaggttactcaatctatcctcaacaagaaacccaactctagccacactgttaaaaccctccaatctcatgccactctt

SEQ ID NO: 108 - DNA, 625 bp, Gossypium hirsutum
  Clone ID: LIB3825-001-Q1-K6-E2
cttggatggaagacagtgaaactcacaatcttaagagagaaactgtagagcaacagtatgaatcagtaagcataaaagattttcagcaaattttggagttattttggggcttataaccagagagactttcatcatgcgaaaattcttgaatttccatcatgcaggtaaaggaaaggaccttccaatttcaatgcttacgcatttggtggatcgcatgtgatggagtatgggaacacgagcattaaactggaaaagctttatttatatcaaggttttgatcctgccaccgtaaaccttcctccaaatgagctgagccccaacacccccatggaagcatttaatcagagagatgcagatattctctttttatggcatatgtacaaaaattctgaagatggatcaaagaagactgaaatactcaaacagataactgagacaaaaaggcatagaatccacttggatggcagcattgatttgattggaacacttttatatggaccagcaaaaggctctgccattctcaaatctgtaagggaaactggtttgccccttgttgatgactggcaatgcttgaaatccgtggtatgagtcaaattctcctttcgagatttaactatctgtgcat

SEQ ID NO: 109 - DNA, 617 bp, Gossypium hirsutum
  Clone ID: LIB3825-001-Q1-K6-E6
cagccgacttgaagtggagtgtttcttctcaaacaaatcttcttttatttttttaactctctctctctcaaatcctcgattccacttcgctctccagatctccccagaagttattgaaatggcagaatcgaagtcattgaggaaacctgttttcaccaaggtggaccaacttcgccctggcactagtggtcacactcttactgtcaaggttgtcagcacaaagatggtattgcagaagggtcgtgctgatggtcctcaagttcgtcaaatgcgaattgcggaatgcctggtaggagacgagacaggaatgattatctttaccgctagaaatgaacaagtggacttaatgaaagagggtgccactgtaacactccgcaacgcgaaaatagacatgtttaaaggatcaatgaggcttgcagtggacaagtgggggtcgtgttgaagttgatgaacctgccagtttcaatgtgaaggaagataacaatctgtcactgatagagtatgagctggtgaatgttgttgaagagtgatattttgtgggcaggtgttgctttacttctgaaccaagaataaagtccagtgcacttgttgccctaatcttatgctacatctcaatc

SEQ ID NO: 110 - DNA, 645 bp, Gossypium hirsutum
  Clone ID: LIB3825-001-Q1-K6-E8
gaaaagcagtttccgaatcttttacgactcgtaaaatagttgaattgactcatggcttccgccgttgcttccgttgcgaagaagaaaactgctggctctaagaagtctaaatcagctccttcacatcctccatttcttgagatgatttcagatgcaatcgtttcgttgaaagagaggacagggtcgagccaatatgcgatcgcgaaattcatcgaagagaagtataagcaattaccggcgaatttccgcaaagtcttacttgttcagacgaagaagtttgttgcttctggaaagcttgtcaaagtaaaagcctcttttaagctgccttcggcttctgccgcagctaagaaaccggccgccgtagctaagaagcctgccgccgcgaagcctaaatctgcagctaccactgccgcctcaaagtccaagccgaaggcgactaaaaccgcgtcgaaaccgaaagccaaagccaaagttggaacgcctgtgaaggcaaaggctaaagttgcggcgaaaccgaaggctactacaactaaggccaaagctaaaccagcggctaagccaactaaggtagcgaagacggcgaagaagagttcgccagggaagaaagtaaaggatccagcaaagaagacagtcgctgtcaagaag

SEQ ID NO: 111 - DNA, 638 bp, Gossypium hirsutum
  Clone ID: LIB3825-001-Q1-K6-E9
ggaaacgatcagtatgtttatcgtcatgccaatggattgtgtgttgttggcctggcttcaactcacttggcatttaaggataagggtgggatcacggccgttgatttcaatgttggcaaatccgatcgcagtggtatgaaagtcaccggaaagagaaaaaagaatgctcaacacttcgagtccaatacagctttgtgcaaggtttgcaccaatggtgattcatatattgtaaggtgttgtgttaaaggctctcttttggaagtgaatgaaagattaatcaaacagccagagctgcttcattcatcagcagatagagaaggatacatagcaattataatgccaaagccagcagactggctgaaggtcaaggcttccttgttgagccttgaagaattcaagaaattgagagcactttgctgaacttaaactgcagaaatacaggaaccaagagaagcctgctctatacttgatcgcagaattcaagcagaaggaatcccttcatcaacggtttttctgattgcgaaaagctcaatacttctactttcctagatttgggtcgggtgaaccatgcaacacaatgcttcatttttgtttgttttttcttcagctaaataatttaatagtagaactgttttatt

SEQ ID NO: 112 - DNA, 650 bp, Gossypium hirsutum
  Clone ID: LIB3825-001-Q1-K6-F1
ggcaagtccaaaccctaaagtgcgcctctcccaatttcttcttcactttgaggtttgagcagatcggatggttcgttcatccaaggtggtcaatgtgggaaccagctcagggcaaatttctgggaagtcatatgcgaggagcatggagttgacaacactggaaaatataacggtgactccgaccttcagttggagcgcatcaatgtctactacaatgaagccagtggtggaaggtatgtcccacgcgctgttcttatggatctggagccgggcactatggattccatcagatctggtccttttggacaaacctttcgccccgataacttcgtcttcggacagtctggtgctggcaacaactgggccaagggttattacacggagggagctgagctcattgattctgttcttgatgttgtcaggaaagaggctgagaattgtgattgcttacaagcatatagttgatttcaattttccaaggttagcagattttggagctgcaatatctggtgcaaacaaattgcaatgccagcaagttattgaagagttggatgtgcataagcggttgcaacttacactggaattagtaaaaaaggaaatggaaatcagcaagattcaggtctaaatcatttgaagcatacttttaggac

SEQ ID NO: 113 - DNA, 642 bp, Gossypium hirsutum
  Clone ID: LIB3825-001-Q1-K6-F10
atcagatccgcctgcccctcttagtaccaaaatgtattactctcaaagaaatagtcgtcttcgcttagcgcttagtcatcagtacttcattacttcaaccaaagaactttgcagtgaaatggctaatcgacaagtgtcaaagcagagcacgatgatgttacgggattcttctcagggggtctgtcctcttgaacaggcagataatctgcttaccaagaagcaagagtcttctctgcagaaacccgatcaagttcttgctcaaatttcagaattatgctcgagtaaatctgaggggtgcctgccatccaatgacttctcaaatccgcatcctgttgatattattccaaggcctcaggctgattctgttggattgacccgaagcaaatatgttcctgagcaccatgcttttgctggaaactcagtttgattttctgcagacaaactgctggggcctttgcagcctcctagtggaagtgttcctgttgtatagacagtcccaggatcaattttttgcttggcgaaggtgtatttagccatacatgagatttaggatccattttttaaaacctaggaaagcatatctcttcaattgttcattctagtcttctgaattacacttttgacaactagcttctatttata

SEQ ID NO: 114 - DNA, 284 bp, Gossypium hirsutum
  Clone ID: LIB3825-001-Q1-K6-F12
ttttttttttacgaatcgaagcgacaaacggtaatttagagcacaatggattcctcaagggataatgatattaaatttcatgaagttcgtataccttttagcagtttacccctttttcttatgtatctatctttgaaattttcacaaagtaatatctggagcaactttcatgtttgagagtagttttatcatatttgtaaaactgtggctaagtgtccaattggaaagcagtatttgtgagtgtgaaacttagtatcatttgttcttaatcatgattatttttt

SEQ ID NO: 115 - DNA, 644 bp, Gossypium hirsutum
  Clone ID: LIB3825-001-Q1-K6-F2
gagagattattcatattattattcctttcttcttctttcattctcaacaatctcttccccctcttcttccataatactctttctcttcatatataatctttattttcaaaccaccctaaatttaccaaccacatattccagagaggatttttttttaaaaaatggtgatgaagttaccttatctgggttcttgtttgtttttggttttttttagtttggtttctattgttgcttctgggtctggaaaagggctcccaattctttcattcgatgaaggatataatcagttgtttggggatgataatctagttatccatagagatggtaaagctgttcacttgtctttgaacgaaagaacagggtcggggtttgtgtcacaagacctttacttgcatggttacttcagtgcttcaataaagttacctgctgattacactgctggagttgtggttgctttctatatgtcaaatggtgatatgttcgagaagaaccatgatgaaatagattttgagttcttgggtaacattagaggaaaaaattggaggattcagaccaatatttatggcaatggaagcaccagtgctggcagagaagagagatcaatctctggtttgatcctgctgatgatttccatcactacacta

SEQ ID NO: 116 - DNA, 587 bp, Gossypium hirsutum
  Clone ID: LIB3825-001-Q1-K6-F3
caatactcgagcaaaaatggcaattccgatccccagtcggcaactgttcatcaacggcgattgggctgagtctttgctcaagaaacgcatccctattattaaccctactactgaagaaatcatcggtgatattccggcggcgactgctgaagatgtggatgttgcggtgcaggctgctcggagcgcacttactcggaacaaaggtaaagattgggcctttgcttcgggtgctgtccgtgctaagtatttgcgtgccattgctgctaagataaaggagagaaaaccagtacttgcgaaacttgaaacagttgattgtgggaaaccacttagtgaatctgaagcagatatggatgatgtcgtcggatgctttgagtactatgcagaccttgctggaggtttagatgccaagcaaaaggctcctatctctcttccgatgaagacatttaagagctatgtgatcaaggaacccattggggttgttgccgttgatcgtcccatgggattacccacttttgatggctactgggaaagtgctccagccttggctgctgggtgtgctgcatactgaagccttctgagtggcatct

SEQ ID NO: 117 - DNA, 633 bp, Gossypium hirsutum
  Clone ID: LIB3825-001-Q1-K6-F5
ccttatctcatcctaactgatgggatgcaatgatagagatgattgctttagatggtaatggtacttgggaattggttagtttgccgactgaaaagaaggctattgaatgtaaatgtgtttacagtccaagttaatcttaatggttactcagatactttttctccagtggctaagatggcttatgttcgtttgttcatttctatagcggcaacatatgggtgatccttgcatcaacttgatataaaaaaaatgtctttctgcatagtgatctacaggaggaggtctatatgaaggacccatttggttttgttgctcagggggagagtgcgaagttgtgtcgtcttcagaaatctctatatgatttgaaacagagcctatgagcatggtttggacgattctgtgaggtgatccacttagaggtaggcatgattctcttagtagtttatgttgatgattttgttattactggaagtgatgatacaaatattcttgctttgaaatcataccttcatacttagtttcaaacgaaggatttgggacaattgaaatattttcttggcattgaagttactaggagtaagaagggtattctcttgtctcagagaaatatacccttgacttacttgaagaaac

SEQ ID NO: 118 - DNA, 650 bp, Gossypium hirsutum
  Clone ID: LIB3825-001-Q1-K6-F6
ggcaagtctaaaccctaaagtgcgcctctcccaatttcttcttcactttgaggtttgagcagatcggatggttcgttcatccaaggtggtcaatgtgggaaccagctcagggcaaatttctgggaagtcatatgcgaggagcatggagttgacaacactggaaaatataacggtgactccgaccttcagttggagcgcatcaatgtctactacaatgaagccagtggtggaaggtatgtcccacgcgctgttcttatggatctggagccgggcactatggattccatcagatctggtccttttggacaaacctttcgccccgataacttcgtcttcggacagtctggtgctggcaacaactgggccaagggttattacacggagggagctgagctcattgattctgttcttgatgttgtcaggaaagaggctgagaattgtgattgcttacaagcatatagttgatttcaattttccaaggttagcagattttggagctgcaatatctggtgcaaacaaattgcaatgccagcaagttattgaagagttggatgtgcataagcggttgcaacttacactggaattagtaaaaaaggaaatggaaatcagcaagattcaagtctaaatcatttgaagcatacttttaggac

SEQ ID NO: 119 - DNA, 640 bp, Gossypium hirsutum
  Clone ID: LIB3825-001-Q1-K6-F8
agcaaatataccctgaaaaccctttcactaaatattgaagatgcagtcaatgaaggatgctgctgcctctgctaaggccggcatggagaaggccaaggcctccatgcaggaaaaggtggaccaaatgaagacaagagaccctaatgagaaagagatggcgagggaaaggaaagaagagagacaagaagatgcagagctgaggaaacaagaggcccgccatcataacgccacagctggccatgctggtggtggtggtattggtggcactggctacaccacagctgggtacaacataggcgacactggtggctatggcggtaccggtggacatgacaaccgtgggtaccccaccgcaggtagtgggtatgatacaggcaggcaagatgacctcagcagtatggggtttggcggagatacagagggtgcttacggtacaacggggaaccaagacttcccaaatgcggcgtctaacaatgctgggactagaaggaacacccgcggaggtacccaggatgatccttattatcgatcctattaaatgaaaggagcgagtttttgtgctctgctactgccttgagtctgtgtttggtgtttggttgcttctacttttttctttttcaagatcgtactgttgtaccat

SEQ ID NO: 120 - DNA, 647 bp, Gossypium hirsutum
  Clone ID: LIB3825-001-Q1-K6-F9
cggacgcgtgggttgaaattgaaaccctagcctcctattatttccttcagccgacccttagtgtcaactcttaagcgccgagtcgccaccatgaacggcgaccagcgtgcgcgaacctcgagattactttttcagccttaagattccctctatacctcgattttaacggagcagaaggaatcccatggaatttgtaaggtaagcttttcacttcccttctccctttcagcccatctgcgggcttcatcggcgctgaaagcgcctccacccaagacgcgattttaaacagatccctaaggatctaaaatcttggaccggagaagtgaacaatgaatagatcgacccccgaatcaggtaagtaaaccctttccccttttttatatatctttatgcaatagatttgaaatcaataaaaagaaaaaaaaacgatgaacaaaagagacacatttaagatgtttgcctccgattgtttcttcttctgtttttttttatttccagtgttcgtgtccaacgattacaaagaacataggacttttatatagtcgaaaataaaaatgaaaatacaataagttttccttttttctctttttttttcttactgttgtttttgctgtgctgttcttgtcctttgtttgtcttcttttaca

SEQ ID NO: 121 - DNA, 519 bp, Gossypium hirsutum
  Clone ID: LIB3825-001-Q1-K6-G10
gttatatttgacgcctatgttcaacatgtaattgagcatacccgtcggaatcacgccctagtactctaaaccaagttacatgcaaacaaattttcctcagataaagagtgtcagaaactgaagttgcggatcagtgatggtggttggcaatggcatcatgcacattaatcatataggtcatatgattgtttcgttttgttttgtttttttccttctgctggtctatgccttacaagttatatgtgtaattgatgattgtccatccattttgttcactttgttctattttcacataaattgtactctgctgctatcaagcaacttaatctcggatttcatgtccaaatacatctcgtaggatgcgttttcacggaatttttatgtttcggaatcatctttcctttgtatagtacattaccatttctttttgatagtgtaactttactcggaactcgaatttgtgtctttgttcatagttttaccaagaataaatgttgtgagtttgagagttgttgcctt

SEQ ID NO: 122 - DNA, 114 bp, Gossypium hirsutum
  Clone ID: LIB3825-001-Q1-K6-G11
aaaaaaattaaaaaaaaaaaaaaaaaaaaaaaaaaaaaaaaaaaaaaaaaaaaaaaaaaaaaaaaaaaaaaaaaaaaaaaaaaaaaaaaaaaaaaaaaaaaaaaaaaaaaaaaa

SEQ ID NO: 123 - DNA, 623 bp, Gossypium hirsutum
  Clone ID: LIB3825-001-Q1-K6-G12
ctggattagctcgacttggatcaaagctcacagaggcagaggtgcagcaactaatggaagctgctgacgtggatggaaatggtagtattgattacattgaattcatcactgctacaatgcatagacataggcttgaaagagatgaacatctttacaaagcttttcaacattttgataaggacaacagtgggtatatcacaagagatgagctagaagcagccatgaaagaatacggaatgggtgatgatgacacaatcaaggaaataatatccgaagttgacaccgacaacgacggcaagatcaactacgaggagttccgggacatgatgagaagcggaacccaacacacacaactcttttagattttatacacgacactggtcttgcagaaatcagctaaaaggttccccccaaatgtagtgcaaaataactttctaagagatggtgtaggcagtcaattacacgactttctctggtttggtttttcattttgagtgtaatatattcacatatggttttttatcgacggattttgagaagagagattaaacttatggtttctcagagctaggaaaactcaaacccatgaatgcacagcatattatgttgatttccatttgttt

SEQ ID NO: 124 - DNA, 655 bp, Gossypium hirsutum
  Clone ID: LIB3825-001-Q1-K6-G2
cggacgcgtgggcgatccaatacgtgaaacagtagaggttgagcttcctgtatacaaggcaattggacagtttcaaactgggaaaagcaaaagtgatgatctttttgatgagcttgatacgagtaaactaaatgctcatttgaaggaactcatgcctggtcttacagcgaaagtcttccgtacctataatgcttccattacattggacgatatgttaaataaagaaaccaaagatggggatgtagcagaaaaagtagtaatttatcagcgtgcaaacaaggagggtgcaatcatttgtaatcatcagcgcagtatctcgaaatctcatagtgcgcaaatgtcaaggctgaccgagaaaataactgagctcaagggtcttctaaaagagctaaaaactgatttggacagggctaagaaagggaagccgccattgaaggatgctgatgggaagcagaagaggaacttgacccctgaagcgatagagaaaaagatagctcaaacaaatgtaaagatcgagaagatggaacgggacatgcagactaaagaggatctaaaaactgtagcattgggcacatccaaaatcaattaccttgaccctcgaatcacggttgcatggtgcaagcggcacgaagttcccatcgagaagatattcaac

SEQ ID NO: 125 - DNA, 221 bp, Gossypium hirsutum
  Clone ID: LIB3825-001-Q1-K6-G4
cttgtagccgatcacaattttctacaaaattattttagtttttgccctactgaaagaaatttagtaagggagtattttgttttttttaagaaaaaggaaaattcttattcttacccttgtattctaatacttatatctcaacttgtgtattgcattttcttttaatttgcaaaaaataatagtaaaattaaaccttatcaattcatggttgtttttttttt

SEQ ID NO: 126 - DNA, 651 bp, Gossypium hirsutum
  Clone ID: LIB3825-001-Q1-K6-G5
agcaaatataccctaaaaaccctttcactaaaaattgaagatgcagtcaatgaaggatgctgctgcctctgctaaggccggcatggagaaggccaaggcctccatgcaggaaaaggtggaccaaatgaagacaagggaccctaatgagaaagagatggcgagggaaaggaaagaagagagacaagaagatgcagagctgaggaaacaagaggcccgccatcataacgccacggctggccatgctggtggtggtggtattggtggtactggctacaccacagctgggtacaacagaggggatactggtggctatggcggtaccggtggacatgacaaccgtgggtaccccaccgcaggtagtgggtatgatacaggcaggcaagatgacctcagcagtatggggtttggcggagatacagggggtgcttacggtacaacgggaaaccaagacttcccaagtgcggcgcctaacaatgctgggactagaaggagcacccgcggaggtacccaggatgatccttattatcgatcctattaaatgaaaggagcgactttttgtgctctgctactgccttgagtctgtgtttgttgtttgtttgcttctactttttttctttttcaagttcgtactgttgtaccatataaagaaaa

SEQ ID NO: 127 - DNA, 324 bp, Gossypium hirsutum
  Clone ID: LIB3825-001-Q1-K6-G6
gtattacaagatgatatgtaatgagactctgagatcagttttcccggatgacgggaccagtgtacaaagcccccttcacaaccaaatcctcaggtttgtccctctcttgaagccaagcatagttattcttctcttcatccgggattgatacttgttcatcacctgagaattttgtgaatgggtaggccaagtagtacgtacagtgccgtccttcggcatccgagttcggttggctaaagttaaggtcgattccaacttgaccgaaccttgcaagaccttcatactttatccagctgatggaggcatcattcattgctttactgc

SEQ ID NO: 128 - DNA, 644 bp, Gossypium hirsutum
  unsure (1)..(644): unsure at all n locations; Clone ID: LIB3825-001-Q1-K6-G7
caacttcttcttctttttactttccttttggcttttcttgtcgtacaacaaaagaaaaaaaaatgtctgatttaagagatttgcacggcaaccccattccacttactgacgagcatggcaaccccgttcaattgactgatgaacatggtaaccccgtttacgtctctggtgtagccgccaagcagacagatatgtatggtggtcagatgggatatgatcccactctttccgccgctgctgagtatcagcagcagcagcagctgcggcctcagtacctgcagcaggaggaacagcagccgcagtatcagccacagcacctgcattacgaggtttccaccacagaagagattcagcgctccaacgcctccagccctagctcgtctgaggacgatgggatgggcggtagaaggaagaagaaagggctaaaggagaaaataaaggagaaactaacgggtggaaagcataagacggaggggnngggaaagaaagggcaatcacanaaccgtacctacgttgccaaaaccagaatcacaacaaccagcaacgcaacaacgccgccgcctgaggagcactaccaccaccatgatcaacatgagaagaagagtatgatggagaagataaaggaaatattgcctggtcatcac

SEQ ID NO: 129 - DNA, 158 bp, Gossypium hirsutum
  Clone ID: LIB3825-001-Q1-K6-G8
gtaaagatctgttccatcttccatgacaatgaaaagcttgaaaggggttgaactttttgaattaaatgaaatggcattagtgctgcccaagatgctgtaattggtatacattttaattttttatgaacaaaaggggttgtggggctgcctttcttttg

SEQ ID NO: 130 - DNA, 76 bp, Gossypium hirsutum
  unsure (1)..(76): unsure at all n locations; Clone ID: LIB3825-001-Q1-K6-G9
cccggtcgacccagcgtccggtttttcagaagctttnaaaaaaaaaaaaaaaaaaaaaaaaaaaaaaaaanaaaaa

SEQ ID NO: 131 - DNA, 647 bp, Gossypium hirsutum
  Clone ID: LIB3825-001-Q1-K6-H3
gccaagttttcgaatgtgctgtctgcatttcctcaaaatctaatacaaagcagcagcagtcctgctcagtctcctcaatggaagaattctgtgaggacaactagctctcaagttccttctcaatctctaccatcaacttcatccctcaagaatatttcccagcaacaaggtcggccacagcaaagccccacacagatttcttttgcagctaatcctaaatcaccacaaggtcaacagcctcttagtagcactcctaccccttctccaatgatggttggctctcccacaacttcactctccaggagtgctggtggtagcccaaggacaacaggttcctcttccaccagcaacaaagctggccaagcatctggtttagcatcccaacaagctaagaactcaccgaccgtgcctagtcagaagtcatctcctgttggtgggagtaatgtgccatctgtcctgggaaaccctcacataagttcatcttcaaatatgggagccaagcctcaagtggcactacagcatcagcaacatcaaaagcatgcacttcatcaagggcagctgttcttcccaaatgcttacatgcaggctcaagctcaacactcaccaagttcgacaacacctgcaacaacagcaagtgcatactatgt

SEQ ID NO: 132 - DNA, 645 bp, Gossypium hirsutum
  Clone ID: LIB3825-001-Q1-K6-H4
caatgtttttacatatcatttctcatcatattaaaaatcgagttatcaagcatcactttaataggtctggggaaaccgttagcagatcatttctcaatattttaaatgctgtcatacgcttacaagatgtactatttaaaaaggcagagccaattacagctaattctacagactcaaggtggaaatggttcaagaattgtttaggtgctttagatggaacctacatcaagattagagtttcaacagttgataaatctagatatcgaacgcaaaaaggtgacatagcaacaaatatgttaggtgtttgtacacctgatatgcattttgtttatgttcttcctggttgggaaggttctgttgttgataaacggattcttcgagatgccattagtaggagacatggattaaaagttcctcatggttgttattatctagttgatgttggatacgcaaattgtgagggatttcttgcaccttttagaggacaaatatatcatttgaatgagtggcgtcagggttaccagccaagtactccggaagaatttttcaatatgaaacatgcttcagcgcataatgttattgaaagatgctttgggttattaaaacttagatgaggaatacttaggagtccattattctatccta

SEQ ID NO: 133 - DNA, 637 bp, Gossypium hirsutum
  Clone ID: LIB3825-001-Q1-K6-H5
taattttgtattaattcaatatttaattagtagcgtatagcgtatgacggtgttgtttaattacacaacgtgatcctgcatgtgtttttttaaaatgaattaaaataggagttcaatcagtggacgtggatggagctaaagatttagtaaccgtaaaaggcacaatggacgtggaagacctcgttccttatctcagggagaagttgagacgaaatgtagaggtggttccccctaagaaaaaagatgccggtgagaagaaagacggcggagagaagaatgacgccggcggtgataacaaagagaaaggaaaagaagctgctgctgcaggcggcggcgggaagaagggaggaggaggtggagagaaggaaggcggcgagaagaaggaaggaggaggcggggagaagaaggaaggcggcggagagaagaaggaaggcggggagaagaaagaaggcggtggtgaagccaagatggaggtgagcaagatggagtatcatggatatgcttatccaccgcaaccaatgtactggtcgggtggacaggagtacggtggtccgagttatgcgattgagggatatcagaatcatcagcggtacggatacgtggatgaagggtatatgcatcctcatcctgtatatgt

SEQ ID NO: 134 - DNA, 596 bp, Gossypium hirsutum
  Clone ID: LIB3825-001-Q1-K6-H6
tcttaccattgaagagggtatatttgaagtgaaagccactgctggtgacactcatcttggaggtgaagattttgataacagaatggtgaaccactttgtgcaagagtttaaaagaaagaacaagaaggacattagtggtaatcccagggctcttaggaggttgaggactgcttgtgaaagggcgaagagaactttatcatccactgctcaaacaaccatcgaaattgactccttgtatgagggtatcgatttttactctaccattacccgtgccaggtttgaagaacttaacatggatctattcaggaagtgtatggaaccagttgagaaatgtttgagggatgctaagatggacaagagcactgtccatgatgttgttcttgttggtggttccactagaattccaaaggtccaacaacttttacaagatttcttcaatgggaaggagctttgcaagagcatcaaccctgatgaggccgttgcatacggtgctgcagtccaagctgctatattgagtggtgaaggtaatgagaaagtgcaagatctcttgctcttggatgtcaccccattgtctctcggtttggaaaccgctggtg

SEQ ID NO: 135 - DNA, 612 bp, Gossypium hirsutum
  unsure (1)..(612): unsure at all n locations; Clone ID: LIB3825-001-Q1-K6-H7
cggacgcgtggggccagaaccatcagagtttaagcccgagaggtttctcacaacccacaaagatgtggatgttaggggccagcattttgaactgatgccttttggcagtggtaggaggagttgtcctggaacatcgtttgcactccatatgctatacttgaccatgtctaatttcttgcacgcctttgatttctcaacaccatccaatggtttgattgacttgactggcacagttggattgaccaacattaaatctaccccgcttgaagcattggtctcacctcgccttgctcctgagctctataactaagattgcaataataaagtgtgaaggacagaaaaggtttagcattttggttcttacggtgtagtgttatttattggggcaatctcgcctatgttacatccccttcttttcaaaactaataatgataaaattactcatacatgaatagaataaaggatttttgtaatgtcaagttaatttcctagctgttttatgggttagctataccatcctgtaaaaatgatatttgctgggcaaaatatattccatttctttttattaaaaaaaaaaanannnaannaaaaaannnnaaaaaaannnanana

SEQ ID NO: 136 - DNA, 484 bp, Gossypium hirsutum
  Clone ID: LIB3825-001-Q1-N6-A1
ggaaaaaaaccccctccctttttttaaaaaaaaattaaaaaaaaaaggtttttttttttttaaggggggaaatttaaaaaaaaaaaggggaataaaccccccgggcccccctttttttttttaaaaaatttaatttcccccccccccccttaaaggcccccttgaaaaaattttaaaaaaaaacttttttttttttaatggaaaaccctttttttaaaaaaaaaaaaacctttttttaggggttttttacccctccccccccgaaaaaaatccccaaaaaagggggaatttttttcccgggtcccccccttaaaaaacctttggtggaaggggttccccctgaaaaaaaaacccttccccaaaatttgccctaaaaaaccaaacccggggtaaaggggtcccaaggggtgggggaactctgggcgttcccctttaaaaaaaccaattttttgggcaaaggggggggggttgtgaatttttttaa

SEQ ID NO: 137 - DNA, 616 bp, Gossypium hirsutum
  unsure (1)..(616): unsure at all n locations; Clone ID: LIB3825-001-Q1-N6-A10
aaataataacactaacttatttatgagacaatcacattctatttgtaaatcggtaacaggattgcaggatcatgggggctttcctggtttttttattgaagcccagatgaaaacctgttaaaacttactaaacttctacatctacaaacattattatttacaaaccaagtaaaaaacaaaagggcttttttgctggtgctcattagcacttaagtgggggagacttttgttactggaaccagattgaaacatcctgctttggcatggaatccatcccaactgcatgcagatcttccttgtaatcgaaagaagccaaatcgaatgaagacccgaacatcaactggaagctgttgttgttattgtggttgctgtctaatggagaattcaagcccttaaaccgctcaaactgagcttccccttgtgagaacatctgatgattatggagcatgctggagtcctcgaagaagtttccttccatcatgactccttgaccacggaagaattcatcttgctgatgttggatttttggctgaagacgttttgacctttggtaactagattgttactaggattcatgttcttgttgccttgaatgttgntatcatatactgacatg

SEQ ID NO: 138 - DNA, 597 bp, Gossypium hirsutum
  Clone ID: LIB3825-001-Q1-N6-A11
tttttttttttttttttttttttttttttttttttttttttttttttttttttttttttttttttttttttttttttttttttttttttttttttttttttttttttttttttttttttttttttttttttttttttttttttttttggggggggggggtttttttttttggaaatcgggggggggccggggagggaaaaaatttttttaaaaaggggggtaaataagagggggggaaaaaaaagaaaaaaagtttttctggggaaaaaaggaataaaaaaaaaaatccaaaaaaaaaaaaaaggggaaaaaaaaagggaaaagcggggggggccaaaagggggggaaaaaaaaaaaaaagggggggggggaaaggggcgcgtttaaaagggaaaaaacgggggggcccgttttaaaaaaaaaaagccaaacccgggggaaaggggggtttggttattggcgcacagggggtttttttttttaaaaaaagagaagggaaaagaggtgtgcccttcaacgccctggccgcaaagaaaaaaaaaaaaagagggacaaataggttttacaaaaaaaaaaaaaaaaatggtttgggggggg

SEQ ID NO: 139 - DNA, 600 bp, Gossypium hirsutum
  Clone ID: LIB3825-001-Q1-N6-A12
cgcagaacctataattatttattcaaaggaaaatttcttacatgatattcaaataaaaaacctgtcattttcgaggggccgggcaatatgaatctggcaagtcaattaaaacgttactagtgcgcataatgtcccagtcttcaccttctttgcataatctatttccagaatcttcatttgatttggcctcttccctgaactctataatcttcttttaaaaacatcgttcaatttcccttccatccagcgcactatttccttcagtccgctcacctcaccttgcacagaaatcacgttttgattgactctctcttccaatcaacgcaccaagtccttcactgcagtaagctaagtcaccaatgcctcaaaaaacacgtcaaccttacttgtccacttcaaaagggttgacatttgcctttgaacattgtttagtgaggacttgacttcaacaagatatttggccttcggatattcttccaatggcttctgttgaggttcatcctcggttaaagcaacgagctgtaagatttctttatgtcacaccatatttcataattatttaagggtaacaaatctaccttccctttgattttggggtag

SEQ ID NO: 140 - DNA, 544 bp, Gossypium hirsutum
  Clone ID: LIB3825-001-Q1-N6-A2
aaataaataaaccaaatatattaataaaagtccattagtctaaaattattacaatagcccaaacccattgtttagacccaaaaccaaatacaatggcccattaacctagacccaaaaattagcccgattggcccaaaggtcaagcaatcctcaggaaccctaaggttccccttgcgccaccagctacctccgtacgccagcgcatagcctccgtacgtgctccacgttctcctccgtacctgtaaaagaagacaaacaaaggacaagaacagcacagcaaaaacaacagtaagaaaaaaaaagagaaaaaaggaaaacttattgtattttcatttttattttcgactatataaaagtcctatgttctttgtaatcgttggacacgaacactggaaataaaaaaaaacagaagaagaaacaatcggaggcaaacatcttaaatgtgtctcttttgttcatcgtttttttttctttttattgatttcaaatctattgcataaagaaatataaaaaaggggaaagggtttacttacctgattcgggg

SEQ ID NO: 141 - DNA, 574 bp, Gossypium hirsutum
  Clone ID: LIB3825-001-Q1-N6-A3
aaaatattattttaagccttttttcttattcatatatttaaaacattatgccccatactcatccaaatatgagcaaattatcagttcaggaatgatcctaccatacgctgatcattcaaaatttattatattttcagcttattagttcaagtttagattcatggcaatttgtaagaaaacaaacaaacaaacattacaaccatgctgggttcttcaaaggagtgacaactgccttgacttgcaagtaacttgaaaggccataaatccctttctctcttccttgaccactcatcttgaacccgccaaatgggactgcagcatcaaatatgtcgtagcagttaatccataccgtcccgactcgcaatgctcgagtcaaggtgttggcggtttcgatattctgagtgaaaactccggcagccaatccatatgaagatgcatttgccctttgtaccacctcttcaagatccttgaactttgagatggattgtactggaccaaatatctcatctttagctatcaacatgtcatcctgaacattggagaaaaagtgggttgaatatagtagcctttggag

SEQ ID NO: 142 - DNA, 597 bp, Gossypium hirsutum
  unsure (1)..(597): unsure at all n locations; Clone ID: LIB3825-001-Q1-N6-A4
agtaaactatttatttactagggaaaagaaagaagtttgccaaaagaaaacaaacataaatatgtaggtgaaacataaacatcgaaaattttaaactcaaccacctaaacatactgattctgagtctcccacatcctcttcaattatccgttcntatcttccctagttaggctcatgcttgatgctgatgaccccgctatccctgagactcctttgttcagaaagatcgccttccgcttccgtctgctatgctgccatttgctcattagatcggaaacctcaacccgatcatttcttctgccgcccattactggctctctcaattcctctacgcttgcatctctttcgacacctgctgatgctgtgaatggaaagaatagctgtctaaagcaaccgacgagaagtatgaggaagaacatgtatacatagagcgatgtccatacagacaaggtccacttccaattgtggaccaactgtttagaccatggcaactgtgagttcatgatgatttccgcttcgtacaactgtggaagcgacaaagttccggccctcggagccaatgttaccctcacggcttcacttctgggatattcttct

SEQ ID NO: 143 - DNA, 570 bp, Gossypium hirsutum
  unsure (1)..(570): unsure at all n locations; Clone ID: LIB3825-001-Q1-N6-A5
ttttttttttttttttttttttttttttttttttttttttttttttttttttttttttttttttttttttttttttttttttttttttttttttttttttttttttttttttttttttttttttttttttttttttttttttgggggggggggggattgggggtgggggttgaagggggaaaaaaaaaaaaaaaaaaaagagaaaaaaaacccggcggccccccccccccgggaaaaaaaaaaaaaaaaaaaaaggggggggggaaaaaaaaaaaaaaaaaaaaaangggggggggnggggggaggggggagggagaaaaaaaaaaaaaaaaaaaaaaaggaaaaaaaaaaaaaaaaaaaaaaaaaaaaaaaaaaaaaaaaaaaaaaaaaaaaaaaaaaaaaaaaaggaggaaaaggaaaaaaaagaaggaaggggaaaaaaaaaaaaaaagggngaaagaaaaaaaaagaaaaaaaaggggagagaggaaaaaagaaaaggagaggggggggggagggaggaaaaaaaaaaaaaaaaaaagaaaaaagggaaaggaaagagagaagagg

SEQ ID NO: 144 - DNA, 586 bp, Gossypium hirsutum
  Clone ID: LIB3825-001-Q1-N6-A7
gaaatgagaaaataccaatcacattttctccgttcagttacaaaacacaacaggcggctttgccagttccggctcttgccaatgctatactgcaaactgagatctacaatatgatgatgcctctacaatatgatgatgcctatttgtacaatttgtaatttaattgacactatcaacataacagtcctagttttggcggtgtgatgggaacctatggtttaaactacgcaacggtttgcatgaactataagttaaaaagttgacaattagtgaatgtacacgcctgtgtgaaagaaataggcaacaaccccatccgatatcatgatcactgctgatttacaggagatggacgagtcttaatctgataaacctttcttcatctgcttctcataagctccacttgatgcgttttcttgttttaagcgacttccagggtttacattaactggtttacccatccatgtgttgggtggtaggggagcagcacccgtgttctgctcagacaggagatctagattttgcaggcacctagaatttggcattttcgaagactctctgcatgtgctctacctctggcacttccctc

SEQ ID NO: 145 - DNA, 533 bp, Gossypium hirsutum
  Clone ID: LIB3825-001-Q1-N6-A8
gtttttttttttttaattatttttttttttttttttttttttttttttttttttttttttttattttttttttttttttttttttattttttttttttttttgaaggggaaaagaaaaaaaactttgggaaacaattggaaaaaaacaaaaaaaaggggtcgggtccgatttccaaaaacccaggaggaaaaaaaaaggggaaaaagggaaaacaccccccccttcctccccctttaaaaagtaaaaaaggaaaaaaaaaatggggttcaaaaaaaaaaaaaaaagggaatcccctattttaaaaaagggtaaaaactaaaaaaaaacaaaaaagggaaaagggggtaggggacagggcccaaaaaaccccaaaaaagaaaaaaaaaggggggtttttttaaaaaaaaataagcgggaaaaacccggcaaaagggaaagaaaaaaaatggggccctcacggaaaaaaaaaaaaagaaaagggggaaagaaggtccttcaaaaaaaaaaaaagggataaaaatttccttggggg

SEQ ID NO: 146 - DNA, 323 bp, Gossypium hirsutum
  unsure (1)..(323): unsure at all n locations; Clone ID: LIB3825-001-Q1-N6-A9
aaaaaaaaccgaaggtgttaatgctaaattgtaaaagaaagttaaaataagagactcgaattataatatgattctctgacgcactaattaagctactatatattgtcaatagtattataacttctgtagctctattccttagacccacctgngatgagttgataaatgcttcccttacttgtctccctctaatctgactttattaacccaaagcaattgcttatttgttccccacgcccacaaagcccagcattgtccctaaggtattaatttgttgttcgattcttgttcttgaacccttgttgcattctccaaatgggttc

SEQ ID NO: 147 - DNA, 571 bp, Gossypium hirsutum
  Clone ID: LIB3825-001-Q1-N6-B10
attataacatttaagcgaagagatttactccaaattccattagcaacttgtaattacaacaaaaccacatcaaccaacacaagggtaacaacaacaatttaagattccataaaaccctaatcctaaatttatcgaattccgccaaattacagatagaaaaaaaaccctaaggtcaaatttcaagagctagtaaacttggtaaccgccttagtaccttcagagacggcgtgtttggcgagctctccgggaagtacaagcctaactgcggtctggatttccctggaagtaatcgttggcttcttgttgtacctcgcgagtctagaagcctcctgagcaagcttctcgaagatatcgttgatgaaactgttcatgatccccatagccttgcttgagatcccgatatcaggatggacttgcttaaggaccttgaagatgtagatcttgtaggtctccacgctcttcttggccttcttcttcttcttgtctccggccgcgccgccttctttgggaagcttcttaccggccttcggcttcttctcggcaagggatttctcagcgacggtagtctttt

SEQ ID NO: 148 - DNA, 463 bp, Gossypium hirsutum
  Clone ID: LIB3825-001-Q1-N6-B11
aaatcaaaattcatatttaattttgggatttggctgtttcttttaccatgtcctttcctttcttatctttttattatatccccattggcacccttttttttttttttcaaactgggctatagtagacaattttttattccaactaaagtaaaaaaaaactgaaagtccaaaccctaattagccctcttttagcagaactcaaaacaaaaacctaatcaagcaagccgctggtacaaatacaaaatcccaatgaagggatcaatgtcaaaaaaattgggaggggggattttgaaaggcttcttccataaaataaataatccaatgcctgccctatctcctgaacttctcaatctcaaaatgcatagcagctatggggtatacagttcctttatgcctgtcaaggaaaaaggaatactccacagccccatgaaaaacatctgaatccttaagttccgtctttact

SEQ ID NO: 149 - DNA, 599 bp, Gossypium hirsutum
  Clone ID: LIB3825-001-Q1-N6-B2
ccaaatacaataaatagaatacaaaacaagcagatatcctaatggaaacatcctagacaaacgaggtttagtaagttagagatctaccaggttattataatgcatccaaaactgtagcctgaaatttgcaagatttttttagttaagagccccataggctgaaagttacatacaagaaataaaagagggagatggatgccgcaatgccagacttccgaaatgaacacttccaaacaaaacagaaagcaacaactctaatcacctagtcattaccaagcttgttagcggcggcactactgaagaactgaataacggatcacctatgttcttgcagttctcattatcgacttttaaggatgcagggatcaaaaatcgttcacaagcaactgactgtgcagtgcttttgatgaggtttcgactgcaattcagtttccgtacacagtttgaagtcacacgttttctcttcctagatgacttccacttcaactgagaaagccgaccatcctttgaaagatctggaacaacactcgcatcttgtgccctctcatttcctggttcaacagcagaacctttacactcagtggcttctttaccacact

SEQ ID NO: 150 - DNA, 474 bp, Gossypium hirsutum
  Clone ID: LIB3825-001-Q1-N6-B3
gacattgttaacctattaagggacatcttattattaagccaataaaaatgaaagataagcaatactccatatttccatttgacacagtcaaagagactattataaaaaggatcgaacagcgaatcattttttttggttaacaccaaatttggatattatacggtatgctccaaaagaaagaacaacagcaaacagtagcagtaaaagaaagaaaaagaaaaccaagatttgagccaagggtagaggtgaggtgaaaactagttttagataatgtagagttaccctcggcttgaggttttaacatagtcagccctaattgcccataactgttctcccacagatttcatctccggacggtcacttttaacaggtgctgcacattgaaatgccaatgcaaacatcttcgttagtatttctgcatttaccacttccatccttggatccaccaattccaccacatgtccttcattatac

SEQ ID NO: 151 - DNA, 279 bp, Gossypium hirsutum
  Clone ID: LIB3825-001-Q1-N6-B4
gttgtgtgtgtggattttttttgttgtttttttttttttttttttttttttttttttattagttgggaaaaaatggggatatttgggggtattccatgcttcggggggaaaggggaaaataataaaggaaaagggggggcaatcacttttttttttgacagaacaggaaaacacactgaaacaaaagacctttagaggggccctgtcctttaaacttatcaaaccacaccagtaaatatacattgaaaaagaggggttattttagtttgtagttaaaat

SEQ ID NO: 152 - DNA, 563 bp, Gossypium hirsutum
  Clone ID: LIB3825-001-Q1-N6-B5
aaataaaagcaaacaaataagaaataaaataccagagttttaacgaggttcggccaatttagcttacgtcctcggacactaccaaattaatatttcctctagaaatattacaaaggagaagattttgggatgatacaaccaaagggggaggggttttttttttaacaaaccaaaccccctccctttctatcttttcctaatgtgggatattgccaatattcaacaaatctccaccttggcgatattccacatcttcgaacatcttctcataacactaacttcaatagtgtcttcaaatttgcaaccaatcgccttcttcccttttggtagttgtgccagcttccacgtcttgtttttctctagagattgcatttcctcttccattgcacctaaccatctattattctctaaactctgaatggcttcggtgtaagtggatggaatattatcaacaactggaagtgcataagctaccatgtcagtgaaacgagctggtttctgaatttctcgtctctgccttctgactgcaattggctctgattgctgttgaggttcttgggtag

SEQ ID NO: 153 - DNA, 79 bp, Gossypium hirsutum
  unsure (1)..(79): unsure at all n locations; Clone ID: LIB3825-001-Q1-N6-B8
tgcacctacgacacgtgcccttgggggnccagagcccctactgcgggtcggcaatcgggcgacgggcgcgtgcgtcgct

SEQ ID NO: 154 - DNA, 591 bp, Gossypium hirsutum
  Clone ID: LIB3825-001-Q1-N6-C1
agcatgaaaaagattcattgtcatcatcagatataaaaagagagtccagtgaattggtggcaagcacgctgaatagtttgagaaaagcaaactgacgtattagtgacggataaaaagggtcacaaaccattaccatttacaaccatttacaacaccacaaactacgtccatgttaaaccaaactgcattttatgttgaaggccatactaagaccattttacaccaccataaattaaaaaaaaaaaaaaaactatatactctaaaaggagttaacactgatattaacaaattcgtggttacctgcttttgttgttgtccacgatccgtagcatatcacatgatggagccatgaatctgaaggcctgtgaaataacaagtgtgctatggatctatctatagagtttgtgccagtttccatatccataaatcgcgtgcacttgtttgtttcattggccacaaatgaaccagcttcatctttttcctctttcatgccacctttcgtatttgtgcaattatgcctttgttcagcactcctagccaaacgatacaaactatcccgtatgcacaattttgtccggatatccaactttt

SEQ ID NO: 155 - DNA, 576 bp, Gossypium hirsutum
  unsure (1)..(576): unsure at all n locations; Clone ID: LIB3825-001-Q1-N6-C10
aaaaaaaacccaaaagcagggtcactcaagggtaaatgtaaatgtaattcaccagtggtacaagacgccatctaatttttaagcattaagcttaatatttattaactttcatacaacacatacactattttttctgggattctctttgccatacaacatccgacaagttgcctcttaattntctaccccaaaccttaagcactttctttctcgtacacttcacttgcatatttccaatttatgaccttccatacgttcttcaagtaatctggtctaacgttcttgtactgtagataatatgcatgctcccaaacatctatcccaagcaagggaactaaatttggcccgttggtcacaagtggatcctgatttgcagtggtttcgaccacaagcttcttcaactccttgtccagtccaagccacacccaaccagagccttgcaaagcagcaccctcagcattcatcttctgaatcaatgattccaatgaaccaaagttggtatcaatggcccaacccaaagaaccatgtggaggctcacctcctccttcacgaataggggcaagattcttccaaaaa

SEQ ID NO: 156 - DNA, 571 bp, Gossypium hirsutum
  unsure (1)..(571): unsure at all n locations; Clone ID: LIB3825-001-Q1-N6-C11
aagttggaagaagatttataactaaattacggggagacaaaaactaaactactggatcgccattacaatatgtcaaagctacctatcccaaatttgccatcaacacaggggggagggtttnncgtgccnttccccacacanaacacaaaaaaacgggactctttaagaaaccacaggcgacccctcctcttttanaagaataagaaacaggcttaagcaactgacggaaaaaaaaaaaaaaaaaaacttgaactagcttatagtatgcaataacaccaacgctcattttaattttcccaacttccttaattgctcgatatctctttatggttaccgaaatgtacatcctcacacctccaacccaaaattttccaattgcaaacgaaagttgaaggaaccgtatcccctttaaaattcaatcgaaattcaccagaaacaaataaaattacagtgtgacaagaaagaaaacaactaagcgcacgcagtggacgaaagacccggcattttgttagactttgattcaacccagaagtgactattgaagaataaaccaagtcttttgcctgccaaa

SEQ ID NO: 157 - DNA, 554 bp, Gossypium hirsutum
  unsure (1)..(554): unsure at all n locations; Clone ID: LIB3825-001-Q1-N6-C12
aagtagacttcgaattcttggatagcatataactcgcattaatacatangaaaaacaggaaaacctcgtaaccacactagaccattatagtttggtcataaacatttattcaccaggaaattgtctcaagatatcagattcaattctttcatggttctgcaagtaccagcagcaatttttcatagtctccatgagtgtccttccccatggcactagtcagtgggacactgttccttcgctggtactcatctgctatgatctttagatcaacctcagccctagtgcaaacaactctagtaagagctccttcatccgttcctcgtctattgattgctaggcgaagaaccttctcaaaatacttttccggatagaccaagcacttcactgtggaccttagtagtgcaaggaactcatccttaggatcagccttcaagtccttgtttatgtcatttccatattcatttttgtagtgattcagagttgcattgatctgtgccttgcttcttgtagccaaaacccttatgacatcgtcatcactgtaagctttgtctgaa

SEQ ID NO: 158 - DNA, 605 bp, Gossypium hirsutum
  unsure (1)..(605): unsure at all n locations; Clone ID: LIB3825-001-Q1-N6-C2
agaacaatatttgattttttttcttaaagaaaaaggaaaggtgaaaattttgacaaaaaacaggtaatgttctaaagaagcaacagtttggtggtgaggctaaaagcagaaagtccaaagctcagctcaatgcatcagaaaggcctggnagataacgcttttgcatatataattcagtataattttcccagcccttcacttccaacccatatggtgatcatccgtcccctccctccgacaaacaatccgaattttcttctcatcagcttcttgatttttctctgaatccagttctttggtagcccgtactgagacccttcagtcaccaagcacatgcttcagttgaatacaacaaacaagataacaagtgacactgcgcatgatgattctccaaaataacttaagatccatttacagtcatttcaggtgaggattttggtggtaccaagggacagtcatcgccacttaattgtctattgtctgaggggctatgcaagcaatctgaacaatttctaggaggttccttctctctatggctatcctcttcggaaccacttttaccagaacttctaggactgctagattccatctctgtatgatttccc

SEQ ID NO: 159 - DNA, 579 bp, Gossypium hirsutum
  Clone ID: LIB3825-001-Q1-N6-C3
ctaattcaattccttttagaaaatttcactataaaataattctttacataaaactgagttacaaatacgacttcgccctaacactcagggtcttgattttcctaagtaatgaagctagttcctatcccctatctgactccaactcatactttacattaatacgtctgtctgtacttccaaggactgcaagtagtcagctacttctcaaatttgcgttacagcttctcccgtgatgtagtccctgtttctcacctggtcttgagaatgatgaagctaattcttccattactcctcatttgcctccaagaactcaatcctcatttcacaattctgtaaggccgtctctaactcttctattttccctttcatctcctcaatcatatttaaacttgctttcaactctgtcacagaattgcaattccggtataaacacagatatctctcaagttcagctactctggctcttaattcatctttttcattcttactctctgccaaacttctttccaaagtttcattcttagcttgagcctcctgaaacctcttttccaattgatctgccttagccctttcttctcg

SEQ ID NO: 160 - DNA, 138 bp, Gossypium hirsutum
  Clone ID: LIB3825-001-Q1-N6-C5
aaaaaaaaacacaaataaagaatccaaattcaaaagtccaatgtccgttacaaatatttgggccaaaaataacttaaacccaaaatcctttaatatagacctaacccaatccttagttcaaatagcacgggggggggg

SEQ ID NO: 161 - DNA, 585 bp, Gossypium hirsutum
  Clone ID: LIB3825-001-Q1-N6-C6
caagctgaatttgaatagcttgcaacaaagtatctcgtttacaccctactagaaacagtgaaattgctggattggccctcctaaactttagacagattatttttgtgtattttccatcagagaggcaacaataacatagactgttgctgcaaatattacaaagggacctaaatatttttttaccaaaacgacctgcttgcccctatcatcattttcattgaaaacaaagacaaaaaactattatacagtgtgcagcaaagaaatatttgctgctgaggaatttggttttatactacctgcgaatgcgcatgtcccccttacctctccacgactcttattccctcattatgctcccactctgtccaccatactgctccgttttggcatactgcatcctaagtactgctacaggatcagaaagatttgggcaggagccccctacaacacctcccactccagtccccacaacattaattccaaccataccccttccctggtgctgtaaatttgagattgcatcaaacccatttcgcctttgcatctcggagaaatctcccgtcgcttcatatccatggcaaaaggcac

SEQ ID NO: 162 - DNA, 577 bp, Gossypium hirsutum
  Clone ID: LIB3825-001-Q1-N6-C7
ttttttttttttttttttttttttttttttttttttttttttttttttttttttttttttttttttttttttttttttttttttttttttttttttttttttttttttttttttttttttttttttttaaaaaaaaaaagggaaaaaaagggcacatttggggtgccctttttagggaaaaaggggaaaaaaaatttaaaaaaaaaaattttcccccccccccccccctcgcccgggaaaaaagggggaaaaacccttttggggcaaaaatgcccccaaaaaaaaaaaatttttaaaaagcccttttttggggggcaaaatttttttttttttaaacaaaacccggggaaaaaatttttttggaaaaaaaattttttttaaaaacccaaaaagtggggaaagggtttaaaaaatttcccccctttttaaaaaaaaaaaaaatttggggggggtttttaaaaaaaaaaattttactgggaaaaaaccctttgtattggggcggggtttgggggcaaaaaaattaaccggaaaggggggaggaaccccagggggaaacgggaaaaaaattttttttgag

SEQ ID NO: 163 - DNA, 322 bp, Gossypium hirsutum
  unsure (1)..(322): unsure at all n locations; Clone ID: LIB3825-001-Q1-N6-C8
aaaaaaaaccgaaggtgttaatgctaaattgtaaaagaaagttaaaataagagactcgaattataatatgattctctgacgcactaattaagctactatatattgtcaatagtattataacttctgtagctctatggcggagacccactttgtacttttggaaaangcnacccaaacaagaaacccacaaancggannncaggacgggcctgcctttgcttatnngntccccacgcccacaaagcccagcattgtccctaaggaaaaaaaatgttgttcgattcttgttcttgaacccttgttgcattctccaaatgggttc

SEQ ID NO: 164 - DNA, 581 bp, Gossypium hirsutum
  unsure (1)..(581): unsure at all n locations; Clone ID: LIB3825-001-Q1-N6-C9
ggttaaggatcaatgtttatgcatcacaattgaaatattagaacatcttaatcgcctcttcatatcgggatcatcatttctttcatcccttctttcagtttataggaattaacattttaacactgggttcggttatacggaggggccctttttggtgctttttaaacnacaggcgagcaagagcagagggagaagngnnggnccgggcggtcccccctccttaagggnnngnnaganggataacaagtgacaaatggaataaaaaaaacaagatcaactgccattctatcttcagaaggtgttgaaggttcagccacgcattccctttcagttgctgcggcctcttcactcttctcaggctctgctatctcaaccttcaatttcttaacgggcattgatgatcccttcgacatttgtgcaaacatgtttgtaaagagtttagcatccctcttgttgctttcaacttggaggtgtctcagggtcttctgaagtagcttcacctccctgttttggggggcagcctcaagagctttcttgatgtccatttcagctgatattagatctgaaggtttcatataggc

SEQ ID NO: 165 - DNA, 563 bp, Gossypium hirsutum
  Clone ID: LIB3825-001-Q1-N6-D1
agtagagaaaccataatcacaacatttgcattaaagtagagaaacaactgcaatgaaacttgaaacattcaagttcttgggtaataaaactgaaacaacccttcttcacataaatatatttgctccggacaattcgtttattctttcataacattttttttaaatcaaaattgctaaagcttggatacacaaagcacaatcactcactcacttaagccttaaacatgtgtcggatcaagtcgataacacgggaactgtaaccccattcgttgtcataccaagtcacaagcttaacaaagttgtcattcaaagcaattccagccttggcattaaaaatgcttgacctgttgtctccgatgaagtcagttgagactaaattttcgtccacataaccaaaaattcccttcaagttgccttcaaattccgccttgatagcagccttaatttcatcatatgtagccttcttctcaagtctcacagtgaggtcaaccacagagacatcaacagtgggaacacggaaagccattccagtcagcttgccattcagtgctggcaaaatttgc

SEQ ID NO: 166 - DNA, 489 bp, Gossypium hirsutum
  unsure (1)..(489): unsure at all n locations; Clone ID: LIB3825-001-Q1-N6-D10
aagggtaaagttaggggtgaaaagagagtaaaaaaaaggaaacccctgccaaaagggggggggggggaaaattangtttggtttacaacccgggccgagagaaaaggagaacaaaaaaaagaaaaaaccccccccccccccccggaaggataaaatatggcctgggggaaatgggagatataaaaaaaaaaaaaaaaaaattcactacatgggcttgggcaaaacaaagagggggcaaaaaagaaaggggggcgccgcatggggggtaaagaaatcgccccaagggaagaagagtcgaggcaagcaatggcgtaaaacaagggggggggaaggggaaacaaaactttgttggggaggtcaaaacggacacgagcgggagggggggcaccggaaaacggggtaaccaacttaagaagaggggaaggggggcggggggggggccgggaaggccggaacgaggagggggggggcccagccgccccgaagggg

SEQ ID NO: 167 - DNA, 455 bp, Gossypium hirsutum
  Clone ID: LIB3825-001-Q1-N6-D11
aaggggaaaaaaaaaaaaaaaacccccccttttttaccctaaaaaaaaaaaaaaaaaaaaaaaaaaatccccccaaaaaggaaaaggggaataccctccataagggggaaaaaaaaaaaaaaaaaaaaaaaaaaggggaaaaaaccccccccccccaaaaaaaaaaaaagcaaccccttggtttaaaagcttgggggggaaaaaaaaagggaacgggggggaaagccttttttaaaaaaaatttccggggcaaaaagggggggccaaaactggggaaccttgccttaaaaaaccaaaattggggggagggggggggggaagccaaaaaggggccccctaaaaaaaaaataaactttctttggggggggggaaccccttaaaactcaaaggcgggggggggaaaagctttaaatccccgggcaaaccggggagggaatccagggaaaaaagggggg

SEQ ID NO: 168 - DNA, 583 bp, Gossypium hirsutum
  Clone ID: LIB3825-001-Q1-N6-D2
gaaaaagaaaaaaaaagatttatcagcaataaaattcagggttcataaaaaagtggtactacaagcttttactacctgccaaggaatgcaactcgtataagaggagattcaatttactattatctgcattgtgaactttgggtcagtcaaatagcatctgcaccgtgcacgctcattgcttgaagttcatatccagggaaccttccatctcggtttaacataccatacgcactcaaatggggagatccttttcattcaagcaactcactgcagccaaatcagttgatgactattttatacaacctttgaactacatatacactcagggtatggattttcatagaaggattcttcggtcctaaaacgtgctttgccttttattccaggtgaaggaccttttcgttttcttggagctccttgtctgtttttgtgcatttgctgcacaagatcggaaaagaggatgtttctctgagctgtccactttctaactcatcaaaaagcctgactagtcctttcctgtctggggtgattgtcttccgatggcctaagatctgcggtgcccctcactgctcgtgccatgtta

SEQ ID NO: 169 - DNA, 566 bp, Gossypium hirsutum
  unsure (1)..(566): unsure at all n locations; Clone ID: LIB3825-001-Q1-N6-D3
aaatcaagtaccaaataaggttagcaagttacaaattaaacacatgaaagcttcaacgcaaaattcagctgaacctgttggataatttttttttctctcccttttctaacttgagatatgagatgatgaatatttcaccattcctattatctgggtcnttggtttatttgatatctaaatatttgaggttccaaaaatgggatttctacaaattcttcatatcagtttcttatgaatttacagtagaattttttttccgtaatttatacataccagatacatcgaaactcgacctcaacaattcccaatcagcaccttggctcctgcttgagattgatcccgagaatcgttgcctgagttgcactacaaaacatgctatttgctaaatcctcactaacagacacaggcaatggcagcatatggctcattaaacccggcatatctctcatgtcttttagcatggcagtaatattgttctttgcatgacaaaagaatcaacgttatcctgtaacttgtatgcagaaaggttggatgtgatttgactaaagtacttgagaatttgcttc

SEQ ID NO: 170 - DNA, 568 bp, Gossypium hirsutum
  Clone ID: LIB3825-001-Q1-N6-D4
cacatccacatataaacgattttccattaattattataatcaaacagatattgtattactctcattataatgcattcaaacttcaaagctgcattaacaagtatgtgttaacagagaagctttgcatttgcatcctataaaacgggcataactactatttttctgaaagaggacatcacagacatcgaattattcgaaagtgaactaactagaagagaagacatgttttactacaatttacaacatacaggaggacttaagtctcaacatttctttacacaaattcacacgtgcatacccgttctatgtgcatgactggaatcgtggagaagctaactcagatgcatatcttttcttgaggcttagaagatgtaaaaatacagatcagcaggctgacacatttgttcattgcttctatgcttcgcacaataatgtgctgtttatagtttcgttttctatgactagctattaccatggagtttattttgacttactttgtttcatcggctagaagaaccaaaacctaaaaccatctgagaatggatggattatgcaggaacagtacgtg

SEQ ID NO: 171 - DNA, 625 bp, Gossypium hirsutum
  Clone ID: LIB3825-001-Q1-N6-D5
ccctctttttgttttgttttactgagcctgtaaaggattactttctttccaaaaaagcagaacacatggtgatttattaaatagcatagtgataagatctagattgttgaattttgattacgcttagcagctgcagccatggcagcacccactcccccaggcgtagtactcatgccttttttttttctcacctcagctgctacaaccctttcagcatcttcacgagtcactgctttatccttaggcagcatcgcagtagcatccgataaaacgtccgagagagtggcttgatcttcaaaccgctgggttcgagcattccgagtggctgcagactgagcttcggatgcaataccgcccggagttatctcgctgctgccagtggctctcatttcagcagcttgaattgcagccgcatcgctctgatcaatcggtttatcagcagcagagatggccgccgcctctaaagcctctccaatcgtaattgatcctggatcaaccaacattgctggagtagtcaccgctgaaacatctggttgcctgtattgccccacaatctgtccagcaacggcttctgtgatcataacatcgccatctgcgtcagacttaatgacggcgacgccttggt

SEQ ID NO: 172 - DNA, 624 bp, Gossypium hirsutum
  Clone ID: LIB3825-001-Q1-N6-D6
aataataaaaatatagtccaatttttaatgtccatttacaagcaacgggctcaatagcccaaatccactacccaaaattagtcctaagcccgattagcctaaatagctttaacccaaacccaactaacctaaacccaaaaccaagcccaataactcgctgtccaaaacagagaaaattaacagcaaaccctagagaccaaaaccctaaactcagccaccgctcctaccttcagcatgcatcgagcctccgcgccacgtcaccgtacggctccatacaccagctggccaccgtacctgcaaagaagacgaaaacaacacagcaaaacaacaacaacaataggccagcagatataaaaaagggaagaaataatagaaaaaaaagaggaaaaaaccatttttgtaatattcggcaatataaagggccgattgcttcattcttgtaaggttacgcacacagacacgaaatcaatacaaaagatcaaaagtttctttgaaggtttttttctgcttttttcttctctgttccatcgatgcatggttattactattgatttttgtaaatagagagaaaaaggaaatgattcaccttagcgtagcgccgattgaaaccttgctcgcttcgtc

SEQ ID NO: 173 - DNA, 510 bp, Gossypium hirsutum
  Clone ID: LIB3825-001-Q1-N6-D7
ggaaactgataagtatctttgaccactgattacaaaacaaagcagcaaatccaaatttcagccatggttaaacatcacagagcagcgacggaaatatttacaagcaacacaacactatctttacgtaatggaggctgagagagctagtgactttcttgtctccaaccatctttatataaagttatacctaacacagtaatgggtggacatttgaagaaaactcagttgccccattccatggtaaggtatttttatgccgcctcggcaaagccaactctctctttaccgaaatcgaacacggtgtggtagcggcccatgaaaacatctcccaaaatccacaggggtccacgaggaggaggaacatccaaagcagtaaagccactgatgcactgagcttgaggaccttcacccaccttgagaatatactctttaggggacaggtcgaaaactttgtcaccgatagtgaaggaaacagttggcatggacgatagacttccacattcaacagca

SEQ ID NO: 174 - DNA, 563 bp, Gossypium hirsutum
  Clone ID: LIB3825-001-Q1-N6-D8
gagatcaataatattgatttttatttttctcacttttatgaattacttgcagatgctccagatcccccttcttctttctctgggaaaattatagagtgttcttgggatcctgatgaacatgtgttgggctaagtcggatcagggcagataagtcgactcccaatgatatcaatacttttaggaaggttttgctaagtatcagggataacatcacagaggaaatcttattaaatgagataaatgagattattcagttgcccatgtatgctgatagaataaggattgacagcaaggcacgcatgcacgcaaatgcagcgcgacgcaggtaaccaaacagcatgctggctggtgtgtagttgatttgattgaggtattggatgcttgggtgtgcctttgattgcatgcgtggtccaagtttctgttggttgcaacttgagagttatgtgcatacctaagctggtgagggcatcatgtaattagctatctctgctgttagtcttgtagggtgagttgtatgatccagggtggtacattagttgaatagttgggccacattaagttgg

SEQ ID NO: 175 - DNA, 527 bp, Gossypium hirsutum
  Clone ID: LIB3825-001-Q1-N6-E1
agaaatgaacatgatgaactttctttccgatgtagtgcaacagccaaatgaaagaacgcattcaccatgtcgtaaattcctatcagcagcagagatatacaagcataaattcaaaagcaacttgcaataggatggaacagacaacaatgagtgactaatgtaaacatactacgcagaatttcttcgcatattttgcacaattgtagaatcagaatggcttttcatacccctgggatggtggttgctcccatgctggcaaaaagcttaatggtatttcccccagggacatatatatcgagtcgtcatcggcaagagttccctctccattatgtaggccaatctcattctgcagaggattgatgtcctcagtctgcagactgttaatgctttcattttgtagagggtgagcatttatatcatcaggggggcaattggaaaaatttggaggaactctgtgatcataagcccatcatattgatccggtacatcagtcatatcaccattcatgctcacaaacattggttcac

SEQ ID NO: 176 - DNA, 593 bp, Gossypium hirsutum
  unsure (1)..(593): unsure at all n locations; Clone ID: LIB3825-001-Q1-N6-E10
aaaggtacactcttcgaactttttctttcaggaaaataccggtaacaacaataatgtgaacatggaagcaataaagctatgtacctaagaccattaaagtcgcaactatcagagatgtatacaagggaaaaaacaaagtcaaagtaaaccatgncacttcccaaaacatctcgacactgaagaggtaagagcagaggtgagaaatccgagctacctttcccaccagggaagtaagaaacagcatagtatgcaagtgcaaggacctgaacaacagaaaaaagccagaaagaatgtagctatgaagcaccatggaaacatacatggtgcccaccatacttccaataaatcctaatgtaaaaggaagcctctctttcgatgacatgtgggccaactgattctttgggcctctgagagcaaagaatgatccaatgataaagccacatccaagggtaaagcaaattgcaaatttttggggcatgagcaccatgactggaagaaaatggtaaaagcaataaaaacaaaaaaagaccccagctgccagaaataaaccaaagtagatgaatgcttttcctgaagggacactacttgtggca

SEQ ID NO: 177 - DNA, 603 bp, Gossypium hirsutum
  Clone ID: LIB3825-001-Q1-N6-E11
caggcaatgcaaatctcacattccggatgaatttgttgacacaacagcagtttcctagatatagatgctgtttcggacttgcgatgtcaatagtgatatatcatctgggtaatgcatatatatatataaacaaaatcttgagcactattttcctttttttcaaaactcttctatggaagcactatgttcctgacgtgcgtaaaggtgtggttactttagcacccttgaccaacgattgatgaacgatcttcagggttgataactgtgtcaaccccagccttggttgctttgctatcatcatcatcatcatcattcactggaagttttatcttaggtgataacttccggacttcctctgacgtatagataaaaattttcctcaccatgctgcaaaactcattccagggatcatccccaaccatcatcatgtcatcttcatcatcggtgtagacaacctgccaattctttgttgatccacaaagctgacctttaatgtcaaacatgtattccagcttctttagcaaatcctcataacagtcaaatcgtgtcaaatcaacagcccttccaactgccataccttgcatgtgaacctttgtgcagctc

SEQ ID NO: 178 - DNA, 608 bp, Gossypium hirsutum
  Clone ID: LIB3825-001-Q1-N6-E12
acacccaattttaatttaatgtttataacaggccaagtaatcatctatttttttagacaaaaatctgtaatagtgttccattttcaattttcatggccacatcataggttttctcaattacaggaagaaaaagatagatttttttcattttttttccagtttatgaaagcatacacagatgaatctgaacatttaagggtcatacccatacaaggactgtatggggactatataatgtacaatctaagaaacatatagctcagcttttccatcaatgaagaggctcatgaactcttctccatcaacagtttctttctccatcagaagttgagcaagcttgtggagaatgtcaatgtgagttgtgattatctgctttgcccttgtgtatgcagtctctactagatcccttacctctgcatccaccacatctgctgttgccatggagtagtctttttgtgatgacatctgttgacctaagaaaggattgccaccacctccaccaatggcaacttgtccaatctttttgctgaatccaaatctttcaaccatctgccttgccactcgtgagacttgcataaagtcattcgatgctcctgttgtcacatttt

SEQ ID NO: 179 - DNA, 591 bp, Gossypium hirsutum
  Clone ID: LIB3825-001-Q1-N6-E2
accttaaaaacttttatgcataagcttgatatacaaactgctgctatgcatttacaatcctgtaagtatgcaggatagagatgcgactggcagaaagaaacaaacatatatgactagctttggaaagattcaaatgtaatggtagtaaatgcaattaagcactatagccttgatttgaaggatgccattgaatcggaccatggccgttgcatgcagcagtacaagcttcctgcattaagacttgggaaacaccactattgcaaatgttggcgaacgcacgcatgtgtttcatgccgtattgtgtcaatgacccacagtgtgtttcgaacaagcggacctggaatcaagatatggttgcaacttataagcaaggaccaatgcacagatagttaaatctcgaaaggagaatttgactcataccacggatttcaagcattgccagtcatcaacaaggggcaaaccagtttcccttacagatttgagaatggcagagccttttgctggtccatataaaagtgttccaatcaaatcaatgctgccatccaagtggattctatgcctttttgtctcagttatctgtttgagtatttc

SEQ ID NO: 180 - DNA, 495 bp, Gossypium hirsutum
  Clone ID: LIB3825-001-Q1-N6-E3
aaaggccaaaaaaaaaacccccctcattaaaaaaaggaaaaagaaccgaaaagaaaaaaaaaatttttttttaggggggggggtaaagcttaaaaaaacccaaagttttgaaaagcccgcataaaactaaaaaaagcccttgggggctttaaattcaccccccagaaaatccaaaacccccaaacaaaaggccaaattttccccccccatattaaaaaaaatcctttggggaaaaaaaaataaattgttttaaaaagggggttcaaaaccaaaatccacaatagatcgaagcacctccggtttaaaaaaaaagtttttgaatcccaaacggggatttccaaaaaacccccagggtgttaaaaccacaaaaacaggggaacatcaggggatttaaaccggctttaacccaaaaaatttttaaaaagggaaaccccatcctttatggcccaaaaaaaaaaaataaacaggcggtttcaaaaaaaaaggtggggcccc

SEQ ID NO: 181 - DNA, 569 bp, Gossypium hirsutum
  Clone ID: LIB3825-001-Q1-N6-E6
aaaaaaaaagccatatcatatcacttcattataacttgaaaagatcgaccagcaagaaattatgattatgaagtacttcaggcctacataatattaaacttctcatgtctaatctaaacgcaataaacagttgctacccagaatagaagaattatgttatcaggtaaaagcaagtaccaaaagctagctgtttttagctctaaaatgtctgtttggaggtccaaccaaatggttctgctggatttacagcaaccatgagaaacaactctgagcactacactagtttccagatttcttcttcctaaaattgcacttccattacccttttgaagattgagatgtagcataagattagggcaacaagtgcactggactttattcttggttcagaagtaaagcaaacactgcccacaaaatatcactcttcaacaacattcaccagctcatactctatcagtgacagattgttatcttccttcacattgaaactggcaggttcatcaacttcaacacgaccccacttgtccactgcaagcctcattgatcctttaaacatgtctatttttcgc

SEQ ID NO: 182 - DNA, 547 bp, Gossypium hirsutum
  Clone ID: LIB3825-001-Q1-N6-E8
gaaacctgaatactgagtttttcataaaacagagtaacataggataaattaataaaaccgtaacctgctttatataatcaatacatactacatatatcgatctaaattccacgggggcgcggagcttgccataaagttacagcatctgcaaagggaaggaaaaaaaaaaaagaacaaccccctcaaccccttttctgtttttttttaacttctttgccttctttggcgccgttttcttagccggagatttaacactcttcggctttttgacagggactgtcttttttgctggatcctttactttcttccctggcgaacttttcttcgccgtcttcgctaccttagttggcttagccgctggtttagctttggccttagttgtagtagccttcggtttcgccgcaactttagcctttgccttcacaggcgttccaactttggctttggctttcggtttcgacgcggttttagtcgccttcggcttggactttgaggcggcagtggtagctgcagatttaggctttggggcggcaggctttttactacg

SEQ ID NO: 183 - DNA, 485 bp, Gossypium hirsutum
  unsure (1)..(485): unsure at all n locations; Clone ID: LIB3825-001-Q1-N6-E9
gaaaatggctttactttttttgcttctatcattcatgggattggaaaataaaacagttctactattaaattatttagctgaagaaaaacaaacaaaaatgaagccttgggttgcatttgnctcccttcccaaatctaggaaagtagaagtattgagcttttcgcaatcagaaacacacccttgatgaagggattccttctgcttgaattctgcgatcaagtttagagcaggcttctcttggttcctgtatttctgcagtttaagttcaacaaagtgctctcaatttcttgaattcttcaaggctcaacaaggaagccttgaccttcagccagtctgctggctttggcattataattgctatgtatccttctctatctgctgatgaatgaagcaactctggctgtttgattaatctttcattcacttccaaaagagagcctttaacacaacaccttacaatatatgaatcaccattggtgcaaacc

SEQ ID NO: 184 - DNA, 612 bp, Gossypium hirsutum
  Clone ID: LIB3825-001-Q1-N6-F10
aattgaaagaatttacttcatttccatgaaatataaatagaagctagttgtcaaaagtgtaattcagaagactagaatgaacaattgaagagatatgctttcctaggttttaaaaaatggatcctaaatctcatgtatggctaaatacaccttctcctagcaaaaaattgatcctgggactgtctatacaacaggaacacttccactaggaggctgcaaaggccccagcagtttgtctgcagaaaatcaaactgagtttccagcaaaagcatggtgctcaggaacatatttgcttcgggtcaatccaacagaatcagcctgaggccttggaataatatcaacaggatgcggatttgagaagtcattggatggcaggcacccctcagatttactcgagcataattctgaaatttgagcaagaacttgatcgggtttctgcagagaagactcttgcttcttggtaagcagattatctgcctgttcaagaggacagaccccctgagaagaatcccgtaacatcatcgtgctctgctttgacacttgtcgattagccatttcactgcaaagttctttggttgaagtaatgaagtactgatgactaagcgctaaacg

SEQ ID NO: 185 - DNA, 509 bp, Gossypium hirsutum
  Clone ID: LIB3825-001-Q1-N6-F12
aaaaaaataaaaaaaaaaaaagggggggggagaattgcccgtgaaataaaaaggggggaaaaaaaaaaaaaaaaaaaaaaaaaaaaaaaaccccccccccccccggggggggaaaaaaaagaaaaggaaaaaaatgggaaaaaaaaaaaaaaaaaaaaaaagggggccaaaaaattttttggaaaaaatgaaaaaaaaaaaccacaaaaaaaaaagggggaaaaacgggaaagaagaaaaaaaacaaaaaaaaaaaaaaaaaaaaaacccgggggaaaaaaaagggggaaaaaaaaacggggggggggggtgagaaaaaaaaaaaaaaaagagggggggggggggacggggaaaaaagaaggaggaaccggggggagaaaaaatttttgtataaaaggggggaataaaaaaggggggagaaaaaaaagaaaaaagcgggtcccgaggaaaaaaaaaaattcaggaaaaaaaaacaaaaaaaaaaaaacaggaaaaaaaaaaagaaaagg

SEQ ID NO: 186 - DNA, 546 bp, Gossypium hirsutum
  Clone ID: LIB3825-001-Q1-N6-F2
aaatctgctaaagtattttattgcatcaataacaaaaaggacaggaacctaaaaggtatggaactatacacataccctccacatcattgaacatatataatgactcatatcaccctcaatatatatatgtatatgtgctgtgctctgcagtcttccccctctctctatacacaaaactgatccccaagctgaatgaaaaggagaggaaaacaatggtcaaaggtctttcatcagatggaatcagcctcagaccggcttgctcgcatatggtggtgtcgtttcccatggtggcgcctgcctcctccaaatgtgacagggtcaaacttcttcagtctttcagcttctcggggattgatcacacactccggaggagcaaccttgtatctggtttggtcatagcagtaagagtatgtcatgtgcttcctcctaaagctatccatcttgcttctttgtgatggggtgatactggttgtaagttgttcccaactttgcgtgccgtcacacctcttggacgaaaactcgattggatcaactgcgcagccgtgc

SEQ ID NO: 187 - DNA, 504 bp, Gossypium hirsutum
  Clone ID: LIB3825-001-Q1-N6-F3
aaaattggcccacgcaatgagccagcaaaacaaaactagtaggtaacatgcattcgtaacttacattccaaacaggtcagccaaaatgtaatatagaatatacatactaacggtgaccttatgccattgacatagcccccaaagggattacgtacatgcaaacatacctataaacgtgaaactaaaatccatagacatacctccaacaggacgggataacatacgtacaaacatacatactcgaaaacaaattggctctccacacttttttaccgttatttttggtagagcagtaaatattatttgtatttccatgttgaacttcattgatttggaggctggtaccaaccccattgttcatttgagacatactctgttacctgttttacactcaagtaactttcaagtccccattcccctagttcacgcccaaagccactccatttggtgcctccgaatggagcttggcaaaagcatggctgtgaacaattgacccacacagca

SEQ ID NO: 188 - DNA, 612 bp, Gossypium hirsutum
  Clone ID: LIB3825-001-Q1-N6-F5
ataaggaaagtaaataaaatcaaatctctaatatcttgccataatccactataatcaactatattattctatgtacatatcttaacacttcccctcaagctagagcatagatgttaatcatgcctagcttggtacaaatataatcaatttgagttccactaagagatttcgaaaagaatctcctaattgatctcctgttttgacataatctgttgatatgagcttttgttggatcttctcatgaatgaagtgacagtcgacatcaatatgcttggttcgctcatgaaatactggaagggaggatataagaagagcagcttgattttcacaccacaattttgctggtgacgactttttaaatcctagttcttccagtaactattgtaaccacataatttctcacacagattgtgtcaagaaattagatagttgatcctctatccatctttgatcctccccaatttgcattagtgaagcattcaatgcctatgtgaccacaattctaatatagaagctcacagcctagagctccctttaggtaaaataagatttgctctagtgtcacccaatgtctaactgttggtgaaagaatgaattgtctcacacactcac

SEQ ID NO: 189 - DNA, 605 bp, Gossypium hirsutum
  unsure (1)..(605): unsure at all n locations; Clone ID: LIB3825-001-Q1-N6-F6
aaaaaacatatattcttttcattaatatataacaaaaatcagtactacaatacacggttattatacattcgcttccgttttcttgcagcgctgaattgattgaactgtacaagtatatgttacttacagggaacaaaaggggggtncnttttnatttncncaatgtcgnccttatttttagtctaataaaaaaaaatccccttcctttttcgttgtggtgaaacaacaaaagaaaactttacttatcactccatgtgtgaccaaagaaaaatacatccacggcttcttgcaaatcctcagtagcatctgccctctttgagtaactgaaagtgcagttttgtcgtctgtttctaacccaagttccttctttattgccttgagctgctcattcaacgagtatcagcgttgttcaccacttatcttttcctcgattgcttttgcaattgagtcctaaaagtatgcttcaaatgatttagacctgaatcttgctgatttccatttccttttttactaattccagtgtaagttgcaaccgcttatgcacatccaactcttcaataacttgctggcattgcaatttgtttgcaccagatattgcagctcca

SEQ ID NO: 190 - DNA, 222 bp, Gossypium hirsutum
  Clone ID: LIB3825-001-Q1-N6-F7
caaaaaacagaaaaatttcccaaacaaaaaccaaggggggggaaaaattaccctttcttaaaagaaggcggggggccttaacaaaaaatggggaaaggacccccccccacacgggcttttttaaaaaaaaaaaccagggcaaaaaggcggggccaaatggggaaaaaaaacccaggggcccccccacgcgcccccccacccgtccggggaccgggggggcac

SEQ ID NO: 191 - DNA, 607 bp, Gossypium hirsutum
  Clone ID: LIB3825-001-Q1-N6-F8
gaatataaaaaggtttttaactgatgatcacatttctttatttttctctaattattcccaacttttattgatttatagaactgccctggctaaccctataacattacaacaggaccaaacttctttttatatggtacaacagtacgatcttgaaaatgaataagtagaagcaaacaaacaacaaacacagactcaaggcagtagccccccccaaaacctctctcctttcatttaataggatcgataataaggatcatcctgggtacctacgcgggtgttccttctagtcccagcattgttagacgccgcatttgggaagtcttggttccccgttgtaccgtaagcaccctctgtatctccgccaaaccccatactgctgaggtcatcttgcctgcctgtatcatacccactacctgcggtggggtacccacggttgtcatgtccaccggtaccgccatagccaccagtgtcgcctatgttgtacccagctgtggtgtagccagtgccaccaataccaccaccaccagcatggccagctgtggcgttatgatggcgggcctcttgtttcctcagctctgcatcttcttggctctcttctttcctttcc

SEQ ID NO: 192 - DNA, 518 bp, Gossypium hirsutum
  unsure (1)..(518): unsure at all n locations; Clone ID: LIB3825-001-Q1-N6-G10
aaggcaacaactctcaaactcacaacatttattcttggtaaaactatgaacaaagacacaaattcgagttccgagtaaagttacactatcaaaaagaaatggtaatgtactatacaaaggaaagatttnncctaacttaaaaattccgtgaaaacgcatcctacgagatgtttttggacatccccccccccatttatttgcttgatagcagcagagtacaatttatgtgaaaatagaacaaagtgaacaaaatggatggacaatcatcaattacacatataacttgtaaggcatagaccagcagaaggaaaaaaacaaaacaaaacgaaacaatcatatgacctatatgattaatgtgcatgatgccattgccaaccaccatcactgatccgcaacttcagtttctgacactctttatctgaggaaaatttgtttgcatgtaacttggtttagagtactagggcgtgattccgacgggtatgctcaattacatgttgaacataggcgtcaaatataac

SEQ ID NO: 193 - DNA, 577 bp, Gossypium hirsutum
  unsure (1)..(577): unsure at all n locations; Clone ID: LIB3825-001-Q1-N6-G11
cggggggggggggggtttaaaaaaaaaaaaatgggggctatttttttttttttttttttgtttttttttttgtttttttgtttttttttttgggtttgggttttttttttttttttttttggggggggggggggcaaccgggaaaaccggggggggggggggggggtttcctggttttccccagggggggggaaaaaaaaaaagggggaaaaaaggggccaagcgggccccccgcgcgcgaaaaggnaaaccggaaaaaancccaaaaaaaaaaggagcgaaaaaaaaaaaaagaaaaggggggggggccaaaggagggagcaaacaaaaaaaaaagggggggggcaaaagggccggttccaagggggaaaaacgggggggcaaggggaaaaaaaaaaagggcaaaaggggggggaaagggggttggggaaaggggggcaaagggggtttttctttaaacaagggaaagggaaaaaagggggagggcccaaaacgccgggcccagaaaaagggaaaaaaggggacaacgcggggtggcccaaaaaggaaaaaaactcggggagggggggaaaagggg

SEQ ID NO: 194 - DNA, 586 bp, Gossypium hirsutum
  Clone ID: LIB3825-001-Q1-N6-G12
aaacaaatggacatcaacataatatgctgtgcattcatgggtttgagttttcctagctctgagaaaccataagtttaatctctcttctcaaaatccgtcgataaaaaaccatatgtgaatatattacactcaaaatgaaatccaatacagagaaagtcgggtaattgactgcctacaccatctcttagaaagtcctttcgactccctttggggggaaccttttagctgatttctgcaagaccagtgtcgtgtataaaatctaaaagagttgtgtgtgttgggttccgcttctcatcatgtcccggaactcctcgtagttgatcttgccgtcgttgtcggtgtcaacttcggatattatttccttgattgtgtcatcatcacccattccgtattctttcatggctgcttctagctcatctcttgtgatatacccactgttgtccttatcaaaatgttgaaaagctttgtaaagatgttcatctctttcaagcctatgtctatgcattgtagcagtgatgaattcaatgtaatcaatactaccatttccatccacgtcagcagcttccattagttgctgcacctctgc

SEQ ID NO: 195 - DNA, 564 bp, Gossypium hirsutum
  Clone ID: LIB3825-001-Q1-N6-G2
gtataaaattaaactctgtttatgaaacattgttcaatgtatatccagttcgacatttaacagttagtagggaatgttcaaaaagcaaacaatttctttagcaacagggatggataaaagaaatgggccaactttttttttttttagattagatcgacatataacatgaatttttccctctaaaaccgaccaaaaaaaattttggaaaaatggatcatcatttcaacaaagaagggagttctggttgttcctttctccccctcttttttttcccggggactggtaggtcggagtaagaatttaatggcgccaacctggttttccttacggatgattagaatctgaaatccggatccacatccattgcccaagcaaactttgccagaagtgacttgttgaatatcttctcgatgggaacttcgtgccgcttgcaccatgcaaccgtgattcgagggtcaaggtaattgattttggatgtgcccaatgctacagtttttagatcctctttagtctgcatgtcccgttccatcttctcgatctttacatttgtttgagctatctttt

SEQ ID NO: 196 - DNA, 614 bp, Gossypium hirsutum
  unsure (1)..(614): unsure at all n locations; Clone ID: LIB3825-001-Q1-N6-G3
atccaggttcaatccttcctagttttatagctcagtgttttgaaattgccttacaattcctgcgcagtccagaagaaattctaaaggcacaatactacaacactgggaattgtattttttaaagcaaattcgaggaactactcctgaatanagataaccagnacctgtataatgcctaatccaataccaaaactggaatacaaaatgatttcatccgctctagatgttgactaatggtatcgaagtccgaaagagaatgcagcagcaatagtttctcgtatgactcattcacttttaccattttgctgggaagcaacaaaattgcgaatgacttcaattgccagctgatgagcactcttgttttgcagctttgcaagctcatccatgacttcatatgtctctttatcggcaaaaagctttaggttataccttgctggtggcgtttgcactacaccttcccacttgtccaccagctctttaagtttttcaaatccaatgcgggctgtgaagtcaccaaatgattcttttggttgtcttttttgtttccagtagtagaacaaagttcaaaaacttttcaagacctgaactttgactttgtccataaaactcttgct

SEQ ID NO: 197 - DNA, 219 bp, Gossypium hirsutum
  unsure (1)..(219): unsure at all n locations; Clone ID: LIB3825-001-Q1-N6-G4
aaaaaaaaaacaccatgaattgataaggtttaattttactattattttttgcaaattaaaagaaaatgcaatacacaagttgagatataagtattagaatacaagggtaagaataagaattttcctttttcttaaaaaaaacaaaaactctcnnactaaanttctngcagtagggcaaaaactaaaataattttgtagaaaattgcgccccggctctag

SEQ ID NO: 198 - DNA, 565 bp, Gossypium hirsutum
  unsure (1)..(565): unsure at all n locations; Clone ID: LIB3825-001-Q1-N6-G5
ggggtggggggtttttttttttttttttttttttttttttttttttttttttttttttttttttttttttttttttttttttttttttttttttttttttttttttttttttttttttttaaaaaaaagggccggggaaaaaatgaaaagggggggggggccaatcnnttttnntttgggggaaaaaggcccaacttaaaaaaaaaaaaaaggggaccccccccccccacaaccccagactaaagggggaagaaaaaaaaaaaaaggggctcctttaataaaaaaggagcgaaaaaaaggggcatccgggggacccccggggggggtccttttaaacccaaaattggaagggccccaaatgggaaaagatggggttcccggggaaccaaaaaaacccccgggattttcgaaaaaacccaaacgggggagggaaaatgggcgggcggaataaaacccaaaaccgggggggggggaccaagggggggaaaggaaaagggaaccgaaaaaaacacacaaaacccctttgggggacccaaggagggggggggcggggccaaaaaaacca

SEQ ID NO: 199 - DNA, 623 bp, Gossypium hirsutum
  unsure (1)..(623): unsure at all n locations; Clone ID: LIB3825-001-Q1-N6-G6
cggggggggggggggggggtaaaaaaaaaagatggggttgtttttttttttttaatttttttttttttttttttgtttttttttttttttttttttgttgttttttttttttttgtttgtgtgggtttttttttttttttaaaaaaaaaaaaggggggggggaaatttttttaatttcgaaggggggnaaaaaaaggggaaaaaaaaaaaggggggnaaccaagcgggccccccccccccagggnnaaaaaaaaaaaaaaaaggaaggggggggaaaaaaaaaaaaaaaaaaaaatgtccccctttgttggggtttttgggggggggggggaaattttccctttaaggaaaaaaaaaagggggaaaaaaaaaaaaaaaagggccccgggccccccgggggggggggggggaaaaaaaaaaaataaaagggggggaaagggggggttgaaaggggggaaaaaaaaaccgggaaaaaaaaagggggaaaaaaaaagattcggtttttgttgggggaaaaaaaaggaatggggaaagagaaagngaaaaaaatgggcgaggggggagggagggggagaaaaaaggannaaaaaaaaaaaaaagagggggacgagagaaaaggagag

SEQ ID NO: 200 - DNA, 600 bp, Gossypium hirsutum
  unsure (1)..(600): unsure at all n locations; Clone ID: LIB3825-001-Q1-N6-G7
gctagtaattgaatatttattacatatcatcacacttcacaaaagatcaaaagcataaattcatggaaaccatgcattttattaattattacacaacaacatcatccaaattattcatggctagctcttcaatggctgggatgaccaggcanatttcttttatcttctccatcatactcttcttctcatgttgatcatggtggccccagtgctcctcaggcggnggcgttgttgcgttgctggttgttgtgattctggttttggcaacgtaggttacggtttgtgattgcccctcttcccccccctccgtcttatgctttccacccgttagtttctcctttattttctcctttagccctttcttcttccttctaccgcccatcccatcgtcctcagacgagctagggctggaggcgttggagcgctgaatctcttctgtggtggaaacctcgtaatgcaggtgctgtggctgatactgcggctgctgttcctcctgctgcaggtactgaggccgcagctgctgctgctgctgatactcagcagcggcggaaagagtgggatcatatcccatctgaccaccaatacatatctgtctgcttg

SEQ ID NO: 201 - DNA, 157 bp, Gossypium hirsutum
  unsure (1)..(157): unsure at all n locations; Clone ID: LIB3825-001-Q1-N6-G8
caaaaaaaggcagccccacaaccccttttgttcataaaaaattaaaatgtataccaattacagcatcttgggcagcactaatgccatttcatttaattcaaaaagttcaacccctttcaagcttttcattggcaggggaagaggatcagttcnnntc

SEQ ID NO: 202 - DNA, 79 bp, Gossypium hirsutum
  Clone ID: LIB3825-001-Q1-N6-G9
gttgggggggtttttttttttttttttttttttttttttttttttttttttttttttttttttaaagctcaagaaaaac

SEQ ID NO: 203 - DNA, 601 bp, Gossypium hirsutum
  Clone ID: LIB3825-001-Q1-N6-H11
cggggggggggggggggtttaaaaaaaaatagtggggtaatttttttttattattttttttttttttttttgggggtttttttttttgttttgtttgggttggggggtgtaagggggaagggggttggggggacaaaaaaaaaaaaaagaaggggggggggaaaatttggggtgaatttgggcggggcaaaaaaaaaaaaaaagaaaaaaaaaggaaaaacaaacaagccccccccccgggggaaaaaagaaaaaaccggcccggggcaaaaaaaaaaaaaagaggaaaaaaaaagggggcgggggggaaaaaaaaaacggggaaaaagaagggaaaaaaaaagcgcggggaggggccccaaggggccaaacaccgaaagaaacgcaaaaaaaggggagaaaagggaaaggaaaaagggggccccccccccggggaggggggaaaagcccgcgccggggggggggggcaaaggggggagaaaaagggggggggggaaaccagaaaaaaagaaggaggggggccataaaaaaaaagaggggaaagggggcggaaaaaaaaaaaaaaagggccgcagggaaaaaccgggggggggagaatgcg

SEQ ID NO: 204 - DNA, 609 bp, Gossypium hirsutum
  Clone ID: LIB3825-001-Q1-N6-H2
atacaaaaccaaaccagacactgataagttctaaccataatataaaacagtagtacaaaatcacaattagagatttctttgaacgctttagtaactgcaataatttgttctgcgcttcacatttctgtctccaagtcagggcagccattcttattatgagcttttccagaaccattgcattatccaagaaataactaaccatttcaatcatatgtgtgtcaaagtatgaaatttcaatctccttgaggtgaaatgacaaacaagaaggaactttcatacgtaaagccttccatcgagttcccgcatcgtcctaaactcttgaaaaaagaaaaaaagttatttggtttgtaccatgaatttaggtgatctcgaatatgctttctatttttttaaagttttttgtaattgtggatgtaactgacactaaaacaatgacaaagacttcataccggaaaattgagggtaagtgtctttagattaggcacacaatgtagaaactccacaagccaagtttctctcccattaaaaccaacaccaagaatatttgaattcaataaggttgtgaaatataggaagtcgacttgttctgaaaactgcacacacataaac

SEQ ID NO: 205 - DNA, 416 bp, Gossypium hirsutum
  Clone ID: LIB3825-001-Q1-N6-H3
gaaataaaaaaaaaaaaaaaaaaacaaaaaaaaaccccccccaaaaacccccaaaaaaaaaaaaaaaaattttttttttttaaacccccccccccccccttttttttttaaaaaaaaaaaaattcccccccccaacacccaaaaaaaattaaaaaaaaagggaaaaaggaaaaacccccccaaaaaaaaaaaaaaaaaaaatttaaattttgggggggcccccaaaaaaaaacctcccaaaaaaaaaaaaccccccccccactttaaaaaaaagggggggggggggggtttcccccccccctttataaaaaaaaaaaaaaaaaaaccccacctggggggggggggggtttttttggaaaaaaaaaaaaaattttttttttttttgtccgccaaaaaaaaaaaacccctttaaaacc

SEQ ID NO: 206 - DNA, 549 bp, Gossypium hirsutum
  unsure (1)..(549): unsure at all n locations; Clone ID: LIB3825-001-Q1-N6-H4
cgaatcaatagaaaataaattataattcaacaagtctagtacaatacaaaaaacaattcaaacaccatcaaagtttcttaaactagatacatgaaataacataaataaattaacatttactacttttaccttaaacctaactaattgctagatgcnttgcttcatcaaacatttggttggctagctccatcctccaactagctcatgcctccgatggatgaatatttacgatattcggttcatcgtcatctatcacattactaggtaatccttctcccaactaggatagaataatggactcctaagtattcctcatctaagttttaataacccaaagcatctttcaataacattatgcgctgaagcatgtttcatattgaaaaattcttccggagtacttggctggtaaccctgacgccactcattcaaatgatatatttgtcctctaaaaggtgcaagaaatccctcacaatttgcgtatccaacatcaactagataataacaaccatgaggaacttttaatccatgtctcctactaatggcatctcg

SEQ ID NO: 207 - DNA, 643 bp, Gossypium hirsutum
  unsure (1)..(643): unsure at all n locations; Clone ID: LIB3825-001-Q1-N6-H5
gtggggtggggtttttttttttttttttttttttttttttttttttttttttttttagaaaaggtatttccattaccccaattaataaaatttagacaaaagaagcaaccaacaaacacccccagctcctagccaagccggctttagccggggcggggctataatcnnttagccttttaatggccggttatatgggtcattttttggggtctttatttacccccctctccctagaaaggtctggaatttacatttggcatttttattttttgggatctaaaattccatcctgcaccggtgatttttcccttacatgacaaaacaggggttcggatttttgtcactgaacatttgaggagcgtgaaggggatgacgtggatcaatcatgtacccctggttcacatatacaggatgagggtgcatatacccttcatccacgtatccggaccgctgatgattctgatatccctcaatcgcataacttggaccaccgtacttctgtccacccgaccagtacattggttgggggggataagcatatccatgatactccatcttggtcacctccatcttgggttcaccaccggctttttttttttccccggctttcttttttttttcggcggctttcttttttttcccg

SEQ ID NO: 208 - DNA, 559 bp, Gossypium hirsutum
  unsure (1)..(559): unsure at all n locations; Clone ID: LIB3825-001-Q1-N6-H6
aaaaaaaaaataaagagcatttcataaacattcaaaagggacctgtttccaaaacacaacaatcacaggtgctactgatagagtatcccaaaaaaggaaccaaacggtttaaatcccaaaaaacatacgagaacacaatagagaaaccagagtgaatttcaatgttttagtcaacttcctcaatcttaggaccagnaccacttccaccagccggaacatcctnatccatgccaccacccatgtcaccgccggcaccctggtacatcttagcaatgatggggttgcaaatactctccaactccttcatcttgtcttcaaattcatcggattcggcgagttggttgctgtctagccattgaatggcttgttcaatagcatcttcgatcttctttttatcagttgctgggagtttggcaccaatcttttcgtccttaactgtgttcctcatattgtatgcatagttttccaatgcattctttgcctcgaccttctttttatgttcttcatcttcggatttgtatttctctgcttcttgaaccatcttttcaatttcttcttt

SEQ ID NO: 209 - DNA, 510 bp, Gossypium hirsutum
  Clone ID: LIB3825-001-Q1-N6-H7
aaaaaaaaaaaagggaattttttttgcccaacaaatttcatttttacagggggggttagctaacccaaaaatattttttggtaaaaaacttgacattacaaaaaacctttattctattcagggttgagaaattttatcattattagttttaaaaaaaagggggtgtaacaaaggcgaaattgccccaaaaaaaaacactcccccggaaaaaccaaaaggctaaaccttttttggccttcacactttattattgcaatcttaattataaagctcaagaacaaggggaggggaaaccaatgcttaaagcgggggaaattaaatggtgggaaaaccaactgggccagtaaagtaaaaaaaaccattggatggggttaaaaaaaaaaggcgggcaaaaaataaaaatgggcaagtttagcatatggggggcaaaccatgttccaggacaactccccctaccactgccaaaaggcatcaattaaaaatgctggcccctaaatccacattttgggg

SEQ ID NO: 210 - DNA, 525 bp, Gossypium hirsutum
  Clone ID: LIB3825-001-Q1-N6-H9
tttttttttttttttttttttttttttttttttttttttttttttttttttttttttttttttttttttttttttttttttttttttttttttttttttttggagggggggaaccaatttataaattgggaaaaaaatttttggagggggggggaacatttaacttgggtaaccgggcctgtcccaaaaaaaaaatttaaaaataaaaaaaaggcccccccccttcccccaattttaaaaccaaaaatttgtaaacctttttggaaattgaacatttttatggacccagtaaaaattgccccaaaaaaaactggaaaattaaaaatcacaggggcaactaaccccaaaaaaacatccccaaaataaaaaaaatttttaaaggcccgccccactggttaattggcccccctttaaaacatgggggttatatccccaaactgggaaacaaccaatccatacaagggccaaaaaaaaggaaaaatccaggggcccccccccccccaaattggcaaactagggcggggg

SEQ ID NO: 211 - DNA, 672 bp, Gossypium hirsutum
  Clone ID: LIB3825-002-Q1-K6-A1
cattgctatgggctcgagcttggcttgccgttttgcccccgtcacgtttagggatgccttgtgcatcccaagtcggcgaccacacggtgccttggccttgccaagcccttgcccgcattcgaaactgcccgcgaccccagtaccaagtccctttgacggcaacggcccactggggggtgtaagttgagtttgtaggctcggtcttggctcgaccaagtcccggtgggacttttcccctcgtagttctcgtgccaagcggttgtggtgcgccctcgttcgttgttccttccgctcccctaccattcggttgggtgggctgttgggcggtgtgcgtgggcgctactactagtacgcaataggcatatgagtggtgttttggttgtgtgtattggcaggctccatgctactcgcatcgaactgtcgagccgcactcctcttcattaactccccttgttgtaatcgaactcaaggggtgcgatcgggatcctgtgctgcgtacctaagccagatggaattatggatgtgttgccgtcccttctccatcccgtgcccttcggggtgcgtggtggacctcaatcgtgccttgtgtcccgagtgcgcccccttaaatcggtgtggcctcgtcggtgcactggtgctcgatcgtgctttcggatgcggaaaatgtttttg

SEQ ID NO: 212 - DNA, 425 bp, Gossypium hirsutum
  unsure (1)..(425): unsure at all n locations; Clone ID: LIB3825-002-Q1-K6-A11
gtcaattttgtgtactgcccngatgtaatgcagttgngaagacaatagcattcagcattttcaaactcattggatgcgaggtgaacctgttattgttagaaatgtccttgaaaaagttctggtcttagttgggaaccattggttatgtggagagcttttataggtgcanaaaaagatattaaaagaggaggctaatagggtaaatcaattgattgcttggactggtgtgaggtactttttntggattaagaagcctcacaaaaatttggcttcaaaaattttctcagggttgaagatattgatacttttatgtggtgtaatattatgcacttggacaatgttgttattatgtggtgtactactaattatgtatttggataatattatttctagtactcattatggtttcgaagcaatttataatt

SEQ ID NO: 213 - DNA, 656 bp, Gossypium hirsutum
  unsure (1)..(656): unsure at all n locations; Clone ID: LIB3825-002-Q1-K6-A3
tctatcatctcccaagctcgacagttctcaatctcaatctttccttcaacacatcaactctcagcttcgccttgcttcgtctcgtaaaccttgcagagctgttactgccatggccggttccggaaagttctttgttgggggtaactggaaatgtaatggaacaaaagactccatcacaaagcttgtttctgacccgtacattgcaaagttggagactgatgttgatgttgttgtgtcacctcccttcgcccctctcgatcaagtgacagcttcattaaccagtcgaattgaggtatctgctcagaactcttggattgggaaaggtggggcttttaccggagaaatcagattggagcaattgaaagatattggctgcaagtgggtcattcttgggcattctgaacgcagacatattattggtgaagatgatcagtttataggaaagaaagctgcttacgctttgaacgagggtctcggagtaatagcttgtattggtgaattgctagaagaaagagaagcaggcaaaactttcgatgtgtgtttccggcaactgaaggcttttgctgatgttgtacccnagttggacaatatagttattgcttatgagcctgtatgggccattcggactggcaaagtggctacaccccaacaagctc

SEQ ID NO: 214 - DNA, 613 bp, Gossypium hirsutum
  Clone ID: LIB3825-002-Q1-K6-A4
ttttctctcatctgctcttcctttctaaaaccctacaaaaggacctgtttttcttccctatctaccatgtccatcaaccttaacgcccatgcatttgctggtaaccccataagatccaaaacccctaaagcccatgacccactctccccttcttcagctttccagtccctcaaaacccatctcctccaaatccataattcacctcccttccacctcctccaaagtcccctcttttcaaggtcttgccttttagaaagggcagacctttagcttcttcgtctatcacagggaataatgatgatgatgtgcccatttggcatctggggtggatcagtttacctgattgtaagaattttctggggaaatgtggggtggacttgactgaagactctttggtttatttgggttcaaaggttgaagacgatgttgtttattgggctgttgatgtttctggggaaagtagattggtccctgaattgggtgacaaacagttttgctttgtggagcttagaacactaatggtggctactgattggtctgattctattgccatgggtgaattggctattgctggtcatgctcgagcattgcttgaatggcacaacctatcacg

SEQ ID NO: 215 - DNA, 608 bp, Gossypium hirsutum
  Clone ID: LIB3825-002-Q1-K6-A6
gttgtgtggtgtgcatgggagctccaactgggactctctcttccatccactcctatttttcctttcaaaatgttggacctcaacagctatggttacgagcttagggagggtttgggtccatttggcattaatgttaacaacaattgcggcagttgcagcagcagctgcaattctagcatttgcgtcggtgctgatgatggtggtggtggcaccaaaacacgacgactccttgatcaccaccaatcgaattgttcctaaaacgttgcctcttttgttttggacaaaccaacgacctaatgatgaagatgagccgaaagatgtcgacgaccactcttcttctgccattttcaagaatgatggagagggtttagtggggtggccaccagtgaaagcatggaggaagaaagtgcggcgccgcgtagccaatgtaaaggcggcggtggagaatagctgtggtggtagggcttcaagttcaacgctcgtgaaggttaagatggaaggaaatgcaattgccccggaaattgacattagtcttcaccactccttttgattcgctcacaaccaccctgctgagaatgtttggtctttcttgttgagatgggccaaag

SEQ ID NO: 216 - DNA, 653 bp, Gossypium hirsutum
  unsure (1)..(653): unsure at all n locations; Clone ID: LIB3825-002-Q1-K6-A7
ttttctctctcttcctgtcttcgtctacttgggctctttctctatggatccctacaaggtccaattctccttgaggactatcatctggtggaaaagcttgccaactttgacagggagcggattccagaacgtgttgtccatgctaggggagcaagcgcaaagggtttcatcgaggttacccaggacatttctcaccnttcngtgctgattntctgcgagcacctggagttcaaacccctgttatcgcccccccctcaaccgtcatccatgagcgtggaagccctgaaaccctcagggatcctcgtggttttgcagtgaagttctacacccgagagggtaattttgatcttgtgggaaacaatttcccagtcttctttattcgtgatggaatgaaattccctgatatggtccatgctcttaagcccaaccctaagtcccatattcaggagaattggaggatccttgatttcttctcacaccatcctgagagcttgcatatgtttactttcctctttgatgatttgggtgttccacaagattacagacacatgggaaggttctggtgtaaacacatacactctgattaacaaggctggcaaagcacactatgtgaaattccactggaagcccacttgtggggtcaaatgcttgct

SEQ ID NO: 217 - DNA, 314 bp, Gossypium hirsutum
  unsure (1)..(314): unsure at all n locations; Clone ID: LIB3825-002-Q1-K6-A8
gcaaacgccgaancaccannncattcggnggccgacaangcacgagcagcgnaccaganccaccgacgaaggcaccanncaaggaaaccnggnangcnannnnannnnnncnggcggggggggggaaaaaattacccttgttttaagacggggcanncaagaaaagagaagccaaaagaaaaaacaccacagcacccgacactcgnncanancncaanannnnngagaaannngggacnacaaaggagaagaaacgagaannnngnangcagagganngnaagnaanncgaaagaaaaagaaaaagaacaagaa

SEQ ID NO: 218 - DNA, 388 bp, Gossypium hirsutum
  unsure (1)..(388): unsure at all n locations; Clone ID: LIB3825-002-Q1-K6-B1
ttttcgcgtgggcgaagttctgtatcttcagtgaagcttgaggaaaatgaagatagtggagattcattttcggcttttatacangaaaatcaagactagtgtggtcgagatggtgagtaaaacgactgatttcctccatagtctctttagtttacccttggcggacaaggctaaagaaaatgctggatcgaacatttttgttttatgacaattggagctagcttgatgggattggcagtgatggttattatggttgttcttttgaaacgagtgtagcaccctattttaaagtaaatttgccgatattacaaactcaaaaacacttgcttgtttggttactcatggatgataatgatgatcaatataaactttaaagtccactgcccgt

SEQ ID NO: 219 - DNA, 604 bp, Gossypium hirsutum
  unsure (1)..(604): unsure at all n locations; Clone ID: LIB3825-002-Q1-K6-B10
aattcaaggcgctcacttttctcctgcaaaaaaggtatgccaaaggtttcttaattttattgaattttaatatttcccctttttgttatgtcattaagaaagagtacgaaactgtgggtgttgaagtgaatggagaaggaagcaaattgtcacagtggaagaagcttaattctcaggatcttggaattagcatnnctanttttccaagccaacaaggaaagttcttaatgggctcaaaacaaaaggatatgacgtttaccttgtaggaggttgtgttcgggatcttattttgaagcgaacgcctaaggacttcgatattattactacagcagaactcagagaggtggtgaaggcattttcacggtgtgaaataattggaaggcggtttcctatatgccatgtgcacatggatgatacaatcgtggaggtttcaagttttagcacatctgcacggaattttggtaggggcctaacctatgaaattgaaaagcctgctggctctgacaagaaggattttgttcgttggagaaattgtttacagcgagacttcacaattaatgggttaatgtttgacccatttgctaggataatttatgactacatg

SEQ ID NO: 220 - DNA, 607 bp, Gossypium hirsutum
  unsure (1)..(607): unsure at all n locations; Clone ID: LIB3825-002-Q1-K6-B11
tctttttcgtgggccgggagtcaccctgcgatctgcagctgtttcaagccaagatgtaaaccaagttgcagcgcataaagacacgccaccgcttctgcagcaaaggcggatgttgtttgttgaaagcggcatcgaaattaattttttgtctcgatccaaccggaccaacccaacttcctacacagagacgggcaatttgactttctttgaacaagngttccctcgattccacaccgttttggcaccaactacagccgcagatcctctcaatctccgatattgtaggttactgaaagcagggaaatanattcgtgaaacacgccaaactgtaatctttattttagagggtagatctaagttccatagctttttgtaaaattgtttgtaatttgtctgtaagtcattctgatcattgtataagagaagtttatgcctactctgcaccgaatattctccagtcggctcaccccgccaaataacaaagtccttatgctcatacaaagacaaaggaatgcatagaatttgcttcacttcctgctccgagaaggatccaagcgtcttcccaaatggagaatgcttgccatttctaatcccccagcccaaacct

SEQ ID NO: 221 - DNA, 534 bp, Gossypium hirsutum
  unsure (1)..(534): unsure at all n locations; Clone ID: LIB3825-002-Q1-K6-B12
tgttttcgaaagtagagctttggttctctgtctgctgcttctttcttctcttggtacttcattatttttcctttcacttcctttttgtgaaaaaacattgaaacccttttcaagacgcaatagaagatgtgtggaggtgcaatcatttccgatttcattgccgtgaaacgcggtcggaagtggaccgccgtgtanctttggnttgaactngacacattctccgacctgttgggtctggattacggaaatccacaagaccctttcactcagttcgacaacaccaaggccggttccaaagccaagaaccttgaaaaagtgacaaacgagtcgactcagaagacaagccgggggagagagaaagaagggaagactcagcgaactcgaaagaacatttacagaggagatcaggcgaaggccatgggggaaatgggcggctgagataagagatcctcacaaaggtgtcctgaatctggctcggtacatacaacacggctgaagaagcggctcgagcctaccatgaaaccgccaagcgca

SEQ ID NO: 222 - DNA, 694 bp, Gossypium hirsutum
  unsure (1)..(694): unsure at all n locations; Clone ID: LIB3825-002-Q1-K6-B2
ttttgtatgagcagattgggtggtgctgctgctgttgctccccttgtttctgaggtaattactctcatgattaaaatttgcgctaatttattttgttaaaaaaatttgagaaatttttacatggtgacnttatgatgaaaaatcttgtcttgttcttgtttaaatcattccttgtcnntgaaatccgacccatatctcatanctcantttaaaacgacaaaaacaaaagtagcacgcgtgccatcacttttatagatcccttttcatttttggtcatatttcggttttggtccctttatttttttaaaattttagttttaactcttatactttaatcctatttaatttaataatgttacttcatcaagagaagtatttgaagtgctatttgtttggagtgaactgacctcaatagctcaagtggtagcataattacccataagtatctcatatgttgtaaggcatgagcgcaaaccttactcaaaattttttaaatatgttgtttctccacaaaattaggagataaaatcccgatcgaggagaatatttgctctcatttgaacacatcaataagcgttttaatctaccttaaatttctttaaaaacttgaagccttttatgagaatagttagcggtgttaataatttaggttagctaataacaatacaatgattgaactatgtcaatttaatga

SEQ ID NO: 223 - DNA, 358 bp, Gossypium hirsutum
  unsure (1)..(358): unsure at all n locations; Clone ID: LIB3825-002-Q1-K6-B3
tttttcctcanaaagaagagaaagcataagaagttaattctgaattggttcttgagccccttgagctaagtgcctgatagcttatccatgctttacttatatatccttcaacattgctattcaactgaggagtactacaattttaaatctaggtatatgaactctagaatagcgccaagcagtcagtatagggacctttcccttagaagctaaggttcaagttcttgtaatgaaataaaacatgtctgatcttaaacctgtttatgtaatgaaacaggtactattcagctgtaaaaaaaaaaaaaaaaaaaaaaaaaaaaaaaaaaaaaaaaaaaaanaaaaaacaaaaaaaaaagaa

SEQ ID NO: 224 - DNA, 500 bp, Gossypium hirsutum
  unsure (1)..(500): unsure at all n locations; Clone ID: LIB3825-002-Q1-K6-B4
ttttcgcgtgggcgagacttcgtgcatatgcaactcaacagggcgtgcagccagatcagattatttttacagatgttgccatgaaaagtgaacatataagacgcagtgccttggcagatctcttccttgatacaccattatgcaatgcacacacaacaggcaccgatgttctatgggctggtcttccaatgttgacctttcttttgaaaagatggctactagagttgctggttctttgtgctgctccccccctggggaggagatgatcgtnagtagtttgaaagaatatgaagagaaagcagtgaaactagctctaaatnacactcaggagtcctcaacaacctttctaccttacaaaataaatttaccccgatgccctcggcggtatctacaatgcacccccacctttaagcaaattcttcatgattctctggcactctaatgtgtngggggtgctgacctgaccgatacacactggccatnttacaggaaggcccgtt

SEQ ID NO: 225 - DNA, 610 bp, Gossypium hirsutum
  unsure (1)..(610): unsure at all n locations; Clone ID: LIB3825-002-Q1-K6-B5
atacaaatacaaagcaacctccccagcccccttcatcattatgttgtcttcatcatcatcatcgtatctgcaagaagccttaatttgtaaagcttcaaggtttgatgttaatggtgatcatatcctctttggtggtaaaatgtccccccttagtaagaccgacttgcaacgcgtattcgagaagctcncttgaagttgatggcttcgttagtctggaggagctgaattggttgctncaccagaaccgcctctgtccaattcagccttgaagaattggagcccttagtgggaaaaccatgtttgaacttggatgaattcttgttcttttatgaatccatctcgaacccactggcacatggtggtgacgaagaggaggaggaggaattggtcattcacggcggcggtgaagaagaagacagtgaccttgcgaaggctttcaaagtgtttgacttgaatggggatgggtttatttcatgtgaggagcttgaatacgtgctgggaagactgggtttgtgggatgaaaatagtggaaaagactgcaagagcatgatttggtattacgacaccaattcagacggcatgtttgattttcaagaattcaaaacatgat

SEQ ID NO: 226 - DNA, 540 bp, Gossypium hirsutum
  unsure (1)..(540): unsure at all n locations; Clone ID: LIB3825-002-Q1-K6-B6
cttttgcgtgggcaaagatccatggcgtggtacgaaaanacacagagatagctatgggtgcctatcaaccgcattatacatgggctaagaaaaaatatcctcgtggtcaggtacacggatatagaatgtcattatgggcagagcatcttggggagctaaataagttgttcaaggagccagaaagtggggaaggcgtgaagtggnttatagganngctgaagagaactggaagaaatgcactgatgnngagcattcagnattgcagggtnaccttntgatgtatccattgcaagtagatatggatgagaaagtaaacccactccctgaacatgagaattttcctgatgttggtggtaaagtaattggagctcactccattcagcttccggatgtccttacaacataatacactagtagagagatggaatggaggattggaccttgtgaaatcatatcagcataccattgtttcttgatgtgtgaagtagtagctagtttgtatgaaagatttgcatatttgtaaagagcaaaaaaaaatat

SEQ ID NO: 227 - DNA, 683 bp, Gossypium hirsutum
  unsure (1)..(683): unsure at all n locations; Clone ID: LIB3825-002-Q1-K6-B7
tttttgcgtgggtttgcatcctcctgcctttttgcttctcaaaattgaagctttggaaaaccacgcaggctttcaagaagccatatcatggatagtctccaaatatacgcagataatagtgatgaggaagacctaagtcaccagccatctactctgtctgcagactcttcacctccacggctcatcccctccaattcngtgcaccaaaggttgatgacacaatgcttgccctaactgcagcagaagcaccccacccccaatcaaggcccattgatccaacccagcatgttgttgccttcaatccaacctatgaccaactctgggctcctacctatggcccagctcatccatatgctaaggatggcattgcccagggcatgcgcaaccacaagctgggatttgttgaggatgcctccatcgactcttttgtttttgatgagcaatacaacaccttccacaaatatggttatgcggccgacccttcaggaagcaactatattggtgatttggatgctttacagaagaatgatgccatttcagtctataacatcccacaacatgagcaaaagaagcgaaaaattgagagggagaaggatgaggatgagggtgatccaacgnagatcgataatccagctactgatgtttggttgatgaagaataaaagagtccttgggcaggtaaaa

SEQ ID NO: 228 - DNA, 411 bp, Gossypium hirsutum
  unsure (1)..(411): unsure at all n locations; Clone ID: LIB3825-002-Q1-K6-B8
ttttaatctatctaattcaaggtgcctgttaaataaaaggttctcttgttgggtgaggattgaatggggaaatgaagggaacaataacaacaacaaagggtcgatcacagctttttgtgatgtagtgagattatcttgccagtcaaaagactatctcttcacatggaggttccatatacccaccatagggttaaatcnntttnnagnnncaatgtgtgaatttcgaaaaatgtacaaagttttttcccctctcttttactgcaaaatgtaaccttaaccagttagtactatatgcaagtacaaatgtcacaaatatatatagcatatagtgtagtagttttttgtcagtgtcttttgtgtatagatatgctatgagaagcttttagtactattctatatatttacttcttc

SEQ ID NO: 229 - DNA, 655 bp, Gossypium hirsutum
  unsure (1)..(655): unsure at all n locations; Clone ID: LIB3825-002-Q1-K6-B9
gttttaattgcctccctgttgctgctctaattgatgagaagatcctttgcatgcatggtggattatctcctgacttgaaaacattggatcagatccgtagcatttctcgccctgttgatgtgccagatcagggccttctctgtgatcttctttgggctgatcctgataaagatcttgatgggtggggagagtttgnttgggttgtgncananacatnnggggctgacataggggctgaattccttaacacccacgaccttgatctcatttgccgagctcaccaggttgtagaagatggctatgagttctttgcaaagcgacagttggtgaccatattctctgctccaaactactgcggggaattcgataatgcaggtgccatgatgagtgtggatgatagtttaacatgttcgtttcagattcttaaatctttagagaagaaaggaaagggtggatttggcaacaacacattcagaccaggaaccccacctcacaagggtgggaagcgctgagtaagaccgtaaagttcaatgttggatgaccaatagaccaataggggcggtcttgtctctacttaatgatggtgtttttgttgaatgaaactgtgatggctggctggactattgtttggtgccaaaggaaattggaaggtaaa

SEQ ID NO: 230 - DNA, 588 bp, Gossypium hirsutum
  unsure (1)..(588): unsure at all n locations; Clone ID: LIB3825-002-Q1-K6-C1
tgctttcaagnatactgtggcatcaaagttaagcgaggaggaaaagctcaanaaactcggcaatcttatgaatgaaagccaccacagctgtagtgttctctatgaatgcagctgcccggagttggaggaaattgtaaaagtatgccgagacaatggcgctatgggagcatatgttttttgagctggatggggtggttgtgccgtggccttggtaaaagagagtatcgccccacagttcatcctcaatttgaaggaacaattctacaagtctaggattgacaaaggtgtgataaaccagaatgaccttggtctctatgtgtttgcttcaaagccttcaagtggtgctgctattcttaaattttagtatgtttcatttaacttattggttgtgccataaaacattttcaatttcacatgccgaagatttaaaaaagggaaaatcagtttagggaatagagaacatcaaaattcaataaaaatttgatcgttttgtgtatggttttagacaaattggacactgatttcgctctatgtaaatggattagtgacgttgagcgggtagacattaatttatttaccggctgtttc

SEQ ID NO: 231 - DNA, 145 bp, Gossypium hirsutum
  unsure (1)..(145): unsure at all n locations; Clone ID: LIB3825-002-Q1-K6-C10
ggtgttacaccttttacttgattcgcgcgtggaggggggcgcaagnaatgaacgggacatgggcccctaggtttgaactcgtcgcccgctcatgtgataggtgtgggtcctagccgcgtggggcggcccgggtgctgggggccgg

SEQ ID NO: 232 - DNA, 424 bp, Gossypium hirsutum
  Clone ID: LIB3825-002-Q1-K6-C12
cttattcgtccgattttcttatgagtcgggcgtgagaacgtagttaactaaagtttttttccctttaactttcaattaatgcttgccttatatcaaaatcataattagcataagcgtattaattaagcaattgcgtagtttgtttcagagggaagttatacctttcaagccctacacacaccggggggggggactttttttttttttagggaggacaacccccctctggcaccccaacaagagagccccaaccccccccaatggcccggcggcctactcagcttatgggacatccacacctcagtacaaatggcttgaaagggagcttcccaaagtgaacacgacacaaacaccatggctcatatgatcttatgcattctcctttttacaacagatatgtacatcattatatggaaggggagtc

SEQ ID NO: 233 - DNA, 661 bp, Gossypium hirsutum
  unsure (1)..(661): unsure at all n locations; Clone ID: LIB3825-002-Q1-K6-C2
tttctattctctttggaaattggtagaagagtggtagtgggtaagaatctttaaaaaagcttactttttccccccttcacttccattctcatcaatttctcttttgtcttcctctttttccaatatcatcaaaaaccagccctaacagagcagctgaacctaacatcatcatcatccatggcggcaccgattnggtangggctttctctgtagccctaactctggtcccgtctgtttttggaaactctgcaagagatgctctttacacgttgagaaaaagtttgaccgatccagataacatactccagagctgggatccgaaccttgttaatccttgtacttggtttcacatcacttgtaaccaaaataatcgagtcactcgagtagatttaggtaattccaacctgtctggacatttggtacctgagcttgggaagcttgagcatttgcagtatctggagctttacaaaaatgacatccagggaaccatcccaactgaacttgggaacttgaagagcctcattagtttggacctatataacaacaacatctcagggaccattcctccttcactagggaaattgaagtctcttgtatttttacagcttaatgacaacaaattaactggacctatccctagggaacttgtcggtatttcaag

SEQ ID NO: 234 - DNA, 589 bp, Gossypium hirsutum
  unsure (1)..(589): unsure at all n locations; Clone ID: LIB3825-002-Q1-K6-C3
caagcagttgtcattgttcttgtcttaggttttatattcaaacttgaaaagaaaaaatcatggcacactttcagaatcaatattctgctcccgaagttacgcaaactgacgcatatggcaacccaactcgccggacagacgagtacggcaacccaatcccgactcaggagactggccgtggatnncnatggancggtggacatcatcacggaggccatcatggactccatcgtactgcacccccctctagctcgagctcatcttcggaagacgaaggaacggggaagaagaagaagggactgaaacagaggctaaaggagaagataccaggtaacaaagagcatcaatctcaggccacctcaactacaaccccagggcagggggctacgtatcaccagcagcaccacgagaagaaaggagtgatggataagatcaaggagaagctccctggtcaccacaacccttgattagctgcctttggtcggctatttcctactagttatataagcgttaattaaataacttgcagcaatgaagactcttgtatctcttaagactatacttaaaaggagatatttgacttccatcg

SEQ ID NO: 235 - DNA, 601 bp, Gossypium hirsutum
  unsure (1)..(601): unsure at all n locations; Clone ID: LIB3825-002-Q1-K6-C4
tttattctaagtcagcagatcttcaatgaactagtgaagtcacaacgtctgactgatgtttctcttgaagcttttcgagactgtgctcttcaggacctttacctgggagactaccccggggttaatgagaattggatggatgtcatctcttcacaaggctcatccttgctttcactagacctctctggttctgnagttcgtttcctggattgtatatctcaaagattgcgtgaaccttcaagatttaaccctaaattactgtgaccagatttctgaccgtgggctaaaacacatcagtggtctgtcaaacttgaggagtctcacttttcggagaaacagtgcaatcactgcacaaggaatggccgccttatctggcctagtaaacctgatgaagctggacctggaaaaagtcctgggattcatggggggcttattcacatcaaaggtttgacaatgttagagtctcttagtattaaatggtgtaattgcataacagatgctgatatgaagcctctttcanggcttacaaacttgaaaagcttacagatttcctgtagtaaggttacagattttggcatcacttatttaaaaggtctgcaaa

SEQ ID NO: 236 - DNA, 368 bp, Gossypium hirsutum
  unsure (1)..(368): unsure at all n locations; Clone ID: LIB3825-002-Q1-K6-C5
tcattactttattcgatgggggcaggggtggattgaaaaaaaaaaaaaaaaaaaaaaaaaaaaaaaaaaaaaaaaaaaaaaaaaaaaaaaaaaaaaaaaaaaaaaaaaaaaaaaaaaaaaaaaanaaacccccaaaaaaaaaaaaaaaaaaaaaaaaaaaaaaaaaaaaaaaggagggaggggggagaatttttttttttttttannnnnnncnnnnncnnnnnngnaaaaaaaaaagaaataaaaaaacccggcggccgccgccgggaaagggnnnnnnnggggggggggggggggggggggggggggaaaaaaaaaaaaaaaaaaaaaaaangggggggggggggggggggggggggggggggggg

SEQ ID NO: 237 - DNA, 645 bp, Gossypium hirsutum
  unsure (1)..(645): unsure at all n locations; Clone ID: LIB3825-002-Q1-K6-C6
tttttaaagcccaagaaaaaggcttctggtgccggtgctctcctcaagtcttcacctattatcgacaagtccgagtggattaagggccaaaacctccgccacccttcggtttgttttgtacggtcacaccctacatcggccgcctttaccgtccgtgctagttcatatgccgatgagctgggtaagaccgtttaaactttgtttctccaggtcgnggnattttggccatggatgaatcaaatgctacacgcgcccaagcggcttgcctcgattggtctcgagaataccgaggcaaaccggcaagcttaccgaacccttctcgtgtctgcccctggcctcggtaactacatctcgggagctatccttttcgaggagactctctaccaatctaccatcgatgggaaaaagatggtcgatgttcttgttgagcaaaatattgtccctggtatcaaagttgacaagggtttggttccactccctggttccaacaacgagtcatggtgccaaggtcttgacggtctttcatcccgcacagctgcctactaccagcagggtgctcgtttcgccaaatggcgtaccggtgtgagcattccaaatggtccatctgccttggcagttaaagaagcagcttggggacttgctcgc

SEQ ID NO: 238 - DNA, 678 bp, Gossypium hirsutum
  unsure (1)..(678): unsure at all n locations; Clone ID: LIB3825-002-Q1-K6-C8
gtatctcagtttagatattttctgttttctttttttgcccctagtgagagatttatgcggtgttatcgccatgattgatgttggtgtgtgttggcttgttacaacgcgaccatacatgaaggctgcgtaataaggagttcctaataaaggcacttggtaagctaaggaatgaagccgatcaaacctcccaaccaaccattttctgattctcaatttctccaaatcaagtcctctgatttctcatttttgtctcttctaacttgattatagtttccctttatatatatttttgtctttgcatgtgaagcagcccggagagcatcaatccccaacttgaggagtttcagcaagagattataaactgcaagtctcggattgccaatatggagaaacgattaagaatatttgaaggcgatgcttccgaaatcacaacgttgattcaggccgactaccacgagcagatcctggaggaaacactgaaacaagtgcgcttacacaagcaagttttagaggaaaaaatacttctcctggtcctccgccaactacaaaggtaaaacttccaccaaatgctgnagatgtaaatggctntgttacagcaagttccagcagtatctccaaccatttcttgaactttttggattcaaatggtctttctcctncagggtgtgcatcaattat

SEQ ID NO: 239 - DNA, 614 bp, Gossypium hirsutum
  unsure (1)..(614): unsure at all n locations; Clone ID: LIB3825-002-Q1-K6-C9
tttcttggaattttatggtaataaaaaaagagctagccccagattgggcccacgtatatatgataacttcctttttagttaaagcattgggttgctgcaaaaattgatataggaggggaaaatagctgtagattcaggggggaaagttggcacctgaaaatttgcgttgtggagtggccccttttanttaaagtcaatatcaatgcaccaggatcctaaattgatttaggaaagaaatccacccatgaagattgtcatgaagcacactcttttgatgatatggagtcaaactcttttgtaaatgccacaagtttacccgcttttaagccagataagtaaattaagtcaaaaatatttcagtgtctcagacccagcaagcattgaattttgtcttctcttcaactgcagcttcctcttatccttcttgctgttaagaaattcgatgagaccttggagtgcaactttgggttcatcactgatcatcagttgttgtgccacttcagcagtttgtcatctttgatcccaagatatgaagctgcaagttttctgaatcctgctggactacaatatcccatgtaaatatgcacatccattcgccccggccgtagcagcgc

SEQ ID NO: 240 - DNA, 243 bp, Gossypium hirsutum
  Clone ID: LIB3825-002-Q1-K6-D1
ttctgggttgtctttgatgaggaaggcaacacacaggctccacttgctatgttggctggcaagacgagcggcgatatactgcttgaccaagatattgaaggtgtagtggaggattcaatctcttcaagcctggaaaagccaaggcttagcgcttcttcaagtagagtgttatttaatgttgcattccatggtctttttttttagtcggaacttgaattaggtattattgaaatagggttttgt

SEQ ID NO: 241 - DNA, 245 bp, Gossypium hirsutum
  unsure (1)..(245): unsure at all n locations; Clone ID: LIB3825-002-Q1-K6-D10
gacccagcgtccgctgtttttgagcagattgggtggtgctgctgctggtgctccccttgtttctgaggtaattactctcatgattaaaatttgcgctaatttattttgttaaaaaaatttgagaaatttttacatgtngactagttgatgaaaaatcttgtcttgttcttgtttaaatcattccttgtctgaaatgcgggcagagctctttttcataaatttcgacaaaaacaaaagnagcacgc

SEQ ID NO: 242 - DNA, 549 bp, Gossypium hirsutum
  unsure (1)..(549): unsure at all n locations; Clone ID: LIB3825-002-Q1-K6-D12
gtgtccgcgcccgattcggttcctccagccgtggctccgtcgtctcttctccacctatccttcaaccaggatcatggctgctttgccgccggcactgaccatggcttccgaatctacaattgcgatccattccgggagatctttcgccgagacttcgattgcggtggcggtatcggggttgttgagatgctgtttcggttttaatcnatggctcttgttggtggtggacccgatccgcagtacccgcctaataaggtcctgatctgggacgatcaccaaagccggtgcatcagcgagctttcgtttcgttcggaagtgagatcggttcggcttcggagggaccgaatcatagtcgttttggaacagaaaattatcgtttacaattttgtggatttgaagctcctacaccagattgagaccatcttgaatccaaaaggactctgcgcggcgtctcagggagcaggagcattggttttggtttgccctggattgcaaaacgggcaggtcagggtggagcattacgcctagaagaggactaagtccatcatg

SEQ ID NO: 243 - DNA, 524 bp, Gossypium hirsutum
  unsure (1)..(524): unsure at all n locations; Clone ID: LIB3825-002-Q1-K6-D3
gtttttaanaagcagacacattaattgagcagatgactcgggatcaagatcctattatccgttatggtggtatgtatgcattagcattggcctataggggaactgcaaacaataaggctattcgtcagctgctgcactttgctgtatcagatgtgagtgatgatgttaggagaactgctgttttagcactgggtnnngtccnttactcagagccagagcagactcctcgaattgtctccttactgtctgacccttacaaccctcatgttcgatatggtgcggcacttgcagtgggtatttcatgtgctggcactggattgagtgaggccatatcattgttagaacccttgacatcagatgttgttgattttgttcgccaaggtgctcttattgcgatggctatggtcatgattcagatcaatgaagcaagtgattctcgtgtcgggacattcaggcgtcaacttgaaaaaatatactggataagcatgaagacacaatgagcaagatgggagcaatcttggcct

SEQ ID NO: 244 - DNA, 617 bp, Gossypium hirsutum
  unsure (1)..(617): unsure at all n locations; Clone ID: LIB3825-002-Q1-K6-D4
tctttacagaaattcgcaaccttttctggcagatggcgattccgttgcctcctcaaagaaacgctccaaagctcctaaacaccaccaaaagcaagacaaaatgctttcgacgggaataagctcgaaattcttgaaagaggcgcttcttcagcagaaggaaatagaagatgaagcctcaggagggaacgttaggatcgcatttggttcggntaaagaagagcataataagcacgaagaagaataagaagaagccccccagatattgacaattttggtggatttttttgagacccaaagtcaatttggcaactacgaagatgagattgatgaggaagatgagaaattgcttgaggcattcttatcgaaggatgctggtccgcaaaggacacttgctgacattataattcaaaagatcaaggagaatgatggaaatgttgcttcagaaacacgacctttgcccaaaaaccttaaaactctggatgtggattaaatatgcaatgttgccaagtttctgaacaaatacacagctgggtaaatgcccaaagcctttaaacacattccttcaatgcaactctgggaggatgttttgtacttgactgaacctgagcagtggtctc

SEQ ID NO: 245 - DNA, 641 bp, Gossypium hirsutum
  unsure (1)..(641): unsure at all n locations; Clone ID: LIB3825-002-Q1-K6-D5
gttttaactgagagcaaaccttggcaaaagctctgaaatcttgtaatctctcaaactctcttcctttaagatatagagtgaaaagagtagggccccaaaatagccatagccaagagaaggcgctacggcagtatcgagggagcaagttcacacgagactgagactcttatcagtcgtcgtgtgtggggaagggttttggttgnnttatnnnctnccacaagaattagggcgaccacgcgctcaaaaaaaaaaactgcacggcgcataaacccaatcctttagaccgcccatgaaccgaatctcccatatttaattagtttatccaaaaaaaaaattcagcatactttcaatcattaaaccccggcgaaaaatggccgcgtcgctgctattccccgtcgcatcgtcgacgaaaacagccgctcctccaacctactcgccacggaaacctataccttccggtcaccgtttcttctcattcccttccaaaaccaagcctcttctcaaattcaccggcaattcaaacaaacatcggtctttcaccgccaaggccatcgaagaaagcaaggagagcacggaagacacgttgaccgccaaggaagtggatacggaaccggaatcgagtgaggaaagcgagctgagtg

SEQ ID NO: 246 - DNA, 645 bp, Gossypium hirsutum
  unsure (1)..(645): unsure at all n locations; Clone ID: LIB3825-002-Q1-K6-D6
catgcctgaaacgtttgaagggcatacatcaagtgtattaagagcatcatttcttacgcgtgggacccagtttgtatcatgtggtgctgatgggttggttaagctgtggacaatcaaaacaaatgaatgcatctctacctatgatcagcacgaggacaaggtttgggcattggggggggggaattgnnctttatgttagcaacaggnggcagngatgcagngagcaatctgtggnatccnnccantcctgctgagaaagaggaagcttttcgtaaagaggaagaaggggttttgagagggcaagaattagaaaatgcactgttagatgctgagtacacaaaggcaatacaaattgctttggagcttaggaggcctcgtaaactttttgagctgttttctgagcttttcaggaagagagaaactggggaccatatagacaaagcccttcatgcccttggcaaagaagaatttcttctactttttgagtatatacgagaatggaacacaaagccaaagctctgtcatgttgcccaatctgttcttttccgagctttcaacattcttcctccgacagagattatcgagataaaaggcattagtgaactacttgaaggtcttatcccatattctcagagacatttcagc

SEQ ID NO: 247 - DNA, 353 bp, Gossypium hirsutum
  unsure (1)..(353): unsure at all n locations; Clone ID: LIB3825-002-Q1-K6-D8
ggtttggaacaatgccaaatctcagcgacaaggctggacaaatagaagtctgagccatttctttctgtgacatgaagccgggcctcaatagggtacatggaacctttcggttgtatattccttttgatgctctgtcattgaaaaagtagagtaatatatcaacaattcaatgttttactttatgaaaggcaactcnnncctganatatnggccttaatgaaaagccagaaaaaaaaaactttgtgaaccatccccccaagcagatacaagatcaaccatttgctctaaaatgctttctggccattcatttactgttaatttaattttggccttgatgttggcaattaggttca

SEQ ID NO: 248 - DNA, 619 bp, Gossypium hirsutum
  unsure (1)..(619): unsure at all n locations; Clone ID: LIB3825-002-Q1-K6-E10
cgtccgtttttttccaacaagtcaatgagagcataagaaagctgctatggcgaggaggagcttggggtttctctcatgtggaaccggcaatcccatcgatgattgctggcggtgcgaccatcattgggagaagaaccgtcagaagctagccgattgcgccattgggttcggcaagcatgccattggggggagagatggttttttttttttggngacngaccctagngaccatgacccnggnaancctaaacccgccaccctccgatatgctgtcatccaagatgaacctttatggatcattttcgctcgtgacatgaccatcaagttgaaggaagaattgcttatgaactcgttcaagaccatcgacggccgaggcgtcagcgtccacatttccggtgggccatgcattactgttcagtacgtgaccaacatcataatccatgggatcaacattcatgattgcaagagaggagggaatgcttatgtgagggactctcctacccattacggctggaggacgatatcggacggggacggggtatcgattttcggaggcagtcatgtttgggtggaccattgctctttgtctaacggcaacgaagggctgatcgacgccctt

SEQ ID NO: 249 - DNA, 635 bp, Gossypium hirsutum
  Clone ID: LIB3825-002-Q1-K6-E11
attatgggtcttttcttattgttaccaaaggcggtcataaatatcaacgtaattgaccaactgttgaagtatttcaatgctgtatttcataattccgtcaccccgtttcttgtggtgctgcaaattgtaggtggttggtgctgtagctttccagaataggaagcttgccatgggtgggagcaccttccccatttggtttccctcatggaatcttgttgggccgagtaagtatatactttctcctccatatattcactgcacttaattttatatgatgatgagttagctatagagacttccctattctatcttttctctgtatgcatcggtccgggtaggaccaagcagcagctttacggccaataaggagagagattagcagtagcttatactctctaagtaaaagagaaatgaaaaaaaagaaacccaagtttcactgaacatacttgaacttcacggtcacatctatcccgactaacatgggggccaagtatttcttggatttgctggagttatatttgagaatactaaaaattcctgatgatagttgctatatgtgcacttttgcagtgatcccgctcaacggccgtcttttggtaatatagtaataacactaaagaagttgctaaaatctc

SEQ ID NO: 250 - DNA, 172 bp, Gossypium hirsutum
  unsure (1)..(172): unsure at all n locations; Clone ID: LIB3825-002-Q1-K6-E12
cagctganaagaacgagaagaagaaaaggaggggggaagaangaaccggaaagggggagcccaggaaaggnngcccaacaagaataacctgccttgggaatatggaagttaggtgacaatacaaggtcgttttcttgctttttttttttgtggggaatcactatgttaatat

SEQ ID NO: 251 - DNA, 660 bp, Gossypium hirsutum
  Clone ID: LIB3825-002-Q1-K6-E2
gtaggaacaggaagtggcattcttgcaatctggtctgcccaggctggtgcaaggaaggtctatgccgttgaagcaactaagatgtcggagcatgcccggactcttgttcaggcaaacaatcttcaagacattgtagaagtaattgagggctctatggaggaagttgtcttaccagagaaagttgatgtgattattttcttgtggatgggttattttctcctgcgagagtctatgtttgactcagttatatccgctcgagatcgttggttgaaaccatctggggtcatgtatcctagccatgcacgcatgtgggttggacctatccgatctggattggtggatcaaaagaaaaatgattatgaagcagcaatggatgattggtatgggtttttggaagatacgaaggattactatggtgttgatatgagtgttttgacaaggcctttctcaaatgagcaggagaaatattatctgcaaacatcattatggaacaacctccacccaaatcaagttattgggacagcagctgttataaaggagattgattgtttaactgcttcagtaaatgacatccttgaagtcaaatcaagtttttcatcagctatcagtatggcgcccactcgcctctgtggatttgcaggatgttttgatgtccatttc

SEQ ID NO: 252 - DNA, 651 bp, Gossypium hirsutum
  unsure (1)..(651): unsure at all n locations; Clone ID: LIB3825-002-Q1-K6-E3
tttttgatgttgcgattttgtaagccaatgttgccacttagggaccagtaagcttggtcttgttgatgttggttgaaaattcgttgttctttctagttcagtgacgattttcaggttgtcgagtcacacaccatctgtttgtctttattcccatttgatatatctcactggggatggcttttgcttttgttcngtttcggtaacctcccatttagggatattaacttacgttaattgaagttgctcccccagaaatgccaagtgctcacttttcgttattgtctagtttaaatatataaattaagaaaactagttctccatctaaagacccgatttctggtcatatatcccctatacaagcaccacccaaccaaggggacagggaaagctaaaggcccaggccaaagttcattttatttatttatttattttctccataaaaaaaatggaagcagacgagatagcagaggagctgcaaaacattgagtttgagattcatgatgttgaagaacaaatacgggagttaattgagaagcaagagaagttgtacgagagacggtcggaactgcaagttttactggaaacatgccctatagatgtcaaagatggttccgctccgaccaatgtacaagcggaaagatggtcaaggtc

SEQ ID NO: 253 - DNA, 660 bp, Gossypium hirsutum
  unsure (1)..(660): unsure at all n locations; Clone ID: LIB3825-002-Q1-K6-E4
ctttgtgttatttatcaaacaaactgcccatttacctgtaatctcaggtcaagtcaaactacaacattacacaaagggacccaacattcatataattaagatggccatgattaatgagcagcagaaagcttcatcttctttgggggtgggttccctccagagatcacaacatatgaatagaagaagaacattgtggcattaanttcagcataaaatgcattaggaaatagcttctttgtcgcggacgccccccccaaaatctcacgcacccagagagaaaggaactttgattcatacggtaatcgaggattcaagaactaatatagttaataacaagcatttggaagttttagattgtcttgagttaaaagttcgagtcttggaattctgcttatcgtcaatcaaatggaggctgaaaggttgaattctccaagtacatccgtaattacttttgaattattgggtcatcaactacacttctctcaggatcctaattccaaacatttaggaacaacagtttgggacacatcaatggtgtttgccaaatttctggaaaagaatgcagaagggaaggttttgcccgtctaaacttaaagaaagcgcgttattgaacttggagcangntgtggagtagcgggggtttggaatggcattgctggg

SEQ ID NO: 254 - DNA, 596 bp, Gossypium hirsutum
  unsure (1)..(596): unsure at all n locations; Clone ID: LIB3825-002-Q1-K6-E5
attcgaaccggtcaagatgcggtctgtagatggtcaaactagttgcgtggcggttgatggtgggttggcaatgagcaacccgaccgccgccgcaatgacgcacgtgttgcataataaacaggagttcccttttgttagaggggtcgaggatatattagtgttgtcactggggaccggggcgctacncggtaaagttacgaatatgaaaaagtcaagaatnggaaggtcaaggattgggctcaccccctggctcgaatatccggtgacggctcagccgactcggtggaccaagccgttgccatggatttcggacaatccagaagcagcaactacgtaagaattcaggcaaatgggaccagttttagacggtgtggcccaaacgtagacacagaccccagccccagcaacgtaaagatgctgatcgccatagccgaggaaatgctgaagcagaagaacgtagagtccgtgttgttcggaggcaaaaggctggccgaccaaaccaacttcgagaaactcgatggtttcgccgctcaactcgtgcttgaacatcagaggcggagttgtaggattgctcccactgtcgctttcaagcaatc

SEQ ID NO: 255 - DNA, 477 bp, Gossypium hirsutum
  unsure (1)..(477): unsure at all n locations; Clone ID: LIB3825-002-Q1-K6-E6
tttttaatcatgcaagaagccttgaaacatcccggcgggcaggcattagcaacatacagaggccacaatgtgttgcgtactttgattcgttgttacttctctccagcatatagcactggtcaaaagtacatttacactggctctagtgatggttcactttatatatatgatctggtgacgcgggcggaaggatttgnttttnttttcaggaaaaaccggnnagggangggaggggggacccaaaaccccacagcccatcacctgcggcnggggaggngnganngcgangagggaannnccgggcagagaagaagaacccncagaggcaggaggcaggagaaagagaaagagaaagaaggccnagcnnnngaagaaaaggganngnnngacanacnnngggagnnannngnnacagagaaancanagaggggnngcnggggnngcncagcacnnccaaanaaaaacaaaagggagcca

SEQ ID NO: 256 - DNA, 500 bp, Gossypium hirsutum
  unsure (1)..(500): unsure at all n locations; Clone ID: LIB3825-002-Q1-K6-E7
cttttgcgtggggncgaagatcaaggtccaagtcaagatcaccaatcatttataggcgaaagtcaaggtcaaagtcaagatcaccaatcagttataggcgaaggaggaggtctcgctcttattcacctctgccccgtttccaaagggaccgtaggtccagatcacctgtgcgatctcatcatcgttcaagaaatttttgtgncttcgnncatatagagatagggatgacaangacaggagtggnagacccgactngcagagatcgcgtgatcgtcattcatctctttcgaggagaaataggagtattagtcctcgaactagaaaattaactcctgtagattctgactcccctaaacatagtagagaaagttcacctaagcttaggaaatcatcccgtcctggttcaacatcaccaaggcatcacagaagaaataggtcatccccaaagaatgatgatgaaaagaaattgaaatatagaaagcgctctangtcaatgtctg

SEQ ID NO: 257 - DNA, 337 bp, Gossypium hirsutum
  unsure (1)..(337): unsure at all n locations; Clone ID: LIB3825-002-Q1-K6-E8
tttttaaaccaatcagacacctaaccccgcggcggtgggcgaaatcaaagtaaaaaaagaactaaagtctctcagacgaaccctagatcaacacccaagccaccgattcccatcccccaggcaacaacctgcccctttaggcccagaagatgatttttcagcctcaagatctcctcctagggggggcggcaacattttttttttgggggacggcgnannncccaggnacggggggggcgggngcncgcgnacggcaccggcgnacggaggcgcgcgnggcngcngaaacacnggagcgnacggaggcaacaaaaggagcacggcngcnagggcnagg

SEQ ID NO: 258 - DNA, 625 bp, Gossypium hirsutum
  Clone ID: LIB3825-002-Q1-K6-F1
ttcatcgctaagccataatatttcttccagttatcaaagcgaagaatcagaaagagcttgaagagctgccgtgaaagcaaaggggtttttgttctgttttgtttttatttatttataatcaaaagctgtgaaaattatcaatatgcctttcccaatgaagatccagcctatcgatttcagcccttcggaagacgttttgccgcctcgtttggagacggtgaagccggttgtgaaatcgcggttcaagaggctgtttgagcgccagttccctagcattctgaggaattccgcggcggagaaggtggacgctgatgagctgccttttagcaaagaatgcaccaccgccgagctggaaccgagctcattttgcttggcgaagatggtgcaaaatttcatcgaagataacaacgagaaacaacaatctggtgccgttaggtgtagccgtaaccgctctaactgcttcaatagtaactgcaacgacagctccgatgacgatatggatggtttcggtttcagcgactccaatctctcttcttcagctgaagcatctgaaattctaaagagcttggttccttgtaagagtttgaatgaaaggaatttactggcgcatacagcgagaatcatg

SEQ ID NO: 259 - DNA, 589 bp, Gossypium hirsutum
  unsure (1)..(589): unsure at all n locations; Clone ID: LIB3825-002-Q1-K6-F10
tatttcaaatttgaaaacttgtgttggctcgaactcaaatcttagtctgaacaacatggccaaaacacccatcaaatactatctggttgatgcattcaccgactcagccttcaagggaaacccagcagcggtttgtttgttggaggaagaaagagacgagaaatggatgcaagcagtggggggggagattananctcccattactngngacttgactcggatccccanagccacctctccaaacaccacccctcctcttagatggtttacccctgttaccgaggttaagctatgtggtcatgcaaccttagcatctgctcatactctctttacaactggcttggtaaattcaaacattatcgaatttgatacagtatctggaatcctaactgctacaagagttccagatgttagtccaaccaatatctccgaggttcagaacggtggagtgagcgactgctttctgatcgaattgaattttcctttcgttccagctactgacttcaattctgctgaggctttacttgtatcgaaagccttgaacgatgctccatctattgattttaagaagacgactcccgcagatgat

SEQ ID NO: 260 - DNA, 575 bp, Gossypium hirsutum
  unsure (1)..(575): unsure at all n locations; Clone ID: LIB3825-002-Q1-K6-F11
tgttattgtctaaaaagggtccgattcagaaaaaaaaagagaactctcaacaagctggaactaatcaagatcaataggaagaggagttagctaggaatctattgacaaagttcatgcacctatatggaagggctgttttgttgatgtattcctgtcgagaatgaagaagaagaaaaagagcggtggggaaccggtccgttcnantattacgaaccctaaaatttcttcagatatttttatttcttttattccccctatttttttacttttcttttggtgctgctactgttcaactctatactaacattttttaattcctatcatcatcgtcgcagcttgcgagtttgaggaagataaggtcgattcgatggaggtgcagcaagccctccccccggtgccggaagcttctgagccactaccactagctcaggagcctgtttctccttcgtttgaaatacaagctgctgaagtcaaccaagaggtcatctggagggagttggagcagcaggagcaaccggcaccaacgggggggagctaagctaacaaggcctcacatttgcagatactcaccccat

SEQ ID NO: 261 - DNA, 254 bp, Gossypium hirsutum
  unsure (1)..(254): unsure at all n locations; Clone ID: LIB3825-002-Q1-K6-F12
gaaagaangggagnancnnaannnaacncgcananacacaaaaccaaaagggangaacccagacnanngaagaccngnnanccngncancgaagagaagggcgggggaggatttcngtacnttttggcagaaagacangcnnaaacaaaagaaggaggcacnngnaccgggcangacgcgcaaaacacaagccncaaagagnnggcaaggaccaagaaccngaggaagaagaagaagaaaagagcaccaagaaa

SEQ ID NO: 262 - DNA, 638 bp, Gossypium hirsutum
  unsure (1)..(638): unsure at all n locations; Clone ID: LIB3825-002-Q1-K6-F2
tccgcttatgtatgaccatanaaaccgcgttaccacagtgttcatcacttacatttagaagaacatatagtcaagaaaccgagtattaaacgtagcttgtccgaaaagaatcagtaagtggagttttaaaaggttcaggtcgaatgtcaagcaagactgctgaaagttctggactttctgattccggaagagaattcgttcaccattttttctcaggaacattctcatttgattccgatgccggccaaagtgaactgcaagcaaaatacggctgtaatttacgagagggagtacatgcaaggagttatgattaaagagagaatacgagattacaacgaattatcaaagaaagctgaaaagaaaactaaatttcatgccaaagaaacacaaaagagctcatgtgttggcattttcaaaggccataacagttatcatttgatgcttaatttgcaactcggtataaggtatactgtcggtaagataacaccagtgcctaagcgtgaggttcgagcagctgattttggtgatcgagctagaattactatgtttttccctaaaaaggttcacaatttacccctccacacaaatcaattgatttctactggaaggattactgtcccatggttttcaggcatttg

SEQ ID NO: 263 - DNA, 458 bp, Gossypium hirsutum
  Clone ID: LIB3825-002-Q1-K6-F3
ctttcgcgtgggttccacttctgtcttgtaacataattacttgatcctgtgtaaatatctagtctagcacagtttggttttgcaacacttgtttctctgtactgcgaagtaaatgtttttatactttttagtaaaattttcagttcacaaaaaaaaaaaaaaaaaaaaaaaaaaaaaaaaaaaagagaaaaaaaaaaaataaaaataaaaaaaaaaaaaaaaaaaaaaaaaagaaaaaaattttaaaaaaaccccccccccccgggttgtttttataaaaaataaaattttaataaccctgccttaaaaaaaaaaaaaaaaaaaaaagggcccccaaatttaattgggggggccctgttttaaaaaagcctaaacgggaaaaacctgggagcccccaaacaaaatggctttaaaaaaaataccccttttccaaaggggctttaaaacaaaagggcccc

SEQ ID NO: 264 - DNA, 610 bp, Gossypium hirsutum
  unsure (1)..(610): unsure at all n locations; Clone ID: LIB3825-002-Q1-K6-F4
tttttgtccttgcttgatggataatgaaatagtagttcaatgagacgctcggggtttatccacgggatgcagtgtatctccgtctatgattcgccggaggagaaaagagatgataggttgcggttgctttcgacggaggaagaggaggaagagagagacgatgatgagtcggggtctggcagtttttcgttganagtaaggaacagcgatgattccggtggatcaccatcggatgatgatcactcaccggaacctgaagtacaaagccagcttaaaggacctttggatacaatggatgctctacaggagattttgcctttgagaaaaggcatatccaagttttataatggcaaatcaaagtcctttacaagtttagccgatgcggctgctgtttcctctgttaaagattttgcaaagcctgaagatccctacaataggaaacgcaagaacttattagctcgcagttcttcattggacaagaaacccaacaatcttttgggaaacattggaactaaaatatcaatggcatcatcgccgtctaactgccttccacctctgcatccacagtgtaaaaaaatcaactaccatcatcaaaccctcatcatcatca

SEQ ID NO: 265 - DNA, 242 bp, Gossypium hirsutum
  unsure (1)..(242): unsure at all n locations; Clone ID: LIB3825-002-Q1-K6-F5
ccgggncgacccagcgtccgttttttgcagttgattctccagggttggaaggcgaagttttccttcactgagcaggagcagatcagaatcaaggtcgttgttgaactcccagtctccaaagcaggtgagcaaagtgaagtcaaggtcatcatcaggaagcccagatggtagaaggggactggtctcttatgatgatgggtgtggtgagtagtttggtttatttagngaaagnngggaggaga

SEQ ID NO: 266 - DNA, 189 bp, Gossypium hirsutum
  unsure (1)..(189): unsure at all n locations; Clone ID: LIB3825-002-Q1-K6-F6
gcgaccgcgtttgcgngggcggacgcgngggcgcgaagcgggggcggccnngancnagacncccngccagcgncacgggcnncagccaacganaagcnancggcanancaagggcnncaacagnacgacnncccagcaggcancccccccaagggcgngagngggnacgaannngaaagaggcacgggg

SEQ ID NO: 267 - DNA, 654 bp, Gossypium hirsutum
  unsure (1)..(654): unsure at all n locations; Clone ID: LIB3825-002-Q1-K6-F7
ttttcgcgtggggcagagcagttatcttatgggtcagataccatgatgaaagatgctccagttaatcgtatcttagtttcttctggagatcctaagatgctaaggttttcaccaaacactagagacaactgtgaggcacaggtatcttcttatgatatgatggcatatgctcagaatgatgcccagaatttctccagtgcnattaatgcagctgctaatctcaagggtgaacattctcaaataagtcccacaccgctccttcctggtttgatcggtatggctcgtttaaaaatgagcaaatgtcacatctatatgatgctcgaaaaactgccatgttgaaggccgcagaaaaagcactcattgttgatagaccttctgacagcatgcatgcacttcattcaaatgagcaggttaatgctgctgcttatcctagccagctggatagtgcctgtaaaagctcaaagccaattgtgagtgagctgatctccagtcactcgctgcctcctgaaatcacaaatcaggatttggttgttgtgagaggaagaaagcggaaaagtatggtatttgagcttctaccatggcatagagaagtgaaacaagtttctcaaagatctcagaacatcagtgtggcagaagtggaatgggtgcatgcag

SEQ ID NO: 268 - DNA, 514 bp, Gossypium hirsutum
  unsure (1)..(514): unsure at all n locations; Clone ID: LIB3825-002-Q1-K6-F9
acccccgttgnaaccttccccccggtgctgcggcgcagcattctcctctgtacagatatgaaattagcttagattaaaatttctttggggggttttggggttttcgtctttgtgatcagttcttttttttccttttaaattttccgatggcttctacgaggaaagatatggatcgggtcaggaggacctttgngtcctttatgaaggagaagctnnacaacgnnnagnacaaacgnacggaccaacgcccccccactnngataagcaaancaannccgggncganccgggaaancatgtcggttacgatggtgtaaccagctttcaccggaagttgaacaccggccttttacccccgaagaagatgatactataatccgagcccatgctcgagtcggtaacaaatgggctaccatagctcgtttactcaacggccgtaccgataacgccctttaaaatcactggaactcgacgtttaagcgaaagtgcttgtccatgaccgaaggttttaacga

SEQ ID NO: 269 - DNA, 659 bp, Gossypium hirsutum
  Clone ID: LIB3825-002-Q1-K6-G1
gttagggttcctagtttttttaatggttatgatattattgcaggtcaagggagacaatctgttaggccgaatgccggagcaagcccgtattttggcgcaaatatgccatctgccatgggtctacattattggccttcctctcttgggcttgttggtgctcataaaccgcccacctcatctcatggtgttggacttttttttaggctggcacctatggatttgattcttggccaatcttctaggccgaatgccaattttgttgggcttgaaaatgctagtaattttttggcacaaaatcatgggtccaatgtgccatggtgcactaaatgaaagtgtgtgttcatgacgttgatgcctcgccatgtgttgtgttgcctcatttccctaattgtcatgcatcttattatttgaccacctctaggtccaattccaatactacttaatatgggttaaattttgataatgaaaactcgtatattcctatgcttgtagggaccacatcttggtgtcctgactttggggatacacatcatgtatgttggtaggctaccactttacacgagtccatcccatactcagatcaagaaataccgaatccgaacctagaccaagggaaagctaagcaaatcgactaaatcgactagttgccacattttgta

SEQ ID NO: 270 - DNA, 363 bp, Gossypium hirsutum
  unsure (1)..(363): unsure at all n locations; Clone ID: LIB3825-002-Q1-K6-G10
aaaaaaaaaaaaaaaaaaaaaaaaaaaaaaaaaaaaaaaaaaaaaaaaaaaaaaaaaaaaaaaaaaaaaaaaaaaaaaaaaaaaaaaaaaaaaaaaaaaaaaaaaaaaagaaaccggggggggggggcacactttttttttttttaaaaaannnnngacaggggaaaaaaaaaaaggggaggcaaaaaaacccccccccccaacaaacgcaaaaannnnaaanggngnaaaannaaaaaaagnnnnnacaaaaaaaaaaaaaaaaaaaaaaannacaaaannnaaaaaaaaaaaggaaacgcncnnaaaaaaagcaaaaaaagccannnanngaggagagaaaaacgcaagngagaggaacac

SEQ ID NO: 271 - DNA, 505 bp, Gossypium hirsutum
  Clone ID: LIB3825-002-Q1-K6-G11
tgttctcgtgggttcgtccatcatgaatgtgtgagatgtggtttataagtattgttatatgctagcatgctttgtagtgtttacatataattattttatcctataatgataggaatgttgcttggttttaaaaaaaaaaaaaaaaaaaaaacgaaacgaaaaccaagccaaaccataaaatgcacaagggaacattctttattaacataagctcatatctagaagcacttcctatgaacaatggcaggcccagattcgccatactccgcttttgatatccacatctgctatcgaaaacagctgccggaacaccggagtggatggcacctgaagttctatgcaatgagaattcaaatgagaaatccgatgtttatagctttggagtggttctgtgggaacttatgacactccagcaaccatggaagcatttaaacccaccacaggttgtggcggctgtaggtttcaaaggtgaaaggcttgagatcccaagccatgttaaccgagt

SEQ ID NO: 272 - DNA, 419 bp, Gossypium hirsutum
  Clone ID: LIB3825-002-Q1-K6-G12
tttttaatcttcatcccttttctctcggcgcctaactctaaggttttgattgttaagtgtaatttgaagacaagtcaagatggtgaagtttacagctgaggagcttcgtgctatcatggaccggaagcacaacatccgtaatatgtctgttattgcccatgtggatcatgggaaatctactgggactgatttttttatggcttttgctggtatagttgcacaagaagttgctggtgatattcgtatgacagctacccgtgccgatgaggctgagcgtgggatcacaattaagtctactggtatctctatgtattatgaaatgagtgatgaatatttgaagagctacaaaggagagaggaaaggaaatgagtaccttattaatctcattgattcccctgtgcacgttcactttacatatg

SEQ ID NO: 273 - DNA, 256 bp, Gossypium hirsutum
  Clone ID: LIB3825-002-Q1-K6-G3
attgcttagagtaggaatataactgtgtattattcgccaaactgcaatttttgttttgcttgccaccttcaggttccataatatgttgtaagatttcttttgatttatcgtttgtgttgagtcctccctttgatatgtggggtctgaaagtaaccatttgtaactgtttttagcgaaataaacacatgtattatttttttttaaaaaaaaaaaaaaaaaaaaaaaaaaaaaaaaaaaaaaaaaaaaaaacaccccc

SEQ ID NO: 274 - DNA, 569 bp, Gossypium hirsutum
  Clone ID: LIB3825-002-Q1-K6-G6
ccacaagcatggtcatcacgtgaagtgccaaacatcaaacaatcctttcatgatcatctttgcttgtattcaaattgttcttagccaaatcccaaattttcacaagctttcatggctttcaatccttgctgctgtcatgtcttttacttatgcttccattggtcttggactctccattgctatagctcaagtgggggagaacatgtaaggacaagcttaactggtgttcaagtaggcccccccgcttcaggctctgaaaaggtttggagaacattccaagctattggggacattgcctttgcttatgcttactccaccgtcctcattgagattcaggatacaataaaagcgagtccaccagaaaataagtcgatgaagagagcgagtggtgtcggtgtcacgacaaccactttattctatgtactttgtggcattgttggatacgcagcattcggaaacgatgcaccaggaaatttccttacagggttcggtttctacgaacccttttggttaatcgacttcgccaacgtctgtattgctgtccaccttattggtgcatacccaagttt

SEQ ID NO: 275 - DNA, 222 bp, Gossypium hirsutum
  unsure (1)..(222): unsure at all n locations; Clone ID: LIB3825-002-Q1-K6-G7
agcgggttggttgctgcaggtgttattccatgctccttttgaatatgctgatgttgtgacaaccacaacacacaagtcacttcgtggtccacgtggtgctatgattttcttcaggaagggagtcaaagagattaacaaacaagggnaaagaggtaatgtatgacttggaagacaaaagtaagcaagctgtcnnttcnggttttcaaggnnnggaccacataa

SEQ ID NO: 276 - DNA, 652 bp, Gossypium hirsutum
  unsure (1)..(652): unsure at all n locations; Clone ID: LIB3825-002-Q1-K6-G8
tatttttttcttgatttatttatgtgttcttgttgactgtggaaattacatatacagcatgaattattgtaaaaagaaataaatggttgaagttgagcaggtgtagacaatatttcattctttatacatctctctttcttactctctagtgcccttctgtttttcagctggtgttccatgcaccacagggccttttgaagatgaaattgaagcntttctttccatgttctcagatcatggaaaatctcatccattccatgcataaattgcgtattttcttagcattagttgttaatgttcacagatgtgtagattattttcgatggcaagctagagtttttatttaaaatatttgaggatggattttgcaccgctaacttgatgcttgattgtaggagtcgtgaatttctatggcaggaagggcatactgccttcgcaacaaaggaagaggcagacattgagtttgtggctgaaggcttcagtgcaagaccttgcttctcgtgcagctagtcgagccatggctgaagctgcaaaaagcatcagcctccaaatacagcatatcaatttgaggtttcctgtagagccctatctagtgtccgttcgctacaggctcattttctgaaggtcgctgttagttcatattttctatttc

SEQ ID NO: 277 - DNA, 563 bp, Gossypium hirsutum
  unsure (1)..(563): unsure at all n locations; Clone ID: LIB3825-002-Q1-K6-G9
tactctttgcggttatttttgaactttcatccatatttgctgtaaagaaggaaagatttcatctgcatttcgagttctcaaggacatgngagaaaaaaggatgtaataagagtgtacagacttataattcactgatacttggcttaggaagtaaaaatcaaatatttgaaatttatgatcttggcgatgagatgtgagaatgatttatactcctaatgtttgcatatacaataacattattcagtctctttgcaaaaatgggaaaatccaggacactacttctatcttggatgacatgctgcaaatgggtataaatcctaatatttctaccttcaggatgttaatagaagctttctgcaaggcaagtgattttggagtagcgaaggagttattcgagattggtcttagtatatgtggtcacaaggaagccttttatagtttaatgttcaatgagttgctttctggtgggcaactttcagaagctaaagtgatctttgaagttgcattagatagatcttttcatctgggaaacttcctttataggatctcattgaaaaactttg

SEQ ID NO: 278 - DNA, 669 bp, Gossypium hirsutum
  Clone ID: LIB3825-002-Q1-K6-H1
gttaaaattcaaattcacaaaagagacgatcgaaaatccactagtattttgaaataagctccaatccatggctaaacggttgatctattccagactctcactctctagactctctgcaatgggtggacccaagaatggaagatttctttcaacagagtctaacaagattgatgagccttttaaagttgaagaatctttaccgtgaatgtacctcctcctccttctgagaagctgctcgtgttgggtggaaatggatttgttggctcccatatctgtagggaagctttgaaccgtggtctggctgttgcaagcctcagcaggtctggcggatcatctttacatgactcttgggctaagaatgtgacatggcataaagatctcttgcattggcggttttggatctaattcatatatgtataagattaatgggactgcaaacatcaatgctatcagagctgctgcagataaaggtgtgaaaagatttgtttatatctccgctgctgattttggcttcgcaaactatttacttaaaggatattacgaggggaagagagctgctgagacagagttactcacgaaatttccgtatggaggagtgattttgaggccctgcttcattcatggaactcgcactgttggaagcatgaagttgcctctaggcattattgg

SEQ ID NO: 279 - DNA, 402 bp, Gossypium hirsutum
  unsure (1)..(402): unsure at all n locations; Clone ID: LIB3825-002-Q1-K6-H10
ggggtggggtggtcttttcattcaagatgaccatcctcattgatcaacctgattttggaattgaagcagggtttaacaaggccgatgatgttgagaaagaagcggtgttgaatgggggatttatgatgccacataccaactcttttggccagggggggaggagatttttttgtttttttgggagaggcaacagggngnngagaacggggagcgaaccaanccccggacggcgacacangacnnngnnaagagaangagagaagagnacggaanaccagacaagggggagaagagcacacgggaacgccgcgagcgccccaaagacgcggncgangagagcgaccccgacccgggagagccccacaaagaacaccggccgcaaacagccgaggccacccgaaa

SEQ ID NO: 280 - DNA, 179 bp, Gossypium hirsutum
  unsure (1)..(179): unsure at all n locations; Clone ID: LIB3825-002-Q1-K6-H11
tttttagagnggnncgatccatggccgggggtgtgggagggagagttcaaccggacctggcccttccttgttggtttcgctgtaactggaaccatcatcaccaagttctccctcggtctcactgaggaagatgccaagaactcgcctttcgctcagaagcacaagaggtaaagaaaccc

SEQ ID NO: 281 - DNA, 629 bp, Gossypium hirsutum
  unsure (1)..(629): unsure at all n locations; Clone ID: LIB3825-002-Q1-K6-H12
ttttcgcgtgggttcaaaattaagggtttttagtaaccaaattgattggccttgggagttacggttacactgcaccatcttccaaaaaaatcaacgcctacgatgttcctcaaggcgtcgatattcgtggtcgattcgatgaagaattcgctaagattttaacaaaggatgccttacaattcggcgctgatttgcatgngatttcaggaaccatattaagtacgcgatggaatgtcgcaaagaggcgagaaagacgacacaatgaaggggcgttgcctggtttcgatcctgcaacgaggtatattagagaagggaaatggacttgtgcgccggttccgcctgcggtggctgatcggagggtcgaaattacagggccggtggagaggaagatgatcatcaacgctcttaactcgggagctaaagtgtttatggctgattttgaggatgcactgtcaccaagttgggaaaatcttatgagaggtcaaataaacttaaaggacgcagtggaaggaacaataacgttcaacgacaaagcaggaacagggtttacaagctgaataatgaatagcaaggctatttgttggccacgaggttggcacttaccggcggctctattttcatcgacgggg

SEQ ID NO: 282 - DNA, 501 bp, Gossypium hirsutum
  Clone ID: LIB3825-002-Q1-K6-H3
ggttgtccaacactggcactaaacgagtcaagccccacggtctcttccaagtaagctctttttggtgggcgggagagctacgatgggcaaacatgaactaccgaacgtccgcctcccaagttatatgctcagcattgacgactttactgggtggtcaggctttaatagcaccgctgcaagggcatgaaaaggataaacggcatccttttgttgagataacaataaatgcaaactgtgatctattaaaaggacaccggcaactggtcacccggctgttacctaacgattcttgatctataaaaacatgtgagaggggaagaaacggtgatttcacttatatagatgcctatgatgactatatatgcgcttgtacagatataaaccccacctgttgaagctccatacccatcatgactatatgagtgcactactattgtaccatggacatataccgagaggtaagaagagaaaaacattggtacacgcaactgaataaacaga

SEQ ID NO: 283 - DNA, 649 bp, Gossypium hirsutum
  unsure (1)..(649): unsure at all n locations; Clone ID: LIB3825-002-Q1-K6-H5
gttttattatgcaatggatttgcaccagaaggagcaacttcatgacaataccatttcaatgatgcaatctcagcaattctctatggggagatctggagcatttaatttgggtggatcctattcatctcatcgcccacagcagcagcaacatgctccatcagccagtagtagtggtgtctcctttccatctaacagngggtcacctgggatngggctaagacctctaaattcctcaaatacggtttntggcatgcgtcatgatcagctcatncagcaatatcagcaacatcaaaaccagtccccgtttcgactgcaacagatgtcagctgtcaatcagtcatttagggaaccaggcttgaaatcaacacaggctgcgcaatctgattctgacccttttggtttacttggtttgcaaagtgtaataaagatgactaatcctgatctgacttcccttgctcttggaattgatctgacaactcttggcttaaatctgaattcatcagaaaatcttcacaagacttttggttctgcatggtcagatgaacctgctaagggtgatccagagttcaccgtgccacaatgttattatgctaagcaaccacctgctttgcatcaaggctatttctcgaagtttacagtggatgcgttg

SEQ ID NO: 284 - DNA, 550 bp, Gossypium hirsutum
  unsure (1)..(550): unsure at all n locations; Clone ID: LIB3825-002-Q1-K6-H6
ttttcacaaggtgggaccaagtgctatgatgacgacggccgcctcaagcgatctggaaccgtgtggaccgctagcgcacatattattacagcagtcattggttcaggggttctgtcactggcttgggccacggctcagctgggatggatcgctggtccaatagtgatgattttgttttgtttggaaacgaattacactcncttctncttgctgcttgttaccgctctggtgaccctgttaacggcaagccaccctatacttacatggatgctgtccgatcaaatcttggtgggtttaaagttaagatttgtgggtgggttcaatacttgaacctttttggagttgccattgggtacacaattgcatcatcaattagcatgatggctatcaaaaggtcgaattgcttccatgctagtggcggcaaaaatccatgccatatgaatagcaacccttatatgattgcttttggtattgttgaaatcattttctctcaaattcctgagtttgatcgactatgggggctttccattgttgctgctgtcatgtcttt

SEQ ID NO: 285 - DNA, 442 bp, Gossypium hirsutum
  unsure (1)..(442): unsure at all n locations; Clone ID: LIB3825-002-Q1-K6-H7
accccgggnncgaacccacgcgnnccgntttaaaaaaaaaaaaaaaaaaaaaaaaaaagggggggggggaagaaaaaaaaaaaaaaaaaaaaaaaaaaaaaaaaaaaaaaaaaaaaaaaaaaaaaaaaaaaaaaaaaaaaaaaaaaaaaaaaaaaaaaaaaggggggccgcccnaagggaccaaagcaaaaaaccccggccagccaacaaaaagggggggggggggggaaaattttttttttggggggggggggggnnnaaaaaaaagggggggggaaaaaangcccccccccccaggaaaggnnnnnnnaaaaaanncnnnnngggggggggggaaaaaaaaaaaaaaaaaaaaaggggggggnnnnnnaaaaagggggaaagnggaaaggggaaagggaaggggcnggggaggggggaaaaaaggggggggggggggggg

SEQ ID NO: 286 - DNA, 455 bp, Gossypium hirsutum
  unsure (1)..(455): unsure at all n locations; Clone ID: LIB3825-002-Q1-K6-H8
ctcactnncngcaaagccacggcgccggcaaacgccgcnnccaagangggannannnggagggcgnggcccnggnccncaaagncngaggaaaagancaagcnnanccancnnnagnngcanacgagagcagcnccnnaagagngangnncaacnnnncaaagcagcgggggggcccgctttttttttttttccaggcgacgggnacaaannngncancgaagggggacaanngaccccgcggccaggcagcagnnncaaagnnncnncagnngcacccgganccagcnagcagcaacacaaagccagcaagcggngangganccancacacaaaannngaaggncacnaanagccaacangggaagaaancgnnggncangcgcgnaagganagcgnacaagacgaacaacanaagagnnnnggaagaaagacaaanaaacaannncccccaaa

SEQ ID NO: 287 - DNA, 633 bp, Gossypium hirsutum
  unsure (1)..(633): unsure at all n locations; Clone ID: LIB3825-002-Q1-K6-H9
ccccctcatggccgccggtgatgtcgagttccggtgcttcgtcggagggctcgcatgggccaccgacgaccgggccctcgaagaagccttcagtgcgtttggtgaaatcgtcgaatcgaagatcattaatgatcgtgagactggaagatcccgaggctttggatgtcggactttccgngatgagataagctatgagggacgcgatcgaaggaatgaacggtcaaaatcttgatggaaggaacatcaccgtcaacgaagcccaatcgcgcagaagtggaggcggtggcggaggatttggaggaggaaacggtggttacagccgcggtggaggcggcggcggatatggtggtcgccaaggaggatatggtggcggacgccgtgaaggtggatacggaaatggtggagggtatggtggtggtgggtacggaggtggacgccgtgaaggaggatatggtgacggnggatcttgttactcaaaaggcggcggtgcatctgaaggcagctggaggtcttaagtttaggtttcaaagtgggcttgggcctattttgttatgggttttggtttggggtttagtagtttagtaatttttaagtttctctattacttgtttggtttgggttcttttntttttt

SEQ ID NO: 288 - DNA, 608 bp, Gossypium hirsutum
  unsure (1)..(608): unsure at all n locations; Clone ID: LIB3825-003-Q1-K6-A2
cggncgcgtggggaaaaaagaaaagggttgggtgtggaaagacgaaccaaagacgccgtcgaatcctctgctcgcgacggcgatcattgctcaccagaaggtggtccaatcgaagtgcaagaccgaagaagtcgagcccggaaagctcgttcgaagtgcgagaaaactgaagaagttcttagagaatgctttggaaggccggtcgaagtgctgcaatcaaccaaagagtataccgaagatgatgtcacagaacaaatgctaaaagggagtttctcatctggatcacacgtagaaggttcgtttgattttcccgggctacgtagtgacatggaggcaatcgaacgccagttctttggtgggataaaccgtttctttgatgctgctgaggagatgaaaaataatttcttcgacatattcggagatgcttatggcagaggatcatcatcagcaccatctacaaggcgaggaatacccattgaagatcacaaacaaaaggaagattctcctaaaccaactgaatctgggcatattgatttgtcgggtttagctaaagatatttgaagtggtttcgtatttgttgtcttcaaaatttcttcattagaagtagc

SEQ ID NO: 289 - DNA, 575 bp, Gossypium hirsutum
  Clone ID: LIB3825-003-Q1-K6-A3
cggccgcgtgggcggccgcgtgggctagtttgacttcatctgaaacttaaatcttacatttgcagagacgatatcaaagttcggctcaggactgtttcttttgattcaagttgtgcttttacttgactttgttcatgggtggaatgacaaatgggttggatacgatgagcaattttggtatgttgctctgtttattgtttcacttgtttgctatttggcgacatttggcttttcgggacttctctttcactggttcactccatctggacaggattgtggactcaataccttccttatcgtgatgaccttgattcttgtcattttgtttgccatagttgcactgcatcctgcagttggtagtagcattttaccagcatcagttatatcactgtattgcatgtacctctgctacagtgggcttgcaagtgaaccaagagattatgaatgcaatggtctccacaagcattctaaagcaatttctactggcactgtgactgttggcctgcttaccactatcctttctgttgtctattctgctgttcgagctgggtcttctacaactctactatccccac

SEQ ID NO: 290 - DNA, 603 bp, Gossypium hirsutum
  Clone ID: LIB3825-003-Q1-K6-A4
ccccctcaaaaaaaaaaaaaaaacccaatcacaaatcattggaggataagcgacgaacagcctcgaaaccttgtagctaaactaagttcagtttccgaacggaccgaattgaagctttggccgacttactactgatttccaggcaggacccggaaagccgaccgttaatagccgacgccggcgccgttccttacctttccgagacccttttctcttcttctccggcaatacaagaaaacgccgacgctactttgttgaacttgtcaattacttggcgcgattctatcatgtccacacggggctctcctctatgcgttatctcacgctctgagcaattcggcttcacagggggcggttcagtcgtgcgccgtcacgcttcacagcatactaatcgccgacgagtcttaccgttcgataatagggtcgaaacgcgatatcctttacacgctgttgtcgatcataggtgataaacacgctctggctcgttcgattaatgactcgttagaagcgttgctcgggatcgcgctttaccaattgaatcgggcgagcttggtgggtctgggagcggttccagcttaggagtcattgatagctagggatgct

SEQ ID NO: 291 - DNA, 605 bp, Gossypium hirsutum
  unsure (1)..(605): unsure at all n locations; Clone ID: LIB3825-003-Q1-K6-A5
agttaatcgaaactcganaactggtggatactaaggcagagaaggagcattggatgaagcaatcaatctacagagtgcctgctgccattgctgagcttaacaaggaagcttacatgcctcaagttgtgtccttcggtccttaccaccatggcgaagaccgtgtaaagcccatggaggatcataagaaacgagcactccttcatttccttaaaagatccaacaagcctttggatttgtttgtggagtctttgaataaggacttgcagaaattgaaggaatgctatgatttgcttgatcctatatggcaagatgacgacaagtttttgcagctgatgattgtggatgggtgtttcatgctggagattctacgctctgctactcatacaatggatgattatgctccaaatgacccaatcttcagcaaccatgggaagatacatgttatgccattcattaaacgagatatgttgatgcttgagaatcaattgccaattcctgttctctacagcttggttgctgtagatagcaatggaactaaggatgaagagttcgtgaataaacttatactcaagttcagttccccacatacgcccatcttgaacatg

SEQ ID NO: 292 - DNA, 570 bp, Gossypium hirsutum
  unsure (1)..(570): unsure at all n locations; Clone ID: LIB3825-003-Q1-K6-A6
gcaattgcctgagacatgaaggatcctcccatcctagttccaccccgaacccttatttgaacatgtttcgattcgactttctgcttcggtttcatcatcagctaaactttcagacatccaaatcaactgagaaacataaacttctgttatcatcctccacccgngaaaagatttaacccttttgttacttagaaccaattctttttaccaccaaaaggaaaacccaaagcttcctctattggtgctgctaattttgaagagagtgtctttttgtcttgattttatcggttatgcagatacctagatggcgaaacgtgtttctactgaagaattcattggttccacctttcttatcttcaaaagcaacggctactgttgcaacaacccacgttgcttcgtttcattctacgcctgttacctgtgaaaaatggaagagcaaatgggattttgaggaaagaagaacacaacaaccaattaagaatcacataagatatagagtacatcaaaggcgtgctgacgcaaagagtgctctaaaaaaccttctctataatagtggttgctcaaatgttt

SEQ ID NO: 293 - DNA, 632 bp, Gossypium hirsutum
  unsure (1)..(632): unsure at all n locations; Clone ID: LIB3825-003-Q1-K6-B1
tctcaccctctcaaaacctcagcggcggccactatcttacagaacaactaaagaagcagaaccaatgggaggtcgaagagggtctcgtactcaaaggaaacattttaaacaaagcagagaaaatgtttggaaacgaccaaaaaccgagtcttcatctgaccccaataaccctgcttggcagccttttgctactcaaaacccttcctttgatgaatattacaaagaacaaaggattgtttctcctgaggaatgggatgctttcatggaaatgcttagaaaaccattacctgctgctttcagaattaatgccactagccaattttgtgaggatattcgttcacagttagcgaatgattttatgaaatctcttcaagctgaagctattgaagggggtgatttggagcctataaaacctttgccttggtaccctgataaccttgcttggcaatcgaatttttcacgcatgcagctaaggaaaaaccaaactcttgagaggtttcatgagtttttgaaacttgaaactgaaatagggaacatcagtcgacaggaggctgtcagcatggtgcctcctctattccttgatgtacgtcctgatcattntgtacttgatgtgtgcgcagcacccggttcaa

SEQ ID NO: 294 - DNA, 553 bp, Gossypium hirsutum
  Clone ID: LIB3825-003-Q1-K6-B2
cttcgataccttctctgttgggtaccagcctccattaccagctgctacacgtgacaatcattcacagaagttgatcatgaacgagagggctcacctaatgaccgaggtaagggccgtggagctagaagaaggccgatgagtacatggaacggttttgtctctgctgaatatgatgaccgaagctgggaccgcactagtagctatgctacgggtagaggtcgaagaagacgacgtgaccgtccggggccgcagacgtataggatacaatggacctcatttcgataggctgcacaatgaatgctacaattatcaagcccctccctaagtggccgtagacgaagatcacagcaaggaataccgtaggaagagccgctgtgtttagatctaatgtgccaatctatgcagaataatgaggaggtgcgtggcattgcttgaagatatggaaatgaccgaatgtggatgctatgcttatctatccatatacagatgcaactttattctccttaaacgatgatcattagctcgttatctatataatatgacgtaacggtgc

SEQ ID NO: 295 - DNA, 579 bp, Gossypium hirsutum
  unsure (1)..(579): unsure at all n locations; Clone ID: LIB3825-003-Q1-K6-B3
tttattattggaaaacttttttatatatcgtttaaaacaganaagggaagtgttgatgaaataattctgctccatccttgttgaaggtcttagagagtggggagaatttcagtgttgggcagaggcaattattgagtcttgctcgagcattgctgcgaaggtcaaagattcttgttcttgatgaagcaacagcagcagtggatgttaagactgatgcttttatccagaaaaccattcgtgaagaatttaaatcttgcacgatgctagttattgctcacagactaaataccatcattgactgcgaccagattcttgtgcttgatgctggtcaggtgtgccttctcactcgttgttattcttggatatttctggttctttttctttcttcgattttccctcctgtttaatagacatattctagcactacaatatccttaaggcaagattgactgttttcctggaatggcttggctagtctagcttaaatatacaaggactttatgtatgctatgattaagtcttctttggattgggaaattactggtgaccagataagttctgattctgttctttcaggtt

SEQ ID NO: 296 - DNA, 593 bp, Gossypium hirsutum
  unsure (1)..(593): unsure at all n locations; Clone ID: LIB3825-003-Q1-K6-B5
gaaaacanatgagtgaagaagaggagaccaaaccccagagattgggagttcaaagagtttggagggtacaacaaaagatacaagcatttcagtcccaccctcggctgttccatgactttccatatctacttccctccttcttcttctccttcccacaagttccctatactttactggctctctgggcttacttgcactgatgagaatttcataatcaagtcaggagcacaacgtgctgcttctgctgagggtgttgctctaattgctcctgatacatctccaagaggcctgaatgtggaaggagaggctgacagctgggattttggtgtaggtgctggattttatcttaatgctacacaacagaagtggaagaactggcgtatgtacgattatgttgtgaaagaactgccaaaacttctgagtgaaaattttcctcaacttgatacatcaaaagcatctatttctggtcattctatgggtggacatggtgctctcacaatttatctgaaaaaccttgataagtataagtcagcgtctgcctttgcacccattgccaatcctataaattgcccctggggtcagaaggcattcac

SEQ ID NO: 297 - DNA, 540 bp, Gossypium hirsutum
  unsure (1)..(540): unsure at all n locations; Clone ID: LIB3825-003-Q1-K6-B6
ggccagaagtacaaacacaggtcccaagcaccaagggctgatctctacaagcatgaatcgacaaaactgcacgtgnaggcagaatatctacatactcctccctttagagaaccttggaaaaaggagtcagtggacttaatatagcgtatgcctatactgtgcctacaatatgaggaacacatttactgtcgaagagattgatgcctaactcccagcactgaaaaaaaaagtcgaagatgctttcactacaagccattcaatgattctacagccaccaactagcctaattcttcagtttgcagacagatggatgattggatactttaacacccacattgtatatatcctatgtgcccatggagacatgcctgatggcgtgaatgatgatattacggctgatggaagtgatgctgctcctaatattgatgtaacagactaagacattgccattgtgcatctggttcatctattgtgccttcggatgaattttgacctttaaaccgatcgatagctttacatgcacactatatcacgatcacg

SEQ ID NO: 298 - DNA, 604 bp, Gossypium hirsutum
  unsure (1)..(604): unsure at all n locations; Clone ID: LIB3825-003-Q1-K6-C1
cagattctaccgccatggggagaagactgcaggtgttatcgtcagataaaaaacaaaccttacccaaagtcacgttattgtcgtggtgttcctgatcccaagattaggatttatgatgtggnngaatgaaaaagaagggtgtggatgagttccctttctgtgttcacttggtctcttgggagaaggaaaatgtctctagtgaagctctggaagctgctcgtattgcttgcaacaagtatatggccaagtatgctgggaaggatgccttccacctgcgagtccgtgttcacccattccatgtcttgcgtatcaacaaaatgctttcatgtgctggagctgataggctccaaactggtatgcgaggtgcttttggcaagcctcagggaacatgtgctagagtagccattggtcaggtcctcctttcagttcgttgcaaggacagcaacagtcatcatgctcaagaggccctccgacgtgctaagttcaagttccctggtcgccaaaagattattgtcagcaggaagtggggtttcacaaagttcagccgaactgattatttgaaatataagtcagagaatcacattgtccctgatggtgttaatgc

SEQ ID NO: 299 - DNA, 610 bp, Gossypium hirsutum
  Clone ID: LIB3825-003-Q1-K6-C2
gcgctttggagccaacaagcctgctaaaggccattcagcataaagttataattcaggttctctatcctcatattggatggccattataccatgtggaagtacatttgttgcccagtggcatattcgtcctcagttgactacacgatcttatgtcccaaaccgaataatgacagccagattgggagtcacaagtacaatgagttatttgagagcctcaaattcaggcttattcgcacgtgattccttaccgttattatcctttgtgaggccatctcaaacatcacatcatcgtaggggagcacagttcattgttagagctgaaactgattattatactgtccttggggtttcaagaaatgcaagtaaatctgaaattaaaagtgcttatcgtaagcttgctcgaagttatcatccagatgtgaacaaagatcctggggcagagacgaagttcaaggaaattagcaatgcatatgaggtcttgtcggatgatgagaagcgatctctatacgacaaatatggggaggctggacttaaaggtgctggtatgggaatggggcaatccttttgatctgtttgagtcgctattcgagggcatgggtggtatgggcgg

SEQ ID NO: 300 - DNA, 561 bp, Gossypium hirsutum
  unsure (1)..(561): unsure at all n locations; Clone ID: LIB3825-003-Q1-K6-C3
cgatgcggcaaagggaaaaacagtgagnagagacaagcaaccacagagaaggccagggaattagcagattctgcaaaagaaaagcgaaccagcatatattgcagcgaagaaaggtgaggactgggtagacaggaagacaagaacgcagaaagggggctcggaaggcggaagaagcgaaggaggtagttgccgagaaagcagagggtgcggcggaggaaaccaagaaaaagaacgaagagcaggggagagcctgaagtgggcgaaagagaaagctaaacaagggtacgatgcggccaaaagcaaagctgaagagaccatagaatctgcaaaggataccatagcttcgggctacgagtcggcgaagcagaaatcacaagaactgaaagataactatgtgaacggtgggggacaagggcgaggacgtgagcgagatgaggagctgtgagttgctgcaatgctgagtggtggtgatgagattaagatttgagagtagatgagtttttatatgctttgtttcggtggttgtataaatatgtttggttttgaaacttcggtagacaa

SEQ ID NO: 301 - DNA, 612 bp, Gossypium hirsutum
  unsure (1)..(612): unsure at all n locations; Clone ID: LIB3825-003-Q1-K6-C5
gnaaggaaagcggccatggnaaaaggaaananagcaacaagtttacttggcaaggcttgctgagcaagctgaaagatcgatgagatggttgaggccatgaagagtgttgctaagttggatgttgagctgactgtggaggagaggaatctgttatctgtgggatataagaatgtgattggagcaagaagggcatcctggcggatactgtcttcaattgaacagaaggaggaggccaaaggtaacgaacaaaatgtgaagaggataaaggattataggcaaagggtcgaagatgaactctcaaagatatgcaatgacatactctcagtcattgataagcacctcattccatcttcctccaccggggaatcaactgttttctactataagatgaaaggagattattttcgttatttggcagaatttaaggcaggagatgatcgtaaagaagctgctgatcagtcacttaaggcttatgaggctgccacttccactgcaagctcagatttgcctccaactcacccaattagacttggcctggctttgaacttctcagttttctactatgagatattaaattctcccgagagggcttgtcatctggctaaacaagca

SEQ ID NO: 302 - DNA, 573 bp, Gossypium hirsutum
  Clone ID: LIB3825-003-Q1-K6-C6
cccggttctctcttcacctctgcaaccctctttcatttttctcacttcctttttctttttctgttgtacgaccaggatcgttcatcatgtcgaatgatcaaaacaaacccatgactcagaagctgtacgagtcagttccatcatctcggctgacggccaagtttttaacagcaaccacactgagtgcaacgttgcttttcttgtcaggattaaccttgacgtggactgtgattgccctgattatggcgacgccagttatggtgttgtttagtccagtactagttccctctgccatagtcatcttcttggtgattactgggttcttgttttctggcgggtgtggcgtggcagccatcacggcgttatcgtggatatataattacgtgcaagggaagcacccactaggtgcggataagcttgattatgcaagggatatgcttgcaagtatgacgaggggtgtgacggagaaggctaaggagtatggccagtatgtgaagtataaggctcgggaagttgcacaaggggaacgatcttgaagttgaaccatagtaataattattagtttaagcctta

SEQ ID NO: 303 - DNA, 599 bp, Gossypium hirsutum
  unsure (1)..(599): unsure at all n locations; Clone ID: LIB3825-003-Q1-K6-D1
gnagctttgtttggcacagngtaaataattaaaagatggtgggaaaaagaagatctgggtttgagtcttagtttgggttttcctcagaatcaccactccttgcagctgaatctaaggccttctttgcttccttcctccgttgattcttgctcttcggtcccttctgggtttacagcctttcacaaatcgtcgtggaacgatgtttctgctccttcagatcctaacgcagaatctttccgaggcgagactagatcatttcttagaggaatcgacgtgaacagattgccatctacggtcgactgcgaagaagaagctggagtttcatctccgaacagcacgatatcgagtgtgagtgggaaaaggagcgaaagggaaggcactaatggagatgagcttgatattgaaagagcttgttctcgtggcatcagtgacgaggaagatggtgacgcttcgagaaaaaaacttagactttcgaaggatcagtctgctattcttgaagaaagctttaaagaacacaacactctgaacccaaaacaaaagatggctttggctaagcagctgggattgcgacccagacagttgaagtttggttccaaaac

SEQ ID NO: 304 - DNA, 599 bp, Gossypium hirsutum
  Clone ID: LIB3825-003-Q1-K6-D2
ggccatgaaggtttttcaaagggaaggttaaatgggcactatggtgtcaccgcatttgttattgggaatacaatctcagctatgccattcctcattatgatcactttcatctctggaactatttgttacttcatggttcgtcttcacccgggtttggaacattatttgttcttcgtattgtgcctttatgctagtgttactgtggttgagagcttgatgatggccatagccagtattgtccctaattttctgatgggtattatcataggagcagggattcagggaatattcatgcttgtttctgggtacttcaggctcccgaatgatatcccaaaacctgtctggcgttacccaatgtcctacatcagcttccatttctgggctctacaggggcaataccaaaatgatctaaagggattgctattcaagaaccagtccccagagcttccccagatccctggtgaatacatactggaaaacgtgttccaaatcaatgtaagacggtccaagtggatcgatctgagtgttatattcagcatgatcataatatatcgaatcatattcttcttgatgataaagatcagtgaggatgttacacc

SEQ ID NO: 305 - DNA, 472 bp, Gossypium hirsutum
  Clone ID: LIB3825-003-Q1-K6-D3
gccttggctctacatcaagggatgagtatagctggactggccttgtgtattggtggcgcttaatccggttatagatgtcagaacgttccctggaatataaacctattgtcgatccattggcatctaaagcggctgatcctctagcagagcatacataatgcattcctcactgggccctttatcagagtgaattatgtcaagctcacagatgttcccttgaaagaatctaaacacaatagggttgtgcatagaaagagctagatccgttaagaagtcatttggtatgaagtgtacagatgtcttatttatcagatgataaaagaaactgcccttgaatatcgagcgtagtacgattctttcaaatgaagatagccaagggggttctacacatacgcgcttaacctcctctgaattcatatccatttaagacagagatccgtatgacggacaaacactgttgttttaaaaaccc

SEQ ID NO: 306 - DNA, 619 bp, Gossypium hirsutum
  Clone ID: LIB3825-003-Q1-K6-D4
tgctccccctaccccgattccctttatttttccccccaaattccccaaatcggcagccctctgcatctcctcatcttcttcttcacattttattcatccgaaaaaacatttctattcttcttttatacaaacaaaaaacaatggctacaccgttgcttcatcttcttcctttaccatgcttcatttagcttcattgttctccatttttgtattagttaacgcaagaatccctggtgtttacactggtggatcctgggaaactgctcatgtcactttctatggcggcatgttcacatctagggaaaatcaaaatcaaagaatctagaaccaggaaaccaaggaaacaatgggaaaaagagcaaaaagggattggaaattgaagggtaccgagtggaagggttgtcaataggagggcatgaaacttttagctcaatcgaaatgtttctgaaatattccttgttttgtgcataatctgaaataatacttctaaattgtggaagttcatgaaaaacagttttgttttagttgttctgaaatattccttgttttgtacataatctgttttttttacacttttagctcagtcgaaatgtttctaatatgtgcttgaagttgctat

SEQ ID NO: 307 - DNA, 599 bp, Gossypium hirsutum
  unsure (1)..(599): unsure at all n locations; Clone ID: LIB3825-003-Q1-K6-D5
cggncgcgtggggcaagagcaggtggccaaattttgaggaagatgggatattatacaactgtgtcttttcgctttgcgaccaaggaggagccattaatgagtattgcattatgcaactgatcaaagtaccagatagtaacctccacttgtactacaagaaagggagagtaggggatgatcctaatgccgaggagcggctcgaggaatggaaggacgtagatggtgctgtgaaggagtttgttaggctgtttgaggaagtaacaggaaatgaatttgagccatgggaaagggagaagaagtttcagaagaagccactgaaattttatcccatagacattgatgatggggttgatgtgagatgtggaggacttggcctgcgacagctaggggttgcagcagcacattgtaaacttgaaccgatggttgcaaacttcatgaaggttatttgcggtcaggagatttacaagtatgcactgatggagatggatttagatgcccctgatttaccaatggggatgctctctaatgttcatttgaaaagatgtgaagaggttctacaagagtttatagaaaaagtgaaatcaatgaaagaatctgga

SEQ ID NO: 308 - DNA, 584 bp, Gossypium hirsutum
  unsure (1)..(584): unsure at all n locations; Clone ID: LIB3825-003-Q1-K6-D6
ggnaccattgagcagccaaattcttcataaatggttgatcgtcccaatgtgtacattaagatccctgcaacagcaccatgcattccttcaatcaaggaagttattgcgaatggcataagtgtgaatgtcactctcatattttcgcttgctagatacgaggctgttattgatgcttacttggacggccttgaggcttctgggttgagtgatctctccagggttactagtgtagcttccttctttgtcagtagggtagataccctcattgacaaaatgcttgaaatgattggaacaccagaagcccttgatctccgaggaaaggctgctgtagctcaagcagccctggcatataggctctaccagaagaaattctccggtccaagatgggaagctttggtgaagaagggtgccaagaaacagaggttgctctgggcctcaactagtgtcaagaaccctgcctaccctgacaccctatatgttgctcctctcattggacctgacacggtctcaaccatgcctgaccaagcactccaagcctttatagaccacggcacagtttcaaggacgattgacgcaaacgtgtc

SEQ ID NO: 309 - DNA, 610 bp, Gossypium hirsutum
  Clone ID: LIB3825-003-Q1-K6-E2
cggccgcgtgggttccagaggtggctcatgagacccataaggcttcctgaaccgcccataggacggaggagcgcggcggaggtgttcgaagccgggatttatgggataatcaaacgggttgttgtgataggaaatggcttctcgggagctgagaatcaatgcatcggtttggttcgggctttaggcctctcgggttgtcttactttatatcgtgttacaaggccaagaggaggaatcaataagtggctacattggcttccggtttctcttcataaaaaattggattatgttataaggcaaatttgcatctattcaggagttcaaggggaagctagatggagtaaagtggttccttttgcagttgaaaaaacgggtatctgttttcagctctcaaattatatggtttcatattgcagtaccaaagatggcacccttttatgttgaagaagtctttgatttgtccttttttttgtacccccccccaaaaaaaaatcaaaattcatatgagaactacagggctgtccagtgtaatagaagctgatgcaaaacaaattgcaatgatggcacgggatacatttgagaaggagggccctctgttggtcatagcgtc

SEQ ID NO: 310 - DNA, 595 bp, Gossypium hirsutum
  unsure (1)..(595): unsure at all n locations; Clone ID: LIB3825-003-Q1-K6-E3
gcggnaaatgaaaagccatccgacggttcgagctcagccaccagcagttttcactccatctctgcgagcttctttaagtcatcataaaagttcagtgatcagcttcaggccaatcatcacaagttgttccaagcaaccagaaagcatggagcagaaagacgaaaagcctgaacaaaaacctggggatgtcatgtctgagtcattcggagagggatatgctacgagatcagatgaagaaggatttggaggaatttatggagagaacgagagtatatctgacataaaaaaaaacaaggagattcatggaagtcacccagcttatgacaagacgcaggggagtgaagtgaaggagaaggagaaagccaggaatcaaactcacgcttcctcttaacccatggatggaaaacccaactatgttcacaagtaccctcctccattttgtttcatgtgcgccttaccttgcattagtttattatcttcagttttttactgcagttctatatatgtaagggttattacacggcttaagctgttaccaaactttctcctaaacaaacatctttagctgtatctgtgaaagccctaaagccttcct

SEQ ID NO: 311 - DNA, 614 bp, Gossypium hirsutum
  unsure (1)..(614): unsure at all n locations; Clone ID: LIB3825-003-Q1-K6-E4
aaaaaggaggcttttcttcaaacaaacttgtctttcaaccccaacaacaatagcaccnaccaacaaagatgggaaaaacaatgataaggctaacgctatacgttcaaaacattctgtcacggagcagaggcggaggagtaagattaatgaaagatttcaaagattgagagatttaataccaaacactgatcaaaagagagatacggcttcgttcctgctagaggtgatagagtatgttcaatatttacaggagaaggttcaaaaatatgaggattcataccagggatggagttctgagccggcgaaactaatgccatggagaaatagtcactggcatgttcagagtctcgttggtcacccacaagctattaaaaacggttctggcccaggggcaacatttgctcggaagtttgatgagaataacaccaatattaaccccacggtgatcacaagtgggccgaatgctgtagaaactgatccaatcagatatgttacatccaaaactatggattgccaaactgagttggcaaacaacggaacccatctgcccatccaaggtgagaatgtgcttgtgcatccccttcggagaccagtctctgagactcaatcgactg

SEQ ID NO: 312 - DNA, 272 bp, Gossypium hirsutum
  unsure (1)..(272): unsure at all n locations; Clone ID: LIB3825-003-Q1-K6-E5
acaaaatctactgtgttngagtnnaatgttggtgtattgaatcaataagattgcagttcatggactcaaaaaaaaaaaaaaaaaaaaaaaaaaaaaaaaaaaaaaaaaaaaaaaaaaaaaaaaaaaaaaaaaaaaaaaaaaaaaaaaaaaaaaaaagaaaaaaaaaaaaaaaaaaaaccaaactaaaaaaaaacaaaaatacaaaaaaaaaaaactaaaaaaaaaaaaaaccaaaaataaaataaaaagaaccgccgtgttgccaacctttt

SEQ ID NO: 313 - DNA, 592 bp, Gossypium hirsutum
  unsure (1)..(592): unsure at all n locations; Clone ID: LIB3825-003-Q1-K6-E6
acagctttatgaaatgtataaaatgtcgcatagttgcttcatggatgaagtattagtgaaagataggttncatgaaaattttatccttttctcttctttattgaacctaaagcaatgtgcgctttagtttcttttgtctattattggactattgagaaatctgggctaaaggttaagcttcgcgagactgatgtgaacctgtatctaataactgttttgctggccagattttaagaagtttggaactttgttatgtttttgctctattatagcgataatgctttaaagggaaatagatagttaattactaattagtatgcaaatagtttttttctttagtattattgtgaattgtgggacatctatttcttacttaactccaaagcacttgatgaaatgggaaaccgtgtaaatgagctggagcagagcattaatgacctaaaagcagagatgggagtggagggctctccatccccattagccccatcgaaccaaaagtcggatgaagcaaagcaagaggaaggctcagcataaagcttggccccaagggtgtttttaacagttggctataaattatgattgtaatttggtg

SEQ ID NO: 314 - DNA, 591 bp, Gossypium hirsutum
  unsure (1)..(591): unsure at all n locations; Clone ID: LIB3825-003-Q1-K6-F2
tttgctggaagcacttgaagaggtcgcaccttagctgattacaatatccaaaaagatccaccctccacctggtacttcgtcttcgaggtggcatgcaaatctttgtcaaaactctcactggnaaagacaattaccttggaggtcgagagttcggataccattgacaatgtgaaagccaagattcaggacaaagaaggaatcccaccagaccaacaaagattgatttttgctggaaaacaacttgaagatggaagaactcttgccgattataatatccagaaggagtctactctccatttggttctccgccttcggggtggtatgcagatctttgtaaagactcttaccggaaagaccatcactttggaggttgaaagttccgataccattgacaatgtgaaggcaaagatccaagacaaggagggtatccccccagaccagcaaaggctcatctttgctggcaagcagctcgaagatggtaggacattggccgactacaatatccaaaaggagtctacccttcatttggtgttgcggctgcgtggtgggatgcagatctttgttaagactcttactggaaagactatcact

SEQ ID NO: 315 - DNA, 562 bp, Gossypium hirsutum
  Clone ID: LIB3825-003-Q1-K6-F3
aaactctcacactttctcctcgcattggcacactcgaagatttttctcctagggtttcagcaattctcgttattattgaaattgtgggacgaaatggttctgtcggacgatgaaatcaggaggttgtttcgtatccgaaagacggtattgcagttgttgaaagacagagattacttcgtcggagatttcgagattaacatgtctagagaacaatttatttccaaatttggcgaaaacatgaaaagggaggatctcattattaataaagctaagcgaaacgatagctctgatcagatctatgttttctttcctgaagaacccaaggttggtgtgaaaacaatgaagacatataccaaccgcatgaaatcggagaatgtatttagggctatactggttgtgcaacaaaatttgactccctttgctcggacttgtatcaatgaaatttcttccaaattccacttggaggttttccaggaaacggagctccttgttaatgtaaaagaacattctcttgttccggagcatcaggtgcttactaccgaggagaaaaagactttgctgc

SEQ ID NO: 316 - DNA, 246 bp, Gossypium hirsutum
  Clone ID: LIB3825-003-Q1-K6-F4
caagtttggcaattggagttttgaaccttgcattgttattccacagtgattgtatctctgggagctggtccatgggatgctctatttggtggaggaaatataccagcctttattttggcttcattctgtgctcacgcagcctaagagttgcattaatccagcgctgcttctaatgccgtggtgcccgatcaagtgtagtctcctgctcttcttgtccttgggtgctgacgttgcttcttctgttgg

SEQ ID NO: 317 - DNA, 602 bp, Gossypium hirsutum
  unsure (1)..(602): unsure at all n locations; Clone ID: LIB3825-003-Q1-K6-F5
cttggccacttgncacgcatatctaacaaacttgttcagcttgngaaatagcaatngctgaaattcaggcacantctgcagngaaaaccagtgaatgnnggttgattggcacactttaatgtcttnnattaaagcgtaatgggctgcagaaaatatctatcagtgggcttgtgggaggccaacggctctacacgaccgaaccagagacagtgatgatgatgattaccatgatagggattatgatgttgcagccttggcaaataacttaagccaggcatttcgatggcatttacagtaatgatgatatggatcaggtacatagctcactcgaaagagatgatgaggatgtttactttgatgatgaatctgctgaggttgtaatatcttccctgcgcctaggagacgaccaagaaagtggttctctttttacaaattccaactggtttgcatttgaagatgatagagtttccaatgagtgctcgactggggcattggcttctgcatcacccaacactgggagagctgctgttgtcaatggtgaaggcgaagatgacgaggttgttggtggtgaagatgacgacgacttagatgatactgcaaca

SEQ ID NO: 318 - DNA, 564 bp, Gossypium hirsutum
  unsure (1)..(564): unsure at all n locations; Clone ID: LIB3825-003-Q1-K6-F6
ggaccgtggggaaactcccatttctttcaaaattccgcttccatctcctctctgtcttttccttccttttctcttcacccacaaagaaaggggtctcactcaaatgctctgccnactaaaaacccattttttgcaaacatctctccttccttctctctctctctctctctctctcaaacaaaaccagttctcttcgaaataatcagtctgggttatggacggcggtgcttcctataacccacgtacagtcgaagaagtctttcgagatttcaagggtcgtcgagctgccatgattaaagccctcactactgatgtggaagagttctacaagcagtgcgatccagaaaaggagaatctttgcctttatggatatcccagtgagcagtgggaggtgaatttacctgctgaagaggtgcctccagagcttccggagcctgcactgggtatcaactttgccagagatgggatgcaagaaaaggactggttgtctttggttgctgtacacagtgacgcgtggttacttgctgtggctttctattttggtgctaggtttggattcgataa

SEQ ID NO: 319 - DNA, 593 bp, Gossypium hirsutum
  unsure (1)..(593): unsure at all n locations; Clone ID: LIB3825-003-Q1-K6-G1
ggaatggcctgtactttgcgatgaaaactatggataaaggcattatgctcaaccggaacaagcgcatagagcttgtgcatgaaagagaaattcttgacatgttggaccatccttttcttccagcattgtatgcatcatttcagaccaaaaacatatttgtctgattatggattactgtcctggcggagaacttttcatgcttttggacagacaaccgatgaaggtcatgaaggaagatgctgtaagattttatgctgcggaggttgttgttgcattggagtaccttcactgtcaaggaattatatacagagatttaaagcctgaaaatgttcttctccaggacaatggacatgttgccttgaccgattttgacttatcttgcctgacatcttgcaaaccccagctgctgattccagcagcagatgaaaagataaaacgccagaaaggtcagccaaaaccagtatttatggcagaacctatgcgtgcatcgaattcttttgtggggactgaagagtatannttgccccggaaattatcactggtgcaggccataccagtgcagtggactggtgggcacttggcattcttgtcta

SEQ ID NO: 320 - DNA, 603 bp, Gossypium hirsutum
  Clone ID: LIB3825-003-Q1-K6-G2
ctccgctttttaactcgaacactcgtagagacgaaatgccgttcaagaggtacgttgagatcgggagagtggctctcgttaactacggcaaagattacggcaagttggttgtcatcgtcgatgtcgttgaccaaaacagagcacttgttgatgctccagatatggtcagaggccaaatgaacttcaagaggcttacattgacagatatcacaatcgacattccccgtgttccaaagaagaagacattgattgaagctatggagaaggccgatgttaagaacaagtgggagaatagctcatggggtcgaaagttgattgttcagaagagaagagcatctctcaacgactttgatcggttcaagcttatgttagctaagatcaagagggctggggttgtcaggcaagaactcgcgaagttgaaaaaggagaattcatcttgaaatgatacctgaatcacgaggatttgctagttttgtcattcaacattctgcaatgtgttctttcggaatggtttttttttttttttcaattaagatcagttgagtgcagtttcattggtctaagacagattttgtagtgaatttattgctagatttttgtttg

SEQ ID NO: 321 - DNA, 585 bp, Gossypium hirsutum
  Clone ID: LIB3825-003-Q1-K6-G3
ctgaaactgaactcaatcttcttatacttttaattctgctcgatttcacatgcccacgaaacgcggtctcaagtctcatcggagcgtcagaaatgggatcaaatctttgaaggtttagttggtatgcttaaaacacagcaacaacagcttgaaacacttactaaagaaagaaagatcctcggagatcggatcaatatgcaatatgaacgatggacctctgatgttcgtctctatgaagatcacatatctcagatgagtactgatctggaatcgaaagaaatgacgcgtttgcttgaggctgctaaagccgatatgatggtaggattgaagcaaagagaagcttttctttgcaagttgaaattagaggaaacatcggatgaattgactgatttcagaatctggtttgacatcctctgtaaaaattcaaatgatgtttctcttagggaccccaaaggaaccaaaaagggaatgttgggagatgaggatatcggttcaaagtctgttactttgaagacattggagggcaatttaagaaggctaaagctcaaatatgaaaatcttgcttcggaaaagagttgtcaaatt

SEQ ID NO: 322 - DNA, 582 bp, Gossypium hirsutum
  Clone ID: LIB3825-003-Q1-K6-G4
attttatttggcgcctggcttctctttgaataaaaaagtgaatgagtaggctcctgacatgtagttaattgtcaagttgctagataggactgctaaatgtttttagttaaacctttttatttggagttgaatttattgcttcatcaaattgagcatatgtggcttagaaataccttttttttttcccctattatatttctcctgttaattaatacatctgctaataaccatatgttctgcctttgcattctgtttgttctttatcaggaaatggtaattaaagactatcaaaatttcaagtttcagcaaccctatcaacaggctatgtactattgctcattaatactaaaggaccagacaaggtcttgggtggaacgacttgatgttttgcctcatcttaatgtggaagaccttacaaaatttgctccaatgatgctctcacaggccttcctagagtgttacatagcagggaacattgaacgggaggaggcagaaacaatggttcagcatgttgaagatgtgttctttaagggtccaaaccctatatgccgaccgctgtttccatcacagtttctaacaaat

SEQ ID NO: 323 - DNA, 598 bp, Gossypium hirsutum
  Clone ID: LIB3825-003-Q1-K6-G5
agactgctgtgcagtgaaatgttgcttctgctcttcatgataactgcagagctgttcttgttggggagaggactttcggcaagggtctgattcaatctgtctttgaacttcgagatggatctggggtagttgtcactgtaggacagtatgtaacaccaaatcatttggacatcaatggcaatggaatagaacctgactttagaaacttccctggttggagcgatgtttcacaagatctgttgaagtgcaatttgcatcaacaaggctagaaacagttcatatcctcaaaaatgttgctgctaaatggcggcatgatttggatttgccttcccagtagctgcactcgagggatttgagatgaaaatgaagacttgagagctgattggcttccactcagggctttggcttatatcctgcatggcaaagtgggattattgtataggtttgctggattctgagttcagtctacaagaacaccagcagaagtaaaacggtctgccaagacggattaaccatgaggcaacggaggcaattgccccagctgaaaaatcctaaaatatattacttcgtaattaccattatcaattcttatcaaaaa

SEQ ID NO: 324 - DNA, 585 bp, Gossypium hirsutum
  unsure (1)..(585): unsure at all n locations; Clone ID: LIB3825-003-Q1-K6-G6
cactgctcgatctccttacagctaccgtacacactcacacacacnattcactgatgggtcgagtcatccgagctcaacgtaagggtgctggttccgtcttcaagcccacacccaccaccgcagggtcctgctcgtttccgcagcctcgacttcggtgaacgaaatggctacctcaagggtgttgtcaccgatgtcatccacgaccctggtcgtggcgctcctttagcccgtgttgtcttccgtcaccctttccgttacaagaagcagaaggaacttttcgttgccgcagagggtatgtacactggacagttcgtctattgtggtaagaaggctactcttgtggtcggaaatgtattgcctcttagatctatccctgaaggagctgtcgtttgcaacgtcgagcatcatgtcggtgatcgtggggttttcgctagggcttctggtgattacgctattgttattagtcacaaccctgataacgacaccaccaggatcaagcttccatctggttcgaagaagattgttccaagtggttgtcgtgccatgattgggcaggttgctggaggtggtaggactgagaaacct

SEQ ID NO: 325 - DNA, 569 bp, Gossypium hirsutum
  Clone ID: LIB3825-003-Q1-K6-H1
ccgggtcgcccagcgttttggagtccatggtaaaaatgaaaagcagttgaaagttaacttacctagtcagtcagatctagaggagataggggctgaacttgataatcaaggcaggttctccactgtttccatcccgagatatctacatcttgaaccttctcttgcaatggactggcttgagatatcatgggatgaattgcgtattaaggagcgtgttggtgctggctcatttggaacagttcatcgtgctgagtggcatggatcggatgttgctgtcaaagtcttgactgtccaagattttcatgatgatcagttgaaagagtttctgagagaggttgctataatgaaacgtgttcgacatccaaatgtggtcctttttatgggtgctgttacaaaaaggcctcatctgtcaattgtgacagagtatcttccgaggggtagtttataccgcctcattcataggcctagtgctggagaaacacttgatcagaggcggcgattgcgtatggcattggatgtggcccaagggatcaactatcttcattgccctaatcctcccatagttcact

SEQ ID NO: 326 - DNA, 585 bp, Gossypium hirsutum
  Clone ID: LIB3825-003-Q1-K6-H2
ccacggctgactgattacaacacactgcttgaaaatattcatggtttaaaagcggggaaacctgttcaagttccaatttatgacttcaagtctagctctcgcataggatacaggacacttgaagtgcctagctcccgcatcgtgattattgaaggaatatatgccttaagtgacaaattgcggcctttactagatcttcgcgtatctgtcactgggggtgttcactttgaccttgtcaagagagtgttacgggacattcaacgtgctggccaagagcctgaagaaattatccatcaaatctctgaaacggtttctttatcttacctattttactttataggtgtctgatttagctgttttgtgaaatcatacctagtaatagccttaagtgctttatcaaatgcctccaaaacaaagagtagttatagtagttctcatgcacttcttttcacacaggtatatcctatgtacaaggcttttattgagccagatctcgaaacagcacatattaaaatcatcaacaagtttaatccgttcactggatttcagaatcctacttatattttgaagtctacaaggttggtg

SEQ ID NO: 327 - DNA, 557 bp, Gossypium hirsutum
  Clone ID: LIB3825-003-Q1-K6-H5
gcttgtggtgatgggcgggtgggacccggtgagttacgatccggttactgacgtttttatctacgacttcatgactcagcaatggagacaagggaaggatatgccgtcaaaaagatccttctttgcaatcggagcatgtttaggtcgggtttttatagcgggcgggcacgacgagaacaagaacgcgttaagaagcgcgtgggtttatgatttgagaatggacgagtggagtcagttgggggagatgagtgaagagcgagacgagtgtgaaggagtggagattgaggaagacgagttctgggtcgtgagtgggtacagaacggagagccaaggtcaatttgatgggagcgccgacgtctacgggttaaaatcggggcagtggaggcgagtcgaaggggtttgggaacctggtcggtgcccgagatcgtgcgtggggatggggaaagatgggaaattggtgaattgggcagagttgagcccagcggttcgggtcggagcatgtgggatctcgctgggaaggcgggttttggttacggggtcggggtatcaaggtggac

SEQ ID NO: 328 - DNA, 654 bp, Gossypium hirsutum
  unsure (1)..(654): unsure at all n locations; Clone ID: LIB3825-004-Q1-K6-A1
cggtccgattccgggtcgaaccagcgtccgcggncgcgtgggtccattttcaaattaagggtttttagtaaccaaatatgattggccttgggagttacggttacactgcaccatcttccaaaaaatcaacgcctacgatgttcctcaaggcgtcgatattcgtggtcgattcgatgaagaattcgctaagattttaacaaaggatgccttacaattcgtcgctgatttgcagcagagagttcaggaaccatattaagtacgcgatggaatgtcgcaaagaggcgaaaagacgacacaatgaaggggcgttgcctggtttcgatcctgcaacgaggtatattagagaagggaaatggacttgtgcgccggttccgcctgcggtggctgatcggagggtcgaaattacagggccggtggagaggaagatgatcatcaacgctcttaactcgggagctaaagtgtttatggctgattttgaggatgcactgtcaccaagttgggaaaatcttatgagaggtcaaataaacttaaaggacgcagtggaaggaacaataacgttcaacgacaaagcaaggaacagggtttacaagctgaataatgaaatagcaaggctatttgttcggccacgaagttggcacttaccggaggctcata

SEQ ID NO: 329 - DNA, 597 bp, Gossypium hirsutum
  unsure (1)..(597): unsure at all n locations; Clone ID: LIB3825-004-Q1-K6-A3
ctttaagcctttttttttttaaaaaaaagnaagnaaccccttaacctgctctgttagggttagttcagcatgcagccgccaaaccaccatccattcgatggtcgacggagtgaacaacggccagatttcgccaaccgaggccgtgactacggtgatctggtaattttgctcctttttttctttatttaaaaaaaaacctcgaatcttatgatattcttttaaaaaacgaaacaaactttgaagatttaaacaaaatctcgataccattcgaccctcgcccacatctatatatttttgagatgttcgggctctcatcggcgtcgattcgagtatccacttcatgtattcatgcctaaattgtaagctaatcacaagaaacgaaaaaaaaaacaaatttggaaatcaccttccaataactttcgtcttgatttcttttgatatccagtgtgcctcccaaaaaaaaaattacaatcgattccccctggctttatagccgaatgttcaaataaaaatacaatttttctttttgctttcgtattggctattgttgctgctgtttgcttgttttttttcgcaggtacggaacgtgtgttggca

SEQ ID NO: 330 - DNA, 588 bp, Gossypium hirsutum
  unsure (1)..(588): unsure at all n locations; Clone ID: LIB3825-004-Q1-K6-A4
gaatacacaatgatatttaaaaaaaaaacaagtgagcagataaattgaagaacttttatttctgttaacatccattatgagtacctgctggtcaagtcatccgttgcaaagctgcggtagcatgggagtcggggaagccactgtcaatagaggaagtggaagtggcaccaccgcagaaggatgatagtccgtattaagatactcttcacttctttatgtcacaccgatgtctacttctgggatgctaagggacaaaaccctctgtttcctcgcatactaggtcatgaagctggagggattgtggagagtgtaggtgagnggggtgaactgatctaaagccaggtgatcatgttctccccatcttcacgggggaatgcaaggagtgtccccattgcttgtcagaagaaagtaacatgtgtgatctcctccgaatcaacactgataggggtgaaatgattaatgatggaaaatccaggttttccatcaatgggaagcctatctaccacttcctaggcacctctactttcagtgaatacactgttgtccatgtcggccaggttgccaagatcaatccggaggctccgcttg

SEQ ID NO: 331 - DNA, 578 bp, Gossypium hirsutum
  unsure (1)..(578): unsure at all n locations; Clone ID: LIB3825-004-Q1-K6-A5
aaaaaggagggttcctcnctctganaactgatcattgtgacccgtgaacctgatgggatcgctactgttaccatcaatcgacccaaatctctcaactccttgacccggcccatgatggtggacttggccaaggctttcaaggctcttgcgaaggacaactcggtgcgggtcatcatcttgtctggagctggacgggctttctgttcaggcgtggatttgacggctgcacaagatgttttcaagggtgacgttaaggacccggagacggatccggttgttcagatggagcaatgccccaaaccaatcatcggagctatcaacggccttgctattactgccggcttcgagatcgccctcgcttgtgatatgctggtcgctgctaagggagccgctttcgttgatactcacgccagatttggtatatttccttcatggggtttatcccagaagcttgcacgctttataggaccaaacaaggctcgcgaagtgtcgttggcagccatgcctttgtcagcagaggaagctgagaaaattggggtttgtcaattattgttgttgaccaaaatgaagtgctgaat

SEQ ID NO: 332 - DNA, 581 bp, Gossypium hirsutum
  Clone ID: LIB3825-004-Q1-K6-A6
attccctgcttgcttccgcgtgtaaggttcccatttcttccttttcactttcattttcaaaacactctctgaaccttcatacccatttcttctccttctatttcttaattaagctccaatttcctcttctttgtacatagaactgtggttttaagggggaaaaaaacttgaaaagagagagagagagagagagagatgggtttttcgaaggaagagaaatcaagaagaatcctgagaggtttcaaaacagtgttcttcttggtaacaatgatcagctattataatctgtgtttatagtttttgtgatgggcctaaactttccagaggaccataccttggaaccacaatgatatgttgtgtttcatctttgatgtttgtttcggtaaaagcttcatatgcatcgggttggagtagtggtagagaaggggtcagccatggaaactgctcttttcatttgttcactggctctggcaattgcgcatataattgtggcttatagaacaagttgcagaaaaagaagaaaactccttgtctacaaaattgacattgaagccattttcagcttgcaagaatgggtttcc

SEQ ID NO: 333 - DNA, 573 bp, Gossypium hirsutum
  Clone ID: LIB3825-004-Q1-K6-B1
ttgtaaaaaaaaagagagtaggatctattatggacaagaacatgttagcagcactcgagggtctccctgaagaagaaaggcccgaatgtccgccatgatcgaccaccttcagcttcgtgacagtttagagaatgtacaattcacttgtcgagagatgcttcaccgactgcatcgacaacttcactcgcaagacgttgcagaagcaagaggaaacctgtgtgacacgatgcgctgagaagttcttgaagcactcgatgcgcgtaggcatgaggttcgcggagcttaattcgcaagcaccaacgcaagattgaagggtaataataagaactgcgagaaggggctcggaatttcttatttcgtaacaattttctttttggattaatcgagttcttcgacaaatcttgtttcttggaagaatttgttgattttcactattgaatcaattgcttgttatggtaagagtgaagattgttcaattcaccttgattgattaatgagctaagaagaggaaaaaaaaacactgtgtttcctattctaagtccatttctaattatttaataatattttagtaat

SEQ ID NO: 334 - DNA, 573 bp, Gossypium hirsutum
  Clone ID: LIB3825-004-Q1-K6-B2
caaaagcttggctaattttggtgacttttacatgtttaattgcatcttcttgtgggagagaattgaaggtcgagcacaagcataaactccccgtctacaatcatactcttgccaccattttagtagaatacgcttccgcggtgtacatttcggatttgacggaactttttacttggacatgtgaaagatgtaatggtctgaccaagggatttgaagttattgagcttgttgttgatattgagaactgtttacaggcatttgtcggagtggcgaaggatcttaatgccgttgttattgcctttagaggaacgcaggaacacagcatacagaattgggttgaagacttattctggaaacagcttgatttaaattaccctggcatgcctgatgctatggtgcaccatggattttatactgcttaccacaacacaaccatacgccacggaattctgcatgcagttaaagaagcaaaagagttctatggggaccttgacatcatggtgacaggtcattcaatgggaggggctatggcttccttttgtgcacttgatctagtggttaatcatgaagcta

SEQ ID NO: 335 - DNA, 573 bp, Gossypium hirsutum
  unsure (1)..(573): unsure at all n locations; Clone ID: LIB3825-004-Q1-K6-B3
ttttgatattgtggatgatttctcagnacatcattacagcaatttgaattcatcaggagagcaaccaaaggagtgggcaaagcaaatacaagaggagtggaagattctggaaaagggacttaccagaaactatatatgtgagagtttatgaagcaaggatggatcttttaagggctgttattataggacctactggtactccataccatgatggcctttttgtttttgattgtttcttccctccaaaatatcccaaagagccaccgatggtttattattattctggtggcctccggttaaatccaaatttatacaactgcggtaaagtgtgtctaagccttttgggcacctggcatgggcatcagaatgagatgtnggttccggggcaatcgaccatgctacaatgtattggtttccatacaagctcttattctgaatgctagacctttctttaatgaaccttgggtatgaaacttcgnaattttggggctgaagntgacaagnaggtccaggaagtacaatgaggaaatatttattctatcattaaagacaatgattttacacacttaagaa

SEQ ID NO: 336 - DNA, 593 bp, Gossypium hirsutum
  unsure (1)..(593): unsure at all n locations; Clone ID: LIB3825-004-Q1-K6-B4
cttttgtttacattaaggatgccattgaagctgttcttttngatgattgaaaacccagatagggccaatggtcatattttcaatgtgggtaacccaaacaatgaagtcacagttaggcaacttgctgaaatgatgactcaggtctataccaaggttagtggagaacctatgttgcagtcaccatcgattgatgtcagctccaaggaattttacggtgagggatatgacgatagcgacaagagaatcccggacatggccataataaataaacaactcggttggaaccccaagacatccctttgggacttacttgaatcgactcttacctaccaataccggacttacgccgaggccattaagaagtccatggcaaaaccaactgcatcctaaaggggcaagattgtttagaccacgcacacaagtaaggactcgcgtaaaatatatgcttttgttcttttacgtttggattcttaaaattctttttaggaagtcttatttataaatatatcttcattgttgattttggtttatattttttagacttgtctgcatctgtagttaagttcttagtgtggtacttttatatggaaaca

SEQ ID NO: 337 - DNA, 618 bp, Gossypium hirsutum
  Clone ID: LIB3825-004-Q1-K6-C1
gcagcagtggcttgacgttcccctttgctcccttcttccagagccaaagtttgagttaagaaacaatggcttttgctgcaatgaagccgacaaaacctggtttggaggagtcccaggagcagattcacaagatcaggatcactctctcctccaagaatgtgaaaaaccttgagaaagtttgtgctgatttggttcgtggtgccaaggataagagactgagggttaaggggccagtgagaatgcccaccaaggttcttcacatcacaacaaggaagtctccctgtggtgaaggaacaaacacatgggatagatttgagctccgtgttcacaagcgagttattgatcttttcagctcccctgatgtggtcaagcagatcacatctatcaccattgaacctggtgttgaggtggaggttactattgcagattcttaaatatgcctcacttatatgctttttggcaacctctagttttagtcaattagaagacttccatctgatatagccctcgatgtcctaaacaatcttttaagcttgagtggttggttacagggcttttgtagtttttgattttcccatgctagtattaaagttaaagttctattttgccctgtggctc

SEQ ID NO: 338 - DNA, 591 bp, Gossypium hirsutum
  Clone ID: LIB3825-004-Q1-K6-C3
ataccctaaaacctttcataaaaatgaatagcactcaatgaaggagctgttgcctctgctaaggccggcatgagagacgccaaggcctccatgcaggacaaggtggaccacaatgaagccatagggaccctaatgagaaacataggcgagggaaaggaaatagtagaacaagcacgatgcaaagctgcagaaacaagaggcccgccatcataacgccacggctggccatgctggtggtggtggtattggtggtactggctacaccacagttgggtacaacacaggggatactggtggctatggcggtaccggtggacatgacaaccgtgggtaccacaccgcaggtagcggctatgatacaggccggcaagatgacctcagcagcatgcgtgtttggcgcgacatacagcgggtgacttacggtacaacgggcaaaccaaatactcccaagtgcggcggcctaccaatgcgtgggactaagtaggagacaccccgtggaggtaccaaaccatgatctcttatgattcgattcctaattgaaatgaaaaggagccgaccctttttggtgactctggttacatgcctttgaat

SEQ ID NO: 339 - DNA, 575 bp, Gossypium hirsutum
  Clone ID: LIB3825-004-Q1-K6-D2
gtaaatgtctacatgggccaaactcgccgtgcaagccgagcgctacgaggagatggtcaagttcatggtagaacgtcgtctccgccgtccccgctcccgacgaactctccgtcgaggaacgcaaccttctctctgtcgcctacaagaacgtcatcggcgcccgccgtgcttcctggaggatcgtctcctccatcgagcagaaggaggaaggccgtggcaacgccgaccacgtcgccgtcatccgtgactacagggccaagatcgaggccgagttgtccgagatttgcgctggaattttgaagctccttgacgagaaccttgttccggctgctggaaacggggattccaaggtgttttatctgaaaatgaaaggagattaccataggtacttggctgagttcaagactggcgatgacaggaaatctgctgccgagaataccctcactgcctataaatctgctcaggacattgcagtagctgagctagccccaactcatcctatccgtttaggattggctctgaacttttctgtcttctactatgagatcttgaactctcctgatcgtgcttgcagt

SEQ ID NO: 340 - DNA, 123 bp, Gossypium hirsutum
  unsure (1)..(123): unsure at all n locations; Clone ID: LIB3825-004-Q1-K6-D3
aaaaaaaaaanaaaaaaaaaaaaaaaaaaaanaaaaagagaagagaaaancccccgaaattttagaaaaaanccacaccttttttttttttcnnnnncnnttttttttttttttttttttttt

SEQ ID NO: 341 - DNA, 581 bp, Gossypium hirsutum
  Clone ID: LIB3825-004-Q1-K6-E2
gaaccaccacggcaattcccatatttcatttgtaaacaaacaaaactgagggagcttctcccctgccaattcttcatttcttcatttatacacttgctctaatctctcaaacaatggattcttcatcatcatcatcatcttcaggtccctcacctctcgatctcatgtcggctttagtcaaggccaaaatggacccttccaacgcttcctccgactctgctgctcaagtaaccaccgtccttttcgagaacagagagttcgttatgattttaactacctccattgctgtgctcatcggctgcgtcgtcattttgatctggcgtagatccgcttctcaaaagcctaaacaaatccagcttcctcttaagccttcgatcattaaagaaccagaacttgaagttgacgatggaaagaaaaaagtcaccatcctcttcggtactcaaaccggcaccgccgaaggcttcgctaaggctctagtcgaggaggcaaaagcacgctatgaaaaggcgacttttaatattgtagatttggatgattatgcagcagatgatgaagaatacgaggagaagatgaagaaagat

SEQ ID NO: 342 - DNA, 458 bp, Gossypium hirsutum
  unsure (1)..(458): unsure at all n locations; Clone ID: LIB3825-004-Q1-K6-E3
tggtagctttaagttactatcaatttgttcaatgataagcgattaaacgccatttgggtcattagctctttcacgaccgtttttacataaagcagaaatgaagtgttacatacaggcttgctcaggggcctctaacaaatcttgtgatttatagctatggctttggctgctcttcgtatagtcgtgcaggcgcagtgttattggcccatgggatttggtgtcacctacttatgtcttcacttgtgttgatgcttatttgacttggcctttattttatcctccacaaagctcttgcctactttagagtgcataagctttgttgactgtttcattagataatcatactctgactattgttatatttgagncccgggtggattattgtggttaatgatcgctnacaagtaggaagcacagaaacagaaacacggatcgctccttcatagatgtagaatctt

SEQ ID NO: 343 - DNA, 598 bp, Gossypium hirsutum
  Clone ID: LIB3825-004-Q1-K6-E4
gcaggtttgtcttaacatttgcattaggagctggtcctgttccaagtctcttattaccagaaattttccctagtcgaatcagggcaaaagctatggcaatttgtatgtcagtacactgggtaatcaatttcttcgttggcttgctcttcctgcgtttgctcgagcaacttggaccgcaactcttatactcgatgttcgcaagcgtttgtatgatggctgtagtctttgttaaaaagaacgtaatcgagaccaaagggaagtctcttcaagaaatcgaggttgctcttctcccacaggaataagcaggtatatttttcttccaaaaattttctttgcaattcaatagtgtcgagcaaccaaagaacaaccatccaacatgaaaagaaaaaaaaaatcgtatatgcatgcacacacaccaagcataagcatatcacggtgccacacggtcatactagatcaaagttgtaagcccgtgacgtatatgtacacttattgtaaagccagtactttgggaatcctaagattttgctctttaagattagatttctaaaatctattctttcagttgaacctaactgtttggaatctgagttctcga

SEQ ID NO: 344 - DNA, 584 bp, Gossypium hirsutum
  Clone ID: LIB3825-004-Q1-K6-E5
atttatttcactacccaacaacccaaagaaaaaaggaatcgtttacttgttcgtagcaatttatcgtcatttcaagctcaattctctgaaaattttgtgctgaacttcttttttctctttgtaccaccatgtgtggaggtgctattatctccgatttcataccgccgtcgcggtcgcgacgattgacggccgatttcttgtggcccgatctgaaaaaatccgggttgaagaaggggtcgggtaagagatactcgaagcccgtgatcgacttgggcgatgatttcgagactgactttcaggagttcaaagatgaagaatctgatatagatgattatgatgttgatgatgttttggctgatgtaaagccctttgcttttaacgctacaaagaaacctgcttctgctgtatctcatggttcgaactctgaaaaatccatgcaattcaatggtcaagctgagaaatgtgcgaaaagaaagaggaagaaccagtatcgtggaatccggcagcgcccatggggtaaatgggctgctgagatccgtgacccaaggaaaggggttagggtctggttaggaactttcaatact

SEQ ID NO: 345 - DNA, 508 bp, Gossypium hirsutum
  unsure (1)..(508): unsure at all n locations; Clone ID: LIB3825-004-Q1-K6-E6
ggaggcttcatcgaccttgcgtgcctcagttctaagcaatacacgcccaaactgactacgcaatccgaacgctacctttgacgaaggcaaaaggcacttaacaagatgttattccccacaagcaagcaatcccattcaggcgcttatgtggtgcagttgggctgaaccgcacaggctaagaatcgccattccaatggacaaggccgatgccctgtgaaacagcaaaattcattctggatttgctcaagaatgccgagagcaatgctgaggagaaaggctccgtatgtagattcacttatcgtatctcacatccaagtaaatccaagcagaagcaaggcgccgaanatctccagcacatggaccatttaaccccacctggcttcaccggggtccattggaactgatcttagctagaacaagaggaagccgnacaaaaagagccggagactcatttggctctcgagatacaatgggagctgtcagnttaaactgatggagtgaacggatt

SEQ ID NO: 346 - DNA, 614 bp, Gossypium hirsutum
  Clone ID: LIB3825-004-Q1-K6-F4
cggccgcgtgggcggacgcgtgggcggacgcgtgggttctcatcacattttattgtgcttctctcttcagatcttgaaaatgtatacatcaatgaagaagatccacaaagataaggatgttgaaccaacagaatttgaggaatcagttgcccaggcattctttgatttggagaataccaaccaggatctgaaaagtgacctcaaggatctctacattaattcagcagtccaaattgatgtgtctgggagccggaaagctgttgttatccatgtcccctaccgattgaggaaagcttttcgcaaggttcatgttaagcttgtgagggagcttgaaaagaagttcagtggaaaggatgtgattcttattgccacccggaggatattgaggcccccaaagaaaggttctgccgttcagaggcctcgcagccgcacattgacttctgtacacgaggcaatgctagaagatattgtcttgcccgccgagattgttgggaagcgcactagatatgcaattgatggatctaagttaatgaaggtgtttttggaccccaaagaacgaaacaacactgagtataagcttgagaccttttctgcagtttaccggaagcttgctg

SEQ ID NO: 347 - DNA, 569 bp, Gossypium hirsutum
  Clone ID: LIB3825-004-Q1-K6-F5
ggcaaaactcgttcatgaacacacacaacctagcactaccaattgggtgaacgtctcgactccaaccatgactcggcggcaacttttgtcgtcaaaaaccagccagctttatctgaggcttcatggaatggagcatctagttccttcaaatgcgactcgatgacagttgccaatcctttctccgagtatttgtgtttcccgtgtccggtattgattccgagcaatgggggaagctcctccccagactcctgtacctttgtcaaatcattgatccaaacatgtagtgcagttaaagctgccccgagagatagactcttgagattcaaggaccattgtgttggagaccttgattgtattccggcataaatctctagtgaaagtcccagctctaacagatcacaagctctttccaacaaatctaagttaacacagagatcaatcaaacagttacagtgtatgtgtcatcacattcagaagacaaccgcaaaacctataatccggagtaattcccaattcgtaaactcggttaaacatccttacaacatcgtcggtacgctgagctttcccgt

SEQ ID NO: 348 - DNA, 214 bp, Gossypium hirsutum
  Clone ID: LIB3825-004-Q1-K6-G1
gtacattcatattctgtgtgtatagagcacacctatacatcaatgcaactggtccgatcgtgtttcacatgcagacatggacttggcaagaaacctctgttcgtatgctccaactttgaatacgctctgtgctagtcagcatgcaccctctttgtctgccccgcctcgcacagttaactgactcggataggagtgctccagtcgagccgagtca

SEQ ID NO: 349 - DNA, 594 bp, Gossypium hirsutum
  Clone ID: LIB3825-004-Q1-K6-G3
atctggacacccgtgccattttcacgcccatatgacttgtactgtagtccacccattatcccctctctctctctgcctcactccgccgtctcgcctcttcgctccttggttcaagatctggttttgatctgatcagatcgtataaaatctcaaaacatgtttgggagagcaccgaagaaaagcgataattccaaatactatgagattttgggagtatcgaaaaacgcttcccaagatgatctaaagaaagcttatagaaaagccgctattaagaatcatcccgataaaggcggcgatcctgaaaagtttaaagagttggctcaagcttatgaggtgctgagtgacccggagaagcgtgagatttatgatcagtatggtgaggacgcccttaaagaagggatgggcagcggtggcggtggccatgaccctttcgatatcttccagtctttctttggtggcaatccttttggtgctggtggaagcagccggggcagaagacaaagaaggggggaggatgtaatccatcccctcaaggtatcattggaagatctctacaatggaacatcgaaaaagctttctctttcacgaaacgta

SEQ ID NO: 350 - DNA, 562 bp, Gossypium hirsutum
  Clone ID: LIB3825-004-Q1-K6-G6
tccgcttttttctgtttctttcttgtggacagtcgcccccgccatgcgcattgctaacaaatgttcaggtctcatataaaacacatgtacaagttactgcacgtaagagaagctcatagctgcgttttaagagctcactcaaaaaatggtccaagtccaacacactgtactgatggaaactaatggaaccggggatggactaaccttgaaatcaacccaaatttcttcttcccacggcataggccattgatttgaagtgaccaaaatcttccctcaaactggtgttgaattaaaagcatcttcttattctcttcactgccaacgatcaaactggtcctataagtaacacttgcttaaataaaacatggcgaagctttggactgtttaccagaaactgaattgaacaaggaaagttgtggaacaagttagacctgttcaaggggaaagactttggcttttatacattttattggatcaatggtgagagtctgatgaagcagaggacagcttatttgcgatgctgctcttgacctgttgtgcgccctggaaccgtgctggaacg

SEQ ID NO: 351 - DNA, 605 bp, Gossypium hirsutum
  unsure (1)..(605): unsure at all n locations; Clone ID: LIB3825-004-Q1-K6-H1
cggnaaatgaaaccatccgatcggttcgagctcagccaccagcagttttcactccatctctgcgagcttctttaagtcatcataaaagttcagtgatcagcttcaggccaatcatcacaagttgttccaagcaaccggaaagcatggagcagaaagacgaaaagcctgaacaaaaacctggggatgtgatgtctgagtcattcggagagggatatgctacgagatcagatgaagaagggtttggagggatttatggagagaacgagagtatantctgacatanaaaaacacaaggaggttcatgaaagtcacccagcttatgacaagacgcaggggagtgaagtgaaggagaaggagaaagccaggaatcaaactcacgcttcctcttaactcatggatggaaaacccaattatgttcacaagtaccctcctccattttgtttcatgtgcgccttacctggcattagtttattatcttcagttttttactgcagttcttatatgtaatgcttattacacagcttaggctgttaccaaactttctcctaaacaaacatctttagctatatctgtgaaggccctaaagccttcctccatcacccgtc

SEQ ID NO: 352 - DNA, 308 bp, Gossypium hirsutum
  unsure (1)..(308): unsure at all n locations; Clone ID: LIB3825-004-Q1-K6-H3
aaaaaaaaaaaaaaagaaaaaaaaaagaagaaaaaaaaaaaagaaaannnngaananaacacaaataaaagaaaaaaaaaaaaaaaaaaaaatttttttttttttttttttttttttttttttttttttttttttttttttttttnttttggggnaaaaaaaaannnnnnngggggngngggagggcgggcccccgcccccccccccccccccgcgggggaaagggggggagggggaggggagagaaacaaaaacaacaaacacccccccctncccaaaaaaaaaaaatanntttttttttttttaat

SEQ ID NO: 353 - DNA, 585 bp, Gossypium hirsutum
  unsure (1)..(585): unsure at all n locations; Clone ID: LIB3825-004-Q1-K6-H4
ggngtaagtaggnaaacaaaagctccctcacatatctctatcctttttcttttaacctctttgtcctggatttaaactccttttacttatcagttttttaagattcaaagttaagttttttgccttccttaatctatgctaaaaaacaagtttccttccatttccatctgctgcctcatgcaactgctgactttcttacatcaaacaacacaccagttcttatcagcttaattcatcaaaggtaagttcttttgcaacttttagcatattttaccagtaaggccccttattatttattcccatttcctgtttgagttttcatgccaaatttatggtttttttatataattaatcccttttagtccttcaaaaaggcttcatttgtctgctcaaacacaatttcaggaaacaggttttgggtattattgcttattcctttaattaagtgaataaatgatggtgaattagggtttaaaagatattagtaaatgttttactactatatattagtttaataaaaggtcagggtgtctgggatcaagagttttttatacattagaaatcatagttttaatggaagtgaaa

SEQ ID NO: 354 - DNA, 492 bp, Gossypium hirsutum
  Clone ID: LIB3825-005-Q1-K6-A1
tctatatcacacagatcgcgctctatataatataagatcacacacgcgcgcgtgtgacacgatatatcttttatatagtgacatatatataaaatacagtgcgcggcgttacacaacgtgcgacagtggagaaacactgtggcgacacaaatcaaaatcgtcgcgcaacatatccctttttccagaggtggtgatatagaaaagaggcccacacagagcgctcttcaacacaggcgcacactcaatggggaaagtgacacgcgctgtgtaggggcataaaaagcgcggggtgtgggggggacacgcacagtgacacctatacacttgagagcgctatagcccgctcttcttgcgctctctcccctctctttctcgacacgtgccgggtctttccgtgaagatctataaatggggctctctctatagggccgatatagagcgctacaccgcatctacaccaaaaaacacgatatgagggagagggcacatata

SEQ ID NO: 355 - DNA, 567 bp, Gossypium hirsutum
  Clone ID: LIB3825-005-Q1-K6-A2
gctcttctacgtgggttgggttgggataccacaactgatggccttcgttcactcttttcggtctatggagaactcgaagaagcggttgttatcctcgacaagactaccgggaaatcgaagggtatggattcgttacgtttaagcacgtagatggtgctttgcttgctcttaaagaacccagtaagaaaatcgacgggagagtcaccgtgacacagctggcggcggcggggaattcggcgacgaatagtaacccggtggatattcatatgaggaagatttatgtagccaatgtaccgtatgatatgccggcggataagttattgggccattttgctcagtatggggaaatagaagaggggcccttggggttcgataagcagacggggaaatcaaggggttttgcacttttcgtttataagacagcagaaggggctcaggcagcgttagcggagcctgtaaagaacattgatgggagacaaatgaattgtaagctggctattgaagggaaaaagggaagcaaggacaagacgggatgatgcaaagtggcggtggggttccgggaaacgc

SEQ ID NO: 356 - DNA, 567 bp, Gossypium hirsutum
  unsure (1)..(567): unsure at all n locations; Clone ID: LIB3825-005-Q1-K6-A3
caaaagcacttgnanatttaccatatcatttactatcacaattattttactcgttagggttttttatttaataacaagaggagagggaagaaagaagaaaaaaaccccaaaaaaaagaaagagaaggaaagagaaaaaagatttttttgttgggtttttagctgttggtttagggttttcaaagatggcgcatgttcaagttcagggacaaagtgggggcgttaacaatggatctggtggagccaataaccagtttgtaacctcgctatatgttggggatttggatccaagtgtgaccgagactcagctttatgagtactttaaccatattggtcagctgcttacggttcggttatgcaccgatttgtcgacccggaggtcccttggttatggttatgtcaactatggcaatccccaagatgctgcaagggcattggaacttctgaatttcactcctctgaatggaaagcctatccggattatgtattccaaccgtgaccccagtcttcgtaaaagtggtgcagggaatatattcatcaagaatttagacaagggaatcgaccaaaa

SEQ ID NO: 357 - DNA, 613 bp, Gossypium hirsutum
  Clone ID: LIB3825-005-Q1-K6-A4
gccgaggcgaaaacaatggcttcaattccagtaataacatcacctcaatgccttcctacaaaacccataagaacccactcccttcagcttccctcactctcttaacaggttcaaggagaagaatttccgtctcttccaatggcggcaaacaagtcttcccttcttcactgctcctttctcccttcttcatcatcttctctctctttcccttcttccttttcagggttatctttggggactgattttggttcaaataatggggtgaagaatgagagaagggagatgcctggtggttagggcaggaaaggctgcactttgtcaaacaaagaggaataggtctcggaaatcattggctcgaactcatgggttccgtagaagaatgagaaccactagtgggagagctgtattgaaacgtagacgtgctaagggccggaaggtcctctgcaccaaatcaaatccaaacagtgggaaacgctaaactttctcttttttgtttcagtgattttatgatgtttaaaggataatttaggcaaacacttagccatgcctgctttgttggttcagttgtgcaatattcatcgattgaaaccctcattttaatgattattattcg

SEQ ID NO: 358 - DNA, 593 bp, Gossypium hirsutum
  unsure (1)..(593): unsure at all n locations; Clone ID: LIB3825-005-Q1-K6-A5
cccttcaaaaaaaaaaaactaaaatccagcagtgaggtgcagggnaaacagaacacaaaatggcgacagttccaggacagttgatttgggaggtagtgaagaagaacaattgttttttggtgaaacaatttggaagaggaactgctggcgttcgattcagcaaagagcccaacaatctctacaatgtcaactcttacaaacactctggtttggcaaacaagaaaactgtcaccattcaacctgcaggcaaagaccagtctgtactcttagccacaaccaagtctaagaaacagaacaagccttcgagcttgctccataagtctgtcatgaaaaaggagttccctaggatggccaaggcagtcaaaaaccaggtgacagacaactactacaggccggatttaacaaaagctgccctagcaaggttgagtgctgtgaaccgaagtctgaaggttgccaaatccggtgtcaagaagaggaacagacaagcatcgaggatccatggcaggaagtgagcttttttacacaacttcacaatcattttgctgcaattttcgttgtttccgatactttttcatccttgtttcgtggtttta

SEQ ID NO: 359 - DNA, 592 bp, Gossypium hirsutum
  Clone ID: LIB3825-005-Q1-K6-B1
ccccgcgtcggattctttttgctaaatttccgcttttcagcttcaaatcgaagttcttctctgcttagcttacagaataaactttccgattagagaatcaactcttttaccacaagattctttcttggtggttggatgctactgcttaaggttgagtctgagaactgctttcttctagctgtaggaaagtaaagcgattctgtattgggaacttttgggcaactaaattcgtatcgatcataaagaggcagagagttggttttgtaggattatggattccgagagatagaccaaaagcaagagattcggattggcttctgatgatggagaaaagttcataatatgtgggtctgaaattcccgaggttgtcaaagcaacatacttttagttgagaattgttgataactcattgagattcagcttttgaccatggaaaaacagcagagttttaaacaagaacctcctcaaggactcctggagaagcaacaaagttttaaacaatctgaaaaacagcagagttttcgcggtgttatgacagaaaaacaccacctcaacggctcctggagaagcaaaaaagtttaaacaatctgaa

SEQ ID NO: 360 - DNA, 595 bp, Gossypium hirsutum
  Clone ID: LIB3825-005-Q1-K6-B3
atctggaccgtccattttcaccccatataactcgatctctagccacccatttccccctctctctttctgcctcactcgccgagtccacctcacgctgattggtagcaagatctggtaggactctgctcaaatcgttttgtaatgagaaaacatgtcaagggatggcaccgtaaaaaaaccgataatatcagatcctattggtactccataccattatggaatctcttgccaaggatatctaattaaatctcataataaaacccagagccaccaatgatcccttattatgctgctagcctcacaataaatacaaatttctccaaccgctgaaaagcttgtctacccctttaagccacctatctggatcatcataatgaaatacgcccttccgagaacaatcgaccatgctacacggattgcattacccacaagctatctattcagaatgctattacctttctttactgaacctgcttatgaaactacgcatgtcggagcaaaaggagacaggaagatcaggtacatcacttgaggaaagtcattattctatcattacagacaatcatttacacactaataagaccgccaaaacatt

SEQ ID NO: 361 - DNA, 432 bp, Gossypium hirsutum
  unsure (1)..(432): unsure at all n locations; Clone ID: LIB3825-005-Q1-K6-B4
ngnaggcgagacgcaatggcctcctcttccaaaaaacccaagnaacagaacaagaacaagaagaagcataaggagaagagcaacagaaccgctgacaaagacgcaaaaaatccattaaaaaaccagagaagaaagcaagtgcctccaaaatacctaccaaatcaaagccaaagcccgaattaaagccagacaaaagcaaaaacaagagcagcaatggaatcccagtcaagtcccaggttattgccgacccatcttcaagctctgaatcagaacccgaagaaaacagaaacaactaccacaagaacgttaaacccgacagcaaaagaaagcgaaaggaagaagtagacgaggaagaagaagagcaaaggtgtgtagatttncaatgaacagaatcaagaggataatcaagactgaagattcacatatgggctg

SEQ ID NO: 362 - DNA, 591 bp, Gossypium hirsutum
  Clone ID: LIB3825-005-Q1-K6-B5
cggccgcgtgggcggacgcgtgggtggaaatgcagctgaacatgcaggagctatcatttttgctttcaaaaacaagctggatatttctttaggtgtggcattaggatctgcaactcagatttccatgtttgtggtcccactttgtgttattacggcttggattatgggtattaagatggatcttaatttcaatctcctcgaaaccggctctcttgccctatcaatcatcgtcgtggccttcgcgttacaagacggcacttctcactacatgaaaggactggttcttctattgctctacatagttattggagcttgcttttttgtatccaaaacaccactaaaccaattaagcaccataaactcaggaactaaagcagccatcgatacaatcttcagagcttgaaaaggtttggacgtgttggggacaaagatttccatgcattttgttattcttttgctatgttgtgcgtggcactgtcggaaagctgacaaatgaaggttgatatataccattgaagcttgacgaagacaggctatatatgagtacacaatgtactgttttgtctgtgtatagatctatctcagtgtttt

SEQ ID NO: 363 - DNA, 535 bp, Gossypium hirsutum
  Clone ID: LIB3825-005-Q1-K6-B6
caggaacagtagcactcgacgtaaacattgcgcacaaatgtccagtaccataaaaaacacctgacaagttctgcacgtaagagaacccatagctgagttttaagagctcactcaaaaaatggtcaaagtccaacacactgtactgatggaaactaatggaaccggggatggaataaccttgaaatcaacccaaatttcttcttcccacggcataggccattgatttgaagtgaccaaaatcttccctcaactggcgttgaatcaagagcatcttctcattcttttcactggcaacgatcaaactggtcctataagaacacttgcttaaataaaacatggccaagctttggactgtttaccataaactcgattgaacaaggaaagtaggggcaaaagttatgacctgttagaggggaaagactttggcttttttacattttattggatcaacggtgagagtcagcagaagcacaggacagcttatttgcgatgctgttcttgacctcttgggcgcccttttaaccgtgctggaacg

SEQ ID NO: 364 - DNA, 618 bp, Gossypium hirsutum
  unsure (1)..(618): unsure at all n locations; Clone ID: LIB3825-005-Q1-K6-C1
ggaaaacaccganaaatactaccacctcacctccaaagaaatcttccctttccctgtctttgggaaagcagattcttgacgacaagtattcgcttggcaaatcactcaaaaacaaacaaatcgttgagctagcctcaatgggtgaccaaaagaatgctatcaacgttgttttaacagcatctgatgttgctgttgaagggttctgcatgagccgctgtgggactcatggctctgccttgggctccaccgatggtctcgtcaaggccaagaagcactccaagttcgcttacatttgggtgggtaactcccagacccagtgccccggtcaatgtgcctggccgttccaccagccaatctacggaccacaaagcgcgcctttgattgcaccaaacaacaacgtgggtcttgatggcatggtcataaacttggctagcctctttgccgggaccgtcacgaaccctttcggaaatggttacttccaaggcccagccgaggcaccgttggaggcttcatcggcttgtcctnggatttatggtaaaggggcttatccaggctatgcaggaaacctacttgtagaccctacaactggcgctagctacaatgctcatggtaacaatg

SEQ ID NO: 365 - DNA, 592 bp, Gossypium hirsutum
  unsure (1)..(592): unsure at all n locations; Clone ID: LIB3825-005-Q1-K6-C2
canaagagtatttctggagaagtcagccccgaaaatcagctcttttgatattggtgtcctgttttgtgaagacttcccaccttgaagaatacctatgtgtcaaggaagctatacttttagatctccttagagtcatcagccatcaccgtgcccgacttgccacaccaattcgaactgtgcagaaagtagttggtgattctgagttggaaaatgtaccattcgcagactcaatctataaccatggtggagtgtcatctaacaggcctctgttactgatcgaacctgcttacaagatcaatggtgaggatagaacaaaaggccggtctgcacaaccaaccggagaacaagacagtaaaaccacagtacggcctgctgcagacaacaaggccggagcaacaccaaagcctgattccaaatccaaagcagatgccaaggttgtagaaagcccaaattctgaaaccaaagcctctaatgcttcttttgaaccaacatcacatcccaagacagatgataaagttaaaccaccatcaaaatcaacccagaagacgagttctaatgctgcagaaacatctagtcccgaccaaaaggttct

SEQ ID NO: 366 - DNA, 582 bp, Gossypium hirsutum
  Clone ID: LIB3825-005-Q1-K6-C3
cgcgacaagcaatggtctaggtgtagggggtgcaggagtaggttaggaatttgacagtagaagagagacggcgatgggtatagaagaatccgcaacctggtccaccgcctaaatcaagaatgcgagttcatgcagggaatactatgacaagggtgctttcttgcagacagatgctgatgatcctgctggaactgctgtatcccaaaatatttatgaccgtgatttgtgctgccccgacgggtgacgacatgatggacaagacattattgcccaaggtcatgcaaatgaagcattttggtcgtaatggcagaaccaaatggactcattttgtcaacaaggatacaactgattggaacaatccatggacatacaacgatccccttcaggcaaaatacaatgcaaaaatggctgctgtgaatgtacctatagcgaaacctaaaggaagcaagaagttgaaggattgggaaatgaaatgaatactggtttcaatccatgatttgattggagaggttggtgtattttgttttttttactgatgactggcatgtttcattgcaaatggtactaggggtgatgcttatg

SEQ ID NO: 367 - DNA, 615 bp, Gossypium hirsutum
  Clone ID: LIB3825-005-Q1-K6-C4
caaagatacgcaaacttgctagatcatgtaaggtaccctttgagttccatgctgctgctatttctggcactgaggttcaacttagaaaaccttggtattcaacctggtgaagccattgctgtaaattttgccatgatgctgcatcacatgccagatgaaagtgtggacactcagaaccatcgggacagactgttgaggttggccaagagtttgtccccaaaggtggtgacgctcgttgagcatgaagcaaatacaaataccgcccccttcattccccgtttcctagagacaatgggttatttttcgtctatctttgaatcgattgatgttagcctgccaagagaacacaaggagcgaatcaacgttgaacagcactgtctggcccgggagattgtcaacattatagcatgtgaagggcaagagagagtggaacgttatgaactttttgggaaatggagatcaaggtttattatggctggctttacaccctctccattaagtccatttgtaaatgctaccatcaaaactctgctgcaaagctattgcgataagtatactcttgaagagagagatggcgttctttatctcggctggatggatcgagctataattgct

SEQ ID NO: 368 - DNA, 544 bp, Gossypium hirsutum
  Clone ID: LIB3825-005-Q1-K6-C5
ttccacttctgtcccgtcagggaaatttcccacaccatttcatttgcaccaataggccttcttgacatgttcaacagcagcggtgccgttgagaagttcgaagtacaaacgacatccgatgagaaactgcagttctttgatggcgaggtttcctcggagttgacaacttcactcagcaccaaccggaatccaacagcaacgatcagtcttaaagtccggggctgtgggaggtttggtggatactcatctcagcgtccgttgaagtgctgtgtggacaatgtcgacactcacttcaactatgactcagccaccggattggtgacacttacattgccagtgccatcggaggagatgtacagatggcacgtagaaattcaagtctaagtttagcttcaggttattatattaggccatcatattaaaagtcattattgtatggagggagatttcatggctttctagtctagtctagtggtaatacggaattggggtcctctactgtgttgtagctactttctcttaaaataaaattgcctctctctcg

SEQ ID NO: 369 - DNA, 510 bp, Gossypium hirsutum
  Clone ID: LIB3825-005-Q1-K6-C6
gcgtgcgcttagctctaaccaccaccaccatagccattcaaatcttaaccttcagcctaattttttgcgtgtcagcttcgctcttctcaaaaccccacaaggagaccaaccatgacaccaagatgactagaaaattgagatatgccaactgtgaagaccaagattctcgagaaaccacgtccacaaacagtaacgagtctttgatggaaacgtgcagaaagaaactattcgaccagagaggagtacatgcaccgcctaggaatctttgcgaaaaactaggtgagggctgctcagcaccagctgcttgatcctatgactgtacatggagtgactaagatctctgatctatatgaggatgagttagagagtctgtacactgcattcaagatccccaatgtggcggctccattattaaggattggtgttggtgatgaagcagaatcgtcggaagttgatgagttgcctgatagctttgcttggaaacagaaggtagcatgtaacactaggtta

SEQ ID NO: 370 - DNA, 612 bp, Gossypium hirsutum
  unsure (1)..(612): unsure at all n locations; Clone ID: LIB3825-005-Q1-K6-D1
cttgatttcaataacggagnatttgatgaaggttccgttgaagaagaagaaaaaactccgtttctacttcatatcaacaacgtgttgcagatgatggtagtaactctaattccaccagttttacactctccgtaccggtaatttttcattaattagaagtaatttaaaaaaaatccctcctctttttgaattcaaaattttgaattttttgtttttgttttctttaggatgatgaaatagcagggcttgaatgggtgtctcactttgtggacgattcggtaccggagattcctttgccatgccctgtttttaagcaggaaactgataaccatgcaggaactcggtttgaagcggaaaccggcccggtttttgtgaaaacgccgtctctttcatcgtcggttccaagtaaagcgaggagcaagaggtctaaaccgacagtcccgacatggtcggttgggtcactgcctacttccgagtcatcgtcttcgacagcatcatcttcgagtacttgctcggggtcttccatgacttctacggagttggctaatggtttcggagtaccgccgacaaagaaacagaagaaaaaaccggtggcggttcaaggtagtggga

SEQ ID NO: 371 - DNA, 610 bp, Gossypium hirsutum
  Clone ID: LIB3825-005-Q1-K6-D4
gcagcttagagaggagaacaagcacaattttgaggatgccagaattacgcgaggtggctcataaacataagattgaatctgaagctctagagagccagctgatggagaggcaatttgaggttgaagcttctaaaaaggaaattgaaaagcatctgacagagagagagatcttggaaaagagggtctctgagttacttgagagatgtagaaacattgatgtggaagactataaccgtctgaaaaatgatgttctacagaaggaggaaaacttgaaagagaaggacgctcagattgaggagattacaaaccttctgtgtaagaagcaggatattatatcaaaattggaacaagatcttgcaaacagcaagttggaactcaatgagtagtcgaagaagaagaagaagaagaagaagaagaagaagaagaggagaaaaggagaaagtaaaaggtaaataaacaatgtcagggcacaaggagcattgcccaaggagtcgaagacggcaacgatatatgaatcagtacaaggaggagagaataagagcaaaacggagctgaggtccaaggaggatgagggtggcaatcaggttgataggctggaggacaggtgaaa

SEQ ID NO: 372 - DNA, 593 bp, Gossypium hirsutum
  Clone ID: LIB3825-005-Q1-K6-E1
cggacgcgtgggcacaattcgagcaaaagaaagaaaaggcgtctcatgaacagagttacaaagctggtcgagctgaaggccgagctcatgaaaaagtgagcaaatgaaggagagcatgaaggagaaagcagaagcagcgaagcagaagacaatggagaccgcagaagcagcgaagcagaagacaatggagaccgcagaagcagcgaagcagaagacaatggagacaacagaagcagcgaagcagaagaccagaggagccgccgagacaaccaacgacaagacaaaacagacggcgggagctgctagagggaaggcggaggaaactaaggagacggagacaagcggagggatactgcagcaggcgggggagaaagtgaggaacgcggcacaaggtgcgactgatgcggtgaaacatacctttggaatggcggatgccgatgaggatgaacataattatccggctactattactaggaaggattagggtagcatgtagagttaagatattaataacagttgcaatttgtacgtgagtggttttagataacgtacggttgcaaacgcttcgttgttatgagcattggcttactttg

SEQ ID NO: 373 - DNA, 583 bp, Gossypium hirsutum
  unsure (1)..(583): unsure at all n locations; Clone ID: LIB3825-005-Q1-K6-E2
caanatttcacttttcaagnaaaacaaactgttcacgaaaggaaaaaaattccttaaattcatcaaaaacccagtttagaactaagctttgttcattgtttttcgtccttttttgttctctctctttttgagcttcgtttgttttggttagcccctgttcttgtttctggagatttctggggttttctcgtttgaaatttttgggaatgtttggtatgggttttaaggataatcacaacccagagatggattcgtctttgtttccggtttcttcacgtaaaaggaagagacgggacgggttatcagtggcggatactttgaagttatggagtgagaactcggaggccaaacaatcacgtaaagcgccggctaagggttccaagaaagggtgcatgaagggtaaaggcgggccgcagaaccagaactgtaactacagaggcgtacggcagcgtacatggggtaagtgggtagcggaaatccgcgctccgaataaagggaaacgtctctggctcggcactttccctactgccgtcgaagccgcttctgcttacgacgaagccgccaaagccatgtacggtgacaa

SEQ ID NO: 374 - DNA, 572 bp, Gossypium hirsutum
  Clone ID: LIB3825-005-Q1-K6-E3
aaccctaaaaaccctttcactaaaaattgaagatgcagtcaatgaaggatgctgctgcctctgctaaggccggcatggagaagccaagcctccatgcagaaaggtggaccaaatgaagacaagggaccctatgagaaagagaggcgagggaaaggaaagaagagagtacaagtaagatgcagagctgagggaaacaagaggcccgccatcataacgccacggctggccatgctggtggtggtggtattggtggtactggctacaccacagctgggtacaacagaggggatactggtggctatggcggtaccggtggacatgacaaccgtgggtaccccaccgcaggtagtgggtatgatacaggcaggcaagatgacctcagcagaatagggtttggcggagatacagggggtgcttacggtacaacgggaaaccaagacttcccaaatgcggcgcctaacaatgctgggactataaggagcacccgcggaggtacccaggatgatccttattatcgatcctattaaatgaaaggagcgactttttgtgctctgctactgccttgagtctga

SEQ ID NO: 375 - DNA, 608 bp, Gossypium hirsutum
  unsure (1)..(608): unsure at all n locations; Clone ID: LIB3825-005-Q1-K6-E4
tgccattttaagacgggnagatgttggttgttgattaagtattggaaaggtgaaaccagctacagctgtcccggagtagtcatcacttatcatcaggggccttggtcttgctgatgctgaaaccgaagctaccacacgctgtcgccctaagctggaatcaaattgattctctgctgacatcctgtgaggattagaggctaataatctctcttcccgtttattatctccgtcagcaacgcttgaacttttctgattcatgcccaagggtgttttgggctcaacttgaacggatttgttgccggagcagggacagcttcggccccaaagccatttcaatttaccacacccttttctcttgtgatcagtggtaggatttttcatggtcatagacaccgcaatggcgccaggaggattcgacaaaagaccagtctggctattccagctagcctctgatgaagccgttggagttgcatggaaagaacgaactcggtaggtcatgccatagccatagccatagccatagccgtcggcacaagaggtggaggaaacatcacgctggggcgctgatgaaataggatctaattccaggttgggcatgttaagcgggg

SEQ ID NO: 376 - DNA, 571 bp, Gossypium hirsutum
  Clone ID: LIB3825-005-Q1-K6-E5
cccagtgcgttctgactcctcttttccttttatttgcttttcttatatatacaaagaggcgattcaaaaagaaaatgaaaagaaaaaaagaacaaactttctgatttacctccaagcttttttggttcttttttgatctttgtatatattggatgtgtaaaaaggggggatcctttacaaattcccaaagcggcttttatatagccggaaataaaatcaagatttacaagaatttttttctaaaaaaatctgctattttttctctgctattctctttttgccattgttgccttctgtttttgctcgtttgttggtcctttgcaggtacatggtcgaacgagggccagcatgtacggggggctatgtgtgggaggggcgtgctcgtacggaggctcgcgcacacacacgaaagggggctcgtgctctattacggcacggtaactgctgcctagggtttctgatttccccatgttaggctaatttgggctgagtgatttgggcctggagggttaagtattgagttaacagtttaggcttgggaattttgggttttgtaatcgggtttgggctt

SEQ ID NO: 377 - DNA, 490 bp, Gossypium hirsutum
  Clone ID: LIB3825-005-Q1-K6-F2
tagtaaagcacaaagcagcacatcctgagctgaagaaccgccttccccgacatcaagcacattttcaagtcaaaacccaaaggaagtagctgaagaggtgggaccttcaaggtggcttcacaggtggctaaatcagctaccccatcagcatcctcaaatagccaaaaaccagatcctgcatctgaaagtaccagtcagcctgcagataccgaagcagaagcaatgcaaattgaaccggtgttgccttctacacggaatgaagtcacaaaccctcccccaaaagtgactctcatggaagaaagcattcgagtcacacgtggtagattgaggaaaagccgttcaggaacccgttaaaatgatcgtattaattccttttctttttagtttactgaactagcacttgaattggtaggcgtatcgttgttgacattgatgtaaatttccctgttttctagtttctatttcattcgttgcttcattattatttttc

SEQ ID NO: 378 - DNA, 614 bp, Gossypium hirsutum
  Clone ID: LIB3825-005-Q1-K6-F4
ggttggagtattggctttacaggatcttttaacgaacacatagcagcgctaaggaggttaggaatgaaaggagtggaaataaggaagccagagcagcttcaaagtatcagctctcttatcattcctggtggagaaagcaccaccatggctaagcttgctgagttccacaatctttttccagctctgcgggaatttgtgcaaatggggaagccggtttgggggacttgtgcaggtcttatatttttggcaaacaaagctgttggacagaaagaaggaggacaggaattagttgggggtctgaattgcactgtccatagaaattactttgggagtcagatccaaagctttgaggctgagctcttagtgccagaacttgcctcccaagaaggtggccctgagacatttcgtggtgttttcatccgagctcctgctgtccttgaagtggggccagaagttgaagtgcttgctgattatcctatcccatcaaaaaaagttctatattcaagttcagctgttgaaattcaagaggagtctgctgtgcctgaaaagaaagtgatagttgccataaagcaaggaaacttgctggggactgctttccaccctgagttgactgc

SEQ ID NO: 379 - DNA, 572 bp, Gossypium hirsutum
  Clone ID: LIB3825-005-Q1-K6-F5
cggccgcgtgggccctgaaaccctttcactaaatattgaagatgcagtcaatgaaggatgctgctgcctctgctaagccggcatggagaagccaagcctccatgcagaaaggtggaccaaatgaagacaagagaccctaatgagaaagagatggcgagggaaaggaaagaagagagacaagaagatgcagagctgaggaaacaagaggcccgccatcataacgccacagctggccatgctggtggtggtggtattggtggcactggctacaccacagctgggtacaacataggcgacactggtggctatggcggtaccggtggacatgacaaccgtgggtaccccaccgcaggtagtgggtatgatacaggcaggcaagatgacctcagcagtatggggtttggcggagatacagagggtgcttacggtacaacggggaaccaagacttcccaaatgcggcgtctaacaatgctgggactagaaggaacacccgcggaggtacccaggatgatccttattatcgatcctattaaatgaaaggagcgagtttttgtgctctgctactgccttg

SEQ ID NO: 380 - DNA, 584 bp, Gossypium hirsutum
  unsure (1)..(584): unsure at all n locations; Clone ID: LIB3825-005-Q1-K6-G2
gntaaaagtcatctggaaggagactacctcaggatattcaaagctcttgtctctgctccaggtctttctattcataaggttcnttgataagntnnggcttgaggggaaggaaaaaatctaagcagagctgagatttcatcagcaacgctcaatcttcgcaagcgccgaatgtatgggagggcattgcagctctctgagtggctggagatgaagcagcagcttgaatttaatgagaaagattatgcttctcgtcttgatttgattgccaaaatacgaggtctccagaaggcagaagactacattcagactatcccaaaatctttcagaggagagataatctacagaaccctgctggctaactgtgttgtatctaacaatctcaagaaagcagaagaggtctttaacaaaatgaaggacctagaattcccgagtactgcttttgcttgcaaccagctgttgctcctctataagaggcttgacaagaaaaaaatagctgacgtgctgttgttaatggagaaagaaaagtcaaacctacgctctttacttatagaatcttaattgacacgaaaggtttatgtaatgac

SEQ ID NO: 381 - DNA, 584 bp, Gossypium hirsutum
  Clone ID: LIB3825-005-Q1-K6-G3
atcaaacacgttacaagtcacggcaattgttatctcatggtatgtttgagattccctaggaagcaaatttcaccaacattgagcagttcctggaacctcttaaactttcttataaatcactttgctcttgtggtgatcggccaattactgatggaagccttcttgatttcttgaggcaagtgtcaacctttgggctctcacttgtcagacttgacattaagcaagagtctgactgtcatatagatgtcttagatgccattaccaaacacttagaaattggttcctaccgagagtggtctgaagaacaaaagcaggaatggctattatctgaactaagtggcaagcgtccattgtttggttcagatcttcctaaaacagaagaaattactgatgttttagatgcattcaatgtcctagcagagctcccagcagataacttcagagcgtacatcatttcaatggcaactgcaccttctgatgttcttgctgttgagctcctgcaacatgaatgccatgtgaagcaaccattaagagttggtccactgtttgagaagcttgcagatttggaggctgcacctgctgct

SEQ ID NO: 382 - DNA, 597 bp, Gossypium hirsutum
  Clone ID: LIB3825-005-Q1-K6-G4
cattctcttaatattaggttttttaccctatagcactccacgacgcggtccgtggagtgggggcaaaaccctcacacaaatgctctctctaaatcttaaccgagaaggtgtccaaaaaagactaccctttgtgcccatttactctccttattcaacagataaagcctcgcatcccccaaaatagtcgcttttgtatctcttgctctcttcatctgcttcaagtcatggctggagtaccacccgaaggatcccaattcgatgctcgtcaatttgatcagaaaatgagtgattcgctccaaacggatggagatgatgttttcacttcttatgacgaagcttatgacagttttgatgcaatgggacttcaagagaaccttctgaggggcatctatgcatatggttttgagaagccctcagcgattcagcaaagaggaattgttccattctgcaagggtctcgatgtgatacaacaggcacagtctgggactggaaagacagcgactttttgctctggaattttgcagcaacttgattacggtatagtccaatgccaggctctggttttggcacccactagggagttggctcaacagatcg

SEQ ID NO: 383 - DNA, 100 bp, Gossypium hirsutum
  Clone ID: LIB3825-005-Q1-K6-G6
accggcacagcgccctgctataagtcttctctatagtcttagggcactcttaaatcctatattcacttggtctcgtaagtatttaacacgtagactactg

SEQ ID NO: 384 - DNA, 613 bp, Gossypium hirsutum
  Clone ID: LIB3825-005-Q1-K6-H1
aggggtaaaggcgactgatataaggattataccgccgagaagccaagaggcaagaggtaccacagcccaaaggcttctgagtatacagattacgctacccaggaaagctaaggacgcaaaagacaccactgcacagaaggcttccgagtatacaggctatgcagcacagaaaactaaggatgcaaaggatgctacaatggggaaagcggctgaatataaggattatacagctcagaaagccaaggaggaaagagatactacagcccaaaaagcttctgagtacacagattatgcagcacagaaagctaaggatgcaaaggatgccgcaattggaaaagcgactgaatataaggactatgcagctgagaaagccaagggagcaaaggatacgacagcgcagaaggcttccgagtttacagactacgcagcacagaaagctaaggaagcaaaagatactacaatggaaaaagcgaccgagtataaagactatgcagctgaaaaagcgaaggaagcgaaggacgtgacagctgagaagacaaaacaggggacggaatatgcagcggagaaagcaaaggaaggtaaggatacaacagttagtaagcttggggagttg

SEQ ID NO: 385 - DNA, 586 bp, Gossypium hirsutum
  unsure (1)..(586): unsure at all n locations; Clone ID: LIB3825-005-Q1-K6-H2
tgataagacctaccctgcaggttttatggatgttgtgtcaattcccaanacaaatgaggacttccgtctcctttatgacactaaaggtcgtttccgccttcatgccatcactggtgatgagactaagtttaagctctgcaaagttaggtctgtccaatttggccagaagggtattccatacctgaatacctacgatggacgcacaatccgttacccagaccctttgatcaaagccaacgacaccatcaagcttgacttagagagcaacaaaattgttgatttcatcaagtttgatgttgggaatgttgtcatggtcactggtggaaggaacaggggacgtgttggagtgattaagaacagggagaagcataagggtagcttcgagacaatccatgtacaagatgctgctggacacgagtttgcaactcgtctaggcaatgtcttcacaatcggtaaaggaacaaagccatggatttcgcttcccaagggcaagggtatcaagttgtcgatcattgaggaagcgaggaaaaggcttgctgctcaggctgctgcttaaacctatcatatctagagtttttttttttgt

SEQ ID NO: 386 - DNA, 443 bp, Gossypium hirsutum
  Clone ID: LIB3825-005-Q1-K6-H4
cggccgcgtgggcggacgcgtgggtcaaaagccagcagcgctgcagctaaaagacagtcgtttgacaattattcgccatgggtaaggttcacggatctctagctcgtgctggtaaggtgagaggccaaactcctaaagtggccaagcaagacaagaagaagaagccccgtggccgcgcttacaagcggatgcaatacaaccgccgcttcgtcaccgcagtggttggatttggcaaaaagaggggacctaactcatctgagaagtaagagatctatgtaggtgaaagaaggcaagaagccttgttgaaagctttgatggattttaagtctttgttttcttttgataatgtttttatgatactggtttcaaggattggattgaactaccattttgtttgctagatattatgtgatattgttatcaattatcttaatttttggttt

SEQ ID NO: 387 - DNA, 613 bp, Gossypium hirsutum
  Clone ID: LIB3825-006-Q1-K6-A2
aacctctcgatcgagtcaagcgtctccttcactacgcttctcttctccctcctctccctgcttcatcccggactgattcgaaccgggttatgggctgtacagcccgagtttggctcgacgcccagatggactccgaagggaacatcagattctgggccgacagtgattccgagattaccaaagggttctgtgcttgcttggtttcggttcttgatggggcggggccggaagaagtgttgcagttgaaaacagaggatttagcggcgcttaacgtcggactccccggtggtgaaaggtctcgtgttaacacttggcataatgttttagttagtatgcagaaacgaaccagggctttggttgctcaaaaggaaggaaagacaccatttgagccatttccatcattagtgatcactactgaaggtattcagccaaagggaacctatgccgaggctcaggcaaggtatttatcccctgacaagttaaaggtgaaagaacttgtccatgttcttaaagaaaagcaaattggtgtggttgctcatttttatatggaccctgaagtgcaaggcatcttaactgaagctcagaaagatggcctcacattcatatatctgac

SEQ ID NO: 388 - DNA, 305 bp, Gossypium hirsutum
  Clone ID: LIB3825-006-Q1-K6-A3
agcgaatacaatttctgtaaccaactacagtatagcacatggcggtgatgctcctgaatgagactgttactctggctgtacctcgatacataggtaagctcgtaaatggtcgttcatgccctagattgccgcgtttttcccacctgtaggcctgacaccatattcatgagccactgatactacctgccttctcttaggtcaatgagtatgctgctgcaactgtagcggaccatatacatgactgccatgatggtgactggaactgcatggcgatagagattgctgatacagttgtatcctttgat

SEQ ID NO: 389 - DNA, 595 bp, Gossypium hirsutum
  Clone ID: LIB3825-006-Q1-K6-A4
gcaaatgcggatgccacttcgtcgtgaacttccgaacgagagcatagggccgccccctcgacgttcatagcgacaattcctgaagccgatctaaaaatccatcgtcataagcgccattgaagtttatcttcatcgtattcccagaaggctttccccattttccccccagattcgcactttgatagtgcacagcaaatgatacacttttggttaaacgaacacccccaatagcccaggacacactcgaaatacatgggtgattgttttagttacttcaccacatcgatggacacattgtaatatggggaagcttcttatggttcttgttcacaagagtggggatgtaattccaggagatcctccaaactgtaatatttattttcccaaggagatttaggccccaaagttgtttgtataattctttagctttgttttttaatgcataaacattaggatccataggatactttcgttatggtttgtaagtattgcgaaccgagaactccctaaagggctcgccactccacaccatctgatcgtcatgtgcttctcgtaccagcgggatacggagaattctagtggcatctttcctccc

SEQ ID NO: 390 - DNA, 598 bp, Gossypium hirsutum
  Clone ID: LIB3825-006-Q1-K6-A5
cggccgcgtggggaaaactgcagaactggccacccagttctttattaatcctgcaaccagtcagcccaatgttgctgggctgatactggctggttcagctgacttcaagactgaattgagtcagtcagacatgtttgatcctcgtttacaagccaagattttgaatgttgttgatgtgtcttatggaggtgaaaacggttttaatcaagctattgagttgtctgctgaaatcttgtcgaatgtgaagtttatacaagaaaagcgattaattggaaaatactttgaggagataagccaggatactggaaagtatgtgtttggcatagatgatacgttgaaggctctggaaatgggtgctgtagaaacccttattgtgtgggaaaatctagagatcaataggtacgtgctaaagcacagtgcaaccggagaaattatcataaaacacctgaataaggagcaggaggctgatcagagcaacttccgtgatcctgaaacctctgcagagttggaagttcaagaaaaaatgcccttactcgaatggtttgccaacgagtacaagcgctttggttgttctcttgaattcgtcacaaacaaatcc

SEQ ID NO: 391 - DNA, 461 bp, Gossypium hirsutum
  unsure (1)..(461): unsure at all n locations; Clone ID: LIB3825-006-Q1-K6-A6
gtgtccgggnaaaaaattaagtaattaattaacacaactttttttcgttgttgttngaaaaagctcatctttttttttgatagttagagtgagcaatggctaagaatgtgggaattcttgctatnggaaatctacttccctcctacctgtgttcaacaggaagcattggaggctcatgatggtgctagtaaggggaaatacaccattggacttggacaagattgcatggccttttgtacagaagtggaagatgttatctctatgagtttaacagctgttacttcactccttgcaaaatataagattgaccccaaacaaatcggccgtcttgaagttggtagtgagactgtgatcgacaagagcaagtccattaagaccttcttgatgcaaatctttgagaaatctgaaaacactgacatcgaaggggttgactcaactaatgcatgctatggagggactgc

SEQ ID NO: 392 - DNA, 618 bp, Gossypium hirsutum
  Clone ID: LIB3825-006-Q1-K6-B1
accgattgttgcaactgtacgaggaggaagatgatgccactagtccattaaaggagccagctgtgctgaagcctgagattgatgatcaaagcctaaatcccagtactttacctgtaattcccgaggactattttgtgactcatgagccacaagaacaatcatttcaagggtttgatttatgcaaagtttctacctcggctaatgctgacataaattatcaattggattatcatccatttgatttacaacaagattttgaccatgagcatctcctcgatgccaatggcactgaagattatgtgaaggatgctaactccaacatgctgccaaatatctctcctccaccatctgctttcatgggtccgaagtgtgcactgtgggattgtacaaggcctgctcaaggatctgactggtttcaggactactgtagcagttttcatgctaccctagctctgaatgaagacccccctggcacaactcctattctacgccctggtggaattagtttaaaggataatttactacttgatgcagttcgagcaaaggcacagggtaagaatgttggcatccctcaatgtgaaggagccgctaccatgaaatctccttgggatgctactg

SEQ ID NO: 393 - DNA, 613 bp, Gossypium hirsutum
  Clone ID: LIB3825-006-Q1-K6-B4
ctcttcgattctttcctttcctttccctccatttctctccaattttcctttctctttccctctctttctcaggtccttgcaaatggcggaagcttctaaagtcattcatgttcgcaacgttggccatgaaatttctgaaatgatttgcttcaacttttccagccatttggagtgataacaaagcttgtaatgctccgtgcaaagaatcaggctcttctccaaatgcaagatattccttcagccatcaatgcaatgcagttctacactaatgttcaaccaactatcagggggaggaatgtgtatgttcaattctcatcacatcaagaactgacaaccatggatcagaatgctcaaggacgaggtgatgagccgaatcgaatcctcctggtcacaatccatcatatgctttatcctattactgtggaagtgctacaccaggttttctcacctcatggatttgtggagaagattgtcacatttcagaagtcggctggctttcaagccctgatccagtatcaaggacgccagaatgctatctcagctagaacttctcttcagggccgtaatatttatgatggctgctgccagcttgatatacagttttcaaaccttg

SEQ ID NO: 394 - DNA, 173 bp, Gossypium hirsutum
  unsure (1)..(173): unsure at all n locations; Clone ID: LIB3825-006-Q1-K6-B5
gcgngaaacgttaagttgttaaagttattatctgtttttccctagccagaaaaaatagggttagtatgttttttttgaagccaattttatggacttaatggcattgatggccatgatgtttttgcatttatgcttgatcctatactatgaacccagtgttgaagttttgtgat

SEQ ID NO: 395 - DNA, 381 bp, Gossypium hirsutum
  Clone ID: LIB3825-006-Q1-K6-B6
gagcatgcctttctgtatgtatacctcatcccatctaacagacacatttactatgcctaggatagggtataatctaaaaaattacagctacaagctgaacagagcaaagtcactgcctcttctggtgatataccttgatcttattaaaaggaggacagatggttcttacagggaattataatccaagactagtagagtgtatcaactggagaaactatatatggaaatgtcactgaagaatgaattacaataaaaagggtcggaagcggaaactccgagaagacgagttagtatgttcaacctccaagctagcggataaatggagatcagaaagaaagaggggacaaagatggttgagttggtgatagaggcaatttggct

SEQ ID NO: 396 - DNA, 612 bp, Gossypium hirsutum
  unsure (1)..(612): unsure at all n locations; Clone ID: LIB3825-006-Q1-K6-C1
ttcagnagcagtagcctacatcaagnaactaagatcaaaaatcgataaactagaggctcaactcctagtacaantctgaaaaatccaagttgaaccccatcaatgttttcgaaaaccaaactaccaaatccgcattcgacaataccatgaaacaatcctctacttattggccaaagacagtggaagttgatgtgaagatagtaggatccgaagctatgattcgggttcgaagtccagatatcgatcatccagctgcacgattgatggatgcacttcgagacctagagctaccagttcaccatgccagtgtatcaaacgtcaatgatcttatgctacaggatgttgttgtcagagtccctactggaatattcataaccgacgagatgcttagtactgcaatccttcagagatgcacgttgaattaggtagctagctaggtagccctgcagtgagatgcactttttttcttttttgccttcttttgtttttttgtttgatcaatgtttcttgttttattcgtgcattagttctttaacatttcctatatatgttctacgtatagataggtttcaattacgacctgcttttatcagatttcatcatttcattggc

SEQ ID NO: 397 - DNA, 612 bp, Gossypium hirsutum
  Clone ID: LIB3825-006-Q1-K6-C2
cccttaactgctgatttttctttgcagcctttgcagtttttggaagaaccatttcagccttgaccttccttccaacttcgattccaatgaagcaaagagaagatccttggcctactcgcacgatattgctcccttcctttgtttttctttattttttttttaaaaacgcaataatgatgtattctaaaaaacaaattgaaaaagaaactcgaatcggaaaccaccttgaactttgattgatttcctttgtttgattaatatgcgtagtgtgcgtgcgtatgcatacagtatgggtaaaaaattaaggtccaaataatggctttttatagccagatttacagaataaatgaaaaataaaaattatatttttcttctgtcatttggctgtatattctgttactctttcttctcgtgtgttctttgcaggaatggccgtacggaggagcggggaaaggggtgcgtgaaagaggccgtgcgaggaaaccgttcgtgggagcccgaccccttggcactgttctgggacgttccagaagattctagtgctcgcaagctgctgagataatttttgggtgtattgggcctcgggttttagggcttatttaattgggtcat

SEQ ID NO: 398 - DNA, 567 bp, Gossypium hirsutum
  unsure (1)..(567): unsure at all n locations; Clone ID: LIB3825-006-Q1-K6-C3
gngaagcctgctttaacaaagctttttacttcccgaatctcctgcacgccttccatcatttcacacatgcgttggtgctaatgaggaaaggttaactcctaaatggtacaaggaacatgggattgaattagtccttggaactcgagttaagtctgttgatgtcagacgtaagaagctattgacagcaactggagagacgataagttacaagatccttctcattgccacaggagctcgggctttgaagcttgaagaatttggagtggatggatcagaagctgaaaatgtatgttacttacgagatttagcagatgcaaacggtcttgttaatgtgatgcaatcttgttccagtggaaacgctgtagtaattggtggtgggtacattggaatggaatgcgcggcatctttggcaatcaataaaataaatgtaaccttggtttttcccgaagtacattatggctcgtttgtttacaccgaagattgcaagctactatgaggaatattatcaatctaaaggagttaagttcgtcaaaggaactgtcttgacgtcgtttgaatttgattcta

SEQ ID NO: 399 - DNA, 601 bp, Gossypium hirsutum
  Clone ID: LIB3825-006-Q1-K6-C5
gtttagtgctacaatgcctccagctgtggagcgcctagctaggaagtatttgaggaatcctgctgtggtcactattggtactgctggaaaggctactgatttaatttctcaacatgtgataataatgaaggaatcagataagtttccaagattgcagaaattgcttgatgatcttggggacaagacagcaatcgtgtttgtcaatactaagaagaatgctgatgctatttctaagaatctggataaggctggttataaggtaacaactttgcaaggtggaagatcgcaggagcagagggaaattagccttgacggttttagggccaagagattcaatgttcttgttgctacagatgttgcagggcgtgggattgatattcctgatgtggctaacgtcattaactatgatatggcgaatagtattgaaatgtacacacatcatattggaagaacagaacgtgcaggcaaaactggtgtggccacaacatttttgactctccatgacactgatgtcttctttgatcttaagcggatgcttgttcaaagtggcagccctgtccctcctgagctggcaaagcatgaagcttctaagtttaaacca

SEQ ID NO: 400 - DNA, 569 bp, Gossypium hirsutum
  unsure (1)..(569): unsure at all n locations; Clone ID: LIB3825-006-Q1-K6-C6
ctttgattccgccaagnatagttggnaaaaaactcaaccatccgtctctactattgcgtgatcataaccgcgactccatcccggttgcagcgtccggtgatctcgtttgttttagaaacatatctggcggttacatcgtatgcaatcccgtgactggatcttgtcgcgaactgcctcccgtggatccgggtcagtcccttcttgctattgcaatgaatgcatattccaactaccatggttcatacaagctagtgttggtctctggtgattttccaaaactttcgtttaaagtttataactcgattaccgattgctgggaagaagagattatgttgaggagaaatgccgatgattgtaccaaatccaacgacaacgacgaggatgccgtttacttccttagtacagccggaaacgtagtggtaaccaacatgcaaagaagcccttccaagcaatattcatcagtgtttacacttaaagatggtgaagagattgtttatttcctcacctcctcaggcagagtaatcgcttgcaatcttacccgaaagtgtttctccgaatacccaagactg

SEQ ID NO: 401 - DNA, 621 bp, Gossypium hirsutum
  Clone ID: LIB3825-006-Q1-K6-D1
tttgatttcttatagaaattgaagatagcgcaatcagggtatgatattaataatctgtttcgggaagctcaatctcggtggttgaagccagctgaagtactgtttatactacaaaaccatgagaagtatcagcttgagcaagagccccctcacaagccaacaagtggctcattgtttcttttcaacaagagggttcttcggttctttcgtaaagatggccatagttggcgtaagaagaaggatggaagaactgtcggggaagcccacgaaaggcttaaggttggtaatgttgaaaccttgaattgttactatgctcatggagagcagaaccccagttttcagagacgtagctactggatgctggacccggcatacgagcatattgttcttgttcattatagagagataaatgaggctaagccctgttctgcatccactgtgcactcaccattatccaattctgctagtactccaagtccaatctcatatacttctcaaaatcctggatttaactctctatctagtgatgtacatgaatcatatcagaacttacctagtcctgggtctgctgaagttagctctgatatagtcattaagaacaatgggatagataatacagta

SEQ ID NO: 402 - DNA, 193 bp, Gossypium hirsutum
  unsure (1)..(193): unsure at all n locations; Clone ID: LIB3825-006-Q1-K6-D2
gaaaaagggnaccctnatgagnaaananaggcgnagggaaaggaagnaanagagacaagaagatgcagnagctgnagggaaacaagaggcccgccatcataacgccacggctggccatgctggtggtggtggtattggtggtactggctacaccacagctgggtacaacagaggggatactggtggctatggc

SEQ ID NO: 403 - DNA, 404 bp, Gossypium hirsutum
  Clone ID: LIB3825-006-Q1-K6-D3
ataactataacattaaaaggggaaatattaataataattaataaaaaaaaaaaataaaaaaaaaaaaaaaaaaaaaaaaaaaaaaaaaaaagaaaaaaaaaaaaaaaaaaaaaaaaaaaaaaaaaaaaaagggcgaccaaaaaaaaaggaaccaaaataaacgaccccaaacaagcaaaaaagggggccgggggtgggggggcccccggaattccattccccccggccgcggccctgccaacgtttgtgtctggggtacacccggccgtaccccaattccgtggcctcgcggcgccccccccggtccccgcggggggtcaccccggcgggccccctgcggatcgccccccccccccgtttcgcttcctgaggggcgagggggacgccccccccccccgcccctt

SEQ ID NO: 404 - DNA, 603 bp, Gossypium hirsutum
  Clone ID: LIB3825-006-Q1-K6-D5
cggccgcgtggggaaaatttagccaaactttcttccatcttgcgaaactcaaatctgagaggagtaaaggaagaaacttgaaagctctaaacataatcatggagattcgcaagaaccttctccaaaatcagagcataccccaaaaactcacttattctggaaccaaatcgttcgatccataatagccatcttcttcatcaattcgagaacgccatcaatccggatgcacgagacttgccgtcttttttcttccaaaacaagagtaggaaccgccctgttaatctcccgaggaaaaaagatgtcttaagtttttttattacaatcagagagtccccctccaagataattcgacgaaaacccatgtcgactgcaaaaaagataagccttccacaagctcgtgcttcagccacaaaagacgacattttcaacaacgtaagtacttgcccctacaacttcacacttgtagtctctagccaaaactgcagcaatagaagttctagagtccctttgaaaaggcgcatcaaagtttattttgataaacccattattaggtggtttccgtaacttttctgtcattgaactggaaaaactctttatattctc

SEQ ID NO: 405 - DNA, 545 bp, Gossypium hirsutum
  Clone ID: LIB3825-006-Q1-K6-E1
ccccgcgtccggtgtgtttttagttactatccatttccctccagattatcctttcaagcctcctaagttgcgtttaggaccaaggtcttccatcccaacatcaacagcaatggaagcatttgtcttgatatcctcaaagaacaatggagccctgcactaaccatttccaaggttctgctctcaatctgctcgttgctgaccgatccaaaccctgatgaccctcttgttccggagattgctcacatgtataagaccgatcgggccaagtatgaagccactgctcgtagctggacccagaagtatgccatgggatgacagtggttggtgtgtaatacctatcagctttcttatgtgttttggggaaggaaggaggtgttttttcttaaagtaacttgccattgtgctttggatatgggaaagatatggaacattctttttatttatttcgtgctttataacttgtgtgaaacccttgtttcgttcaatttcaaagtcgctgtgaaaccctttgtttcgttcaatgtaacaaaaaagtctttagttct

SEQ ID NO: 406 - DNA, 521 bp, Gossypium hirsutum
  Clone ID: LIB3825-006-Q1-K6-E2
ccgatggcaacccctttttccccaatctgctagggcttgcaccctattttggtgcaccaaaatggagggtcatcggcaccctcatgccgttgcctccggtgcctatccacggcgaacccaggtaagtctcctttcctccgattttacttttattttttaaaaaaaaacagtttataaatggaaaacattaaacgaaaatcagaaaagaaacaggaaaaaaaaacacctctttaacctttaatctgacttttgttgatgactattgcttgtgtattctctgctgtgggtaaaaaaatcgggaaaaaaaccatcacttttacatttgttttgtttccattttatagccgacttttacaacttattctacatgtttgtaggagcacgtctctaatgtggaggtggagtggcatacaacacggaggaagtgcgtgacgtgcggaagagggactgcttcaatttgttgaaacggcacaaaatgactgatagggtttcctttactgaagatgtgctgggtttgtggg

SEQ ID NO: 407 - DNA, 556 bp, Gossypium hirsutum
  Clone ID: LIB3825-006-Q1-K6-E3
tgatctcactgctggttacttctcaaactgtctactgatgaagttaaagcctatgttcccgatgtgcttaatcagttccagacaataattcagtatatatataaccaaggagggagatacttttggatacacaatacaggtcctgttgggtgtttaccatatgtaatggagcgtatcccggtcttagcaggtcaaattgatgactatggatgcgcctctccattcaatgaagttgctcagtttttcaaccgtggattgaaaaagattgtggaacagttacgcaaaaatttgccccatgctgcaatcacttacgttgatgtctactcagtgaaatactccctaattagccaaggtagcaagcatgggttcaagcaccctcttagaacatgctgtggccatggtgggaagtacaattataacaagaacttggggtgtggagcaaaggttaacaaacatgggaaagaagtgttggtgggagctccttgcaaagatccttggacttacgtaaactgggacggggttcattttactgaagctgctaataagtacatatttg

SEQ ID NO: 408 - DNA, 605 bp, Gossypium hirsutum
  Clone ID: LIB3825-006-Q1-K6-E4
caactattgtttgtaataaagttcggataggggaccaacgaatcgtacgcatcaaagagggagatgctacagggcggcatgtggtgattgttgatgatttggttcaatcaggtggcactctgattgaatgccagaaagtattagcagccagtggagcaacaaaaataagtgcatatgtgacgcatggaattttccctaaaagctcgtggcaacgctttgaacatgataatggagggcaacttgagaaagggctaacctatttctggatcactgattcatgccctcacacagtgaaagaggtaaagtgcaaacgtccatttgaaattcttagcctttctggttccattgcagctgctcttcaggtataaaagtaaccctttcaaagttactaataaatcatttcattacattttttgagtgaatttaagttgttttgtttattgaaaaaaaatgtaatgagattagaaccctccttcggcagcagaattttctatttaggttattcggttttttttttctttcgatttttgggtatgttactcggagttggatgttgatgttgagtacggatatatcttatttagttatgttcaaatttatttttc

SEQ ID NO: 409 - DNA, 564 bp, Gossypium hirsutum
  Clone ID: LIB3825-006-Q1-K6-E6
ttgcttatttctggcactccttgacttttctcttagcctcatccatagcattattgaaaccatcaacatctactatcaaacctctttcctctgccatcaactgagttaaatctaatggaaacccatatgtgtcccacaagataaaagcatcctgcccacttaatatcctcccttgaacatcctgggctgccttcttaaatttctcgattcccttcaccaaagtcttgccaaagctcgcttcttctgcagcaattatgtccccaattcgtgcctcatgctgctttagctctgggaaaacatcacccatggcttccaccacaatccttacaagcctgctgaaaaaaccctcaggagctttcaagacctcactgccatagcgaacagcacggcgaagaatacgtcttaagacatattcacgtccctcattgcctggagaagcaccatcagcaatggcaaaagacaaagttctaatatgatcagcaacaaccctatatgccatgtcaactttgtcagtatcatcaggcccaacttttccagaatatgagcgtgcccctgtgacctgtt

SEQ ID NO: 410 - DNA, 262 bp, Gossypium hirsutum
  Clone ID: LIB3825-006-Q1-K6-F1
tttttcgcgcgaccgtaagcttttcgtcatcacatcaccatgagagtccaagtggaagaagaagcgtatgagaagattgaagagaagcgccgaaagagaggcagagatccaagtagacagtgaaatctgtgggttctgttttagtttttggtttactttcttatttcgatcttttgaatcggtgttaatccagcagtggatggtttttagatttttaaattgttgagaacagtttactgatttctatagaatgggtattttt

SEQ ID NO: 411 - DNA, 611 bp, Gossypium hirsutum
  Clone ID: LIB3825-006-Q1-K6-F2
cggacttaggttcggtgtggacttcttttgatttagataagaacgacatatctccccttctcagtttttacattttagttctctcccgaaatctctcactcaaaaccaaaaaacaaaaacagagcatccactctttttttcttgagtttcctttgtaaattagttcaagctggcgattgaaaataaagaaaccactgttcgtgaaatcaagcccaagaacagaagaataatgggagctggtgggcctgatgaagaagataataggtggccgccatggttgaaacctttactgaaagaacagttctttgttcagtgtaaacatcatgttgattttcacaagagtgaatgcaatatgttctgcttagattgcgttaatggcgctctctgttctttctgcttagcgtatcacaaggatcatcgttatatccagataaggaggtcttcataccacgatgtgataagagtatctgagatacaaaaatacctagacatatctggagtccaaacttatataatcaacagtgctaagatcgtttttcttaatgaaaggccacaacccaggcctggaaaaggtgttaccaacacttgtgaggtctgtgatcgcagccttg

SEQ ID NO: 412 - DNA, 504 bp, Gossypium hirsutum
  Clone ID: LIB3825-006-Q1-K6-F3
catttctttcatctttctttttctctctcccttcccccttcccccctcctcccgctctctctctctctctctctctctccaaaaggctacagaaaattgtttttatttatttatatttgtatgaaaaaaaccccaaaatttcccctcatttcttgcccagtttataaagagaaatctttgttttaacaggcaaaaggaagaaaataaaggataacataaacacaaaataaatttattcctttttttattacaatttttaatcttttgagtatgaatggtcttttacatcttgaagaaccagattgttctgagtttgttgaagttgatccaactggaagatatggcagatacaatgaaatccttggaaaaggagcttcaaagacagtttatagagcattcgatgagtatgaagggattgaagttgcttggaaccaagtcaaactttatgattttcttcaaagccctgaagatcttgaaagactttatttgtgagatttatcccct

SEQ ID NO: 413 - DNA, 583 bp, Gossypium hirsutum
  unsure (1)..(583): unsure at all n locations; Clone ID: LIB3825-006-Q1-K6-F5
ccccgcgtccgcaagttattggtttgcacatgtgtgngagaagattcagctgaaattgcgcagggatttgcagttgctgtcaaagctggcttgactaaagcagactttgatgccactgtgggtattcatccaacatcagctgaggagttgtcacaatgcggtctcctactaggaaaatacgacagagctctgagtctcagggaaacatgggtcatgaggcaaaaactgcagcaggggtttagctagagtaattgaataggttgcgttttgttggagttccttttaaggttgatgctgattgtaacctctattacgatgcaaacaagctggttggtggaaaaaatggttctgacacgaaatttcccctttgcatcctagtcaaaacatgcatgccatgccatacatcataattccaacttcttacacatcatggtagtaagaaagtaaaattatttgcatcttcttcgatcagttcacattttactgtaaaaaatgctgttagatcacatttaacctatagccgttgcctatatttggtctaaaatgtttttggatcattgatgttaaaataaacagtgttaat

SEQ ID NO: 414 - DNA, 575 bp, Gossypium hirsutum
  Clone ID: LIB3825-006-Q1-K6-F6
gttgccgggcagaacctggcctctggagctcctggtggtttagagcagattaagaaaaattgttgggtgagaatccaatagacttgttcacttatcagaggatgggagctcatttcttctcgccggagcattttccttcattcactgagtttgtccgaagcctgagtcaacctgaattacatccagacgatttaccctcggatgaggcagaagctactgaatctgtacaaacgagttcggatccaaacatccacttgcagacagcttagcaagaggtagcttgacacatcagagctcaacatcacaagttggatgccattgctgatgtttaagcaattctagtctcaaagctgctgaggcagatagcaaaggcttggaatgccgagatcggataccgataatccatggtaaataaatccttacccactttcccaaactggaggatgatcttctcatgttctggtcctgccggttcgttctctggtgaagccaccaactgaaagtttttcactgaagcaattgtgactcgtccatggaagttcaagcaccaacactggaagttgctcatgccacct

SEQ ID NO: 415 - DNA, 317 bp, Gossypium hirsutum
  Clone ID: LIB3825-006-Q1-K6-G1
caggagcgtgggccgaggcttccatatcttgttggagagattcttggtcagttgctgcataacgccgcataatatcgatagatatgataaaagcaaaaagtgaagattgacattattggtcaaggattggaaatctagactcagcatggaagtatgatcatggagccttattcctggcaatacaatgtaagtactctaaacatttacgggcaatgaactgcatggcgttaactatcgactaagtaaatgttattgaaccttgttttgtttactatggaaatgactgtacctcttaatgccatttaagtacatacttg

SEQ ID NO: 416 - DNA, 606 bp, Gossypium hirsutum
  Clone ID: LIB3825-006-Q1-K6-G2
cccagcgtccgaaagatccagctccctcctccactgcgcttcgatagtttcgatttagaaagttcttttccgacagcaagcatacctgacgtagaaaacccaaagccaaagcgagggaaaggagaagacgtagaagacgttgaaagaagaatagagattatgacgttggctctctcttcggcaacgtctgcttcttatttcatcactcgtcataatgcaaagccttctccggttatcaaaacgaccttcatgactctgaaaccagcgtcgtttccttcccctttaaccgccgtcattgtgtctgccggggcgcggaggatcgtttcttgccaagctgtctccaccgcttccctcgacaaggacgagaaaaacgcgtcggcttcggggtccgccgaagccgacgaggaagctaaagtaggggccaaggttaaggtgaaggtaccgctcaaagtgtatcacgtcgttcgcgagccggagttggatctgattggtatggaaggagtgattaagcagtacgtcggaatctggaaagggaaaccgatttcagctaatcttccttacaaggtggagtttcttaaggaaattgaaggccgaggacctgtcaag

SEQ ID NO: 417 - DNA, 575 bp, Gossypium hirsutum
  Clone ID: LIB3825-006-Q1-K6-G3
gctttgttgagactttgaactgagcttcgctgaattttcgtgatcgtcgagaaagaaatgatgggaaggaaattcttcgtcggcggaaattggaaatgcaatggaaccactgaggaagtgaataagattgtgagtactttgaatgctggagaggtgccttctccggatgttgttgaggttgtggttagccctccatttttgttccttcctttggtaaaaacttcactgagacctgagttccaagtcgctgcacaaaattgttgggtcaagaaaggaggtgctttcactggtgaagttagtgcggagatgcttgtcaatttgagcattccttgggttattattggtcattctgagaggagacttattttgatggagtcaaatgagttcgttgcggataaggttgcttatgcactttctcaaggcttgaaggtgatagcttgtattggggaaacacttgagcaacgtgaagcaggatctactgtggcggttgttgctgaacaaactaaagcaattgcagcaaaaatatcagactggactaatgtcgttttggcatatgagcctgtgtgggctattgg

SEQ ID NO: 418 - DNA, 606 bp, Gossypium hirsutum
  Clone ID: LIB3825-006-Q1-K6-G5
atgattcagcagaatcaacaagtgaattctgatccttccagcaaatctcaagctgagccagcccaagctgaccaacagcccatgagtaatgcttcacttatgggtacagccacaacaatggcaatgcctcaagctgccattgattcagctgacaatgtatcggttgtttctccctctgttggccctcagtggaaaccatcagaatcagtgtgtgatctgggtttgccaaatgtggccactcaagtgggatccatggggagccctcctcatccaaattctgctcgtagtgattcgctaccttctgtcagccaagtgttagggaagagacaattatcaggtagtctaccctctaatgggagtactgatggggcacagtggccacaacagccacagatacaacaatcttccacattgccaccatctcaacaaccttaccagcagttacaaaatcagcatagtttgctgccacaacagcagccattgcaacagcagtcgcaacagcaaactctgcatctacaaacagtacagggcagcttgtattacaggccttctaattctaagctggaatgaagcaattagtggttggagcagttccaacagcaatgg

SEQ ID NO: 419 - DNA, 573 bp, Gossypium hirsutum
  Clone ID: LIB3825-006-Q1-K6-G6
gttaaccgcacgaaaccttctgcaaacaaagaacgcacttcgtaacaaaaccctaatccccaaatagaatgatgttttccctaattcactctccatgaccaccactatcggcccaccttttatactcacccgccgttgatttttgcctgcgtctccggcagtcgccttttgcaggttgtggcttctgttgaaaggttggattttgaaggtctctactgtttgtcattgttgctcagccttcagtagcaacaatgggcagttcatttaatgctcaaatcttggtggaaaagctagccaagcttaataactcacaagcgagcatagagagtatcctttcagaaaataattgcagattctgtgcttctttggctatttaggacggcaaaacaagttgttgaaacttgggacagacaatttcattgctccccacgcgagcagagattggcctttctgtatcttgccaatgatattttgcagaatagcaggcgtaagggttcggaatttgttggtgaattttggaaggttcttcctaatgctcttcgtgatgtgattgaaaatggagacgagtttggc

SEQ ID NO: 420 - DNA, 568 bp, Gossypium hirsutum
  Clone ID: LIB3825-006-Q1-K6-H1
ggccgggccctgttctgattgatgttcctaaggatatacaacagcaacttgctgttcctaaatggaaccattctcttagattgccagggtatttgtctaggttgcctaaggctcccggtgaggctcatctcgaacagattgttagattggtttctgagtctaagaagcctgttttatatgttggtggtgggtgtttgaactctagtgaggagttgaagaggtttgttgagcttacagggatacctgttgcaagtactttgatgggtcttggagcctttccgatttcggatgacttgtcgttacaaatgcttgggatgcacggaactgtgtatgccaattatgctgttgataagagtgatttgttgcttgcttttggagtgagatttgatgatagggtgacgggaaaacttgaggcttttgccagccgggcaaagattgtgcatatcgatatcgattctgccgagattgggaagaacaagcagcctcatgtgtcagtgtgttccgatgtgaaattggcattgcaggggataaataagatattggagaccaaggtagcaaagctgaatct

SEQ ID NO: 421 - DNA, 477 bp, Gossypium hirsutum
  Clone ID: LIB3825-006-Q1-K6-H2
cggacgcgtgggggccactgcagaaaaatctttattgggcttgtagttcttggtttttccttttggttcgatattcgaagtccttaacctaaattctcatataaaacactagagaaaaacgaatgggttggaacggagaaagacgaagatatgtggtcacatttctttatcagtcttgttagcgttgctggcggtggtgcaaacgacggcgttccaaggggttaaactgaataagaatgagcatctggaacgcgtacgcgacgatgatgtacatggggacgcccacagattacaagttctacgtcgcgacacgtgtcttgattagatcccttgttaagctccaagtggacgctgatctcatcgatattgccttcctcgacgttaccctccgttgggttcgtgcactaagaagattgagcaaatgtactgaaggtggacaaccttaatatcccttacaaaggtcacagaaaatttcga

SEQ ID NO: 422 - DNA, 588 bp, Gossypium hirsutum
  unsure (1)..(588): unsure at all n locations; Clone ID: LIB3825-006-Q1-K6-H3
aaaaaaactaaaannaaatcctctgaagttcctcagccctctgagctccggcccttggccggtttgctccgttcatcgggcctccgtgcccaccctcacacgccgtcaccgactccgccatacatgacggtcggtattctgaaaaacttcgtttttcttagccaatctaaaagctatatttctttcctctattttgatgtattatatgcaaactgtttgtaataaaataatgaaatagaagtagaaacgacagatcacctttgcttctctcgaaaaccttctgatatattattcaagaatattcagtgtacaatatcttttgtggtgtatttatctcttttgtgtattctctctgtttctatctatgtatgcttttctctctgtctctctgctattgtccccccttctttacagatttgcgaaaggctttatagccttaaactactgcctattttggaaagaaatcggaagatttcttgtcttctttgatttctttccttttcttgctctgccttttttgtgtatctgctgcttgtttcctttttttgcaggtgacctcgcgaagatttcggtggctgggcttgctgt

SEQ ID NO: 423 - DNA, 612 bp, Gossypium hirsutum
  Clone ID: LIB3825-006-Q1-K6-H4
gtcgccggtcaccatcagctgatcgcctcctcttccagcaatggcggaagctcaaacagaaactccgccttccctatctgagcaatattcactgaaggagaaagcggagaaatcagatgtggctacaaaagtagctgacgcagaagaggtcgaaaattcagcgagtacttcttccaaggaagtggtgaccgaggaagttgagactcctgctcctcttgtggaaagtactgaggttcctcctgctgttgctgaagaaaacaccgaagccaatcctgttgctgagaacagtgttgaagatgctcaagttgctgcggaagaaagtaatgaacgtaccaaagagagctcaggtgatgctgaagaaacaccggagataaagcttgagactgctcctgcagattttcgcttcccaactacaaaccaaacaaggcattgcttcacccgatatatcgagtaccatcgttgtgtagctgcaaaaggagaagatgcttcagagtgtgacaagtttgccaagtactatcgtgccctatgtccgggagaatggatagatcgatggaacgagcaaagggagaacggtacttttccaggtcctctgtaaggtggtacatttcggga

SEQ ID NO: 424 - DNA, 603 bp, Gossypium hirsutum
  unsure (1)..(603): unsure at all n locations; Clone ID: LIB3825-006-Q1-K6-H5
cggccgcgtggngtcctaattaagtaggtgccgactgctccgttctttgtagcaaagcaaagtttgtgaagcatggccccgtcgggaagaacaagaggatttccanagggaaagaagggaggaaagaagaaggcgtgaagcggatccttttgctaagaaggattggtacgatatcaaggctccttcagttttcactaccagaatgtggggaaaactctcgtctcccgtactcagggtaccaagattgcttctgaaggactcaaacaccgtgtgtttgaggttttccttgctgatcttcaaggtggtgatgaggatcatgcttacagaaagattcgtttgagagctgaagatgttcaaggaaaaaatgttttgaccaacttttggggaatgaattttacaactgacaggctgaggtctttggtccgtaaatggcaaaccctgattgaagctcatgttgatgtgaagacaactgacaattacactttgagattgttctgcattggattcactaagagacgcccgaaccaggttaaaaggacttgttatgctcagtccagccagattagacagatacgccgaaagatgagggaaataatgacttcc

SEQ ID NO: 425 - DNA, 527 bp, Gossypium hirsutum
  Clone ID: LIB3825-006-Q1-K6-H6
aaaagggggtcgacgccaagggagaaaaagcatccaaactataaggaaatagatgatgacaatggggaatactctgaagcaagttctgatgagagaaaggttattctgtacatgatgaagatggagaaactggagaatttgaagatgaagaatttagtggtgctgttggtgcaccccctctaaataaggaccagtctgaagaagatgccccactaggtgataatggaaatgagtatgcccaggcttcagaacacattagaaacaatcgcatacttgaagaaggtggttcttcaggatcatcattggacagtcgaaggccaacgcagatggtgtctcctgtttctcctcagaaatttggatctctctccgcattagatgctatgccaggttctgttgcaaaaaaactgcatgatgaacttgaggaaggtgaaattgctttatctggagattctcacatggaccaccagctatctgaaagttggattcatgatcgggtagaaggtgaagatgaacaagttgtccaacct

SEQ ID NO: 426 - DNA, 628 bp, Gossypium hirsutum
  Clone ID: LIB3825-007-Q1-K6-A10
ggctgatcggaaaaggttgagttggttcgtacggcgaggcggataaggaatgaggagctggtggtggtggttgggaatcatcaggtggagggtttagttgaagtggcgctgaagggtgtacttgcagggctagaaagggtgatgaaagcggccgattgtgtgagactcaaggccttgaaaggtgttttggatgttttgaatccatcacagtcactggatttcttggctgggatctgcatgcttcagattcagatcaggaaatggggccaaaacagggataaccaaaagggttcgaatccgataatattaggagaactacacaacaatgtcattttttaaggctccaacatcgagcatggccggcggcagacaaagtaggcagagctaaatgcatgcgccatactagcagtgttaatataggttcacatgtaaccagatgtaggtgattttactcgttacatcgaggttgaaatgttggtttttttttctttagagtctgtctggtttgtcagtctcacagctttaaattttgctccttctttttcgcatttttcaatttgcataaaacttgaacaacaaatatacatatatatatatgtatgtgtgggatctattgacacgttgttag

SEQ ID NO: 427 - DNA, 647 bp, Gossypium hirsutum
  Clone ID: LIB3825-007-Q1-K6-A12
gtgatgatctatcatcagtctgcgttgtagaagcaacgggctttcagtacgtacatatacgaggttgtagctttcgtcttttgttatcataaagataatataattgggcccctgtatacaacaaatgggactgtcgaaaatcttagtcaataaagttaagtcgaatggccttgagtatatatccaggcttgtggaacggccatgcggtaatagacacataggaaacgggcaaccacaatcttaaacactagaagcgaaacagcgtaacatggttacatggggacgtcgacagtcgtgaatcgaaaattcaagcagcagaaaattctgaaaagaacactcaaacaaccctttccactacaaagcccatgtgaaaattctgctccggtcttaaaagttccttgatgttcctccatacaatgaatttcaaaagcaaataatgactgaggtcatacctgtaaaagacactacattgcattacgcagacattggtgcgttagaagagaccaaagaatcactgcaagatttagtgatgcttcctttttaaacggcagaccttttcaaaggtggtctactaaagccttgcaagagaatattgttgtttggtactgcaagcactggaaagacatgttagcaaatgccattgctaa

SEQ ID NO: 428 - DNA, 607 bp, Gossypium hirsutum
  Clone ID: LIB3825-007-Q1-K6-A2
ctatctcttagggttacgcaattcggggataggaaagaaggtagtcttagcccaagttgctcagttgattttacagaataaactgaaataagcaaatccattatgattagactcatattgtctatgtgttgagttgagttgggttgggttgaagaggttggcgcgcgagttcgcttcctgtcttcctgtttcggcctttggcgttccaattcctgacgttaacaattttccaggtgcatgccgcagattgcagaagaggagataggctgaaccgccatagttgattgctggtagttataagttctaaagagaggccaggccaggccatgcctttcaaattccaattccctttattcgcttatgtcatggagggtggaaatggaaatgatccttgtgaaagttcagtattacagaaagatatttatcaagggattgatgatgatgttaaactgaattctaaagatcagagagatgctctggcggatgaacctaaatgtgttatttgcgggcgctatggcgagtatgtatgtgatgagacagatgatgatatttgcagcttggaatgtaaacaagccatactcctcagggttgctaactcattgccaga

SEQ ID NO: 429 - DNA, 338 bp, Gossypium hirsutum
  Clone ID: LIB3825-007-Q1-K6-A3
ctcagtcgtgggctattgaggcgatgccaacttttgtgtttctgaaaggaggcaccataattgacaagcttgtgggtgcaaggaaagatgaattgcagcagaaaattgccttccattcatctacctcggtgcagacagcatgaatcaacatttaaatgtacttgatgtctggagttgtttatgaaactaggatcttatgaatgtctgacagacactaaataatgtgtggttgtatttatatttggctactctctctgcctgttgtccttgtttctatttcagatcttatcttatatttaaattagtgtatgctttctataagttatctatgtttttat

SEQ ID NO: 430 - DNA, 632 bp, Gossypium hirsutum
  Clone ID: LIB3825-007-Q1-K6-A4
caccaagtaaaagcctcaccacaagcctctcatcgaaatggcggctgccacttcgaactccgctttgcctaagctttctacgttaacttcgtccttcaaatcttccatacccatttccaaatccagccttcccttctccacaacccctcaaaagcccaccccttaccgctccttcgacgtttcctgctctctttctcatgcaagctccaaccccagatccgctgccgcatccgttacccaaaaaactgctcctccccattatttcatttccaggtatgcggatgatgagccccggaaaggcgctgatatcctggtggaagccctggaacgtgaaggggtcaaggatgtgtttgcctacccaggtggagcttcaatggagatccaccaggctttaacccgctcaaaaatcatccgaaatgtccttccgcgacacgagcaaggtggggtctttgccgccgagggttacgcgcgctcctctggcatttccggcgtttgcattgcgacgtctggccctggggcaaccaacttggtgagtggtctcgctgatgcgatgctcgatagtatccctctcgtggcgatcactggtcaagtccctcgtcggatgatcggtaccgatgctttccaggaaactc

SEQ ID NO: 431 - DNA, 601 bp, Gossypium hirsutum
  Clone ID: LIB3825-007-Q1-K6-A5
gtttagaagttcatttaatcgttggactcacagtataggtccattgccacctcaaagaatcttgcctgtagataatggctttcatgtaaaagctactgtcaaggttccattggatgcatatatgatggacttcgtattctctgagagggaagatggtggaatttttgacaacaatggtggtagggattaccatatacctgttgttggaggaatcgtgaaagagccaccaatgcacgttgtgcatattgctgttgagatggcccctattgcaaaggttggaggccttggagatatcgttactagtctctcccgtgctgttcaagatctgaaccacaatgtgaatatcgtttttccgaaatatgactgcttgaaatttgaacatgtgacagactttcattaccaaagatgttattcttggggtggcactgaaattgaagtttggttcggtaaagtggagggcctttcagtttactttctcgatccacaaaatggattcttctcgacagggtgtgtttatggtcgtggaaatgatgcacagaggtttggtttcttttgccatgctgctctcgaatttctacatcaaagcggatttcaccctgat

SEQ ID NO: 432 - DNA, 614 bp, Gossypium hirsutum
  unsure (1)..(614): unsure at all n locations; Clone ID: LIB3825-007-Q1-K6-A6
ggctgtccagtcaggacttgngactgctgcagtaattgtgatggataaatcaactgatattgtagatgcaatcgcaaggctttcatacttctacaagcacgagagttgtggacagtgcacaccctgcagggaagggactggatggctctggatgatcatggaaagattgaaagttgggaatgcaaagttggaagagattgacatgcttcaggaggtgaccaagcagattgaagggcacacaatttgcgctttgggtgatgcagcagcttggcctgtgcagggtcttatacggcattttaggccagagctggagagaaggattagagagcgtgcagaaagggagttgctggaggcttctgcttaatctctgctcagggaattacctgtgcaagtggccattatggaataaaattgaagtacccaaaacttggagaataggtgactctcaggcatctggtgttgtggaagtgttttatttgttatctcctaagctgttgtgttaacaacatttcactgttttagaaaataatgaatgtctccaatgtctgggctatacttgtttctcatagcatccacaacgttttcttttttggccatttgatgaacatggctaa

SEQ ID NO: 433 - DNA, 636 bp, Gossypium hirsutum
  Clone ID: LIB3825-007-Q1-K6-A7
agcagatgaaagtagcccaaggagagtgattgtgttgtacaagaaggggcgcagtttgcgagtaggttgactgggattaaagagaatgcaaagttcaaaaagaatgaccaaaacaacgaacagatctctggcctaaaacatgttgtagacgaggccaagcagcatcataatgtgaagaatgtgtatgtgtggcatgctttggctggctattggggtggagtcaaacctgcagctgctggtatggaacattatgatacagcattggcatatcctgttcagtccccaggtgtgatgggcaaccagccggatatagttatggacagccttgctgttcatggccttggtttggtgcatccgaagaaggttttcaacttctacaatgagcttcatgcctacctggcttcatgtggagttgatggtgtgaaggtcgatgtgcaaaacatcatcgagacacttggtgctggacacggtggtagagtatctcttacccgcagttacgttcaggcccttgaagcgtcaatttcccgaaacttcccggacaatggatgcatagcatgcatgtgccataacactgatggaatctacagcaccaagcagaccgctgttgttagagcttctgatgacttttatcctcgt

SEQ ID NO: 434 - DNA, 607 bp, Gossypium hirsutum
  unsure (1)..(607): unsure at all n locations; Clone ID: LIB3825-007-Q1-K6-A8
cccaaacgctctgctcttctccgtacccatttttctttacttccaaaanatcccatggccccaaagaaggacaaagcccctcctccttcatctaagccagccaagtctggaggtggaaagcagaagaaggtcatctttttattatatcttatgctatatatataatggggtcgatctctctgcttttcaaaagttaaatatgaagtgggggggtttttgttgttgtattaacagaagtggagtaagggaaagcaaaaggagaaggtgaacaacatggtactatttgaccaagctacctatgacaagcttctctcttgagctcctaaatacaagcttatcactccttcaatcctctctgatcgtatgaggattaacggatcacttgcaaggaaggcaatacgggagttgatggcaagagggttgattaggttggtctctgcgcattcaagccagcagatttacactagggcaacaaacacctagatctttagttatatttttgcaattagttctaagaagtattgccatggttgagttttgacttggataaatgatttttcccccctttaaatttggtttaaaacttctctttggctactttttgtag

SEQ ID NO: 435 - DNA, 617 bp, Gossypium hirsutum
  unsure (1)..(617): unsure at all n locations; Clone ID: LIB3825-007-Q1-K6-A9
attttggacggatcgcccaggnaaatgcttctgatgaaaccacccgcatatgcaatcattgtgacagggccataccttcttcaaatattgatttgcattatgctcattgctcccggaatctagaaaaatgtaatgtttgtggtgatatggttccaataaggcatgctaaggaacatttcttaaacacccatgctccggtggcttgctcattgtgcagtgcgacaatggaacgtggaaatctagatatacataaaggtgaaagttgcccccagaggattgttaattgtgagttttgtgagtttccgttgcctgctattgatctggctgagcatcaggaagtctgtgggaaccggacagagatgtgttatcaatgtaacagatacattagactgagagaaagatataaccatgcaagtaggtgcactggtattgcagaaaacaatgtggaatcttccaggaatgtgagggcccctgaaagggaacaaggtgctccgagaaggcagccacctgaatattcacggaaacgacttatattcaccattgcggtaaccggcattgctgttttattcggatcactttttttccaaaagaaggcggaggccagtcaggtgcattaa

SEQ ID NO: 436 - DNA, 605 bp, Gossypium hirsutum
  Clone ID: LIB3825-007-Q1-K6-B10
acatgtgctgctctttaaaagggcagttggaccctacctccgaagagagaaagtcctcaaaaccgaactaaggatggaaattctggagaggatttcaacaaggattcaattgagcgtgatgaaagacgtcttacggaattgggtcgcaggacggtggaaatatttgttctctctcatattttcagcaacaagattgaagttgcctatcaggaagctgttgctttaaaaaggcaagaagaactcatccgtgaagaagctgcctggctggcagaaagcgagcagaaggctaaacgaggagcatctgagaaggagaaaaaatcaaagaaaaaacaggctaagcaaaaacgaaataatcggaaaaacaaagagaaggggagggaggacaaggctattgtggcagcagagaggaagcatcaagaatatcaccccgatgatgaaaaggaagcccctgtgatggtggaggagcagccagtgcctgaaaaggctgatgttctgggtgatgtttctgactccgttgatgctgccactgaagttcttcagcctgactccgaagacagagatgctagtcctgttaactgggatacagatacctcagaaatccatcc

SEQ ID NO: 437 - DNA, 524 bp, Gossypium hirsutum
  Clone ID: LIB3825-007-Q1-K6-B11
cagacacttctttgcagtcacggggatcacaagaatgcttgtttcaactatggccatacaatctgtgtctctgtaccaatatgtggagtgaatcggccacgctggacacgcgaagaggttctacacagagtggatcataaagagtgaaatcaatgaaagactctggacctaaagcagaggcagactggtcagactttagccaaagaggctcactctgatgcatactttcacgccctgcatcttcacggactatcaagagcttgcagatcatgctgaaacatcataacagtgtggtcgaaacattgattggggcataccatatgataggacatatgggtgatgatactattgatgacccattgtctgataaatacaagaaaatatgatgctcaattgctacactggataaagattccaacgactacaacatgatcctcaattatctggaaaaaacttatgaacctgtcaagcttgcagacattcaatatcagatctctaatgagaacatcttcaatgtggaaact

SEQ ID NO: 438 - DNA, 616 bp, Gossypium hirsutum
  Clone ID: LIB3825-007-Q1-K6-B2
caacaataacaattacaaccaccacagcaacaaccatgataaccaccaccacaacaataaatcggcggcatcttcggagacagctcaggatagcaaaaaagagggtcatcttctgggagcggtgagatagctcctgcacccatggtttggccacctaaattcgtgattgctttaacaaataaagagaaagaagaagatttcatgacctttaaaggatctaaactgccacaaagaccaaaaaagcgatcaaaatttattcaacgtaccctcaatctggtaagtcctgggacatggctttgcgatttaaccctcgaacgttatgaagtcagggagaagaagatcacaaagaagagaccaagaggtttaaaggctatgggtaatatggaatctgactctgaatagaaagctgggaaggtgcagtttaaaggtatgattttttgggtatttgcaaatgtcgatgatgatgagattttccagagacagttgctctttatttttttaaaggatgagattagtctttaactgtataaatgatgatcttttcatatatgagaagaaggaaaagtttagattaagcaaaatatgtggtgtaagcaaatgaagagcttttcattta

SEQ ID NO: 439 - DNA, 618 bp, Gossypium hirsutum
  Clone ID: LIB3825-007-Q1-K6-B3
cagatcgaagagtggaatttagcaatgtcagggctggaatcaggttcaggttctcggtatgttcatcagctactcggaccagagcttcagctgcaaccccaactgagggacaccaggcactcaccggagaaagaaggaaccgatcatggcgataccaccacctgttctggtggtggagaaagaaggcctcgaggtcgtccagctggctccaagaataaacctaaaccaccgatcatcgtcactcgcgacagtccaaattcactaagatcccatgtgcttgaaatatcttctggttcggacatagttgactcagtagcaaactacgcacggcggcgcggtaggggtgtttgtgtgctcagtggaaccggggctgtcactaatgtcacattgcggcaaccggctgccccatccgggagtgtcataacactacatggacggttcgaggttttatctttaaccgtttatgataggttacctcttgacaaccaagaggaagagccagcagttcagcttcaaccagcagcttcacagacatctggagtgaccggcagtggtggtggagggcagttgggtgatggaggcaatggcaccaccagcaacagcggcggcgctactgga

SEQ ID NO: 440 - DNA, 459 bp, Gossypium hirsutum
  Clone ID: LIB3825-007-Q1-K6-B4
cttacatgcttatgtgtgctgtagctccatctgcttggtcattgccctgattttgattttcttcatcaattagctttggccacttaagattctttgactaacacctttagtcatttggaggttgcttatccatcaattttcacaactagttttaacctgtcagaggctatggtttaaccgaatgagccattttttccgagtctagcattgattcttcattcttccaatcatttctaggatgccacttaattgcctattttgtgactgggttttagctatgtttgagaaccttggattgatagtcacagtaatacatgacttgaaatgcatgcttgttggcaaagataacagtttgctgccactggtgccatcttgaaattttctagctagaagtgaagcaggaataatatcggattgggaggaattttgaaagggacttggttgtttttatctagttaa

SEQ ID NO: 441 - DNA, 613 bp, Gossypium hirsutum
  unsure (1)..(613): unsure at all n locations; Clone ID: LIB3825-007-Q1-K6-B5
ggggactgactcctggacaatggttgtgcaataacggattcccagcgacaacccttcatggtgctaggactcagcaggaaagggaactggcattaagatctttcaagacctggaaagaccccaattttggtagcaactgatgtggctgctcgtggtcttgatataccccatgtagctcatgtgatcaactttgatcttcccaatgatattgatgattatgtccatcggattggaaggacagggcgtgctggtaaatcaggattggctacagctttctttaatgagggcaatttgtccctggcgaggcctctagctgagctgatgcaagaagcaagtcaagaggtacctgcttggctcacccgttatgcatcccgagctccttatggaggtagcaaaggtcgacgatctgggggagggcgttttggtgggcgtgatttcagaagggaaagttcatttggtaagaatctggattactacggtggaggagggaatagtggtagtggatattggagttccttctagcaattatggtggaggatatgctcccggggtggcaagtgcttgggattaggtcacactntatactggattaactttttgcatgtttgtcttg

SEQ ID NO: 442 - DNA, 613 bp, Gossypium hirsutum
  unsure (1)..(613): unsure at all n locations; Clone ID: LIB3825-007-Q1-K6-B6
ngaaccacacaccataaaccaanacaaaacaaggcaatgatgcaatttagattggcaacagcatcatcaagatcgtatttggcagtgtttacagcccaaaaacaggttcagttccgaagatttgcctctggagcagccattaaaggaagaacagctgaccctactattcactctggagaacttgaagctggacctgatgttcacaggggtgaacctcagggtatagaaaatcatccagatgaccatggagagaaagaactcaaaccctgttccgaaacggatccggtaaaacaacccaagctgccgtataaatcttctccgaggctgaagatttcgccagtgaatcatcctttggaacccaacgttcaacaaaggcgtacggctactagcggtgcagcactggacgacgtaagctgcgtggggatggacggtacgcctttgccggagagcaaagaggaggaaaggggaaagagagaggaaacgatggatgacaaggagtattttaagcatcacaaggcttccccgttgtcggaggtagaggtggcggatactcggaagccgatcactagagcgactgacgggacagcatcggaaacggaacatagtaagggag

SEQ ID NO: 443 - DNA, 606 bp, Gossypium hirsutum
  Clone ID: LIB3825-007-Q1-K6-B7
cggccgcgtgggctttaccagctgcagcttctaatttgccaggttctcagttaccctgaagcactccccttttgctgccaccctttggtacaggcacactgaatttgcaatcttctggtcctccagcacagtcttctaatttagcttcggactcattaactagtttgaatcaagatagggcttcttctttaactcttcctactgcagctccaagtagtagcttgccactggtacctccatcaaatactgctttagataaaactgctgtcatgttgcccttttctgaaaaaactaagacagttcctgatcctgtaatgccattcaaaggcatgcctgattctgcttcctccaccattgggacaacaagttcagttttaaatgatgggatgcttccttcgttagtaaccccaggccagcttttacaaccaggactggtcccagcatctttgtctatgtcttcacaaacagctcagaaggatgtggaagttgttcatgtgtcatctccagaactgacaacatcagcccctgcactagcacctgtgcctgcaaaagcatcacaacctgtgttagcacaagcaccgcaatcattgtcagcacaagcagtgc

SEQ ID NO: 444 - DNA, 625 bp, Gossypium hirsutum
  Clone ID: LIB3825-007-Q1-K6-B8
ggtcgaacccaagccgtccgggcccgaactcttgccgaataaaatatcaaaggagtcaaccctccaactagtccttcgtctaaggggtggcatgcagatattcgtgaaaaactcttactggcaagacaatcaccctcgaggtggaaagttctgatacaattgataatgtcaaggccaagatccaagacaaggaagggatcccaccagaccaacagaggcttatctttgccggtaaacagcttgaagatggccgaactcttgcggattacaacatccagaaagagtctaccctccaccttgtccttcgtcttaggggtgggatgcagatctttgtaaaaacccttactggtaagaccatcacccttgaggtggagagctccgatactatcgataatgtcaaggccaagatccaagacaaggaagggattccaccagatcagcagaggttgatttttgccggaaaacaactcgaagatggtaggacacttgcagattacaacatccagaaagagtctaccctccaccttgtccttcgtcttaggggtgggatgcagatttttgtaaaaaccctcaccggaaaaactattacattggaggtggagagttctgatacgattgataatgt

SEQ ID NO: 445 - DNA, 639 bp, Gossypium hirsutum
  unsure (1)..(639): unsure at all n locations; Clone ID: LIB3825-007-Q1-K6-C10
cggacgcgtgagtaaanaacccagtcttctgatctctgccccaagcaaaaaattctcatcttttacaatcacagctactgcttatttattttcatggctcaaggagattctaacttccagcaagacatggctaaagaggaagaagaacagaggctgaaatacttggaattcgtgcaagtagccgccgttcacgccgctttgtgcttcaccaacctttacctttacgctaaggaaagatcggggccgttgaaacctagcgtcgagaccgttgagggaacggttaagtgcgtggttggaccggtttatgataaataccatgatgtccctgttgaattccttaaattcgttgattccaaggtgggtgaatcagtgaccaagcttgatcgtcgagtccctccagtcatcaaacaggtctcaaccgaagccatctctgcagcccaaaaggctcccgaggttgctcgtggcgtggcttccgaagtccaccgtgctggagtggtgaacaccgcctcaggattagcaaaatcagtgtataccaagtatgaacccacagcaaaacagctttatgcgaagtatgaacccaaagctgaacaatgtgcggtttcagcttggcgtaaactcaacaagctccctctcttccct

SEQ ID NO: 446 - DNA, 616 bp, Gossypium hirsutum
  unsure (1)..(616): unsure at all n locations; Clone ID: LIB3825-007-Q1-K6-C12
gccagggaagtgtcgtcgtcttttctcagctattgagatggctctctgctctctcaggttgagaaactagtcattcctgcaattgcntgaacttacacatacatggacttcagtttttggtttcagtcctatagaggaatcactcaagcaagatatgagatccatgaatatgctggttttccctggtatagatatgctgcagaagctacttctggagcaaggaaacacgaaaacaagcttgactgctgctacaggtaagaagcaaactgaatcaggatctacggaatgtatcacacctgaggtggctaacaaatttaaacccggttccttgtttgggcatgatactgaatctgcagctgcagattcagattcccagtgtccgaatgtttctatcaatgatacttgtgggactagtggttccttggacgcatcagtcgaacctaatgaatctgcgatgaacagtatacctgatgttaaccctagctcaatccacgatgccaacgagacagaaattaaggcaggattggattctccagcagaaaataatactcagtcttgtatggagggggacaaggcaactgagtctgcttcggaggacaaaaacatgcgacctcct

SEQ ID NO: 447 - DNA, 635 bp, Gossypium hirsutum
  Clone ID: LIB3825-007-Q1-K6-C2
ggtcggaatccgggtcgaccaagcgtccgggagctggttcagtaggcgtgagagccggaatcaaatccggcagcaaaatcctgaaaagaagatgaaacaacccttccggcaacgaaggccgagggtgaaaatcctgctccagcctcaaaattctggaagttcctccagacaatgaatttgaaaagcgaataaggcctgaggtcataccggcgaaagagatcgacgttacatttgcagacattggtgcgttagaagagaccaaagaatcactgcaggagttggtgatgcttcctctccgaaggccagaccttttcaaaggtggtctcctaaagccttgcaggggaatattgttgtttggtcctccgggcactggaaagacaatgttagcaaaggccattgctaaagaagctggtgcaagcttcattaatgtatccatgtctactattacttctaaatggttcggggaagatgagaagaatgtccgagctttgtttacattggcagccaaagtctcaccaactattatattcgttgatgaggtagatagcatgctagggcagaggactagagtcggagaacatgaagccatgcgaaaaataaaaaatgagtttatggctcactgggatggcctcttg

SEQ ID NO: 448 - DNA, 613 bp, Gossypium hirsutum
  unsure (1)..(613): unsure at all n locations; Clone ID: LIB3825-007-Q1-K6-C3
ctccgagtgaaggctcgtgtacactgagaaagttggatgtttcatgaagctggttctgattctgaatctccacaatctgtggngacatgngaaaatatcctggtaattcaggggttaatgtgattttgtcaacaaggtctccgggagttcaagcatctgtaaagcaagatgagcctgcaaatgtgttacaagagcaacctcgtgctactaatggaaccagtctcaagcaaactgtcatttctaacaacaacaccggtgcacctgctgccaaggcgcaggttgttggttggccaccaataagaccatttaggactaaaacgctggctgcttcttcaaagaacaatgatgaagttgatggaaagcccggtcctggtgctctttttgtcaaggtcagtatggacggagctccttatctgaggaaggtagatttgagaacttattctacatatcaggaactgtcttctgctcttgagaagatgttcagctgttttacccttggtcaatgtgggtctaatggtactgccgggaaggaaaccctgagtgagagccggttgaaggatcttttgcatggatcagaatatgtggtaacatacaaagataaagatggtgactg

SEQ ID NO: 449 - DNA, 638 bp, Gossypium hirsutum
  unsure (1)..(638): unsure at all n locations; Clone ID: LIB3825-007-Q1-K6-C4
ccgtccggcaaatataccccctaaaaaccctttcactaaaaattgaagatgcagtcaatgaaggatgctgctgcctctgctaaggccggcatggagaaggccaaggcctccatgcaggaaaaggtggaccaaatgaagacagggaccctaatgagaaagagatggcgagggaaaggaaagaagagagacaagaagatgcagagctgaggaaacaagaggcccgccatcataacgccacggctggccatgctggtggtggtggtattggtggtactggctacaccacagctgggtacaacagaggggatactggtggctatggcggtaccggtggacatgacaaccgtgggtaccccaccgcaggtagtgggtatgatacaggcaggcaagatgacctcagcagtatggggtttggcggagatacagggggtgcttacggtacaacgggaaaccaagacttcccaagtgcggcgcctaacaatgctgggactagaaggagcacccgcggaggtacccaggatgatccttattatcgatcctattaaatgaaaggagcgactttttgtgctctgctactgccttgagtctgtgtttgntgtttgtttgcttctactttttttctttttcaagttcgtact

SEQ ID NO: 450 - DNA, 587 bp, Gossypium hirsutum
  Clone ID: LIB3825-007-Q1-K6-C6
gccacgctgacgatggatgcggaaggagagcggtcgctcgtagggaaatcaagattactcacccggtacgagcagacggcagtaacatccgacgtagaagggactctaagcgcagtcaacggtgccttttcttacatcctcgggcgtggggaaaacccggaggacacacatgcctattgcactggcagaactatctcatgccgccattgcctggggtaagacatgaagcacgcgcatgagctcatggcccatctggagcgcgcagtgatattggattgagacgcgcaccgtgtcttagccttacttctaggggaagcaccaggtatcattctgaatgactccttcactcgtacaaactcaaagcgccgtagacttcgctcttacagggatcttctttgcaacaggcaacgtttctccagatcacagatgatagctcttgctcaagtgcaaggatcagacgtagagagtgaccgtatctatgtactctatgttcaactctaggcggtggtgataaccattgtccattggtaaaaaaaaatgtattggcatcgttgactgtgctatccacgttcctcatagcggcactc

SEQ ID NO: 451 - DNA, 341 bp, Gossypium hirsutum
  Clone ID: LIB3825-007-Q1-K6-C8
taaattattattttttttttttttttttttttttttttttttttttttttttttttttttttttttttttttattttaaaaaaaaaaaaaaaaaaaaaaaaaaaaaaaaaaaaaaaaaaaaaaaaaaaaaaaaaaaaaaaaaaaaaaaaaaaaaaaaaaaaaaaaaaaaaaaaaaaaaaaaaaaaaaaaaaaaaaaaaaaaaaaaaaaaaaaaaaaaaaaaaaaaaaaaaaaaaaaaaaaaaaaaaaaaaaaaaaaaaaaaaaaaaaaaaaaaaaaaaaaaaaaaaaaactaaaaaaaaacaaaacaaacaatcatttaaatctattaaataaaaaaataa

SEQ ID NO: 452 - DNA, 614 bp, Gossypium hirsutum
  Clone ID: LIB3825-007-Q1-K6-C9
gaagaacctggatttggccgataagttgatgaatgttatcgttattactatttcccttcttgcactcttcttccttcaccaatatcgttttctcaactcccttatctccactgccagaaccttattcaaagaaaattgaccggaaagttgtgcttattaccggagcatcttccggcattggcgagcatttggcatatgagtatgcaaggagaggagctcgattagcactcgttgcaaggagaaagcgacgtctgcaagaagtagcggatgtgtgtgagataattgggtcacctgaaagtgtttacatacttggagatgtctctaacattgatgactgtaagcggtttattgatgccactgtgaaccactttggacaattggatcatttggtcgccaatgctggagttgcgccggtctgcttgtttgaagattatgatgatatcactaaggcttcaccagctatagacataaacttctggggttcagtatacagcagttattttgcacagcaacacctaaagaagagtaaagggaagataatagtgatatcatcatgtgctggatgggtatttgcacccagaactgccttctacaatgcaagcaaagctgcactg

SEQ ID NO: 453 - DNA, 617 bp, Gossypium hirsutum
  Clone ID: LIB3825-007-Q1-K6-D11
cgcagtcttttgatctctgccccaaacaaaagttgtcatcttttacaatcacaactactggttatttattttcatggctcaaggagattctaacttccagcaagacatggtattttcattaaagctttctctctctctttttattttttcttttgttgggtttttatgtattttgagttttccttttttttttttttaaattgatttgtttttgtattgtttttttatttgaatttgaaaggctaaagaggaagaagaacagaggctgaaatacttggagttcgtgcaagtagccgccgttcacgccgctttgtgcttcaccaacctttacctttacgctaaggaaagatcggggccgttgaaacctagcgtcgagaccgttgagggaacggttaagagtgtggttggaccggtttatgataaataccatgatgtccctgttgaattccttaaattcgttgattccaaggtgggtgaatcagtgaccaagcttgatcgtcgagtccctccagtcatcaaacaggtctcaaccgaagccatcttggcagcccaaaaggctcccgaggttgctcgtggcgtggcttccgaagtccaccgtgctggagtggtgaacaccg

SEQ ID NO: 454 - DNA, 620 bp, Gossypium hirsutum
  Clone ID: LIB3825-007-Q1-K6-D12
gtccaatataacatactttttgtcgttgcttaagctctcttttctgttggatattgatatctgcataaaaaacgctcggcttgagaagtgattgctttgtttagtcgaacctctctactaccctggttgcgattgttttgctaagtggatttgaagtggcatcaacaaaccctttttagtttaaacttggggaaggagtggactaaatattgtttcgttgaagtggatagaaaattttctaacttgtaccactctagatctgagaaacagagagggttggactttgatgctgttagatttagaggtaagttttgaacttgatatgcagggattaatttttgtttatcagttgttttgcgggctatgtgtctataaggattctttgaatggtctgcttcatatataaggttactgaatttaggatgattgaaattcttttcgtttatttccttaatgaattgagcaaacctctaggttatattttaggatctgttgacaagtggcttggcttttatatgaagaagattgtttgaactgttctgtgagttctatctctctcatggactggaatgccaaaaccccgttgcaatgggagtgggagaacctaatgatgttaaatg

SEQ ID NO: 455 - DNA, 55 bp, Gossypium hirsutum
  unsure (1)..(55): unsure at all n locations; Clone ID: LIB3825-007-Q1-K6-D4
gggggggggggggggnnggggggggggggggnggggggggggggggggggggggg

SEQ ID NO: 456 - DNA, 562 bp, Gossypium hirsutum
  unsure (1)..(562): unsure at all n locations; Clone ID: LIB3825-007-Q1-K6-D5
caaatccctaatttttcccttctttaaccgattctcaaattcaaaccctagccacttcaaaaatgaaggaaattcccactttcactattcagccgattaacactctaaaatccccatctcaggcttcaatttctatgaaggagataaggactccgatggctcgttttcgaaggtgtggagaaacggcagtacagaagaagccgctcgtggaagccatgcgtggaaactactcgtgggatcaatctgttgttgctctagcacattccagagacccctagagtttctagtgttttcacattattgggctcctttgggccgtttattaattgggtgtaatgggttttgttgggccagggattaagttggggtttgggttgtttgggttaggtttaatttaggtttatttggacttgtttaatagagcataaatttggactttgggctttattattattaaaaaaaaaaaaaaaaaaaaaaaaaaaaaaaaaaaaaaaaaaaaaaaaaaaaaaaaaaaaaaaaaaaaaaaaaaaaaaaaaaaaaaaaaaaaaaaaaaaaaananaa

SEQ ID NO: 457 - DNA, 611 bp, Gossypium hirsutum
  unsure (1)..(611): unsure at all n locations; Clone ID: LIB3825-007-Q1-K6-D6
cggccgcgtgggcgctcggntttttctcagacgtgaaaaaaaggggctgtctttcaccaagctattcagccggctatttgccaaaaaggagatgcgtatactgatggttgggcttgatgctgctggtaaaaccaccattctttacaagctgaagttgggagagattgtcactaccattcccaccatcggtttcaatgttgagaccgttgaatacaagaacatcagcttcactgtttgggatgttggtggccaggacaagatccgaccattgtggagacactatttccaaaacatgcaaggacttattttcgtggttgatagcaatgatcgtgaccgtgtggttgaagctagagatgagttgcacaggatgttgaatgaggatgagttgagggatgctgtgcttctagtatttgcaaacaagcaagatcttccaaatgctatgaatgctgctgagattaccgacaagcttggccttcattctctccgccagcgtcactggtatatccagagtacatgcgccacatctggtgaaggactgtacgagggactggactggctctcaaacaacattgcaaacaaggcatagatggcgtaattgacttgtcagtctc

SEQ ID NO: 458 - DNA, 628 bp, Gossypium hirsutum
  Clone ID: LIB3825-007-Q1-K6-E10
gtgctctgaattcgaaaaaggaagacgaatcgtcgcattcaattaagttggtgaacttcgtctccgagcaacagttagatgaagcaaaaagaactagaggtgaacgaattgaagatggcactgcccagagggataggcctctgtacgagattttgaaggaaaataaagacaagaaagatgcagagtttaatgaacggttcaaacataggccacccaaagctttggatgaagacgaaactgagtttcttgataaattggagatgtcaagaagggaatatgaacgacaagtggcggatgaggaagctgaacagttgcgaagtttccaagcagctgttgcagcacagtccaatgtcgtgcttgaactaaaagaaacaccacctgttcttgcaaaccaggaacaaaaaacagttgggaagaagaatccagccactcggcctctaggtatgctcataaaagtgaagccacaagcaaaaagggcaaaaaccgagcaggaggaaaaactcataaggggaacaaaggcacctgatgttgataatgtggaatcacctaaaagtgatcccgataagtcccttaatgttgctaagactggtcttgtttcatacagtgatgaaagtgaagatgatgatta

SEQ ID NO: 459 - DNA, 610 bp, Gossypium hirsutum
  unsure (1)..(610): unsure at all n locations; Clone ID: LIB3825-007-Q1-K6-E11
cggccgcgtggggatggatctgggcactggaaacgagntgtcgaagaatttctacgggtctcccttggaatttgcggcggatgtaaggctcacttttaataacgccatgttgtataaccctaaggggcatgaggtttatgtgttggccgagcaatttcttgcaaaattcgaggaactgttccggccgttgagcttgaaactggaggagcaagatgagcctcccgaaaggggttattacgaggaagagttgcaggcgagttcttgggatcacggtgaagctgataggttgaagaaagatagggaaagagatagtgagaggataattgtcgatagggatgattcgggtaattttgtgtcgagatctgatagaattgatagaattggaggggtatcgggctttgtttcgaacccgaatgtaccaccaccacagatgcacttgcaggcgccggcaagggtgccttcacctgtaaggccaccacctgtgaagtcattgaagcagccgaagccaaagctaaggatccgaacaagagggaaatgagtatggaagagaagcaaaagttggggattggattgcagagcttacctcaagagaagatggataatgtggttc

SEQ ID NO: 460 - DNA, 534 bp, Gossypium hirsutum
  Clone ID: LIB3825-007-Q1-K6-E12
cccctacctatcaaccttctcatcccttctttttacctgttttctgagctgctttaagaaaagcttgaagatcggagggatggagggggaacataaaggctgcaaaaaaaccgtgctactactttaccttgaaaactcgtcctaaataacagcaattatagcagcatctaccgctacatgtctccctaaactacttgaaaggatgcttttgatgtcgttgctgttgccatgactgccgctggtactgcatgagctgctccacaatatgctactcttgaccctacacttacaggcccgtggaatggacagactgatggaaactccgtttgtaattacttatcaaatgccacgccatatgtcacgcctcatgagatgcctacagggctaaaatctgccccaaagcctattggagctcctatggtggctcaacatatcggctcaacagccttataagagtagttataagaataaatctgaccgggataatgaacgctgctgtacaggctgaaatcctgtgtcaaaactagagggtat

SEQ ID NO: 461 - DNA, 615 bp, Gossypium hirsutum
  Clone ID: LIB3825-007-Q1-K6-E4
gccatccactcctttatttgcttcgttgggtcaaggtttgggttgatcaggaactacattctttgcacgttcagtagaggttcctgtcaactccttttgactgtaatgagtaacagtatcgaagatgattcattttctaagcccgttggaagatggtctgtttactgttatggtgtgggtcacatgctaaatgacatcacttctgcatgctggtttacttatcttctattgttcttaactgagatcgggctctcctctagggatgctgctattgtcatgctttccggccaaatagccgatggtctagccaccatattttttggtgaactgattgacaggtttggacatttcaaaatatggcatggtgcaggagctatcttggttgctgtttctttttcttcggtttttggtggttgtataccttgtaaactcctttcgtctttctcaacaatagtagagactgtttcatacagtacatttgctgcaatttttaatgtcggctgggctgctactcaggtttcacacatgtccatggtgagttgcatcactctcaattcaacaagcagagtagtactggcaagctgtcgaaatgcctttacaatggttgcaaatctc

SEQ ID NO: 462 - DNA, 610 bp, Gossypium hirsutum
  Clone ID: LIB3825-007-Q1-K6-E5
ctagtttatggcaattttgatgaactttatttttccggttattctttggcaataacaattactattcttcttcttcatcatctcaacataaaagagctgcatgtcatagatggggttccacagcttatttttgtccgttcaagctacacaattgagacagttgaagcagaaaggatctctgtggatcatgttgcccatctaaagccatctggaggttcagcagcaactcaatgtaagcttgcttgcttgtagcattttctgtcaaaactgatattcgtatttgatcgaagcccccttttttttttgtattttatgattatcagggaattgtttatgtttgtatgtttttcctgcatccagtggctgctcagcttaccggtatacatagcgccatcaagatgttgaatagcagaatcagggtgcttcatcaatatcttgttggaatgcaaaaaggtgatattccttgcgaaagttcactgttaaggcaagtatcaagcctcctccgaaggttacctgcaattgaatcagaaaaatttcaagatgactttctaatggaatataacgacacattattgattacttatcttgctatgttcactaactgttcaaa

SEQ ID NO: 463 - DNA, 361 bp, Gossypium hirsutum
  unsure (1)..(361): unsure at all n locations; Clone ID: LIB3825-007-Q1-K6-E6
gntagcaccaaanacgaacctgccttaatgaacttcagcatgtcattattgtacttaagctggtcactgccttttaagactgtcagtgtgccccacttaaatcttttaggatttgtttatttacctctttctctcttctcttgctttgcaatgtctttctcttgagacacaaggtccctctttttgaatctttctttttacctacatttggaacacaacctgaataatgtcccaaactttctctcaaggttcaaataatccaccctttacttgtgttacttagcgacattggtaagacagagtaaactgataagtatgaactacagagaggtaaaatacttgtcattgttgcctaacatgc

SEQ ID NO: 464 - DNA, 631 bp, Gossypium hirsutum
  unsure (1)..(631): unsure at all n locations; Clone ID: LIB3825-007-Q1-K6-E7
gttaaaacacttgagttgcgaattcctttattattattattgtacagnanaagaacatacatagcatgtttttcttacgattttttaacatactggatatggaatttcttaatagcagataccattttattgttgtcatagaatttggtgtagggatagagaatcaaacacaaacaattttcagtgttgggagacacacccatatatagcttaaaacccatttattatcatagggaatgcataggatgaaaaagagctgttattttctcaaagcatcgaattttgtgtgtaagggatgaattagttgaagctcaaacatcaaattttattttgatatccatctcttccacactcactcgaacctcaagaatctaatcagttctctctcgaaaaaagaagacaatcttaacacactgtttatttattttgattattttagagcaaacaagcaagttctcagttgcagcagataaagtaaatgagacgacagttagaaaggctggggcatgggtggcaatggtggagctggtgtgaaggccctccattgctcaaaatgtccattaacaaagtcgtaataacctcctctcagtgccaattgtccactcgtcatagcatctctcacatatggata

SEQ ID NO: 465 - DNA, 611 bp, Gossypium hirsutum
  unsure (1)..(611): unsure at all n locations; Clone ID: LIB3825-007-Q1-K6-E8
gngcttttgaaccaanaagtgcttaagttacgtggacaggttgagactctgagaaagagagtgaacttcaagaatcggagcttcaaaaatccacaaagaaaactcaggaagcaatgaaagtggctgcagaggagtctgctaaatctaaagctgcaaaagaagttataaagtcgctgactgcacagctcaaggatatggctgaaaggttgccacctggagtttatgacacagagaacattaaaccagcatacttgccaaatggcttggagccaaatggtattcactatccagatgcgaacggagagggacatttaagatctgaatcaattggtggctctttccttgcttcccctactgctctcgattcttccacaatcaatggcaatcagagccctggccaattacttaaggaaccaaccggagccaatggtagagatgaccattctggcactagactgctgaatggtagtgggggtttacaggcaggtggcagtggtgtgtcagcagctgttgatgaaagggaatttgggtcttttggagatggagaaaatggtacgaaatctagaaattcagcattggctgctaatggcaatcaagtggaggctgagtgg

SEQ ID NO: 466 - DNA, 615 bp, Gossypium hirsutum
  Clone ID: LIB3825-007-Q1-K6-F10
cagcaatattatcacaagcagcagctaaaaaaaaagcaagaagaaaatggcgtcagagcaatatcaagctatgaggaatgcaccacaagaggaaaaagaagagcttgatgcaagggcaaagcaaggggagactgtggttcctggtgggactcgtgggaaaagcttggatgctcaaattaacctagctgaagggaggcacaaaggaggggaaacaaggaagcaacaactaggaacagaagggtaccaagaaatgggacgcaaaggtggtctgagcaactctgatatgtctggcggtgaacgtgcagctgatgaaggtgtcaccatcgatgaatccaagttcagaaccaaaaactaaatatcatctcccacgacagaaccctagctactctttttatatataaaccctaataatgtatgtttgttttaggttttaggaagaactgaaccagtttatatgtaacaaaacgctggacatgtttaagctttagcttggtgtctgtaatctaagctatagccctgttgacggtttgttttagtgttattaggactaaaccagtttacatgtaaaaactggacatgtttaaagcttagcttggtgtctgtaatctaagctgg

SEQ ID NO: 467 - DNA, 619 bp, Gossypium hirsutum
  unsure (1)..(619): unsure at all n locations; Clone ID: LIB3825-007-Q1-K6-F11
gcattttctctcaacaggtttggacgttcatgtaatacgagaacggtgtaaattgcttgacggatatttaaagaatctcctgcagcttcctactatttcaggatcaattgaagtttgggacttcctaagtgttgactcccagacatatgtattctcaaattctttttctatcattgagacattgtcagttgaccttgacagtaatccatctgaaaagagcaacaaggcctcaagtgttttggtgcctctggtgggtcctttatcttctaagggagaacagttagacactgaaagcaaggaatctgcacggcagatgaagccaaatcttgcaatggatggattaagaaatgcaaaaaatatgtcttatcctccaaaagttctcactaaagaacagggtaactccattgaagattcaggcagtaattctgatactggaatgtcaaagatttcatttgtaagacacacagagaagaatgttaaaggaaaagcgaatgacggaatggaagatgcttctgagttggttcttgatgctgtttcgcacccaacctttcctacagagtgggtgcccccaaatntaagtgtccccattttagatttggtggatgtcattttccagctc

SEQ ID NO: 468 - DNA, 627 bp, Gossypium hirsutum
  Clone ID: LIB3825-007-Q1-K6-F12
cccagcgtccgtttctctctcaaaatctctcaatccatactctccgctcctctgatcttttcttcgacttggtttatgagcggtacgcggattaagacccgcaaacggaatattgctgcacccctggacccttcagcatttgctgatgcagtagtccagatctatttggataatgctggtgacctggaacttgttgccaggagcattgaatcttcagatcttaacttctcaagatacggtgacaccttctttgaggttgtttttgctggaggccgcacacaacctggcacacttaaacctgatgaaggggagtgccacccttactctatcatagagtgtgaggctaaacgtgatgccattttactatctgtgatttacattcagaaaatcttgcgccgaagaccttttctgataaagaatcttgaaaatgttatgcgaagactcttgcagtcgttggagcttttcgaggaaaatgagaggaagaagcttgcaattttcacagcacttgctttctcccagaaattatcagggttgccacctgagactgtgttccagccattgctcaaggataatcttgtggcaaaagggctagttctttcattcatgacagacttcttcaaggactat

SEQ ID NO: 469 - DNA, 624 bp, Gossypium hirsutum
  Clone ID: LIB3825-007-Q1-K6-F2
gcgagggcttctgctgtaaaggggtgggggtatcctcatgtgtaactgactttgaggcttttaagctcccgtttggtctcaaacgactatacctgaggcagatctagcatttcttttgtcaaaagcggcatcaaactgaactgtggtaccctccgtcgccccagtataactgttgtcccttttggaagaagacctaatttcgagaactccaaacgcaccatagcacacaacaaaaggatcgacattgcttgtgacacccctaatctgaccctagtcgaaaagtgatttcgggaccatgaaatcgagttttataaataattgaaagttatattctatgttcatgaggtgagtaaatgcatgtgtaaaaatttcaagcattaattttgccatttgtatgtgaaattctgaaacgggacttatgtgaaacattggtaaaataggatggtaaaaatataaagtgatctaatagagcatgtattcaaaaatgtggacttgcatgtcaattaaaccatttttgaatgtaaatggccggccaacacatgcatgtaacaatgtgttctcttgtctccatttttaattggtgggaattatgtataataataaatttatattagtggtggtgat

SEQ ID NO: 470 - DNA, 626 bp, Gossypium hirsutum
  Clone ID: LIB3825-007-Q1-K6-F3
cggccgcgtgggtttttagaccaaaccatggatcttattcacaagttcctcaacctcgtagctcctacattcaccttcttttcatttgtctttttattgccacccttttatttcttcaacttcttcctttccatcttacgctccgttttcagtgagaatgttgctaggaaagtcatcgtcatcacaggcgcttcttccggtataggagagcatttggcatacgaatatggtagaagaggagcaaggttagctctgacagcaagaagagagaaatcactgcaagaaattgctgatagagctcgtgatttggggtctcccgatgttattgtaattcgtgctgatgtttctaaagttgatgactgtagacgacttgttgaggaaaccgtgaatcatttcggaagatgtaagtctataacttatgtatgtgcatgtataaataacagcggacagtcccggagccgagaccactcctaatttataaaatttataaattaataagagtaaaattagactttagacaaaataataataataatttaatttaatttacatttttaccatagtttgccaaaaaaaaaaaatttggctccgcgactgacaactgatactgttagttaatatgtcat

SEQ ID NO: 471 - DNA, 486 bp, Gossypium hirsutum
  Clone ID: LIB3825-007-Q1-K6-F5
ggatgttggagctgagcttgctgcttacttctctgacttatatgacactgctggagacaacttaaggtttaaatgttaattgtattttcactccctttttctgaaattgttatatacgacttccaaattaagttgagctcagaaaagtaattgctctagaatttgaggaaaagaattgcaggcaagttattatttttctgtcccataatgtgaaaacttggtgttatagactcttattactaacatgttttgccttaaactaaaaaaaaaaaaaaaaaaaaaaaaaaaaaaaaaaaaaaaaaaaaaaaaaaaaaaaaaaaaaaaaaaaaaaaaaaaaaaaacaaaaaaaatagaaaaaaaaataaaatattatatattgaaaaaataaataaaataaattgaattgtaattttaaaaaattaaaattgggaaaattgtgaaattactaaattgaaaaaacttggaggatatccaactttatccatt

SEQ ID NO: 472 - DNA, 618 bp, Gossypium hirsutum
  Clone ID: LIB3825-007-Q1-K6-F6
gtaagtctcataaatactgtaaatcgatgaattttggtaaattgttagatattttggtaaactcatagaaattttggtaattgttaggacttggtatagtgtttagaaaatttgggaatattggtaatgtctcataaatattgataaaaaaatagaaattttggcaacttgttagatatattggtaagttcttagaaatattggtaaatcgttaaatatattggtaacttgttagatattttggtaaatccctaaatattttggtaaaattagagaaattttgataattgttaagacttggtatggtgtttagaaattttggtgaagtctcaaaagtattggcaaaagggtagaaattttggtaaatcttagaaaatttgataaactattagatatattggtaaaacaatagaaagtttggtaaatccttagatattttcataaaccctttaaaattttggtaaactttttaatatattggacctcgagttgcaaagcgatctcggtttctcaggtgatgacgccatattcacatggcaggcaaaatttgtaggttattgagctccatgacatcactgtgaatccaaacacaacttaaaactatgactacgtctccct

SEQ ID NO: 473 - DNA, 373 bp, Gossypium hirsutum
  unsure (1)..(373): unsure at all n locations; Clone ID: LIB3825-007-Q1-K6-G1
cgacccagctttctttttttgctctgtaggcaaanaagaaactcgtgatgattttgtcaaaaattgagattgatagttggagataatttgctgaggtcaacaataacttcactgcaaagcaagataccatcgaggcatgaattagaggtggcaaagcagaacatgaagggtcccggaagcctctgagttttaccattttctcgtttaggtgaggaaggctttgctgcttggtatcctcaaaagctgttggtgctattgggtgactttagcttgcttcttgttatcaaaatgcgtcgacatgataaggacatgtttgaaggtacttgtagtagtcttagcactgctttgttttttaatggtgtaattgtttggt

SEQ ID NO: 474 - DNA, 616 bp, Gossypium hirsutum
  unsure (1)..(616): unsure at all n locations; Clone ID: LIB3825-007-Q1-K6-G10
aagaaagtaaatgacttatgcggcatcaagnagtcagacacgggattggctgcacccagccaatgggatctcgtctcagataagcaaatgatgcaggaggagcaaccgcttcaggtggcaagatgcacaaagataattaatccaaatacagaagatgccaaatacgttatcaatgttaagcaaattgccaagttcgttgttggccttggtgacaaagtttcaccaactgatatagaagaaggcatgcgggtgggggttgatcgcaacaaatatcaaatacagattcctttgcctccaaaaattgacccaagtgtcaccatgatgaccgtggaggagaaaccagacgtgacatataatgatgttggtggatgcaaggagcagattgaaaagatgcgtgaagttgttgagctaccgatgcttcatcctgagaaatttgtcaagctcgggattgatcctcctaagggtgttctttgctatggtcctcctggaactggtaagacacttcttgcgagggctgttgcaaacagaactgatgcttgcttcattcgtgttattggaagtgagcttgttcaaaaatacgtgggtgaaggagctagaatggttcgagaactgtttc

SEQ ID NO: 475 - DNA, 622 bp, Gossypium hirsutum
  Clone ID: LIB3825-007-Q1-K6-G2
acttaaaagatggctctttcagctgccactcttctcactgcccttgcggtacctctgctctttctttttcattctattttacatctcatcaagcaaaaatggaaaaggaaaaggaaaagggaaagccattccgggtccgcgacccttgccaattattggaaacctccacatgttaggcatgcttccacaccaatccctttatcacttggccaaaaaatatggtcctatgatgtccataaggctaggcgttgtgccaactgttgtcgtttcatcccctcaagccgccgagatatttctcaagacacatgatgctgttttcgcaagcaggccaagacttcaagtcctagaattaatttacaatggcaaaaggggcatagcattcacggaacttggatcatattggcgtagtgtgaggaagatttgtaatatgacaatttttactgcatcgaaaattgaatcgtttgcatcaacgaggaaggaggtgctagcacatttcattgaatctttgaaagaagctgcatcagcaaaggaagtggtaaacattagtaagaagattggggcgcttaatgaagagatgactttgagaatggttttggggaatgtgaagaatatgagggattta

SEQ ID NO: 476 - DNA, 575 bp, Gossypium hirsutum
  Clone ID: LIB3825-007-Q1-K6-G3
ggaaggtcagttatataacttcagaggaggatcttaaccatactagtgcccacaatatcaataatgccgctgcttaggcatcactcgctaaacattagcgcacgaccgcttattgcaaaactggggctggtcagcatggagttgcaacagctactgcgtgcgcaaggttcggtttgcagtgtgttattgacatgggtgctcaagatatgtgaaagacaggcacttaatattttcagaatgcagcttattggtgcggacgtaagtgtgataatgaagattatttatcagattctacggttagagtacttcattcaggcaccgctactctgaacgatgctacatcggaagctatccatgattgggtgactaacgtggagacaactcattatattttgggattgattgctggtccacatccgtatcttatgatggtcaaagagtcccatgcacaggttggtaaagaagcaagaaaacaagcgctggaaaaatggggatgggaaaccggatgtattggttgcacgcaatgatggaggttcaaatgctatgggactttacaatgagtttgttaacgacaa

SEQ ID NO: 477 - DNA, 610 bp, Gossypium hirsutum
  Clone ID: LIB3825-007-Q1-K6-G4
cgaaaaaggctgatttgagagaagaacacggcaaccctattcaactcaccgacgaacacggcaacccggttcaactcactgacgaacacggtaaccccatttatgtcaccggtattgccaccaagcatcccacgacgacaacgtcactgtcgggtttaatgggatatggcaccggttccgccgtcgccactgatcagtcacaacagcagctgcagccaccgcctccgcagcaaacacagccgctgcattacgaggtttccggcaaggaaaagattcaacgctccagcagctccagctccagctccagctctagctcggtaatgaaaattaaaaaaaaaaaaacccccgccatgggcatctatgcagtatttgttttagtattgcttttttgcttctccaaaaatgttttgcaaatggtgtttttaaagtgcttttatgatggaagattgtgtttttttacttaaaatgtgcataagtttttgtaattttcatttgaaatttaatttttatatttttatttttagaaatttagtctctttattttctagagattttaatttttaaaatattattaaaattattttgtcaaattcaagtttattagcaagta

SEQ ID NO: 478 - DNA, 619 bp, Gossypium hirsutum
  Clone ID: LIB3825-007-Q1-K6-G5
ttaagcactcgtgcaagtttggttgagacgggtgcaggtgctgttgacgcaacagcaggatggggttcaacctgttgtaaaccgtgctttactctgccttccacgccataagcacgttaagtttatttcacaggcggctatacttgagttcaaatctggggttcctgatagagggagatctatgtttgagggagttttacgggagtacccaaagagaacggatttgtggagcatttatcttgatcaagaaattcgacttggagatgaagatgtgattcgtgctctgtttgagagggcaattagtttgagcttaccacccaaaaagatgaagtttttattcaaaaagtatctcgattatgaaaagtcccgtggtgatgaggaaagaattgaatctgtcaaacggaaggcaatggattacgtagaaagtactctaacttgaagttattgagatttgagacacatatctgatcagttgatctggaatatgcgagtacattggcgtagtcgtcaagataacattatttttgcattaaaatagccctcgtatagaggaagaaattagatccatagtttcttctaattttttatttgaatagtctcttttaaaaccctaaatagt

SEQ ID NO: 479 - DNA, 621 bp, Gossypium hirsutum
  unsure (1)..(621): unsure at all n locations; Clone ID: LIB3825-007-Q1-K6-G6
cggncgcgtgggtgngaaatgttatcagacccgactggaatggattcaatgttttacttctcaatgcagcccaggctgcagccctcgaccttggacttgtaccagaatccagcaatagcatcgagtccgcgaaattcttgtatctaatgggtgctgatgatgtgaacttgaacaaagttccatcggatgcttttgtggtgtatcaggggcaccatggggaccaaagtgtctatcgtgccaatgtaattcttccttcagcagcattcagtgagaaggagggtacatatgaaaatactgaaggttgctctcagcaaacattacctgcagtccctacagtgggtgatgctagggatgattggaagattattcgagcactctctgaggttgcaggaattcgtttaccttatgatacattaggagccatacgatccaggatgaggactgttgcaccaaacctactcaacacagatgagatagagccagctgcttttggaccttcattgagtccagactgtagtcagaagataagcttgacaccgttcaaggctgctgttgagaatttctacatgactgattctattaccagngcatcaaagataatggcacaatgcagcgctatgc

SEQ ID NO: 480 - DNA, 609 bp, Gossypium hirsutum
  Clone ID: LIB3825-007-Q1-K6-G7
catgaggggagaaggagatggaactgttaggtcaaagcaaagccgaagtgaaaagaagagtcgcaaagctatgttgaagcttgggatgaaaccgatctctggtgtcagccgggtcactgtgaagaagagcaagaatatcttatttgtcatctcaaaaccagacgtgttcaagagcccagcatcagatacttatgtaatatttggagaggctaagattgaggacttaagctcacaactgcagactcaagctgcagagcaattcaaggctcctgatctaagccatgtgatatcgaaaccggagtcatcaacagcagtccaggacgatgaagaagtggatgacacaggggtggagcccaaggacattgaattagttatgacacaagcaggagtgtccaggtcaaaggctgtcaaggcactcaaggctgctgatggtgacattgttagtgctataatggagcttactacctaataacggtgttgatttagcaattgttttggttgctgaaagtcgtgtgcttcatttcagatattcctactgtttttttgagaatgttattgtgtcgtttttcttcttgtcggttgttgtattagtaaaaaaaaccatttgtg

SEQ ID NO: 481 - DNA, 626 bp, Gossypium hirsutum
  unsure (1)..(626): unsure at all n locations; Clone ID: LIB3825-007-Q1-K6-G8
ggggacaacaatgagtcaaactctatggttgactgtgagattcgctggngaagatctacatttaggggaggaggttggacaaggctcttatgcagttgtttatcgtgggatttggaatggatcagatgttgcagttaaggtctattttgctggtgaatataaagaatcaacattactagattacaaaaaagagatagatataatgagaaaactgagacatccaaatgtactgctgttcatgggagcggtgtactcacaagaacgacttgcaattgtcaccgagttcttgcctaggggaagcctattcaaagcacttcacaagaataatcaggcattggacgttaaaaggcgcatgaggatggcccttgatgttgctcgaggcatgaattatttgcatcataggaatccaccaatagtgcatagagacctaaagtcttctaatctccttgttgataggaattggaatgtcaaggttggagactttggcctctctaggtggaaaaatggaactttcttaaccacaaagtctggaagaggaacgccccaatggatggccccggaagtcctcaggaatgagccttcaaatgaaaagtctgatgtattcagttttggagtcatcttgtggg

SEQ ID NO: 482 - DNA, 622 bp, Gossypium hirsutum
  Clone ID: LIB3825-007-Q1-K6-G9
cggccgcgtgggcaacactttattcttctctctccattaatcttagttgaaagagaatcatctttgctttcgcccatgaccactgtttatgacccttcacaccatctcacctccaaaaaattgtgtttcaaggaccttgaaatccctccaagggaaaaagcaactccattgttgccacaacgccgccgccatggaacttccccaccacgaagctaggctccacaaataccttccttccaatgaagacaatgacggcaccgatgatccatacggcaccgaccatttccgcatgtacgagttcaaggtaagaaggtgtacaaggagccgtagccatgactggactgactgtccttttgctcatccaggtgaaaaagcccgccgtcgtgaccctactcggtaccaatactcctccaccatctgttctgacttccgccggggcggtggttgtcctcgcggcgatgactgtgagttcgctcatggagtgttcgaatgttggcttcaccctacacgttacagaaccgaagcgtgtaaagatggtaagaactgtaagcgtaaggtttgtttctttgctcattcgtcacgtgagcttcgtctcttgccggaatcacaaccgccatacaaa

SEQ ID NO: 483 - DNA, 599 bp, Gossypium hirsutum
  unsure (1)..(599): unsure at all n locations; Clone ID: LIB3825-007-Q1-K6-H10
anattcgtggtaagaagcgaagtgaacttccctaacgagactccgcgtacctctccaagtgtgcggtcaagacaaattctcagaaaccactttccaagtcgaatttgagccctgttcagctaaatctcaaccagaattacaattacttgagccagcctgagcaggaatacttcgataccatgggtttcgtagaagagaagccactggtcaatcagtttgcatatgtggaccctgttcctacgtctatagatgctggatttaatcaatcagataatgcccccttgtacttcaattcggaccagggaagtaactccatcaattgttccgactatggctggggagaacagggtgccagaactcctgaaatatcatccattcttgaagcttctgtagtgggtgaagagtttcttgaggatgctaaccctagcaagaagctgaaaccaagttctgacaatcttatgcatgctgaagagaactccgcaaagaccttgtcggacgagctgttggctttggacaaccagatgaaatacttccaaatgccaccatttattgaaggaaactgggacgccactattgatgccttcctcaatggagatgca

SEQ ID NO: 484 - DNA, 587 bp, Gossypium hirsutum
  Clone ID: LIB3825-007-Q1-K6-H2
cattttctcgcattttatctaattttctggtctgccctcaaacccaaaacctaacatggcagccgccgccgcccgtcctctggtttcggtgcaaaccatagagtccgatatggctaccgacgctacgcctactgttcttttttttgatgtcatgaaagcctcgatccgaccagacatcgtcaccttcgtccacgataacatttccaagaacaggcgccagccttacgctgtctccaagcgtgctggtcaccagacctcagctgaatcgtggggaactggccgtgccgtctcccgtatcccgcgtgttcctggtggtggtactcaccgtgctggccaaggtgcttttgggaacatgtgtcgtggaggccgtatgtttgctcctaccaagatctggcgccgttggcaccggaagatcaatgttaaccagaagaggtacgccgttgcctccgcaatcgccgcttctgctgttccttcactcgtgatggcacgtggtcaccgtatcgagtctgttccggagatgcctctggtcatatcggccgctgtggagagcggggaaaagacctcggcttgcatttaagttttgaaac

SEQ ID NO: 485 - DNA, 622 bp, Gossypium hirsutum
  Clone ID: LIB3825-007-Q1-K6-H3
cttacctaaacaaattgagccatcatattacacaaaaaaggaaaggatcctctagtatatccgtatatcttgcttttaagtatccagttgctaccagctatttcatacctgtctaaagaagcaggagaggaagaataccatattgatgctgctcacatagcaattgtgctagctgacaatggggtcctttctgaagtttctggagccggacaaaagctgggagttatggatgcttacgcagaagcttctagcattattaggcagtatggctctatgtatctacggcttggtaaccttcaaatggctctagaatattacgcacaagctgctgctgcagtaggtggtggacatgtatcatggactgggagaggtagtggatcagcaaaggcagatgaacttgatgctgaagcagcttctcactgagatattgtttcgagatggtggggtttatcttttacttggttcgagaggtgctggagaggaaggtgaactgagacgatttttgactgatcataaagcaagacaacagtttctgctagaagctgcccgccaatgccaagattctgggctgtacgacaagtctatagagattcagaagagaattggagcattttcgatggca

SEQ ID NO: 486 - DNA, 595 bp, Gossypium hirsutum
  unsure (1)..(595): unsure at all n locations; Clone ID: LIB3825-007-Q1-K6-H4
gaaggtcagntatataacttcanaggaggatcttaaccatactagtgcccacaaaatcaataatgccgttgcttaggcattactcgctaaacatttgggcaagaaccggattattgcagaactggggctggtcagcatggagttgcaacagctactgtgtgtgcaaggttcggtttgcagtgtgttattgacatgggtgctcaagatatggaaagacaggcacttaatattttcagaatgcggcttcttggtgcggaggtaagtgttataatgaagattctttatcagattcttggttagagtagttcattcaggcaccgcgacgctgaaggatgctacatcggaagctatccaggattgggtgactaacgtggagacaactcattatattttgggattgattgctggtccacatccgtatcttatgatggtcagagagtcccatgcagtggttggtaaagaagcaagaaaacaagcgctggaaaaatggggagggaaaccggatgtattggttgcacgcaatgatggaggttcaaatgctatgggacttttcaatgagtttgttaacgacaaggatattaggttgattggtgta

SEQ ID NO: 487 - DNA, 609 bp, Gossypium hirsutum
  unsure (1)..(609): unsure at all n locations; Clone ID: LIB3825-007-Q1-K6-H5
tgnaaaattggctttttggtggttgcagatcaagtagatttggcaggctccagggtatcaaatgtgcaattgctgngaaagaatctgtatattagattcacttgcagtacaggtgatgctatggggatgaacatggtttccaagggagtgcaaaacgttttggatttccttcaaactgatttccctgacatggatgtcattggcatctctggtgagtttcatttttttgtataggcttgcaattatgtctttttactgtccgacataggatcactgatatttatgaatttgtgcatataggaaactattgttccgacaaaaaaccggctgcggtaaattggattgaaggacgaggcaaatctgttgtctgtgaagccaccattaagggtgatgtggttaggaaggtcttgaagacaagtgtggaatctctcgttgagcttaacatgctgaagaaccttactggatcagctatggctggagctctgggtggatttaacgctcacgccagtaacatcgttgctgcaatctacatagctaccggccaagatccggctcaaaacgtcgagagctcgcattgcatcacgatgatggaagctgttaatgatggca

SEQ ID NO: 488 - DNA, 520 bp, Gossypium hirsutum
  unsure (1)..(520): unsure at all n locations; Clone ID: LIB3825-007-Q1-K6-H6
tcggtcggctttggtagttggactatccgctttgggtgattttgattctgggaagcaaaagtaaaacgacgtgtatcgtgaactggaaacgtgctgtcatcaggcatatcgatgatgctcggacgggggtaatcgctggttaggacgtaaactagtcttgcaaggaaatgatgtgtgctcgtacgaagagtttccggattgttacgaggggagacggttggaacaacctagaataccgtgaagcgggcaagtgcactacaggtggattgataagcatcttcgcagatgttgatgtaaaaggagatctcatggtgcggcggtgtgaagataaggtgttgacttacggtgaaaggtggcgtgtggtngtcggtggtgtatagaatatagattcgaacttcattcacaatggtgggtccttggctgggctgatactactacattggtgggcagcccttggttcgggatcgccgtcccaagctctatgaacttttattctcttgatgcgaatgctctatatgag

SEQ ID NO: 489 - DNA, 601 bp, Gossypium hirsutum
  Clone ID: LIB3825-007-Q1-K6-H7
ctttcccctaaactttcatttctgataatcttttctttctatagtaaaccttaaatcccacaagagtaaacaaacccctttattgctgtttgtttttcttaaatgatttttacgtcattttgtgtgttcttcacccaactttaaactctcaaaaattgtatcatatctaaaagaaaaaaaaaggaagttgaaatgctagagactctgaagtacctgatcggctcaacaggagtcagcggcttcggctctaagtccaccgccgaggaagtcaccgagacttgccctgatctccgctctataacagtcatcatcacaggtgcgacgtcggggatcggagctgagacggccagagtgttggccaaacgaggagcgaggttggtgcttccagctcggaaccttaaagccgctgaggaagcaaaggctaggatagtttccgagtttcctgagtcagaaattattgtcatggctcttgatcttagttcactcacttctgttcgaaattttgtatcggagttggagtctcttaacttgccagtcaatatcctcataaacaatgccgggaagtttgcgcatgaacatgcaatctccgaggatggaatcc

SEQ ID NO: 490 - DNA, 592 bp, Gossypium hirsutum
  unsure (1)..(592): unsure at all n locations; Clone ID: LIB3825-008-Q1-K6-A1
ttcatttcttgagaccaaaagattgcaagaattgtggtgagattacctctgagtttctactctctgatctaaaatacctacaggaaatagagaatgagggagtccctctgcttccaagtttggcagataactataccatctgtaaatatttttggggaattttgttgcatctgaggaggcagatgatgtctgcatctgttgcttcaggatctccaatgtgtgctggaactatgncatggctncgnaaatgcaccncaaaaatatttaaattctctcctgcgaaaaacattgagcctcatgctctaaaaaaattgaacgtggggccctcactctctagtcaacaagttaatatgaaaggcatgtcaacatctgaaaatgagccagagctcacttctgttgcggcaactgaatcttnggagattcataggttccagtcagacaccagcacaagagatgttgaggctggtcaggacttgtcagttgataatcagaacaacatggattgtaaggaactggaagcgttggaagattctcagaattgtgatcttaatcatggtaaagcagttcacaggataagcaggcctaatactaa

SEQ ID NO: 491 - DNA, 612 bp, Gossypium hirsutum
  unsure (1)..(612): unsure at all n locations; Clone ID: LIB3825-008-Q1-K6-A10
ngattggttgatgaggtcataagtgagaatcgtatgagaaaatccagcaatggctggaggttatcaacagcaaggatatcaagcacgaccacctgcaaactggggccaaggggctcctcaaatgcagcaacctggctatggttatatgcaacctggagcttatcctggcccttcaccacagtataacatgtctcagccaccttatgggggctatccttcccaaccttcatctggtggatatgcctctggttgggaccagtcagctataccaccaaaccagcaaagttcttctgcaggtggttatgattactatnatcaacagccttcttcacagcagcagcaaacgcctggtggttcagcagctccaactgataatagtggttaccattacagtcagccaccagcttctggctacattcaaccaggacaaggttatgctcaggatggctatggtggataccatgcacctccacaatcaggttatggacagccagcatcatatgaacaacaaggttatggctcagcacaaagctatggcagtgcaacgaaccctactcaagagggtcacactccctcctatggtggtcaaggggatgctggtcaagtacctac

SEQ ID NO: 492 - DNA, 611 bp, Gossypium hirsutum
  Clone ID: LIB3825-008-Q1-K6-A11
cggccgcgtgggcgcctacttgcatgatgtccaggggtgtggcatggtcccaatgatgtttcctggtgttcaacaatacatgccaacaatgggaatgggaattggaatgggcatgggcatggatattggaaggccaacgatgccatttacaaatgttttggctggctcaccattaccaacaccagcagctgctgctcatctgggtccaagatttactatgcgaccctttcatatgccaccaccggctctggctccagctccagctcctgatccatcaagaatccaaccaaacaatcagtcagacaccatgttaaaccggcttggtgtacaaaacccaaaccagccttgtgtcccaaactttgctgatccttatcagcagtataatattggtcttcacccgatgcaattatcccctccactgaatcaagcgatggcccagccaagttctagtaaacccagtaccagtaagggagctgataatcttgaaaatcacccatcaggtgacatgacaagatagcactaaaaggatttacaagtggtggccggccagcatcaactactctcaggctgcaagcagattctattatctgaatcctggtcgcaagtgctgc

SEQ ID NO: 493 - DNA, 609 bp, Gossypium hirsutum
  unsure (1)..(609): unsure at all n locations; Clone ID: LIB3825-008-Q1-K6-A12
cttccgtnncttcaaacacttccccaatcgtgtttccaattacctctgnacaagnatgcaaatctttgttgaaaacccctcactggcaagaaccatcaccctcgagggtggagagttcagacaccattgataatgtgaaggctaagatccaagataaggaagggatcccaccggatcagcagaggcttatatttgctggcaaacaacttgaggatggccgcacgctagccgactacaacattcagaaagaatccacccttcacttggttcttcgacttcgtggcggcatgcaaatctttgtcaagactctcactggaaagacaattaccttggaggttgaaagctctgacacaattgataatgtaaaggcaaagatccaagacaaggaagggatcccaccagatcagcagaggcttatctttgctggaaagcagcttgaagatggtcgcaccttagctgattacaatatccaaaaagagtccaccctccacctggtacttcgtcttcgaggtggcatgcaaatctttgtcaaaactctcactggnaaagacaattaccttgggaggtcgagagtttcggttccattgacaatgggaaaagccaagattc

SEQ ID NO: 494 - DNA, 609 bp, Gossypium hirsutum
  unsure (1)..(609): unsure at all n locations; Clone ID: LIB3825-008-Q1-K6-A2
cgtcgcaaccatcttccaaanaggcaaagacaccaataagattgtgctacggctgcaatgccagggttgcaagcatgtctcacagcatccgatcaagaggtgcaagcactttgaaattggtggagacaagaaggggaaaggaacatctcttttctagatgtgatgatattcatgtcaaattttatgttatgggtttttacttggaacttcaggcagaatggagttttgttaagtttgatattagtattctaatgttgtttttaagaggatattgtgttttttaaggttaatggcatcggtcacactcattgatagcaattgtctaattggttcttgttatatcaatatcttgtgagctcgcatcacttccttgagatcttgtaggtcaacgcccttaacgaagaaacttatgaaatcaagaccttgcaagcttcgtatcattgggatcatgcatttgacatggataaagtatctgtcacttgcatgttacattattcattttttagatggcaagatacttagtaggatcttacaaccttaccttgaagtatagtccagaaggaaggatcctttgtgagtctcgctcacaaaaatagtttggtaatacct

SEQ ID NO: 495 - DNA, 612 bp, Gossypium hirsutum
  unsure (1)..(612): unsure at all n locations; Clone ID: LIB3825-008-Q1-K6-A3
nanaagtcaacagnaatcagggnaacttccacanagctctaggattgtggcaactcacactgatagtcctgatgttcttatctgggatgttgaggctcaacccaaccgccatgcagttcttggagcaacccattctcgcccagatctgattttgactgggcatcaagataatgctgaatttgctcttgcaatgtgtccaactgagccttatgtgctctctggagggaaggacaaatcagtggttttgtggagcatccaggaccacataacaacaacggctacggaccctactaaatctcctggatctggcggatcaatcatcaaacaaaacaagcctggggaaggtaatgacaaagctgctgatgggccttctttaggtcctcgtggtgtcttctgtgggcatgaggatacagttgaagatgtcacattctgtccatcaagtgcacaagagttctgtagtgtaggtgatgattcctgcctcatactatgggatgcacgagttggcactggccccactgtcaaggttgaaaaggcacataatgctgatctccattgtgttgattggaacccccatgatgacaatcttatcctgactgggtctgcagatcatac

SEQ ID NO: 496 - DNA, 141 bp, Gossypium hirsutum
  unsure (1)..(141): unsure at all n locations; Clone ID: LIB3825-008-Q1-K6-A4
ccccgcgtccggnttgctcgtatgcaggctgaagaaagcactgtacggccttaagcagacgcctcgggcatggttttccaaacttcgggagttcttacttagttcacagtttgtgtgtgctaaatcagatgcgtcgctgtt

SEQ ID NO: 497 - DNA, 604 bp, Gossypium hirsutum
  Clone ID: LIB3825-008-Q1-K6-A5
ctgaattccagcaaaattcatgggcaagggtcctggtctctacactgaaatcggaaagaagctagagatcttctttacaaggattatcagactgaccaaaagttcactttgaccactagctctcccactggtgtttcaattacctctgccggaacgaagaaggtgatcttttcttggctgatgttaatacccagctgaagtctaggaatgttacaactgatatcaaagtggacaccagctccaatctatttaccaccataacagttgatgaacctgcacccgggctaaaggcaatctttggcttcagagtccctgatcagaggtctggcaagattgaactccagtatttgcatgagtatgctgggattagctcaagcattggattgactgccaacccgattgttaacttctcgggtgtgcttggaacaaatgttcttgcactaggtaccgatatctcattcgacacgaagactgggaatttcaccaaatgcaacgcgggattcagcttcaccaatgcagacctcattgcttctttggctctgaatgaaaagggtgattcagttaacgcatcttactaccatattgtgaatccatcgaccaacac

SEQ ID NO: 498 - DNA, 607 bp, Gossypium hirsutum
  Clone ID: LIB3825-008-Q1-K6-A6
cagtatccctcccaccaaggtaagccatggttaaacataacaatgttgtgccaaatggccatttcaagaagcattggcagaactatgtgaaaacttggttcaatcagcctgcaaggaaggctagaagaagaattgcaaggcaaaagaaggccgtgaggatcttcccaaggccaactgctggacctctacgccctattgtccatggacagactttgaagtataacatgaagttgagagctggcaagggtttcacccttgaagagcttaaagctgcgggtatttcaaagaaacttgcacccaccatcggtatatcagttgatcaccgtcgtaagaaccgatctcttgaaggtcttcaagccaatgttcagaggcttaagacttacaaggccaaacttgttgtcttcccaagacgtgcacgcaagtctaaggctggtgattctactgctgaggagcttgcaactgcaacccaagtgcaaggaccatacatgcctatttctcatgagaagccttctgttgagctggtgaaggtcaccgaggagatgaagtcattcaaggcctacaacaagcttcgtgttgaacgtacgaatgcgcgatatatcggtgccag

SEQ ID NO: 499 - DNA, 606 bp, Gossypium hirsutum
  Clone ID: LIB3825-008-Q1-K6-A7
gggcaatatctccgacaagtctcattcatatcagtgtgagaccgtgcatatttatttgtggttcagagaagaaagaagaatggcagagagtaacgttttggtattgggcacctgggcaagcccgttcgtgctgagggtgaagattgcacttcacctcaaatctgtcaactacgagaaccatgaggaaaatttgccggaatccaaaagcgaccttcttctcaaatctaaccctgtttataagaaagtcccagtcctcatccatggtcataatcccatctgtgagtctctaatcatcgttgagtacatcgacgaggtttggaccacctctgcttcttccatcctcccttctgatgcctatgaacgcgcccagtcccgattttgggcggcctatgtcgaagataagttttccactgccttaagaagagtgttgtttggtgctacagaggaagataaaagggcagcaatggccgaagtctcagaagggatggtgctgttggaggaagtctttgtgaaattgagcaaagggaaagctttctttggtggggaaaatattgggttcgtggacatagtgttcggtagcttgttggcgtggattgaagtgatcga

SEQ ID NO: 500 - DNA, 279 bp, Gossypium hirsutum
  Clone ID: LIB3825-008-Q1-K6-A8
caggcagttgtaatatatgtattcgctgtgaagcttggccaatcctctcctaggtatgtaggatctgcatatcggtgggtttgagcagttgggttgggattatggtggttgcagaatgtgtgggtgagaatcgagtgatgtgtatgttgtttgatatgggattcgaatacttgtttatgttttcagggatggatgatgataagtgtcttttgtttaagttggggtgggttcactccaaacattttctgttatgaaataaaaagaatgcatgattttctc

SEQ ID NO: 501 - DNA, 59 bp, Gossypium hirsutum
  Clone ID: LIB3825-008-Q1-K6-B1
tcctcgttctgaacatcctcttggctgaatccgctctttacttcggttagcgccctgcg

SEQ ID NO: 502 - DNA, 615 bp, Gossypium hirsutum
  Clone ID: LIB3825-008-Q1-K6-B10
ctcccgtctctgttttgctcccatttctttcttcactatcttttctcttcaaaaatttcaactcttttctcagaatgggaagtaccgatgggaccagctatggtgcttacacctatgatgccctggagagggagccttactggccatccgagaaacttcgaatttccatcaccggtgctggtggcttcattgcttcgcacatcgctcgacgtctaaagagtgaaggacattacatcattgcttctgattggaagaagaatgagcacatgacagaagatatgttctgtcacgaattccatcttgtcgatcttcgagtgatggaaaattgcttgaaggttaccaatggagtggatcatgttttcaacctcgccgctgatatgggtggcatgggcttcatccagtccaaccactcggtcattatgtacaacaacacaatgataagtttcaacatgctcgaggctgctcgaatcagtggagttaagaggtttttttacgcctccagtgcttgtatctatcctgaatttaagcaattggaaactaatgtgagcttgaaagaatccgatgcctggcctgctgagccacaagatgcttacggcttggagaagcttgcaacgg

SEQ ID NO: 503 - DNA, 561 bp, Gossypium hirsutum
  Clone ID: LIB3825-008-Q1-K6-B11
tgagataacaagtggggcaactaccggacagaggaaaaaaaatgggcaggagtgatcgatgctctcctgcaggaacagctgggcgtcttaccgaccatgtatatcagggtcaagattgtcggcgcaccttacctctcctaccaggcgacctgtaggctcaacaccagtccgcggatcaaccccctgatatgctgctctctaccgcccctctaacctgcacaaactgaaaataaatctataactctgactcctacggcacgatctccatacgacgatactaccaccccttggcttttgaaggcgcctgatgacggggggcctcctatgacatcctgtcatgccaaccgtggaggttatcatcatctcggacattctctgtagggcactcatgctacacatgataaattacctacatgcttgagcgatcatggaagacactgtactgactttggcaggggccactatgatgcatatgggacacagtatcacatgaggtctaaaaaggctaatgtccataccacacaaccgatccaacgtgtagaatcgcatgaaacattgggt

SEQ ID NO: 504 - DNA, 622 bp, Gossypium hirsutum
  Clone ID: LIB3825-008-Q1-K6-B12
ctctcgctctctgtagccgccgcctgcgtctctctcttcatctctctgaaccaaaagtctttagcttttcgcttcgagagagaccatgttggtttaccaggatctcatctccggtgacgagcttctttctgactcattcccctacaaggaaatcgagaatgggatgctgtgggaagttgagggaaagtgggttgtgcaaggagctgtcgatgttgacattggtgccaatccttcagccgaaggtgctgatgaggatgaaggtgttgatgaccaagctgtgaaggttgttgacattgttgacactttcaggcttcaggagcaaccccctttcgacaagaagcagtttgtcgtgttcatcaagaagttcatcaagaacttgacaccaaaactggatgcggaaaagcaagagtccttcaagaaaaacattgagggagcaaccaagtttttgctttcaaaattgaaggaccttcaatttttcgtaggagagagcatgcatgatgatggatgcttggtgtttgcttactacaaggatggtgctgttgacccaacatttttgtactttgcatatgcattgaaggaggtcaagtgctgaggtttgaagcaaagaaaaaaaagtggttgc

SEQ ID NO: 505 - DNA, 602 bp, Gossypium hirsutum
  Clone ID: LIB3825-008-Q1-K6-B2
gttggattctggtgatggtgtgagccacactgtgccaatttatgaaggctatgctcttccccatgccattctccggttagaccttgccggtcgtgatcttacggattccttgatgaagatcttaaccgagagagggtactcttttacgacgactgcagaacgggaaattgttcgtgacatgaaagagaagctcgcatacgtagctcttgattacgagcaagaattggagactgccaagagtagctctgccattgaaaagagttacgaattgcccgatggtcaagtgattacaatcggagcggagaggttccgttgccctgaagtattgttccaaccatctctgatcggaatggaagcagccggaatccacgaaactacatacaactccattatgaagtgtgatgttgatatcagaaaagatctgtatggaaacatagtgctgagtggtggaacaaccatgttccctggtattgctgataggatgagcaaggaaatcactgcacttgcacctagcagcatgaagatcaaggtggttgcacctcctgagagaaaatacagtgtttggattggaggttccattttagcttctcttagcaccttcc

SEQ ID NO: 506 - DNA, 618 bp, Gossypium hirsutum
  Clone ID: LIB3825-008-Q1-K6-B3
cccctcttaagctctctctctctctctctctctctctctctctctctctcttgaacttttcaatacaaagaatcaaatttatttcttttcgcttttacccactcaccccatctctgcaatctgcgtttttttcaagtgttgtaaaatcaatctattttgatttcatggcaataaggacagctgggaaattgtttaaagatctcgtgcgccaaagggttatttccacttccataggaccctctagacattgctcttccgctgctgcttctgcccctaaaatccctcattcttcaaaaaaaggaagaaggttattgactggagctaccataggcttaattatagcaggtggagcttatgttagtactgttgatgaagcaactttctgtggttggctgttctcagcgactaaacttgtaaacccattctttgcacttttggatgctgagaaagctcatacactagctgttgcagctgcttctcgtggttgggttcccagggagaagagacctgatccagcaattctgggattagaagtttggggaaggaagttttcaaaccctgttggtctctctgctggctttgacaaaaatgcagaagctgttgaaggtttacttggta

SEQ ID NO: 507 - DNA, 607 bp, Gossypium hirsutum
  Clone ID: LIB3825-008-Q1-K6-B4
cttcaatctggttcttttgccctctcagtttctgcttggatttctgccgcttcagggactcgtccgatcagggctttacgacacgctattgctttcgccccaaagctgagggaactctttgatgaacctctgtacatgatagaagaattgaaccctccttatcgcgggccacaaccccaatagccgctttactttgtctaccgtcgtatgctgcatcgaaattgattttgactaccttgtccactggctttgtccatatttttacagatatggaagattgcaacctattttaaccaactgcatcaagatctgaaatatagctatgaacaaatctccctacttcttttccagatttaccatgttttttaggcaatctattgttcctgtctccccagatggcccatactgcaacacaaaagattcgatgctgaggagtcgagctttgtgagaaaacccaggttagccactgtagaaaccccatttgattgtcttgcaaaaacctatgaaaagataactctctccatactgctattgtagcaggacattcccggaagagatggtccatagtttcagttcctgaactacagcgaggacatactgacgtgtt

SEQ ID NO: 508 - DNA, 582 bp, Gossypium hirsutum
  Clone ID: LIB3825-008-Q1-K6-B5
tgaagagggaatagagcctgaacagtgacggggctgtcttgagaattaaacccctatcgaacggaaagaccgcgctgaaaatcttcttttaactttcagtcttgtcgcatgttcatgtgctttgcttgcaatctctggtgtattcatttttaaatttcgagttctaagatacaaaaggctgttggaaattggaaatttgggcctaaccggagagcttacgttggcatcgttttcatacaatgtactcaagagagcaacgaatggttttaaagaagagttgggtaagggatcctttggagcagtctacaaagggtccttaaacagaggaagaaatttgattgcagtaaagcgattggagaagttagtggaagaaggagaaagagagttccaagcagaaatgcgagcaattggcagagctcaccacaagaatttagttcgacttttgggatactgtgctgaggactccaagagggtgttggtgtatgagtacatgggcaacggctcccttgctgatctactgttcaagtcaagacagcgccctgattgggatgaaagaacaagaatagccctggatgtagctag

SEQ ID NO: 509 - DNA, 614 bp, Gossypium hirsutum
  Clone ID: LIB3825-008-Q1-K6-B6
gccggcgccaatcagctgtccgccttgactgaccgtccggcatcgtcttggccctcgattttgcccttttgtaaaccttttttttcaccaattcccgaatggcagtgaaaccctccaaggccgataagaaaatcgcgtacgacgcgaaactgtgccagctcttagatgagtacacgcagatcttgatcgccgcagccgacaatgttggctcgaagcagctccagaacattcggaaaggtctccgaggtgactcagttgttttaatgggtaagaacactatgatgaaaaggtctgttaggatgcatgctgagaagactgggaacgaagctttccttaaccttatccctttgcttcagggaaatgtgggtttgatctttacaaagggtgatttgaaggaagtcagtgaggaagttgctaaatacaaggttggagctcctgctcgtgttggtctggttgcgcctattgatgtggtcgttccacctggaaacactggtcttgacccatcacagacctctttcttccaggtgctcaatattcccaccaagattaacaaaggtactgttgaaattatcactcccgttgagcttatcaagaagggtgagaaggttggttct

SEQ ID NO: 510 - DNA, 618 bp, Gossypium hirsutum
  unsure (1)..(618): unsure at all n locations; Clone ID: LIB3825-008-Q1-K6-B7
cagaagggaaaaaagactcttatggtctgcatggaagatttaattggaaagttaagaagaaattgtcagaagtttctcttttattcctttgctgacaagtaatgataagaacttaaggaggacaaaactggcaaaactaccatgcctctgaggaagaacatgttgatattaactccatgccagttcctaaaccatcatgngaaaaattttacttactcagagcttgctgctgctactgataatttcagtcctggtatgcaatttcattttaagcttaattttcctctctttaaatccaatgttttagcagttagaaattttagatagatgaattggttcttttttctaatcaggtttatttagatgaaacaatctttttaaagttggttaaatttgaacgttcttatatttgattctagttgaatttatcaattattacgtcggcagccaggcagtcaaacttgtctgcaattgaaggcaacttaatggtttaaagagaagagttatttaatttttgactaaaatgaaatttagttggggggttgaaatgaaattgatgttggaaaatgacccttgctgtgaaccatgtaacatccatggaactntgattgacttaat

SEQ ID NO: 511 - DNA, 619 bp, Gossypium hirsutum
  Clone ID: LIB3825-008-Q1-K6-B8
gttctgaatctttcgcttgcaggctttctccctatcacataaacactctggggcggcgactcttgagaaaagaagcaaaataagactattgattggtgggtaaactataggaaacgtatccggtactctttaattgtggctcttcccgagcgctgctatatctaatctccgtatcaatgcatgatggatacctggaaatggcgggggtcccgtcacaacaataggaaaaaggcaatccgatttgaaaaagtctttcaagctctccgttcgctctcttcttactactatgctctacacaggaattaatcaaaacgtttccaaaattttcaagtatttatcaagaacattttcaccatctttctattcaagtcattacctttttacatgggaatatagaggacgaatttgagtctttatgcaatgaaacacaggtaggagatgcccttgatactgtggatcaacttgtggaagaacaatctcttgaccctttgtcttcagataggactaacgtaatggatgcagtgcacaatctgtcagcagcgaagaaagctgagatccattacttaagaggcctgctggaaagggctgaagaacataatcggcttattcaagctcgggt

SEQ ID NO: 512 - DNA, 622 bp, Gossypium hirsutum
  unsure (1)..(622): unsure at all n locations; Clone ID: LIB3825-008-Q1-K6-B9
gtttggtgttatatgctagnaacatatgttgttggcatgcgtgcagtgtaccgcattccataatcttatttggttcattggtaaatgcagggccccaagcgaggtggaaaggtggccgtcccagccaagaagaaacaagagaaggttgtcaatccattgtttgagaagcgtccaaagcagtttggtattggaggggctctacctccaaagaaggatttgcatcggtttgtgaagtggccaaaggttgtccgcattcaaaggaaaaagagaatccttaagcagaggttgaaggtcccacctgcattgaaccagtttaccaagactcttgataagaaccttgcaacaagtttgtttaagttgcttctcaagtacaggccagaggacaaggcagccaagaaggaacgtctcctgaaaaaggcccaagctgaggctgaaggaaaagcccccgagtctaagaaaccaattgttgtgaaatatggacttaaccatgttacctaccttattgagcagaacaaggctcaattggtggttattgctcatgatgtggatccgatagagttggtggtgtggctccctgctttgtgcagaaaaatggaagtgccttattgcatcgtcaagggaa

SEQ ID NO: 513 - DNA, 609 bp, Gossypium hirsutum
  unsure (1)..(609): unsure at all n locations; Clone ID: LIB3825-008-Q1-K6-C1
tcctgatgttcaaccaccaanataaagagccagttcgtaattcggggaacaacccgttaacctcataaggaattctatcaagatattggagaagcataagggtacgttcaagcatatcgataataagcagaagccagaacatatagattggtttggatggaacacctgggatgctttttattgtaatgtagatcctgaaggaatcaaagatggactcgaaaatttctcaaagggaggttgtcctccaaaacttttaaccattgatgaaggctggcaaaatatctttcccagctatgaagagaacccaacaggggaattgtcaagattaattaatcttgaggaaaatgcaaaattcaagggctcaaagttggataaatcaggaaaaaatctcagagattttatcaaaactatcaagcagaaatatggattgaaatatgtatacatttggcatgctatggctggttactggggaggggttcttccagaatctgaagtgatgaaaaaatacaaccccaaaattcaacctgttgttcagtcccctggtaatctgacccatgttgtatgttcaaccctggacaatatacaggaaaagggaatcgggctaattga

SEQ ID NO: 514 - DNA, 570 bp, Gossypium hirsutum
  unsure (1)..(570): unsure at all n locations; Clone ID: LIB3825-008-Q1-K6-C10
ctttttctctctaatggctgcatttcatctcagttaggtcaattagaatggagaatggtaataattgtaacctgatgggtgcaagcaatgaatctagaggtgccttggtagtttttgaaggattggatcgtagtggtaaaacttcacaatgtgggaagctgctttcgtatttagagggtatggggcattcagtcgagttatggcgattccccgacagaactacaagcgttgggcagatgatatcggcatatctgactaataaatcccagttggatgaccacacaatccatctacttttcagtgcaaatcggtgggagaagagatcaatgatggaagcaaaactgaaagctggaaccacccttatagtagaccgttactcttattctggagtcgctttctcatctgctaaaggacttgatttcgaatggtgtaaggcaccagagaatgggctaatagctccagatctggtagtgtaccttgatataccgcccgagaaagctgcagaaagaggaagctancggagtgagagatacgagcagctcgagtttcagaagaaagttgcacaacact

SEQ ID NO: 515 - DNA, 531 bp, Gossypium hirsutum
  Clone ID: LIB3825-008-Q1-K6-C11
tgatgccaagcaaagttgcaatgaagttcttttctggtgtgcatgatgcatccatatttggtgccttgatctggatcaaaaacttttgtatgaaaggccaaatgatacttctgcacactgataccctgcaggctgctctgctgcttgaactgtaatgtgacaataacagtttcagcaagagtctattttacaaaaacaacaatcatccttggaatggtgcaatgagactacctagcagtaagcatcaattttcaggtagttgacactgcccttcatttacttctaatttcagttatcataggcaattaaatgaaagtgggatcttttacatttatgtaaagcgtccatcctattcttggatttgcaatggccaataagccaaacggttttaagtagttggcacttagaacaactcaagcaacatccatgtttaagatgatagagctgtaaggtatttggcattcatatatgtttaaagtcttgcaatagggtattgtaccattggattttagatgaaagtgacgtttttgt

SEQ ID NO: 516 - DNA, 602 bp, Gossypium hirsutum
  unsure (1)..(602): unsure at all n locations; Clone ID: LIB3825-008-Q1-K6-C2
gnacagtataacctanaagattccttgtggattatgacgatgccaagttctttgttattaaatcatacagcgaggatgatgttcataaaagcatcaagtacaatgtttgggcgagcacaccaaatggtaacaaaaagcttgatgcagcttaccaggaagctcagcagaaatctggtcactgccctatatttcttttcttctcggtcaatacaagtgggcaatttgtcggcattgccgagatggtaggggcggttgattttcaaaagaatgtggagttctggcaacaagacaaatggactggctgtttcccagtaagatggctcattattaaggatgtacctaataattccttgaagcacattaccctagagaacaatgagaataagcccgtcacaaatagcagggatacgcaagagatcaagcttgatcaagggcttaagttgctcaaaatcttcaaggagcattccagcaaaacttgcattttagacgatttcgaattttacgagattcgccagaaagcaattcaggagaaaaaggctaaacatcagttgcaaaagcaggtatgggaagaaaagcctggagatgaaaagaaagatataaca

SEQ ID NO: 517 - DNA, 609 bp, Gossypium hirsutum
  Clone ID: LIB3825-008-Q1-K6-C3
agcaaatataccctaaaaaccctttcactaaaaattgaagatgcagtcaatgaaggatgctgctgcctctgctaaggccggcatggagaagccaagcctccatgcagaaaggtggaccaaatgaagacaagggaccctaatgagaaagagatggcgagggaaaggaaagaagagagacaagaagatgcagagctgaggaaacaagaggcccgccatcataacgccacggctggccatgctggtggtggtggtattggtggtactggctacaccacagctgggtacaacagaggggatactggtggctatggcggtaccggtggacatgacaaccgtgggtaccccaccgcaggtagtgggtatgatacaggcaggcaagatgacctcagcagtatggggtttggcggagatacagggggtgcttacggtacaacgggaaaccaagacttcccaagtgcggcgcctaacaatgctgggactagaaggagcacccgcggaggtacccaggatgatccttattatcgatcctattaaatgaaaggagcgactttttgtgctctgctactgccttgagtctgtgtttgttgtttgtttgcttctacttttttt

SEQ ID NO: 518 - DNA, 591 bp, Gossypium hirsutum
  Clone ID: LIB3825-008-Q1-K6-C4
gttttcactagctagttatttgtttgacggtaaatgaggaatcaaattggttgagctgacgtgaggattaggatctagtatggagtttgaagaaattattgttattgaactttgtttcttcttagttgtaactagcttgaggatgaggatatagtatgaatttcgaagaaattatagttgttgaactttgtttcttcttagtgctaacaagctatatggcaggttaaaattgaaaagatatatatattttaaaatttttgtatgcaggaaactatataagctgaaaacaataaaatgtttaagatgttttgatgtttttataggatttttggaatttataacttgccaggttcgaagttatggcagatgggtgttgatattagcgtttcttcatcgtgcataagtggataagtgatatacctaattctttgcctttctgtttgttatctaacaactgattgttcaatggggctatataggttaatatgggaatgtctatgaacgtggttgtgctgtcattgttcgtcttgtctattttgttttctgtcatgactgcatccgacgatgggttggttagaattgggctgaaaa

SEQ ID NO: 519 - DNA, 302 bp, Gossypium hirsutum
  Clone ID: LIB3825-008-Q1-K6-C5
aggcctccaaacttcgtactcatctcgcgaatacccaatttatttaaaaccctaaaaattgaaggaatcatcaaaaactctgaaagccaatattgaaactttagggaaaaagaaaccatataatgcaaggaacagatgagctaagcatacatgacctggcttcaagtctctctacgtataaggaacagcttcagcaggttagacagcttctggctgatgatcctggaaacgctgaatatgtggacatggaaaaggagctcgctgaggtgattgctctgacagaggaactgcttgcaactgcg

SEQ ID NO: 520 - DNA, 609 bp, Gossypium hirsutum
  Clone ID: LIB3825-008-Q1-K6-C6
tccggcgccgtttcggttgttgaatatgtcttctccgctttcgacttcggcttcggcttcatcggcttatgagtactatcttcgtttaccggagctgaggatgttatgggaggcaaaggagtttccggattggcaaaacgaggtcgttttgaaaccggctttgcatgctttggagactaccttccggttcatttcgatcgttttatcggatcctagaccgtattcgaatcgccgggagtggacgcgtcgacttgagtcgcttgccacaagtcagatcgaactcatcgctatgatatgtgaagatgaaaacgaagacaaaacgacggcgggaacggctccgatcgttgatttgacgtcgtcgaacggtgtgcttgctcgtgagtgtagctccaccgaggtttggaaggtccatggagaaaccacggtggtgaaccggaccagcaaatccagcttgctaccgcggctcgccacgtggcagaaatccgaggatgtggcggagaaaatcctttactccattgagtgtgagatgaggcggtgttcgtacactctcggattaggagaaccgaacttatccggtaagcccaacttggattacgacgccgtttgcaa

SEQ ID NO: 521 - DNA, 542 bp, Gossypium hirsutum
  unsure (1)..(542): unsure at all n locations; Clone ID: LIB3825-008-Q1-K6-C7
gctatatttcagattcttgaagttttgagaggctgaaacacagggtgtcttactgaagaacttgcttgccaatgtatttcattttacacacaactggggagattggaggaagccaagaaagtagcagagaacctttgcagtgngaaaaatttcagattcagtacaactgtggcttttaagggtttcagtagacattagatgtatcacaaaggattctctttctcctagcaaggctgatgcattatccatctttgaactttttagaactgttctaacaaaaatgtcaatatcagaagctgagagcttgtggataatggctctcaaattctttgcaaatcagaaaaaatcttttgagaagctgattgaactttctctcaaagcagtcgctaaatatggtggcagtgagaatgggttctctctttcttcagctgtagttaatttcatccttcaaaaggatggacttaaacatgcaagagaggtttataagcgattcctggctcttacctcatccagtcttgcattatacaaaaattgcattgaat

SEQ ID NO: 522 - DNA, 590 bp, Gossypium hirsutum
  Clone ID: LIB3825-008-Q1-K6-C8
gtcaaaggtacaccctacacgcaacagtcctacaaagttagtgacgtatttcctttcaaatggattaataagaagtggaaagaaggcttctctgtgacctcaatgaccgctgcaggcagcaaatggggcattgtcatgtcccgtaatgcaggctatcctactcaggttgttgaactcgatttcctttatccaagtgaggggattcatagaagaatgggaaaaaggatatcggattaccgcagcagctgctacagaggaccaagctgcattcatacttagtgcgtccaagagaaaatcacaagatgtaatgcaagaaactttgcgtacatctgcttttcctagtacccatgtaaaggataaatggttgaaaaatctgtatatttcatccatttgctatgggaggacagtgtcctgaagtttggtattcggaagaagcaactgcagtttacaagttaaaaggcaggtaaactatcccggtctattattcaaggccttgaaattaataacagttgatgagtcttgtaaagattccatctgattgcgcattttgtcccgctaatacttaatgctttgaatcaaaagtttccttc

SEQ ID NO: 523 - DNA, 600 bp, Gossypium hirsutum
  unsure (1)..(600): unsure at all n locations; Clone ID: LIB3825-008-Q1-K6-C9
cttcctggaatcccanatctcaaacaccgttccaggatgaccctcgttttgccaccaccacctccacgaaaagaacagacaaacaggcgagaaaaaagaatggcaatggccaaacgtgggctaagatcactagtcatagcagtttccttccctttgtctctcaccttgttaaacatatacttgtttggttcaggtcgtggttacgcctctttagccaaacctttctggttccctcctttgtggcttttacatacaggttgcttggcttcgagcttcgtgatggggctgtcggcttggtttgtttgggttgaaggtgggttccacgttaaaccgacggctttgtctctttatttgggttacttaggattgagtatggcttggcatccgactgtgctttggatgggagctagctgggctgggttgcttgtgagtttggcgatggttgggaccttggtcgggtgttcaagagattttggaaaggtgaatccgattgctggtaactcggttatgccttgtttggcttgggctgcgtttttggcgactgtaaatctaaaacttgtcttcctttgaagcatataccaccatcttttgttctgcaag

SEQ ID NO: 524 - DNA, 55 bp, Gossypium hirsutum
  Clone ID: LIB3825-008-Q1-K6-D1
cgttcactaacctttcggcatctctcaatttcttcctctgcattcaatttgcact

SEQ ID NO: 525 - DNA, 623 bp, Gossypium hirsutum
  Clone ID: LIB3825-008-Q1-K6-D10
ctttcttatactgtaacagccatggaggctgtgaacatgaagaaacagacccaaaatagtggtggccgtggacgagagtgatgagagcatgtatgcactttcatggtgcttagcaaatttgatttcccagacctcaaccagcaacctcgtccttctttatgtaaaaccttcaccccctgtctactcttccctcgacgcttcaaggtatatgttttccaccgatgtgatcgtagccttggaaaaatacggcagtgacatggtgaatacagtgatgagaagagccgaagctatttgcagaaaatccaccaccaaaataaatgtggagagaatcgtggggagtggagatgccaaggatgaaatatgtaacatagtgagcaaaatcaaagctgatacgttggtgatgggatgccatgattatggtttcttcaaaagggcaattctgggaagtgtgagtgatcactgtgctaagcatgttaaatgtccggtggtgatcgttaagcacccaaagcagatttgaagttatcttctccatttttcttcgcgtaatatcatctgatgcttcctacaagaagcatggtgtaggtgttaaaagttgggcactgtatattgtacttgtcaattcc

SEQ ID NO: 526 - DNA, 614 bp, Gossypium hirsutum
  Clone ID: LIB3825-008-Q1-K6-D11
gtcatctctcatgcccggcagctcaaggagaaaaagctggcttacgcgatctgggtcaaggctgcctctgctgcccagtaagctctgggcgactgaccgttctccctgtgagctctacttacttgggaggaccataacgttacctacataagtccccctatcaatatcagcgacttacctcagtggtctttggagataagatcactagggcaagtaccattggcaaagtttgatgacaattggtgggctgaggctcacgcactggatcgactccttaaacaaaaataccctcagcctttatctcacaacccctcctcattttgcctctgttggatcaaacatatttggaacttttgccacatttcttaagagcaaagatgctaatgatggatctgagcaggcttagcttaatgaactcatggcattggatgaacatcttaaggcacatggcccattcattgctggcgaaaagataagtgcagttgatttagctttgggacccaaactttaccatcttgaggttgctctgggccatttcaagaaatggactgttccggaaagcttgactaatgtgcgcaatcacatgaagtcgatatgcactactgaatcgttcg

SEQ ID NO: 527 - DNA, 621 bp, Gossypium hirsutum
  Clone ID: LIB3825-008-Q1-K6-D12
gtggtatgtccgtgtcaatgttattgaggctcaagaccttgttccagctgacaagagcaggtttcctgatgcatatgttaaggttcagattggtaaccagatcttaaagacaaaaccagtccaaactcgaaatatgaatccaatctggaacgaagagtttatgtttgttgctgccgaacccttcgaagatcatctgacttttacagttgaagatcatgcaggtcctaataaggatgagaccattggaaggactgtcatagcattgaactccattgataggcgtgctgatgatcgctttgtccgtacccggtggtacaacctggagaaatctttatccgatgccatggacagtgatcgtgcaaagaaggataaatttcatagtaggctccatgtttgtgtttgtcttgatggaggataccatgttcttgatgaatcaactcagtatagcagtgatctccggccaacagcaaagcagctctggaaatcgtcaattggtgttttagaactcggaattttgaatgctgacgggctccaaccaatgaaaactagagacggaaaaggtacatctgatacatattgtgttgcaaagtatggccataaatgggttcgaactcgaaccat

SEQ ID NO: 528 - DNA, 608 bp, Gossypium hirsutum
  unsure (1)..(608): unsure at all n locations; Clone ID: LIB3825-008-Q1-K6-D2
ngaaacacacacaaatttcaatttacaattatgatccgaaccaacgatgatgcttcctcggcctggtcttggcaccaagacaagctgttcgagcgagctttggttatgttctccaacgacgaatcgtccgaccggtggngaaaaaatcgctgcccaagttccggggaagtcggcggcggatgttaggagacattacgaggatttggagcatgatgttttggagattgagtcaggaagagtcgagttgccgagttatgagggtgagttggaatcagcgagttgggttaacgagtcaggtaggagccaagtttgggttggatccaaaggaaaggaaagggaaagcgaaagaaggaaaggcgtcccttggaccgaagaagaacacagattatttttgattggacttcaaaagtatgggaaaggagattggaggagcatatcaagaaatgccgtcgtttcaagaacgccaactcaagtagcgagccatgcacagaagtactttcttcgtctcaactccgtcaatgaaaaaaacaagaaaaggtccagcattcatgatttgaaaatgggagatgataattccatggacccccaatccaagtttttcaatgaac

SEQ ID NO: 529 - DNA, 615 bp, Gossypium hirsutum
  unsure (1)..(615): unsure at all n locations; Clone ID: LIB3825-008-Q1-K6-D3
cggacgcgtgggcggacgcgtgggttggtgctggcttcatccctggggttttagatgtcaatttaatcgatgaagttgttcaaatatcaagtgaagtagctattgaaactgcaaaacaacttgctctngaaagaaggattgttggtaggtatatcatctggtgctgccgccgctgccgcgattgagatagccaagaggccagaaaatgccgggaaactcattgttgtggtcttccccagctttggagagcgatacttgtcttccgtgctgttcgagtccgtgaaacgggaagcagagagtatggtgtttgagccttgagatgaaacatggagaaggtaacctattgatcaagcaacattaccaactttccccattgatggttcttgttttcttctagggttatataaaaaaaaaagaatgtgtttggacatggtgttgaaccctgtttgttgctgttcactgtatttcttttcaaagttttaacacatattaataaatatgttacattagaataaatattaatcgtgtttatggaggtgcagtcgctcaatgtttgaatttgattccagataaatgtgggattgtttgaaataataaataagattagttcaagct

SEQ ID NO: 530 - DNA, 610 bp, Gossypium hirsutum
  Clone ID: LIB3825-008-Q1-K6-D5
ccaaaaatcttttcaatgtcttccagtgacaagttcccggctccgacaccggctaaaggtgccggaggcaaccgccaccagggcaacccatgtcgatgggtcagcatgtggtggacaagggagcatcaatgctgcaggcattgaccccagtgaagcaaatcagccaacatgtctgcacctttgccttgtatagccatgatatgcaccgtcaaatcgagactcaccactatgttagcaggctcaaccaggactttctccagtgtcctgtttatgattccgatgactccaatgcccgcctcattggaattgaatatataatatccgatagtttctttgaagctctgcctcaagaagagcaaaaactttggcattcccatgcttatgagataaaatcagggctctgggttaatcccagaacaccagaaatgatagggaaacctgaactggaaaatcttgcaaaaacctatggcaagttttggtgcacatggcaggttgacagaggtgacagacttccacttggagcaccagcattgatgatgtcaccaagggggtgaacctggggaaaatcgagccagagctagtgaagaagagggatgacaaatacagcatc

SEQ ID NO: 531 - DNA, 595 bp, Gossypium hirsutum
  Clone ID: LIB3825-008-Q1-K6-D6
aaacaaacaacaaaggttgattcaagcggaaacaggtgggggcatttgtttgaggagtttagttttgtttgctctcgtgtattgtactgtttcatccatgcagcggatggatttcttctacttgttatgaagaattttggttctgtttgattggataatcccaaaaattcaatttgtgttcttagttcttaaaaaaaaaaaaaaaaaaaaaaaaaaaaaaaaaaaaaaaaaaaaaaaaaaaaaaaaaaaaaaaaaaaaaaaaaaaaaaaaaaaaaaaaaagggggggccggttttaaagaaccaaattttcctccccggcctttcaaactaaaaattttttttttggggccccaaaaataaaatcactggccccggttttaaaaccgccggagacatgggaaaaaacacctctgggggttccaccaaaattttaatatgcctttataaagaaaataccccctttttccccacaatggcgttaataaagaaaaaagccccccccaaaccccctttccaaaatttgccccaccttaatgggaaatgggacccccccttttactggccattaaacccggggggggggggggtttcccc

SEQ ID NO: 532 - DNA, 191 bp, Gossypium hirsutum
  unsure (1)..(191): unsure at all n locations; Clone ID: LIB3825-008-Q1-K6-D7
ggggatagnatttggntcggnagtgnngctgaacaggactagctacgcaactcctgatgttacagaagaataggagggatctcaacaataccacgacaaggagnaaataaggggtagctntctaaagtgccccgacccattgttccggaaaagttatgaagacagatgatgctggctatggctgtatctct

SEQ ID NO: 533 - DNA, 617 bp, Gossypium hirsutum
  Clone ID: LIB3825-008-Q1-K6-E1
attttgcccatttcactgctctcccctagatcgtctccaaaaaagagatctccttacagctaccgtacacattcacacacacattcactgaatgggtcgagtcatccgagctcaacgtaagggtgctggttccgtcttcaaggcccacacccaccaccgcaagggtcctgctcgtttccgcagcctcgacttcggtgaacgaaatggctacctcaagggtgttgtcaccgatgtcatccacgaccctggccgtggcgctcctttggcccgtgtcgtcttccgtcaccctttccgttacaagaagcagaaggagcttttcgttgccgccgagggtatgtacactggacagttcgtctattgtggtaagaaggctactcttgtggtcggaaatgtattgcctcttagatctatccctgaaggagctgtcgtttgcaacgtcgagcatcatgtcggtgatcgtggggttttcgctagggcttctggtgattacgctattgttattagtcacaaccctgataacgacaccaccaggatcaagcttccatctggttcgaagaagattgttccaagtggttgtcgtgccatgattgggcaggttgctggaggtggtaggactg

SEQ ID NO: 534 - DNA, 626 bp, Gossypium hirsutum
  unsure (1)..(626): unsure at all n locations; Clone ID: LIB3825-008-Q1-K6-E10
gatgaagaagaggcaaanaactggaccaaattcttgaggaatgcttggaggaacataaacggaagagaaattcaggcaaatcatacggcgaacatgatgatttcatgtacatgatgttgtcgcttcttgaagatgctgaggaccacccttcttatgatgctgacacaatcaacaaagctacctgcctggttagttcttatccacaaatcgcttctgatttttttcattatttaaatccgatatttatgtcaagaattaagattggacaatatcaacgtattaagccacgctgcctttggatctgaaaatttaggtaatgttttattaatttttacaaaataaatggagatagagtgggtttcacatgtcttgttttctccatttaagcccaaaattattgaagcgtcacagttggagaaagaggtacagttgattgaattttgaatcccatggtagaatttatcttcaaaactgtttcgttccttttgcaaggcgataatcttaggtggaaccgacacaacaacagtgacgataacatgggctctatcgttactattaaaccaccgcgatgtgttgaagaaagcccaaaatgaattagacacttttgtcggtaaagacaggctagt

SEQ ID NO: 535 - DNA, 604 bp, Gossypium hirsutum
  unsure (1)..(604): unsure at all n locations; Clone ID: LIB3825-008-Q1-K6-E11
agcgagaaactagnaaggaagnaaaagaaagactccagaagctctcatcttcgatggcatcggcagccacggcccgagctgtcatcctctcccgcatcactgccctttcagtcaaacctctatcaccttctctctctcgcttcctccctagccctcgcaaccgtcctccttcagccttgaccgtgagctgctgcttaaaggacggcggagcctacgacgactactccgtttcgacgcagaaatcgaatttagatcgtggattcatagtaatatctaacatgttaaagcacatcgaaccactcgacacttccgttatttccaaaggggtttctgattccgccaaggaagctatgaagcgaactatctccactatgctcggaattctcccttctgatcagttctccgttttggtttccctctcgaaacctcctcttcatcgtctcctcttctcatccatcatcacagggtataccttgtggaacgcggagtatagggtttcattgatgagaaatctggaaagagcggcaccggcggaggacctagtgaaggagacggaggagggcgctagtcaccggcacggagaggtggtgaagaataatattga

SEQ ID NO: 536 - DNA, 409 bp, Gossypium hirsutum
  Clone ID: LIB3825-008-Q1-K6-E12
cggccgcgtggggtgcaactagtggagtgcttggcgtaatataccctcttctcatggcggctttcctgggcgtcggtgatggggttttgaacacgcagctcagtgctttgcttgctctactttttaagcacgacacggaaggagcgtttgcacagctgaaggtgtggcagagttccgcgattgcagtcgtgttctttttgagcccagttgtgacattgcagacaatggtggagatcatggttggtgcgatttctatttctttggtttcatttttattccttactctgaaggtagagaaagcattctcttcgcaccaagttaccaacatgtaatatatttcaaccaagctatggtacaaccaatgtttcttcaaatttgggaaaacttaattacatgctacttaatcttc

SEQ ID NO: 537 - DNA, 578 bp, Gossypium hirsutum
  Clone ID: LIB3825-008-Q1-K6-E2
ggcaacataatctttatttgccacagtaccttatgacaaagctaccgctcgattctggatcaagttcatcgacaaaagtgctgtcctacccttcggctagctgcatggagcccccagaatgagcgagaaaaatgacaacacgaagcttgctgagtatatgtaaaacgcttcgaaagcgcgctcaatggcaaagaaattgtcttggtggaggaaaccattggtaatggtctatatgggtgctagctctggtgggtatttcattacggtcactcaagatattatggggctaaatctgctgtcagctgacaaatttccccaatgattccaatggtctgaagatttcgcaaattgcagcgttggttaggaaagtttacctccaagacacaaactacttccctttgtgcaaaggtctcattgccaaatctcagcaagataatgctaaggcctaagccctcccaatgaacgcctgtcacaatgattgtcgcatgcaatttgccttttttggatttgctgcttttgggtgtaatgagctacttgctcttatttgcgagtgaaaccataattaactcattgtaccc

SEQ ID NO: 538 - DNA, 621 bp, Gossypium hirsutum
  Clone ID: LIB3825-008-Q1-K6-E3
ggcatgagaaatgacgtactcttgtgcagtatttaaggacagaagagaggattagaaagatgcacatcacagaaaagatctctcttttgaattgaaaaagctagaattgatagcaagcatagaaattcttagaaattggatgtggttggggaagcttatctattgaggttgtcaaacgaactggatgcaaatataccggcattactttatccgaagagcaactcaaacttgcataaaacaagagtgaaggaaagctggcacttcaggtaaaatataagattacaactctgtgactatcgacaactacctaacacctacaagtatgacagaattatatcgcgtgagatgatagaagctgttggccatgaatacatggaggacttcttcagttgctgagaataattgttagcagatgatggacttcttgttttacagttcatatcaataccagaggaacggtacaatgaatacaggcgaagctcggatttcatgaatgaatacatcttccctggtggatgcttaccttctctggctaggataacaacagccatgaatgctgcgtccaaactctgtgtggagcatgtggaaaacattggacttcattactaccaaacgcttata

SEQ ID NO: 539 - DNA, 621 bp, Gossypium hirsutum
  Clone ID: LIB3825-008-Q1-K6-E4
attttcatttcagtgaaggacaagaaaaaaattttaaaaaaaaaaagaccctctgcagccatggctgagcatcaccagcaattgcgccgaactgatgacatgaagaatttcttccatgaaaatggaccctcaacatcaaaagttcttatggttgccaccctccttcctgttggtggcatcctcctcttgcttgctggtttgagccttattggatccctcataggtcttgctattgccgccccacttttccttattttcagccctgttttggtacctgctgcttttctcattgcgggttccatagccggattcttgacctccggagcatttgggatcactggactgtcatcgctgtcgtggattgctacttatattcgtggaagcaggggctctatgtctcaggggctagacccagtgaagtggcccttgccggacacggcagtgagtatggagcagaagatccagaataggagccaaggaggaggaaggatctctgagggaggcagagaacaggaaggtggcaagagtaagacacaagaaggtggcaagagtaagacacaagaaggtggcaagagtaagacacaagaaggtggaaacaagactgtgggttgaagtttccta

SEQ ID NO: 540 - DNA, 623 bp, Gossypium hirsutum
  unsure (1)..(623): unsure at all n locations; Clone ID: LIB3825-008-Q1-K6-E6
gtggttaaagagctaatggnaaaagcaaattttgagttacaatgcaaaagctctttgtgtgggtaaaggctcaatgtcagctgttatggcattgaaagacttgggattcagtgatgttactggggtttataggcacccttgtttctctctcaagcataagaaatttgtttatgagcttgattatgaggacaattcttatgattttgtgatatctagggacttagataaggcttcagcccctgctatgctggtgcttgaggttgaacgtgttcttactcctggtgggatagggtccatgcttgttggtcgtagtggtagcttgatcaggtctgtaactccaatttcttccttattgaaagcttccagtgttgttcatgttgattacgtgaatggctttgcattgattgtattcaagaagaaactcaaaaacggcacttacttcgagcagtatcggctaccagccgattgtcggtctatggcaaacaccaaacctatattggataacattgagcctcttttggagaagaggccagttggatttgagaaaactattgcttatttgcctgaatttgttaacatttctcataagcaacgtatggtgtatattgatgttggggcaagtg

SEQ ID NO: 541 - DNA, 623 bp, Gossypium hirsutum
  Clone ID: LIB3825-008-Q1-K6-E7
gccaggacagcccataaagccccaagccaacctgagagccggtgctgttggtcccgatgagagcaacgaaatggtcgaaagagagggcgtagctgtatctaaatcaacagatgcccaagggaaacttgttgttaacgaagctattgctgaccatacggtatgtgagtgtcagtacaatccatatgatttgcgaggcattaccctttctccatctccatctccaacgataagaaatattcaatggacagctccatctccgtccccggctgcggctcccaccacgggtgatgttgttgatcaaagtggcatcaccattggagaagctttggaggcaacagtcctctctgttggtgacaaaccggttgaccaaggtgatgccgctgcaatacgagtggctgaagcgagggctgctagcagcaggctaactcaacatagtggtcttggcactagagctcaagctgctgccactttcaacgaccgtgcgtcttatggtcataataagatcactatatcagatgttttatcggatgcttcggaaaagctgcctacggttaaagcggtgacaaatgaagatgcagaagaggtgagaggggcggagcaaagaaacaaggctgacatgatag

SEQ ID NO: 542 - DNA, 624 bp, Gossypium hirsutum
  Clone ID: LIB3825-008-Q1-K6-E9
cggccgcgtgggcggacgcgtgggcgattttttatatgattggaaggaataagagtagaatttattggagagtattaaagattgatcggcttgatccttttgagctaaatattcgtgaagattctaccacgtatacagagtttgaatgctctgagttgttgaggcgaatacatgaaggaaataaatccaccggtggattgaaatttgttaccgcttgttatggcattgttgggtttgttaaattcctggggccttactatatgctgcttattacaaaacgaagacggattggagcaattttcggacacaatgtatatgcagtttcgaaaagtgagatgattcccctcccaaattcatctgttaacccaagcattgcggactttaggaaagagaacaggtacaagaagctcctaagctcagtggatcttacaaaggacttcttcttcagctattcatacaatgtcatgtgtagtcttcaaaagaacttgtataataatgaaccaggtgaggttctttatgagaccatgtttgtttggaatgagttcctgacccgaggaatccgcaatcacctcaagaatactctatggacagttgccttggtgtatggcttctttaagcaggcat

SEQ ID NO: 543 - DNA, 603 bp, Gossypium hirsutum
  Clone ID: LIB3825-008-Q1-K6-F1
ctctcatttctctcttttcctctaatccaaacatgcctctccttcaactctctccttgaaacaagaaaataaggaagagcaaaatcagagaaaaaaacttgaataattcttggtttaacaaatgcttcgatgggtttggggtcaatgatggtttatttgacgacgtagtgaagtatttagatttcccattggaagatgttgaaggaacggatgatgatggtgctagtggtgaaggtgttgtaaaagattttcatctgcctctcggtgatgttgaagataaaagttatgttggtggcggcggtgatgatggtggtgaagattgggattgtaacttccaaaacttggagccgccgcccactaatgttttggccggcttgtcttctggttttttgtggcgattttttcagtgatactttggagaataagtttccagtttcttgtgatgagtcttcagagctaaaccagttgtcaggcattaccaaagcatcctccagcagaagcactactaccctaaacggagaatctgtggatgtcaaaggttcaacctggttccagacttctagtccagtgtctgtacttgaaaccagtagcgcttgctcatct

SEQ ID NO: 544 - DNA, 603 bp, Gossypium hirsutum
  Clone ID: LIB3825-008-Q1-K6-F10
ccgtccgaaaaaaaaaaaaaaaaaaaaaaaaaaaaaaaaaaaaaaaaaagaacaggaacgtactaaaagaaacgaaaaaaaaatacacaacgcatgcaaagcaaaaaacatatactataggggtggcgctacctaaaatacactgcgctggcgctctacaacgctccggtctgggcaggaccctgccgtgaccccccctaactcgcctcgcggggcatcacttttctcctcctggtggcgggataaactaagcaggccaggcaccgcatcggccgtccctacccatcgcccgcctctgcctggagtggtgggatggcgcccctgccctcggcgcgttacatcgcgtcgcgtcgtggtggggtacgctacagcgcggacctggtccccttcgcctgccccgctaccctcccccctcctttccgtttggttctccttccttctcttggtacgccacgccagcttggccccgccccagctatacattaggtgggtgcctttactggttggtttttagtgctttgcggcacctccacccgaaaaaatttaattagggcgggggttcacgtactgggccagtcccctgaccgacggctcttcccccta

SEQ ID NO: 545 - DNA, 608 bp, Gossypium hirsutum
  unsure (1)..(608): unsure at all n locations; Clone ID: LIB3825-008-Q1-K6-F3
gtaaaaagngaggttcctcgtctgacaagctgatcgttgtgacccgtgaacctgatgggatcgctattgttaccatcaatcgacccaaatctctcaactccttgacccgacccatgatggtggacttggccaaggctttcaaggctcttgcgaaggacaactcggtgcgggtcatcatcttgtctggagctggacgggctttctgttcaggcgtggatttgacggctgcacaagatgttttcaagggtgacgttaaggacccggagacggatccggttgttcagatggagcaatgccccaaacccatcatcggagctatcaacggcgttgctattactgccggcttcgagatcgccctcgcttgtgacatgctggtcgctgctaagggagccactttcgttgatactcacgccagatttgggatatttccttcatggggtttatcccagaagcttgcacgcttcataggaccaaacaaggctcgcgaagtgtcgttggcagccatgcctttgtcagcagaggaagctgagaaattggggtttgtcaattatgttgttgaccaaaatgaagtgttgaataaagctcgacaacttgcaggagcaattata

SEQ ID NO: 546 - DNA, 583 bp, Gossypium hirsutum
  unsure (1)..(583): unsure at all n locations; Clone ID: LIB3825-008-Q1-K6-F4
tgntttattatcatgtaggtagggacgtatgtttggcatggatttttatttttttattttttccccttttatttgagaaatcgtacctcgtgcctagtacgggtacttgaaaatggttggtctgggaacataggtaatttataatgaatcttcgttagtttttactgaaattgttgatgcaatccttcatattaaggatgattacttgatgtgaattggttgaaacattatcgaaaacgaaagagttcttagtttggaggtggatattataaaggtttgattatatgaatcagttgagctaagtttcaagttcttcaatttgggtttatctatggaatctcaattgtgacgcaggtcgatgctgtggtgtacctggttgatgcatacgacaaggaacgattcgcagagtcgaaaaaggagctcgatgccctcctttcggatgaatcactagcagacgtaccattcctcatcttggggaacaagatcgacctaccgtacgcagcgtcggaggacgaattacgtttccatatggggttgacaaacttcacaacagggaaagggaaggttaatttggaaggcacca

SEQ ID NO: 547 - DNA, 58 bp, Gossypium hirsutum
  unsure (1)..(58): unsure at all n locations; Clone ID: LIB3825-008-Q1-K6-F5
gggggggggggggggggggggggggagggggggggggggnngggggggtttttggggg

SEQ ID NO: 548 - DNA, 602 bp, Gossypium hirsutum
  unsure (1)..(602): unsure at all n locations; Clone ID: LIB3825-008-Q1-K6-F6
gnaattgctangaatcagcatgaggacctataaaaaagcaattattaggctggagcaggtttcccattcttacatgcaaagggccattgcatcccatggagcttttgccattttgtatggccgccattccaaacattatattaagaaacctgagatattactgggtagaacaacagaagattttgttgttgacattgacttgggaagagaagggtgtgctaataaagtgtcaaggcggcaggcaattttcaacttggaagacgatggatcattccatcttaaaaatctcggcaagtgttcggtatcgataaataacaaggaagtaggtcctggacagagcctgagccttgattcgggttgtttgattgagataaggggaatgccattcatcttcgagacaaatcaaacatgcgtgaagcagtatttgaatagtaagttgaggaagtcgggaggcccatgctgaaaaggacgatttgaggacagtcttagtgttttgtggggaagacgggattaagaatagggggcaatggcaacaaatccttttttgtaattaaaaacaagtttgagaaaaaagaaaaattgtaatccattgatattcaata

SEQ ID NO: 549 - DNA, 602 bp, Gossypium hirsutum
  Clone ID: LIB3825-008-Q1-K6-F7
cttcattgcttaagagacggacttttccttgaaaaatgcttttctttgaaaagcatgaagaacggccttcatttggtagcaaattttcagaagctgagaagtgcttttgggcagatggagaagtgaaaatttttagcttttcatccaaaagtgcttttggctggttcatttacttttttagccacacacgaacgcccttctttgctctctgctctttgctggttctttgccctcatcgctgccctctactggttctttgttctgccctttgctggttctttattcctccaccctctgctggttgaataggagataaccttaggttgtcaatgcttccttcatctcctacatcgagcgaaaagagtaagagacaacaatggttactttccgggagaaggggatattgttttccaagtgcttaactgggacaaagagattggaaagcatggcttgaactttgaaaggttcccatcttaaagttgcttcctgtttgcttctacctgctattcagctggttgtgggaattagccatccctcgtggatttctttgacatttttcattggaagctgtgttgggctagtggattggtctttgactagca

SEQ ID NO: 550 - DNA, 601 bp, Gossypium hirsutum
  Clone ID: LIB3825-008-Q1-K6-F9
ttcacttttcttttggtcaagcaagtgatagatcatcaacaaaatatgggttctttactgtcaggatgggattctcctacatctgatccttcatcagctatacttaaaagaaatcggtcacttactaaagaagagattgaagctttctggagatcaaaaaggaaaacagaggaagagcatcttaatgctatatatggttcaccagatagttgcaatcagcagtatggaagggaatatatgagatcaagctccatgcctataccaaatagaaaccagggtttcatagacatggacacagaaaaaagcctggaaaatatcgtaaagcaaagtgggtggtggacaaggagcacttgggcattcttgaatgaacctccagttcttgaccgacctacaaacaattaccaaccacagttccatgttgccagcctcgctacttcaaagtttaacaagaattctggaatcagtgccaattagtgtttttaactcctaatggtatcttatgtgggtgtatttatctacttaatctgtttatatagaacataatattactgagataatattctggtttgtgcgtgttgagtgtgtcatggttttgaatctg

SEQ ID NO: 551 - DNA, 605 bp, Gossypium hirsutum
  unsure (1)..(605): unsure at all n locations; Clone ID: LIB3825-008-Q1-K6-G1
ggctctagctaatgtcattagggttgaccanaaaaagtttgttttgattcaaaagcaaagaaatttcttattggtgctgagccctctgaagatgtcacattcagctcttctacctcactggcaacaaatggtgtggggcatgaaaccccttctgagaagtcagttaatattggaaatgtgcagccaatcctgcaacctagaatggttgaggaagaggatgatgatgatgaagtgattgttttccagccagctatgagcgagaagagaactgaagtggttggtccaaactggcccccctctgaggctttgaagcatgatcgaagtagcgctccaggtgatgtcaaattttatggcagtaccatgtctggtcctcctgctagtcttcatcagcataatacatttgatgttagttctccactgcctgtatcttttggtagcattggccctaagcttcagcaacctgttcgtatgcaatcgtctggttggtcagtggaagaagctacttctctggctaatagcttaaaaggtttgacgatgctggagaatgggcatttaacaaaacttgggttgcaagataatgcaagcctgtctcatcctacagctcg

SEQ ID NO: 552 - DNA, 619 bp, Gossypium hirsutum
  unsure (1)..(619): unsure at all n locations; Clone ID: LIB3825-008-Q1-K6-G11
atgaaagnctcaccaaaattatccatcaatagttgccgctctcaaagatcatctttacttgttgtgagttctgatggagaagaaggtgaagcgtcggaatcctcttccgttcattgaagttagggatccaaagttatttaccgttttggtagaaaatcttccagaggatcattcggtagagaatattaagaggatatttggtgaagtgggaagcataaagaaaatatcagttcgcgatccacatgctgttgaagagacaaagaaaactggtagggccgatatattgatcagtagtaagttacacgcactggtggagtatgagactattgaggctgctgaaaaagctgtggctactttgaacgatgaacatgactggagaaatggcatgcatgttaagcttcttgagcgaaagggtaagcatggacagcgaaagcaagcttggaggggacctgctcatgaaaaaaacatcaatgctcatgtatctgatcaaacaggaaccgaggagaaaaatgcttcaagtgagtatcatgaagatatacctgatgatgaggatggggagcatttgtccaaagagaaaaacgggtttcaacctagaaacagacgacgagggaggagacag

SEQ ID NO: 553 - DNA, 604 bp, Gossypium hirsutum
  Clone ID: LIB3825-008-Q1-K6-G12
taaaacccatattctcacagccgcaccaaggcgaagatcgaacggccacgttcgtaacaatatatataaaagaagaaaaatcgtagaagaagctatacggcgatggtggaagtagtttctctgatggatatcgacgaagacgacaaccaccagaaacaaaacaactctcaaaagcttaacaagggcaaaggtctcgtcacagccgctgataccaaacccactccctgggtcgagaagtaccgtcctcagtcactcgccgacgtagccgctcaccgcgacatccttgacaccattgataggcttacaagcgagaacagattgccgcatcttctattgtatggtcctcccggaactggcaaaacatctaccattctggctgttgcacggaagctttatggatcacagtatcgtaatatgattctcgagttgaatgcttcagatgatagaggaattgatgttgttaggcaacagattcaagattttgctagcacccaaagcttctcatttggggcgaagtcatcagtgaaattgattttacttgatgaggctgatgctatgacaaaggatgcccaatttgctttgcgtagagttattgagaaatata

SEQ ID NO: 554 - DNA, 609 bp, Gossypium hirsutum
  unsure (1)..(609): unsure at all n locations; Clone ID: LIB3825-008-Q1-K6-G3
agccaaatcctttgaggtgagaatccattatggtcatccagnaatatttgacagaatcttccatttaacaagaggtggcataagcaaagcttcaaaattattaacttgagcgaggatatatttgctggattcaattctactttgcgcgggggttatgtaacgcatcatgaatatatccaagttggcaaagggcgtgatgttggtatgaatcagatatctgcttttgaggctaaggttgccaatggaaatggagagcagacacttagccgggatgtttatcggcttgggcgtcggtttgatttctatagaatgctatctttctactttacaaccgtgggcttctatttcagtagcatggttacagtgcttatcgtatatgtattcttatatggacgtttgtacatggttatgagtggattggaacaagaaattattgagaatgcaaccatacatcaaagcaaggcccttgaagaagctttggcaacacagtctgtcttccagctgggcttgttgcttgtgcttcccatggttatggaaattggcctggaaaaaggttccgtactgctctgggtgactttatcatcatgcaactacaacttgcctctgtgt

SEQ ID NO: 555 - DNA, 500 bp, Gossypium hirsutum
  Clone ID: LIB3825-008-Q1-K6-G4
gttgtaaccttcccccccctcctccgccgcagcattctcctctgtacagatatgaaattagcttagattaaaatttctttggggggttttggggttttcgtctttgtgatcagttcttttttttccttttaaattttccgatggcttctacgaggaaagatatggatcggatcaaaggtccatggagtccagaagaagatgaagctttacaacgtttagtacaaacgtacggaccaaggaattggactttgataagcaaatcaattccgggtcgatccgggaaatcatgtcggttacgatggtgtaaccagctttcaccggaagttgaacaccggccttttacccccgaagaagatgatactataatccgagcccatgctcgagtcggtaacaaatgggctaccatagctcgtttactcaacggccgtaccgataacgccattaaaaatcactggaactcgacgttaaagccaaagtgcttgtcgatgaccgaaagtttt

SEQ ID NO: 556 - DNA, 611 bp, Gossypium hirsutum
  unsure (1)..(611): unsure at all n locations; Clone ID: LIB3825-008-Q1-K6-G5
cgagccaaggccttcanatacaccgtgaaagggcggagcagctggtggagacgtcgatgaaggggaacgacgcctcccatgatgccccgcacgtgtggagggtcagagaccttgccctctccctcgcacgagaggaaggcctctcctccaaccctgactccatggaaatcgtggagctagctgcacttcttcatgatgtaggtgattacaaatacttgagggatccgtccgaggagaagctagttgagaattttctagaggaagaaggcatagctgagagcaaaaagataaaaatattaagcatcataaagggaatgggttttaaagatgaacttgctggtgtgggaaaccaggaatttccccctgaatttggggttgtgcaagatgctgatcgtctcgatgcaattggtgccataggaatcgctcgctgctttacatttggtggaaacagaaacagagtgcttcacgatcctgctatccagtcacgattggacttatccaaggaacattacatgaagaaagaggagcagactactgtgaaccatttccatgagaagcttcttaagttaaaggatttgatgaaaactaaggctggactaaggagggccgag

SEQ ID NO: 557 - DNA, 608 bp, Gossypium hirsutum
  unsure (1)..(608): unsure at all n locations; Clone ID: LIB3825-008-Q1-K6-G6
tttcctttccatctccgcgtttcccttttttccttattatttcccttccttatttccctttttcccttcattactgatgttaaaattccgctgngaagaacccataaaaaagataccaatatcagcttcaagaatcagaggagagaaattcaagattgctcctttttctctctataaattaattattattatcgaaaatggctatttcctctgtttatttgttaatcgacaatgagcgatcaatcgaaggaattgcctctcatggctcccccaccgacaccaaccccaacgagatcgacctcgaggccggtccagccgatcaaattcagtgtcgaatttgcctcgaaaccgacggtagagattttattgctccttgcaagtgcaaaggaacatcaaaatatgtacatcgggaatgtttagatcattggcgagctgtaaaggtataaacattgataccctttttcttcatttttgaacagtgaacttggaattctttatactttacttgtactatggtttcactggcgtctgtaggagtgcttttctttacaggtaaattgtttgtatgtttatacaacatttacaacaatcaataaaacttaaacaag

SEQ ID NO: 558 - DNA, 567 bp, Gossypium hirsutum
  Clone ID: LIB3825-008-Q1-K6-G7
gccgctctttgttttttatagaagaagaaagcaacactgcaataatcaatttaattattattaggatttaatgtatattgccaatggcttcgaactgaagttattccactgtaggtgctcttcaaaccctaaagagaaaaaaaagagcaagggaaaggaaaaaaaaaaagacaaaaaaatgcaaaaactaaagaaacaggacgcccgccttcataacaccccagctggccatgctggcgggcgaggtattggtggttctgtctacaccacaaatggcaacaacatagccgacactgtacactatggcggctccgaaaaccatgacatccccgagttcaccaccctaggaagagatcctgatacaggcaggcgagataacctcaaaaaggtcgggtccggccgccattcacaacgtgcttacagcccaactgggaaccaagactccccatatgcggggtctatcaatcccgggactagaaggaacaccccccaaggtacccagtatgatcctcattatcgatcctatcaaaccaaaggatcgagtccttgcgctctgctacagccttg

SEQ ID NO: 559 - DNA, 615 bp, Gossypium hirsutum
  Clone ID: LIB3825-008-Q1-K6-G8
ctctttctcttgcttgccgtttttctctcttaggttttgattcttgtttatagttcgaggtgttttaaagacaagtcaagatggtgaagtttacagctgaggagcttcgtgccattatggacaggaagcacaacatccgtaatatgtctgttattgctcatgtggaccacgggaaatcaactcttaccgattctcttgtggctgctgctggaattattgcacaagaagttgctggtgatgttcgtatgacagatacccgtgctgatgaggctgagcgtggtatcacaatcaagtctactggtatctctctttattatgaaatgtctgatgactctttgaagagctacaaaggagagagacaagggaatgagtacctcatcaatcttatcgattcccctgggcacgttgacttttcatccgaggtcacagctgctctacgtattactgatggtgcccttgtggttgttgattgtattgaaggtgtctgtgtgcaaacagagactgttctccgtcaggctcttggagaaagaatcaggcctgtcttgactgttaacaagatggataggtgcttccttgagctccaggttgatggagaggaggcttaccagacattcc

SEQ ID NO: 560 - DNA, 103 bp, Gossypium hirsutum
  unsure (1)..(103): unsure at all n locations; Clone ID: LIB3825-008-Q1-K6-G9
naaaaaaaaaaaaaaaaaaaaaaaaaaaaaaaaaaaaaaaaaaaaaaaaaaaaaaaaaaaaaaaaaaaaaaaaaaaaaaaaaaaaaaaaaaaaaaaaaaaaaa

SEQ ID NO: 561 - DNA, 628 bp, Gossypium hirsutum
  unsure (1)..(628): unsure at all n locations; Clone ID: LIB3825-008-Q1-K6-H10
ttggaaggcccatccttcttctttttcgttgtcctgctgtatttatgttgtcagcttgnttttaaggttctagacttggtagctatccggtaatcaagtctagcttcttatagttgttttttgtttccatggcggttggcttatccgccgctgtaactcctaaacccttccgctcatttccgctgctgaagcctgcgccaattttccatcctttactgcacctcccaaaaacaacaacctacggagctcgaagaaagaaaagctttgctgtttgtttcgtggtggatgaagaacagaagcagagcgctcctacccagatcgtggtaacaaggattcgaggatgctagagatcgtcagatcttaataccgtcgcgtctgtcggagaaattagctagaaagagatccgaaaggtttacttacctcgttgccgctgtcatgtctagctttgggattacatccatgtctgttatggccgtttattacaggttttggtggcaaatggagggaggagaggtgcctctttctgaaatgttcggcacatttactttatcagacggtgccgctgtgggcatggagttttgggctagatgggctcacagagctctctggcacgcatcgttatggcata

SEQ ID NO: 562 - DNA, 629 bp, Gossypium hirsutum
  Clone ID: LIB3825-008-Q1-K6-H11
gcgttcgcttcactcttctctcaccatgtcattgctgtctttctccttcttgttgctgtttacttttagtgccaaagctgttgttcctccatctgaaacttttaggtttgtcaacgacggagaatttgggccgtttgttgttgaatatgatgcaaattaccgtgtcataagcatagctaatgcccccttccagcttgcgttttataacaccacccctaatgccttcacccttgcgttacgcatggctacaacgcgttccgagtcgctcttccgatgggtttgggaggccaacagggggaaccctgttcgcgagaacgccacgttctctctcgggactgacgggaaccttgtcttggctgatgccgatggtcggattgcttggcaaagtaacactgccaacaaaggtgtggtagggttccaattgttgcctaatggtaacatggtgttacacgattccaatggcaagttcatttggcaaagttttgatcatccaactgatacactcttggtgggtcagtcgcttagaatcggaggggcgacgaagcttgtgagtcgggcttctgctcaaaacaatgttgacggagcctatagcttggtgatggagcctaaacagttggttttgcagtaca

SEQ ID NO: 563 - DNA, 601 bp, Gossypium hirsutum
  Clone ID: LIB3825-008-Q1-K6-H12
aaagaagaagaaggatgaggtagaagaagatgaagatgaagaattagaagagggaaagaaagaaaagaagaaagacaaagaggcgaaggagaataagaaagaaaagaagatttttgttgaggtagaagaagctgaagaattagaagagggaaagaaagaaaagaagaaagacaaagaggcgaaggagaataaaaaagaaaagaagaagaaggatgaggtagaagaagatgaagaattagaagagggaaagaaagaaaagaagaaagacaaagaggcaaaggagaagaagaaagaaaagaagaagaaggatgaggtagatgaagatgaagaattagaagagggaaagaaagaaaagaagaaagacaaagaggcaaaggagaagaagaaagaaaagaagaagaaggataaggtagaagaagctgaagaattagaagagggaaagaaagaaaagaagaaagacaaagaggcgaaggagaagaagaaagaaaagaagaagaaggatgaggtagaagaagctgaagaattagaagagggaaagaaagaaagaagaaagacatagaggctaaggagaagaagaaagaaaaaaaaaggatgaggtaga

SEQ ID NO: 564 - DNA, 70 bp, Gossypium hirsutum
  unsure (1)..(70): unsure at all n locations; Clone ID: LIB3825-008-Q1-K6-H2
ttcgtnnttttcttttgcactttttcagcgtatcacaattgaatttaaaaatcaattgttggcatcgtgt

SEQ ID NO: 565 - DNA, 623 bp, Gossypium hirsutum
  Clone ID: LIB3825-008-Q1-K6-H3
gatcatgggtcaatgaattctcaagttgcatgttgatgactgggcagaagatttggtcgtcaagttggtgagggggctttgggataagcatgtctgataactgggcaaattcatatgatgagttcctcagcggtcggacgcttcaaggggtgtctatgtattttctgatatgaatccatatgttggtcatcaaaatcctttaaaagaaggtcaagagctattcaggaaaggacttttgagtgaagtagtgcttgccctagaggctgaagttatgaaaaatcctgagaatgctgaaggttggagattgctaggaataacccatgctgaaaatgatgatgaccagcaggctatggcagcaatgatgcgtgctcaggaggccgatcctaccaatctggaagtacttcttgctcttggtgtgagtcatacaaatgaattggaacatactgctgctttaaagtatctgtatggatggttacgtcatcacccgaagtatggtactcttgcgctgccggagcttgctaattctttgtattatgctgatgaggcacgtttgggctaatttctgcctagcacaccacaatgagaagctccttgatgatgacgctgcacttcacgattttggt

SEQ ID NO: 566 - DNA, 617 bp, Gossypium hirsutum
  unsure (1)..(617): unsure at all n locations; Clone ID: LIB3825-008-Q1-K6-H4
ctcaaatacaaatccacnatcagcgggatcatctccaacacaggctcaaaaacctgagtggaatcagtgtcaaggtcctgtttttatggctcaacatcgtggaggttgttagagatgaagatgagctggaattttcggtggggattgcatctgctagctttcctattgacaatttttacgagtgcccacagtgcggctgcggattggagtgcgttgatagtaaggggcaagtaagcaaacttagaaataagtcttctttttcttcaatttagaggaatttgtgggggtagaataaattaactgcggaggttcatgaaaacgatttggatgaaccttgggttaaattgaattgggtttttagttaatatatcgaaattgatggactcaacttttttaatgggtttagaccttgaactcatatttatttgttgctgtttttgtggttggtattggtttcatcctttaaatgcttggtttagggaagaactgatcaaccacacgttagtgatatgagcaagataatttagaataggttaaaacattagtgcgacatttcttaatgctatgagccagatagtttagaatgctaagaccatgttaaacagatccccatcctg

SEQ ID NO: 567 - DNA, 621 bp, Gossypium hirsutum
  Clone ID: LIB3825-008-Q1-K6-H6
aaacagactctttcagacaagtccttttgcaatagtattgcacaaggttagcatatatatatctttgaatcatcttaaacaagcaccccttatgcattcaaggtcttgcacttaatgtcatccattttttttaatgcagttgaccggaaaagaatggcgccaaattctcgaggaatatagacgaacacatcccgaagctcacggttcttgatcctccggatgctatacaacatttacacaatcgtcaatcgatgttacaatgtgttgcagatatgaatttatctgagacttacggaaaagttggtgttcctcgacagttggtcattaaaagagattcgtcatccattcccgatgctgtaaccaaagctgggttgatactaccccttgttgcgaaaccattggttgccgatggaagtgcaaagtcgcatgaactatcacttgcttacgatgaatactctcttcaaaaacttgaaccaccgctcgttcttcaagagtttgttaaccacggaggtgtacttttcaaggtttatatagttggagaagccataaaagtagtgaggcggctctctttacctgatgtaactaagagagaactctcgaaaatgccagtgttttccgttt

SEQ ID NO: 568 - DNA, 627 bp, Gossypium hirsutum
  Clone ID: LIB3825-008-Q1-K6-H9
ttcgaaaattttctcctatatttttatctgcttttttgcgccctggacatgagtgagaccatgtctactcccactgactggccgcagttttacgatcatgctctttctaaccaggaaataccgaaccgcgttcgtgttttgacggccgaatcggtgttcggcgaccaaggttccgacaccgccgtcctcaccactccaactgtctcctccagcagcgctcctgtaagcttgttagggtcgggacgaggtgggggtttgagcggtggtcatttgagccccgaagggcgcgtcgggaagccagtccgaagacgatcaagggcttcgaggcgaacccctactaccttgctcaacacggataccaccaattttcgagccatggttcaacaattcactggcggtcccagtgctcctttcgcagggggagctcctcaccatggcggaccaaatttcgggttcgggttcggaacccgtcatcaaccccataatagtaaccctaataaccctctcatgcttcctcccaccggttttcacttgcaatatcaacaacaacagcagcagcatcaaaatcaattaattcaccaccaaaaccagccgttgatgttttcattgaacagcaatgataataac

SEQ ID NO: 569 - DNA, 501 bp, Gossypium hirsutum
  unsure (1)..(501): unsure at all n locations; Clone ID: LIB3825-009-Q1-K6-A10
tgttggntcgtcttgagatgaagagatggagttgggttatttatacccttcatggtgaggtcctcacaatataaggtgtcttgtgagggggagctactaattaagtcatggagggcccttaaacacgtgcttctgaatatatttgcaggatgtattatcctgttgaagggctcacacatgagcattgatgcaataggcaagagtccaagtgtccttgcatgcaatgtctagcaaggtcatatagttagggccataggtggtaggctgtttagcaaatgtcagtctctgatgagctgtcgaggcgttccttggacaaggttttggtggtttcagccttccatagtcctaggccctacagccatgaaagatttgtttttcaatctttagtttaagtagatagtttaatattttaccattgctggaactcggctggtttctagacatcctaattatggttgttgcagattcacttgtcatgaaactgagacaaagattaatatg

SEQ ID NO: 570 - DNA, 622 bp, Gossypium hirsutum
  Clone ID: LIB3825-009-Q1-K6-A11
tcgacttttatttatttgtctatttactcaaatttcattaaactctatttgtaaactaaagcttttgtttttcaatggaatgtaccaaaaaattcgcttgagccacaagataaatgttgagtataatggaataaaaactgccccgggtcaacctttgaagcaagttaattccagtgttgccgatgataagtgtcgaggttcggccccttcgaatgcccttgctcttacagattcttgcgattcacaaaaagaagggactcaaaatgctttacttgttggtccatctttgcaaccaaagacgcaaaacaatgttggtacttccggcaaaggcaccgccatggtttcggcttccgcacccttttctgaaaggctaacaacatctgcaataatagaaagaatcccaagcaagtggccacgtcctgtatggcatcgtccttggaagaactacagggttattagtggccatttgggatgggtgagatcggtagcttttgatccaagtaacaactggttttgtactggttctgcagaccgtacaatcaagatatgggatgtagcaagtggaaggctaaagctcacactaaccggacacattgaacagatacgaggcctcgctgtcagt

SEQ ID NO: 571 - DNA, 478 bp, Gossypium hirsutum
  unsure (1)..(478): unsure at all n locations; Clone ID: LIB3825-009-Q1-K6-A2
gcgtgggctatggtgcattttaaaatggaattggaaagaagcctttaggcactgcaccagatttcaattccaagaacaaggatcttgagaagacgtttgaaatgataatgaaaaggaagacaggaagagaagagcagaaaaattctgaaagaatctatagaattctctcacgaactaggtcagttgtagctttaaaataggtttgttaccattctctgttgactttccaaagctggataagtctcctactttggcaactttcttgagtatgctcggaaagtagccaggatagaaatttgtgagggcatgaattttttttttaattgaaattcttgtttcttcttttgttgtcttaaactgatcgtggatttatcagtttctgtttcaatgtcaactctatatgtacactatgctcaccatngnngaagctttacaatattgtatcaacatttgttattaatgaagtcaggttaatttc

SEQ ID NO: 572 - DNA, 539 bp, Gossypium hirsutum
  unsure (1)..(539): unsure at all n locations; Clone ID: LIB3825-009-Q1-K6-A3
cgcgtggngcgggnnaagcttcnagttcttttagtggtgattttctgttaggggctgtgtcgggggggtgatgtgctccaagtcaaccctaaaatctggcctttctgtngggcttaaacaaaggatattgtttttttctttnaaggaattggcttcccgcgctggggggggggaggggaaaaccagcaagagagtccactttgtgaggaggggggttcgggaggttgctggtttcgctccatatgagaagaggataactgaacttctcaaagttgggaaagataagcgtgctttgaaggtggcaaatagaaagctaggcactcacaagcgggctctgaagaagcgtgaggagatgtctagcgttctccgcatgatgaggtcagctgggggtggggtgaaaaagaagtgcgtcgcccccgccgttgggcttcanngnaagggctcgagcttttacatttgttaaattttctttttcgttttgctttggtagtttgggaaactgcctccggttgccttctttttccttggggtggggtttt

SEQ ID NO: 573 - DNA, 617 bp, Gossypium hirsutum
  Clone ID: LIB3825-009-Q1-K6-A5
caagacctttcgagacaagataagtgagaaatttgagtttgttgctcatcaaaaaggaattcaccatttctgtttcagtaataaatctccttactatgaaacggtcgactttgatgtacatgaaagtcattttacatactatgatcagcatgcaaaggatgagcatttcaaccctttgttagaacaaatatctaagttagaggaagctctttataacatccagtttgaacagcactggttagaggctcagacagaacgtcaggcaatagtaaatgaagccatgagtaaaagagcagttcacaaggccttttacgaatctgcagcactaattggagccagtgttcttcaagtttacctactccgccgcctttttgaacgaaagcttggaatgtcccgggtttagttttagcactgcactgcaatgtttcattagctataggatcatgcagactattgtcatctcaggcacttgatacatacatgaatttatgaaatcagtgacgttttctgtttttaagtctttagatttatcattgttgagtaaacataaactatataaagcatgattggttcaagttatttctgctaaaaaaaaaaaaaaaaaaaaaggcggccgc

SEQ ID NO: 574 - DNA, 264 bp, Gossypium hirsutum
  Clone ID: LIB3825-009-Q1-K6-A6
gcaaaatctgatgatcgccgatggaatcatctcaaagttttgcttggagtgaaggaactatatgtgctaacaaattcggctcattgttgattacggagttgattgttcaaatttaatcgaatttcgatgcttgtaaagtgaaaggtatttcttgttcaaaaacaaaaactgaattgcaaatgcaaatgcagatacagtttatatatatgtttgttgaggatgttgcgtatagtttagatgtatcaaattactcatggtttttgg

SEQ ID NO: 575 - DNA, 626 bp, Gossypium hirsutum
  Clone ID: LIB3825-009-Q1-K6-A7
atcctctctattttccccttatttctcctcctcctcgtaatccaacctcctactttcaacttccaatccaatccaatgtcttcctccgtttcttcccaacatgatcatgttctagtagaagaaaactccttcgcaagaattctaaccttaaaccggcctaagcagctgaatgctctttcatttcagatgatttctcggttactagaactttttcttgcctacgaggaggatcctaatgtcaagctggtaatgctgaagggagaaggaagagcattttgtgctggtggagatgttgtagctgttgtacatgatatttgggcaggcggatggagagcaggtgccaacttttttatgaaggaattctccttaaactatttgatggcgacctatagcaaaccacaggtttcaattcttaatggaatcgttatgggaggtgggaacggtgtttcaatgcatggtagattccgtgttgcaactgagaactcggtttttgcaatgcctgaaacagctttgggactcttcccagatgtaggagcgtcatatttcttgtcaagactcccaggatttttcggagaatatgtcggtcttactggtgcaagattggatggtgcagaaatgcttgcatg

SEQ ID NO: 576 - DNA, 119 bp, Gossypium hirsutum
  unsure (1)..(119): unsure at all n locations; Clone ID: LIB3825-009-Q1-K6-A8
naaaaaaaaaaaaaaaaaaaaaaaaaaaaaaaaaaaaaaaaaaaaaaaaaaaaaaaaaaaaaaaaaaaaaaaaaaaaaaaggaaaaaaaaaaaaaaaaaaagggggggctggttttaga

SEQ ID NO: 577 - DNA, 619 bp, Gossypium hirsutum
  Clone ID: LIB3825-009-Q1-K6-B10
ctcttcggccttctcaagtataatacggcatcgaatgcaaataaggtttccgttgtcaataccggaagctcatctgcacgtgatagtaagttagaactgacaagaaaaggatcagtatgcgatgttcaatctcctttggttaatgaccttcccaatcaatgctcaaatgttggtagcaataacatcgatatggcctctacaactgataatgcttttgccaagccagctgttttgaagaataagtcagcttcatcatccgcattcagatcgggacatccatcgtctgccttccagcctatgaaaaatgaccttttaaatgctgctcggaaacccatattagacaaagctgatggtataactactaaagctggacttaaacagcctagactgactcaccaagaacttgatatgcaagactgcccacagcatcagcaggcaactgatcatgacacattatctttgaaaaaaatggctgcagacgctccccattgcgggtcatccaatgtgttgggtgggcctgttcctgttgaaggaaatgctggcaactacagtgtcaatggaagtaactcgggtagtaaccactcaagcaatgggccacatggaagtagcaccatagctg

SEQ ID NO: 578 - DNA, 427 bp, Gossypium hirsutum
  unsure (1)..(427): unsure at all n locations; Clone ID: LIB3825-009-Q1-K6-B11
tttctttttcattttctgggttttggtttgaagatagggtaagttttaatggtgcttgcaggaagaagtggagatagaggcaaaggtgatagcgnngagaagggaaaactttcactggtggtggtggaaattagaagaaaacgaaacggggagctaattgctttgggtaaacaatggatggccacaactaaagatagcattaacgcagcccaactgaagaaaaacattttaaagttatgcctgtgtcacctgtcctttcaagagccaaaccaaagggcgttaataatagagagtcaacatattttggatgctgggggtctgaaaatggaagaagatgctatcctacaaaaatccctgaaatggttgcgagatctatctaaaggaaacataagccacgagctggaggcactcactcttgaaagactgc

SEQ ID NO: 579 - DNA, 608 bp, Gossypium hirsutum
  unsure (1)..(608): unsure at all n locations; Clone ID: LIB3825-009-Q1-K6-B2
ctttgtggnanagnagaggagagaagccagtttcaatcgtccctcagagaactgtcacgaaaaagccattgggtcttcccaaatcttggctttgcattgatggcggatctcaggtcagcatttctcaatgtgtattcccagctcaaatcggagctccttcaggatccttctttcgagtttaccgatgattctcgtcaatgggttgaacggatgctggactacaatgtgcctggagggaaactgaatcgtggactctctgtgattgatagctaccgcctgttgaaagatggaaaggaattgacccaagatgagatttttcttacaagtgcgctcggttggtgtattgaatggcttcaggcatattttcttgttcttgatgacatcatggacagctctcacacccggcgtggccagccttgttggtttagattgccgaaggttggtatgattgctgtaaatgacggtgttatacttcgcaatcacatcaccaggattctcaaaaatcactttcgtgggaaaccttactatgtggatctgctagatttatttaatgaggtggagtttcaaacagcttcaggacagatgatagatctgattacaacacttga

SEQ ID NO: 580 - DNA, 614 bp, Gossypium hirsutum
  unsure (1)..(614): unsure at all n locations; Clone ID: LIB3825-009-Q1-K6-B3
cattcatttctcaggccctctaatgaanaggaggctccccaacaggcgtggttcggacttatccagtccacctatctccttggaacccgaaacccaaaacccgaagtgtacagacactcgattccctcccggtttctggatcgttttccacggtgacaccaaaggccagcaaccattccaagtttagtggaaaatgtgggaggttacattgtgttgagtgtcatttgaatccggtaagtaagtccaaggacaagtcaaagggtactcaaaagtttaggacatgtaatttggccggtttcaaattttccgggttttctgccactggagttttggaatatttgtatagttttaatgatgatgatgatgatgatgagattggtaatcatgtcaatgatcatgattatgtctatgaggatgttggtacatacgttcttaacgacaacgacgacaatgatgattttctggctaagttttggtctctgcatgacaagcagaacgatgacgacgacgacgacgacgatacgagttattgtgatgtggatttcatgctagacattgaggaagatgaagggtggtgtttattgagagaactgtgattggcagactcaatcttt

SEQ ID NO: 581 - DNA, 133 bp, Gossypium hirsutum
  unsure (1)..(133): unsure at all n locations; Clone ID: LIB3825-009-Q1-K6-B4
cggccgcgtggngaaaaaaaaaaaaaaaaaaaaaaaaaaaaaaaaaaaaaaaaaaaaaaaaaaaaaaaaaaaaaaaaaaaaaaaaaaaaaaaaaaaaaaaaaaaaaaaaagggggggccggttttaaaagaac

SEQ ID NO: 582 - DNA, 612 bp, Gossypium hirsutum
  unsure (1)..(612): unsure at all n locations; Clone ID: LIB3825-009-Q1-K6-B6
gctttggtgcagnacagtcagnagatgactgttgtaactcctgcgaagaggttcgtgacgcatatcgtcgaaaaggtgggcaatgactaatgcagacttgattgaccagtgcaaaagagaaggctttttcgaaaggataaaagagcaggagggtgaaggatgcaatgttcacggatctcttgaagttaatagggttgctggaaattttcattttgcacctggcaaaacttttcatcagtcgaacattttctttgatgacttgatgtctgtccataaggacagttacaatataagtcacagaatcaataggttagcttttggtgaatacttccccggtgtggtaaatcctcttgatgggggacattggacccatgaaacctcaaatgggatgtaccagtacttcatcaaggttgtacccacaatatatactgacattagaggccgcactgttaaatcgaatcagtattccgtgacggagcatttcaaggatttggagtacattagccctaattctcaacctggagttttcttctactatgacttttctccgatcaaggtcacttttaaggaggagcatagttcatttttgcacttcatcaccaatatctgtgc

SEQ ID NO: 583 - DNA, 614 bp, Gossypium hirsutum
  Clone ID: LIB3825-009-Q1-K6-B7
ggagctttgcttttcacctgcagatggttacctttctctcctaaaagctcttgttttcctttgccatggttatggcatggagtgcagtggattcatgaaagaatgtggaaccaggctagccaatgctggatatgcggtgtttgggattgattacgaaggacatggcaagtccaagggcgatcgatgttatattaaaaagttcgaaaacattgttaatgactgcagcgaatttttcaaatctatctgtgctcaggaagaatacaggggaaagagcagatttttatacggagagtcaatgggaggtgcagtggccctactgcttcatagaaaggacccttccttttggaatggtgctgttcttgttgcacccatgtgtaagatatcagagaaactgaagccacatccggtggtgataaatatattgactaaaatggaacaagttatacctagatggaagatagtaccctcaaaagatgtagttgactcagcattcaaagatcctgttaaacgtgaagcagtaaggaacaataagctgatataccaagacaaaccaagactgaaaacagcattggaagtgctcagaaccagcatgagcattgaaaatggtttgaatg

SEQ ID NO: 584 - DNA, 611 bp, Gossypium hirsutum
  unsure (1)..(611): unsure at all n locations; Clone ID: LIB3825-009-Q1-K6-B8
gcttctttatctttgtatgttcaaaaactaagattttttagattcgatggggccaagaccaaatcttatctattttttttcaagacttagatgtcatggatacctatttagtagaatattgtataacatccggcttacccgaaccgaacataaatgaaaaagcccctcttatgcatacgtaaacatggtatagggttaaatgaattatagcaagtggatcggtaccgaacggatgtatgaaattaaagtctatatatctagtagatccgtataggcgatcatataaaggggatgattttagatcgaagcaatttgatgaattccttctaaaagttcatatcaaaatagtactagttgatgagagttacttcggaaacaaaaaaagtaaagtcgaatttttttggttattctctcaattcgaataaaatgcaactggatctagtatgtatgagttggcgatcagaatctatatggatagaatttatagtgnggatctcgaaaaacaagcaatttttgctgggcctttatccttttttttggttcattagggtttttattagttggaacttctagttatcttggtaggaatttgatatctttatttccgtctc

SEQ ID NO: 585 - DNA, 612 bp, Gossypium hirsutum
  Clone ID: LIB3825-009-Q1-K6-B9
gtttctggggctggattagaaatgaggagcaagggggcgtggaaactatggtggtggaaggggttatagccggggtgaatttggaaacaggagcagcaatagaggaggatattccagccgtggaggtgatggatatcagaggggtgagcacatggggggtaacggtggccgtgtgagccgctctggtgaagcaacttttaatgcatcaacaaagaatgtggcacctagggtatctgcccctgcttgaagaaagtaatccagaggggagtagtcaaaagatagcatgcagtttgtttgtagtagtgatgtatcaaattgttgcgtagcatttagtggaaagaactgactgcttggcagaggagtgcatctgagatttgtttagagcggtcgtaattcgaagttccaacagtcggaatgggaaaaggaaaaacaaaaaaagagaaagttcaaacagtcagaggataaggtgaaagtgctatgctagtagaggaaaaaggaaagcactacactgtcgactaacggtaacatggatcattgtgtttgcagactaataatttaagagcttaaatattgcaattaattgtaattgcaacggtagagttctaaatataa

SEQ ID NO: 586 - DNA, 610 bp, Gossypium hirsutum
  unsure (1)..(610): unsure at all n locations; Clone ID: LIB3825-009-Q1-K6-C1
gttaaccgcacgaaaccttctgcaaacaaanaacgcacttcgtaacaaaaccctaatccccaaatagaatgatgttttccctaattcactctccatgaccaccactatcggcccaccttttatactcacccgccgttgatttttgcctgcgtctccggcagtcgccttttgcaggttgtggcttctgttgaaaggttggattttgaaggtctctactgtttgtcattgttgctcagccttcagtagcaacaatgggcagttcatttaatgctcaaatcttggtggaaaagctagccaagcttaataactcacaagcgagcatagagagtatcctttcagaaaataattgcagattctgtgcttctttggctatttaggacggcaaaacaagttgttgaaacttgggacagacaatttcattgctccccacgcgagcagagattggcctttctgtatcttgccaatgatattttgcagaatagcaggcgtaagggttcggaatttgttggtgaattttggaaggttcttcctaatgctcttcgtgatgtgattgaaaatggagacgagtttggaaggaatgctgcattgcgtttgatccgtatatgggaag

SEQ ID NO: 587 - DNA, 613 bp, Gossypium hirsutum
  Clone ID: LIB3825-009-Q1-K6-C11
cggccgcgtgggcggccgcgtgggcggacgcgtgggcggtgaggaagcatatcttgggtggaggaccaaaacgcctacccttcactgtccctccccttgttttctcttcacttaagttggttcggcaactacaaggccaagaggaaaatccttttggagaggaggaatcaactacgcccaagaaaatattccaggttttgaatcagactgttgaaactctctctaacattccggcccctgagctggcactacagttgtttctgcagtgtgctgaggctgcgaatgactgtgatttagaacctgtggcatatgaatttttcacacaagcttacattttatacgaggaagagatttcagactcaagggcacaggttactgctatacatttaataattggaactctgcagaggatgcatgtctttggtgttgaaaatagggatactttaacacacaaggctacagggtattctgcgaaacttttgaagaagcctgatcagtgcagagctgtttatgcatgctcgcatctcttctgggttgatgatcaagacaatgtaaaagatggagagagggtcttgctttgccttaagcgggcactgagaattgcaaatgctgc

SEQ ID NO: 588 - DNA, 626 bp, Gossypium hirsutum
  Clone ID: LIB3825-009-Q1-K6-C12
aaacccttttttcccaaatttctcaggttttttcatatttgactctcgaattagagcaacttcatttctctgctgctccaaaatcaaggtgctttaatgtcgcaaaagttagtgaagaaatcgacttgaactgtgatgctgtttcggttgaccgtgaaaacggggataatgatgtaaatattaaggattctggaacttgtttgaaagaaagtgtaaatgaggcaggggaaggaagcaaagttgagagtgtaaaagatgaagaggtaaatttggaagctgatattgggtctttaggtgaagaggtggctttcggctcgggtgaagtttcgaagatggaggttgatggagagttgaaaggaaatggagatggtgagtgtgtctctgtggaagagaagaaaccagtggtggccgaagaaatggctgtgaaatcttctagtgaggttgctgaagaccttaatgttggactgtgtcgtagtggggatccattgctagagggaactagtgttcagtctgtctcaattgttgacgatactactcattctggtgacgagaggctgaattctccagatttaagtcatgaaaactctttaccttgcggggaccagaaagagagtttgaaccatcaa

SEQ ID NO: 589 - DNA, 622 bp, Gossypium hirsutum
  Clone ID: LIB3825-009-Q1-K6-C3
ccctttctcttcctctctgttctttgccttatcccccaataaaataacccctgtttttcaattaaaattacgagaacgccacccccttttttggttgtcggtgtgaggagggacggggaaaattgtgatcggacgacggcgacggtggcggcggtgtgttgtgacgatgatggagtgcagtttatggatatccgcgggggatcataaaaataacaatagtaattctaataataatagtttgtgggggtttagcaatgaaagtgaacatgatttggctttaatggttagtgatttcctggaaaacaacggtgggagcgccggtgccgattcttggtgtagtagcgatagcgagtccggcttctccgatcttatccacctcgctgataaaatctcttactataagcactctgtgtgtcactatgatatggacttgttgtctgtggttcattcacttatattatcgatgggtgagacggacctacactctgtgaagtcgggtccatgtaatgccagttgcataaggtattcccttgtaaagctgttgaggctttctgggtatgatgctgctgtttgtgtatcgaggtggcagcgtagtggcaaagtccctggaggtgatcatgaa

SEQ ID NO: 590 - DNA, 612 bp, Gossypium hirsutum
  Clone ID: LIB3825-009-Q1-K6-C4
gtttatcaattcaacaattgtcctctcatgtttatgtttttgggcaactgatgaattcctttatgcaatgggtaatttgcgtctgataatctttactgatgctatcaccttggagacctgatgcccttctcttgcattacttttaaagcattatgtgctttgtcttttctaatttgaattgccttttggatccataattagcttgtcaagttgggttcaggttttatatcttatatttgagttatgattaagtgtatatctgtatattgactgtatattgattcaaagtgtcattgtactgcatgtgacatctcctaataactatttagccccagttttatttaaggggacctgtaatactgaatggatccttaaatgagtttgctgatttttttttcttgagttctagtcttctccaatggattattaacggtgtataatataatgtcacctcttcagaattgtgtgcgttactttttaataaaccttagttttgatttatgcttctcatgccttcttcaagacaatctctgattttggtcagatatgctgtaaatgcttaatggatgagcaaccttggcaaggggactcggaagactttttctctcgctt

SEQ ID NO: 591 - DNA, 598 bp, Gossypium hirsutum
  Clone ID: LIB3825-009-Q1-K6-C5
ctcgaagcctttgttctttcttctgcggacttagaccctcaaactgttgtcaactttgtatcctcatttttcctttccttgttcctttttccttcctttttcttttagttttgcgattttggtgactatagttctcataaataagaaaccaatgttcttttttgtgtttttttgccttcattccataccccttcgatccttctgaatgaatggatcgacttccctcggggtttcttccactcagaaggtcggcaaatcccttcctcttccccatgctgccatcgcatgtgccgcttcatttgcttcccaagctttttgatgacggttagtgaatctccttctaaaatgatgtcttgaaaccctaaatcttctgcgaaagctactccatgaaggcatgcataggcttctactattgttggatatcgtatgttcttaatcaggtaggtgcatgaacccattacaaaacctttgtatttcttactatgattccagaatctgccttattatttggcttctgaaaaccaatgtcgaaattaactttgacttggtcttctgataagggtgtccattgtggattttgtattttgtggttgtttac

SEQ ID NO: 592 - DNA, 382 bp, Gossypium hirsutum
  Clone ID: LIB3825-009-Q1-K6-C7
aggtgatatctatggtgttggctatttggggcttcatttcctatgtctatcagcaatatctcgatgactacatgccgaagaccgaaacaccggtgaaatttctgaagcttgctcttctagcatatggttatccgaacattcagcactgcagggtgcagctgcctatcattgagtcaaagcctgagactagcttttactcaactttctattattgtgttctatgatatgcttactgcaatatatatgcttaatgcttccttatactgcaaaatggaaatgtgttgattaacgtttgtgatcttgatcgggcttggaagtatgatcggttcatattgcagtaagtacggtgattttgaatgtatcatcttcatctttgtggtgg

SEQ ID NO: 593 - DNA, 389 bp, Gossypium hirsutum
  unsure (1)..(389): unsure at all n locations; Clone ID: LIB3825-009-Q1-K6-C8
gncgatttctgccttcggtttaagtggtcaagaccttcgaactaagcccccgaagtcaagcaaccatcgaatggacaatccctccatctgcctcactaggagtttacagaataagacattttggtgctgcgaaacggcttatgggatcgattcagcatttcacgggtacatccagtgctttcgtggtagcatgatgaaatagatcaaactatatgtatatacgtatggcagcttagatgtttcatttttgttgcgctttatatgtaacgagttgccattagattataacacgtcgaatctgtaatgctgaaactcttctagctcatttgatttccacttcagaacatgaaatttccgatgaattaaaatctgtctttgatggttcattt

SEQ ID NO: 594 - DNA, 624 bp, Gossypium hirsutum
  unsure (1)..(624): unsure at all n locations; Clone ID: LIB3825-009-Q1-K6-C9
anaaacaaanaggggatgtggcggaaaagttgtaatatatcagcgtgcaaacaaagaggttgcaatcatatgtaatcatcagcggagtatttcaaaatctcatagtgcacagatgtcaaggttgnactgagaaaataacagagctcaagggtgttctaaaggagctaaaaattgatttggacagggctaagaaaggaaagcccccattgaaggatgctgacgggaagcagaagagaaacttgacccctgaagcgttagaaaaaaagatagctcaaacaaatgccaagattgagaagatggaaagagacatgcaaactaaagaggatctaaaaactgtggcattaggcacatccaaaattaattaccttgaccccaggattacagttgcatggtgcaagcggcatgaagttcccatcgagaagatattcaacaaatcacttctggcaaagtttgcttgggcaatggatgtagatcctgatttcagattctaatcatctaagtgaatgaaaccaggttggtgccatgaaaatcttactcccaaggaaaagacgagaggaggacaaaggaacaaccaaaccagtcccttttcttcaattatcatccatttttttccattaaagttat

SEQ ID NO: 595 - DNA, 599 bp, Gossypium hirsutum
  Clone ID: LIB3825-009-Q1-K6-D1
ggaaagtgaaaataaatacttggtatctctgagctagccccgaaatacaaggagggcacacgctgtacaccctcttacctgccgtaccaacttgagtggtcgctctggactcgtgatgttgaggaagaactaattcccctttgcagggaactcggaattgggattgttgcatatagtccccttggtcatggtttctttgccggtaaagcaaaggaggatacctctaatagttctctgggagtgttcccaaggtttcaaggagaaaacttggagcgaaataggatcctatattcgaaagtagagaagttggctgaaaagcatggatgtacaccggcacaacttgcacttgcctgggttcttcatcaaggggatgatgtttctcctattcccggaacaaccaagattaaaaatctagacagcaatatcgaatcagtgaaagtaaagctgacaaaagaagatttgaaagaaatttcagatgcgatcccaatccatgaggttgcagggggtacttatcctgatggtttaaagcaattcacttggaaatatggcaatacaccaccaaagaaaagcacctaggtttagaagcaaagtttcatggg

SEQ ID NO: 596 - DNA, 596 bp, Gossypium hirsutum
  unsure (1)..(596): unsure at all n locations; Clone ID: LIB3825-009-Q1-K6-D10
anataagaaaacgctgcttgcaggtatgtcatcatccgataagccagaattagttgaaagggatgttaaggacaaggtggatgacaaagaagacacagtggatttatagacaaggtcaagggtttcattcatgacattggtgagaagatcgaggaaacaatcggctttggcaagcctactgcagatgtagctgagattcacctcccttgtatcaatcttgagaaagcagaaattgtcgttgatgtcctcataaagaacccaaaccctgttccaatccccctcgtcgacattgactacctcattgaaagtgatggtagaaaactcctttcaggcttgattccagatgctggaaccatccatgctcatggtgaggagactgtcaaaataccagttactttgatatatgatgatatcaaaagtacatatgatgacattaagcctggcagcatcattccatataggctgaaagttgatctcattgttgatgttcctgtttttgggaggttaactttacctcttgagaaaactgagagatccctataccttacaagccagatatcgatatggagaagatacactttgagagattctcttgg

SEQ ID NO: 597 - DNA, 610 bp, Gossypium hirsutum
  unsure (1)..(610): unsure at all n locations; Clone ID: LIB3825-009-Q1-K6-D11
ctcactctcaacccanaagctcaaatgaaaaaaagaggctttggagatctgtgtcaaggctgctgttggtgcccctaatgttcttggagactgtccattctcccagagagctcttcttactttggaggaaaagaagatttcctacaaaatgcaccttatcaatatcagtgacaaacctcaatggtttttggagataagtccagaagggaaagtaccagtggtgaagtttgatgacaaatgggtggctgattctgatgtaattgttggaatccttgaagaaaaataccctcagccttgtctcaaaacccctcctcaatttgcctctgttggatcaaacatatttggaacttttgtcacatttttgaagagcaaagatgctaatgatggatctgagcaggctttgcttaatgaactcaaggcattggatgaacatcttaaggcacatggcccattcattgctggggaaaagataagtgcagttgatttagctttgggacccaaactttaccatcttgaggttgctctgggccatttcaagaaatggactgttccggaaagcttgactaatgtccgcaattacatgaagtcgatattcactcgtgaatcgttc

SEQ ID NO: 598 - DNA, 617 bp, Gossypium hirsutum
  unsure (1)..(617): unsure at all n locations; Clone ID: LIB3825-009-Q1-K6-D12
ngagatgtgcagttcaaatagctgttcttacagtgagtgatactgttgcatcaggtgctgggcctgatcgaagtgggccaagggcagtatctgttgtgaattcctcatcggaaaattaggaggtgcaaaggtagttgctacaggtgtggtttcagatgatgtggngaaagatcaaggaagttttgcagagatggagtgatattgataagctggatcttatccttacacttggtggcaccggattcactccaagagatgtgacccctgaagcaactaaagaggtgattgaaaaagaaacacccggtcttttgtatgtcatgatgcaagagagtttaaaggtaacaccatttgctatgctctcacgctcagcagcaggcataagagggtcaacattgatcatcaacatgcccgggaatccaaatgccgtcgcagaatgcatggaggcattgttgcctgcccttaagcatgcactaaagcaggtaaagggtgacaaaagagagaaacatccccggcacatccctcatgaacatgctacaccagtggatacttgggagcgcagccataagttggcctctgctggtagtgtcaaacccagttgtccttgttcccattaatat

SEQ ID NO: 599 - DNA, 605 bp, Gossypium hirsutum
  Clone ID: LIB3825-009-Q1-K6-D2
atccgctgccccccggcgtgcccccccctccgagccgggtggggtgcgtctagccccccctgggggtcgggtcgtcccgcaacgactcaccacgggggtgagtcggtcgccggcggtggtggtcggggtgacaattttccggccggtcaagcccgcccatagaaatgtagccaacgactccaggaccaagttccctattcgggcaaagatctcttggggtggcttatgcattgctatgggctcgagcttggcttgccgttttgcccccgtcacgtttagggatgccttgtgcatcccaagtcggcgaccacacggtgccttggccttgccaagcccttgcccgcattcgaaactgcccgcgaccccagtaccaagtccctttgacggcaacggcccactggggggtgtaagttgagtttgtaggctcggtcttggctcgaccaagtcccggtgggacttttcccctcgtagttctcgtgccaagcggttgtggtgcgccctcgttcgttgttccttccgctcccctaccattcggttgggtgggctgttgggcggtgtgcgtgggcgctactactagtacgcaataggcatatgagtggtgtttt

SEQ ID NO: 600 - DNA, 607 bp, Gossypium hirsutum
  unsure (1)..(607): unsure at all n locations; Clone ID: LIB3825-009-Q1-K6-D3
cacagtttcaagcccaacagnattgaccgacatcaacaagtcaactattttaccaacttgtccttgccgtcgagctgccactctcctagaaaggtacaaaccctcgccatctcctcctacatctgttgtcataagctagtcaatgtctatctacttgtagaggagaggccgcttgatgaatgcgtgctttgaatttgatacttanaatttattcccattatgaacataaattctgccttacaattttaaagcatatgattgatatttgaacataatccttatagttgaaggagctatagttactgtcagaatcttcttttaggcacgtctgaatttactattttatctgggttccatgatctattaagcatttcgagaatcaagcctttttgaatatatgtccatcctagatactttaacccaaaaaatgaactaaagaaatataggggaagtcatgaaaaactgagcataccaatgttagaaacgtattcatgtcgaacacttggaccttagtccgagaaacatagatcatgatcatatgtgctatgctttttttcctcttcagtcacattcttttataggagatattttccccttttacctaaca

SEQ ID NO: 601 - DNA, 597 bp, Gossypium hirsutum
  unsure (1)..(597): unsure at all n locations; Clone ID: LIB3825-009-Q1-K6-D4
gttnctcgaaacggtgaggtctgtcatccaatcatcaagnacaagacctctagtccaacgctcaaaagtgacagacaacttaaaaattttggtttattgaagcgtaaaaagccatccactttggactctggtgtccgagtttctcaacttaaggcaactaaatcacagcgttcttttggtaggttggatactgcggttgttgatgtcggagccccagctgattgggtgaagattaatgtgcaaaaaaccgttgactgctatgaggtctatgctttggttcccgggcttcttcgtgaggaggtgcatgttcagtctgatccagcaggacgtttggttatatccggtcaaccaaaggaactcaaaaatccttggggtgttacacccttcaaaaaggttgtcagcttgccatctagaatcgacccgcaccacacttcggctgtggttaccctgcatggtcaattgtttgtccgagtcccgttcgaggcagccgatgtgtaagatggatttgtaggtttcttttttttagcatcttcacagttagagatttctttagtttgaaatcaacctgacatctaattcaggaatgcacatgtttag

SEQ ID NO: 602 - DNA, 453 bp, Gossypium hirsutum
  Clone ID: LIB3825-009-Q1-K6-D5
gttccttcaagctgtgccctggtttgtagagatagttaagattgacttaatttaaacatttgcctgacacacgctgcattattgttgaagtcagcatgttttgttttgttttgcttttgccagtacagctgttgtagttatgtaaagagaatggggcctgccaataataataagcatgtaggcacaaaatctgctgttcaaattcgaagccatgctcaaaagtttttctctaaggctcattgctttgagttcattacaagatttccttgattaagtaaatgtattatatcttttattaccaagatttacttgattaagaaattgaattgtattttttattacattgcaatgtgtatagttataggtaggttcaactagtcagtctgtttctcatatgtattatttattttagttttgattctaaatttttatttttactttaatatttatgac

SEQ ID NO: 603 - DNA, 531 bp, Gossypium hirsutum
  unsure (1)..(531): unsure at all n locations; Clone ID: LIB3825-009-Q1-K6-D6
tcttgtggtgctgcaaattgtaggtggttggtgctgtagctttccagaataggaagcttgccattcctcctaacacctcccccaagttggtttccctcatggaatcttgttgggccgatgatcccgctcaacggccgtcttttggtaatatagtaataacactaaagaagttgctaaaatctccattgtagcgatgcggaaaggaaaacagtaacaatgggtgtcgttagaataacctgaaagcagctgattttggagattccactaacctttgtttttggttccaggcaactgtagatgttttatctaacccatttggaaggcagttcccattagaatttgaggcctataacgataattaataataagggngaaaaaatatagcaaagctgtaatgagttgctgtgttcattatatgtaggttttgcatggggggttgccttttcttacataaagcaatttgccagtgtatgtaaactccgaaatgtttatgaattcggattggttatgatatgttggtaattcccgttt

SEQ ID NO: 604 - DNA, 600 bp, Gossypium hirsutum
  Clone ID: LIB3825-009-Q1-K6-D7
caaattaccctaaaaccctttcactaaaaattgaagatgcagtcaatgaaggatgctgctgcctctgctaaggccggcatggagatggccaaggcctccatgcaggaaaaggtggaccaaatgaagacaagggaccctaatgagaaagagatggcgagggaaaggaaagaagagagacaagaagatgcagagctgaggaaacaagaggcccgccatcataacgccacggctggccatgctggtggtggtggtattggtggtactggctacaccacagctgggtacaacagaggggatactggtggctatggcggtaccggtggacatgacaaccgtgggtaccccaccgcaggtagtgggtatgatacaggcaggcaagatgacctcagcagtatggggtttggcggagatacagggggtgcttacggtacaacgggaaaccaagacttcccaagtgcggcgcctaacaatgctgggactagaaggagcacccgcggaggtacccaggatgatccttattatcgatcctattaaatgaaaggagcgactttttgtgctctgctactgccttgagtctgtgtttgttgtttgtttgcttct

SEQ ID NO: 605 - DNA, 580 bp, Gossypium hirsutum
  Clone ID: LIB3825-009-Q1-K6-D8
ctttgttgctgctacagtcttcacccttctagagttatgtggtgatgtaggtgctcttggctggtgggacttgttcataaattttggtattgccgagtgctttgcttttcttgtgtgtacaaagtggtccaatcctgtaattcatagaaattccccagcaatagaagctggtccatctactgcaactattagataccttgactggaacagtggcttagtagttgctcctgaggaagaccagcagcaggatacaatgtgtggcctgcaagatattggtggtcacctcatgaaaattccaataataggtttccaagtcctcctctgcatgcatttagagggaacacctcctggtgctagagatataccacttccagttttgttctctcctcttttcctattgcaaggggttggtgtgttgtttgctgcctcaatattaatagagagaattgtacttttactacggagtggggctggcacagggttgtacttcagattctcgtcccgagctcatgattgcttgggattcttgcaccatggttctaggttattaggttgggtggtcaattgatgaaagaagtag

SEQ ID NO: 606 - DNA, 614 bp, Gossypium hirsutum
  unsure (1)..(614): unsure at all n locations; Clone ID: LIB3825-009-Q1-K6-D9
nganagtcaaanananagagctgcagaatttactgagatggcttccaggttatgaagcttcgcaagtgaactacanagggagaaaagcctatgggttttgctctcttctcaagtgcacgacttgcagttgctgccaaagatgcccttcaggaaatggtttttgatgccgagtcaaagtcccttttgcatgtagagatggccaagaagaatctatttgttaaaagagcttactcattgaatctggctccagcaaagtggaatatttattctgaaacagctatcatctttcaggaacattagttctgaagttggaaaacttctattcagataagctaaatttatggaacttatggatgaaatgctggaaagaagttcttcagtggtcacttgtttaaattttcattaggctgtttctttttgttgttgaaatttggttttttgattaaggtctggacagcttgaagtttccatggaatggttctaattccaggaatagtaacagattctgatgcatatgatcaaaccaaacgattgagaactggtgggaattattcacacagtccttatacgagtccatctccatttcaccctcctgctcctgtttggggaccaca

SEQ ID NO: 607 - DNA, 604 bp, Gossypium hirsutum
  unsure (1)..(604): unsure at all n locations; Clone ID: LIB3825-009-Q1-K6-E1
ngataatttctataacaaaaaaaagaaggatggtctcctcaagaatgccatgaaagcttatttggacacacttcatcttgtaagttcatcttttcctaccgcatggaacccaactgcaaagagcccagttgaagaagatgacaagcaaggactaatagaacccaactgcatggaactgatatcagccatggcagccggcaaaggagccaaacacatcgtcgaaatcacaacccaaggcattaccccattaaccatcgcacttgctgtcgcagcaaaacacaccggcggtcaactcacttgcatcctcccatcccaccaccaccaccaccaccacaccgccgatcaacttcaacaatacataaatctggttcacgctgaacccaccaacactagcccacgcgagacaatcataaaacagataaaaatgcggttgaagaacgtggattttgcagtgatcgattgtaagttcgacgatgagtacttgaaattaatgtttaaaacaatggtggaggaggaggatggtattaaaacagggtcgactgtgatagttcataatgttcatcataaaaaagagggtcgatatttggtcaacttttgaggaaaa

SEQ ID NO: 608 - DNA, 614 bp, Gossypium hirsutum
  Clone ID: LIB3825-009-Q1-K6-E10
taagcaaaaagcaggagaaatcagttaaggcaagtcatgatgcaggagatgatgatgagttctctgattcaataaaaacaaggagaaaatacagggatgtagccgatgcagctcaagcagcctttgagtcagctgcctatgcagcagcagctgcaagagcagctgtggaactctctcggtctgattcctatgatcctgatgatcagaacggtcccaatactcgacagaacacagtgtttgacaaacaagaagcaaattctaaagatatggaaaatcatggtagtcaagcagtggagttgaatcataccaagaaggcaccagaaatcaagatgtctagtccttcaagtgaaggatcagcagagggaatcatagaccttaggacaatgtcattcgacgaagtggacccactcaagctattggagaaggaagtggttatttatgagagtgatgatgataaatatgattcccgtggttcaagttttgatttgaatgcaaggaagcttaaaggcaaggtcctagatacagataatgatggtgagcactcagaaaagaaacttgactgatgtttccttcaagctttcctgttggcttgaaggtggagactcgacctgaaa

SEQ ID NO: 609 - DNA, 596 bp, Gossypium hirsutum
  unsure (1)..(596): unsure at all n locations; Clone ID: LIB3825-009-Q1-K6-E11
cggnagcgtgggtgccccccggcgtgcccccccctccggccgagtggggtgcgtctagccccccctgggggtcgggtcgtcccgcaacgactcaccacgggggtgagtcggtcgccggcggtggtggtcggggtgacaattttccggccggtcaagcccgcccatagaaatgtagccaacgactccaggaccaagttccctattcgggcaaagatctcttggggtggcttatgcattgctatgggctcgagcttggcttgccgttttgcccccgtcacgtttagggatgccttgtgcatcccaagtcggcgaccacacggtgccttggccttgccaagcccttgcccgcattcgaaactgcccgcgaccccagtaccaagtccctttgacggcaacggcccactggggggtgtaagttgagtttgtaggctcggtcttggctcgaccaagtcccggtgggacttttcccctcgtagttctcgtgccaagcggttgtggtgcgccctcgttcgttgttccttccgctcccctaccattcggttgggtgggctgttgggcggtgtgcgtgggcgctactactagtacgcaataggcat

SEQ ID NO: 610 - DNA, 614 bp, Gossypium hirsutum
  unsure (1)..(614): unsure at all n locations; Clone ID: LIB3825-009-Q1-K6-E12
ggttctaaaaaaccncgccggagaatccgtcaggttcgaaaggaaaacattgacgttgcagatctgggttccactaaccgtttgggtcctgaacccggttccgttcctacccagatccgactgaccaagtcaaacaacaataagaaggtcgttccagcctctttttatgctgggtcggcctttataacctcgccgcctccgagttccgtcccgatgccggtgttttgcaccaagaagatcagcgttaccgtgaagaatgacgacgccacgagcgacttaaggaggatattaaggctcgatttgtagtcatactcagaaattaattcgtgtcagtttgtcgatttcatcgtttgggttctcttttatatttcgatcatcccttattttttcaaggggaaagatcgaaacaggagtaggttttagcttttcaaatagtgttctttatgttgtatagcgtaacttgggtcttagatttgctgatttgcttggtttagaatgcaaaggtgtgtctgggttttcgtctataaactctcagtcttttttttttaatttcctcacagaaaaatgtaatttctagtttgggaaaaaggtatatttggtgggttatcatctga

SEQ ID NO: 611 - DNA, 598 bp, Gossypium hirsutum
  unsure (1)..(598): unsure at all n locations; Clone ID: LIB3825-009-Q1-K6-E2
ctggnatgggcgtgacacccagtacacctaatctgcttccttgccttaaaaaaacgagtttttaataaaaaagagaaagtttgtggatttcgaggtgttgtgcagataaaggatgagtacactggatgcaactagagcagaacttgctcttgtagttttgtatttgaataaggctgaagcaagggataagatatgcagggctatacaatatggctcgaaattcttaagtgatgggcagcctggcacagcacaaaatgttgacaaatcaaccagcttggcacggaaagttttccgcctttttaagtttgtgaacgatttgcatggtcttattagcccagttcctcaaggaactcccgttccacttgttctgctaggaaagtcaaagaatgcactgttgtcaactttcttatttctcgatcaaattgtgtggcttggcagaacaggcatctataagaacaaagaacgtgctgagttgattggacgaatatcccttttctgttggatgggatcatcaatatgtaccacattggttgagcttggggagcttggaaggctatctgcatcaatgaaaaagttggaaaagagacttaaggatagt

SEQ ID NO: 612 - DNA, 617 bp, Gossypium hirsutum
  Clone ID: LIB3825-009-Q1-K6-E3
ggttttagtacacctaggtcacaaattggttttgacccgcatccgatggttgccgaagcttgggaagccttgagaaggtcattggtgtattttcgtggtcaaccggtcgggactattgcagcattggataatactgaagaaaacctaaactatgatcaggtctttgtgagagactttgtccctagtgcgttggcttttttgatgaatggggaaccagaaatagtaaagaacttcattttgaagactcttcgccttcaatcatgggagaaaaagatcgataggtttcagttaggagaaggagtaatgccagctagttttaaagtgctccatgacccagttaggaacaatgagacattaattgcagattttggtgagagtgcaataggaagagttgctcctgttgattctggattttggtggattattttacttcgagcatatacaaagtctactggagacacttcattggctgagttgcctgaatgccagaagggtatgcgcctaattctgagtttatgtctctcagagggattcgacacatttccaacccttctctgtgccgatggttgctgcatgattgatcgtagaatgggtgtatatggctatcccatcgaaat

SEQ ID NO: 613 - DNA, 606 bp, Gossypium hirsutum
  Clone ID: LIB3825-009-Q1-K6-E4
gccgcactaaaccctaattttttcccctaacatcagcatgctgaaaaacccgcaacttaccccttcgttgcccttttcaataaagaactctacacagcagcgtctccaagctcttatagcaaggtgcccacgattactctggctctcctgtacttagaatggggctgatggtgtatctacaccgggctgacagaagataaagggaaaaggaagttgaaaactttgtctgcagttgaggagtaattccttgtggaaagaaggaatttcttgcagaacttcacccattattctatgcacagtttctgaatttaaaaggagcttaaatactgcaaattctgcatgtaatgaggtacgaaattcccttaaattgaaggatctcaccaagaaaattctctatctaggaaatacattgaaccaaggaactactatgggactgagcaatgcttcctttacaggctaagaagttagcatcacagtatcaaaaggaagcagacaagatgcaattcaggtatgggagacgtgctaagaattaagggacaaaagctgaagaagcactgtaggctcaaatgaaattaacagcaatgtgggcaaataagagctcgtcag

SEQ ID NO: 614 - DNA, 592 bp, Gossypium hirsutum
  Clone ID: LIB3825-009-Q1-K6-E5
taacagcgagggcaacaattcccccacttgatctctcgtgagaagttgggagaggtggcaacctgggtcagcgccactgtggtctccgcctttttctcctctctcgagcgcttctcctgcgttaacctctccaccaacgaccctgacgatgacgacaatcccgacgaggccaaggaccgccctctcacctactcctgaatatctctctcggtacttgccacgtcatagactctcttgctttctcttgatttagggtctttgtatacagaaccaagaaaaaagtattaaggaaactttaaatgctctctatatgtgttggtcctcctgattgaaaagggaactcttgtgtaataaaggcctttttttttttggatatttaatcatctaagtctgttggtgctgtgttttctcaaaagtcacaagtcaaaaccctcgatcaaacaatatggagtttgaatttgattcctaggttttgttatggaactgtcttttccttatcagttaaaggagttactgtgtgtgtgtgtgttttgaatattgaattgtaatcttttgaagctatgcaatgagttcatattaagatgattgatgg

SEQ ID NO: 615 - DNA, 598 bp, Gossypium hirsutum
  Clone ID: LIB3825-009-Q1-K6-E6
ccgtccgaaaaaaaaaaaaaaaaaaaaaaaaaaaaaaaaaaaaaaaaaaaaaaaaaaaaaaaaaaaaaaaaaaaaaaaaaaaaaaaaaaaaaaaaaaaaaaaaaaaaaaaaaaaaaaaaaaaaaaaaaagggggggccgtttttgagagagaaccaaagtttacttccccgtgcttgcaacgtaatactttttttttggggcccccaaaattaatttcatgggccggggtttaaaaacgtggggacgggaaaaaccctggggttcccaaattaattcgctttgaaaaaaatccccttttccccagttgggttaataccaaaaaggcccgccccgttcgcctttccaaaaatttgcccaccctaaatggcaaatggaaccccccttttaccggccctttaaccccggggggtgggggggttacccccagggtaaccgttacatttgccagccccttagcccccgttcttttcgtttttttcctttcttttttcgccactttcgccggttttccccgtaaagttttaaatggggggctccttttagggtcccaattaagggttttacggcccctgaccccaaaaaaattgtttgggggga

SEQ ID NO: 616 - DNA, 592 bp, Gossypium hirsutum
  Clone ID: LIB3825-009-Q1-K6-E8
gctcatttctgctcggaataattctaaactgtccggtggataccctcaacaccctcccggctacggttccccaccagctcagccttacacagccgctccatacacagctggagcaccgccgccacctcaaccgtacggtgctccatacgccgctgcaccatacggcgcaccttctgctccctactctgcccctctaggcgagaaaccaccaaaggacaagcaccaggcgcatggcgtcggtggtgctcctcccgttcacagcggaagctatcctcccgcaggaggctatgcgagcccgttcgcatctctgttgccgtcggcatttccaccggggacagatcctaacgtcgttgcctgctttcaaatggctgatcaagatggaagtgggtttatcgatgataaagagttgcaaagggcgctttcttcgtataaccaaagcttcagtttgagaactgttcgtttgctcatgtatctcttcactaatactaacaccagaaagatcggtccgaaggagttcacttcagtgttctatagtcttcagaattggagggccatctttgagagattcgatagggacaggagtggcaaaata

SEQ ID NO: 617 - DNA, 603 bp, Gossypium hirsutum
  Clone ID: LIB3825-009-Q1-K6-E9
attaaatctaaaattcactgctaaccctcccttttctgcgaatctcggtcgctcctttggctgttctgtccatggcgattgcagcggcagctgttatcgtcccattgggccttcttttcttcatctccggcctcgctgtgaatctcattcaggcagtatgctttgttcttattcgaccactgtccaagaacacatatagaaagatcaatagggtattggcagagttgttgtggctgcaactagtttggctggttgattggtgggcaggcgttaagattgaagtgttcgcagatcatgaaagcttcaatttaatgggtaaggaacatgcccttgtcatatgcaatcacagaagtgatattgattggttagttggatgggttttagcacagaggtcaggttgtcttggcagtacattagctgtaatgaagaaatcatcaaaattcctgccggtcataggttggtcaatgtggttttctgagtatctgtttttggaacgaagctgggccaaggatgaaaacacattaaaggcaggtattcaacgtttaaaggacttcccacggccattttggttggcactttttgtagaaggaactcggtttacac

SEQ ID NO: 618 - DNA, 607 bp, Gossypium hirsutum
  unsure (1)..(607): unsure at all n locations; Clone ID: LIB3825-009-Q1-K6-F1
caaagttgactggtcttcacttgccttagacataaaatgttcctgatactttatctgccaaaaacttaggccctgccgaggaaattaacctgcnagagccctaaaaaaccagtagatgcatctgaagacttggctacaagaccagtttcactgactccagaagttgcattaaatagtgatgctttaccagtccccgcaactcttggttgtgaagaaaaccaggatatggaagctgttcaaagcagtgaggggaaaaagaggtaagacactagatgagggacagagacttcaatcagcaataaacttcaaaacaccgtcaaatagtgatgtcgatcatttcaaggacgccaatgggtctaccctgcagtttgattccactagggacggaactgtacaggtaggctcacaaatagaagacaaaaattgttctacaataaaagaagttgctgaaactggcggtgctgcagccaatgggttaccttcttcaggatacagtatgccagctgaagtggaaaaagaagaaaaccatggagcaataaatgaggaagagaataatacagttggttcaggtgatgagaatgcaacaagagtgggtgaggcttccata

SEQ ID NO: 619 - DNA, 616 bp, Gossypium hirsutum
  unsure (1)..(616): unsure at all n locations; Clone ID: LIB3825-009-Q1-K6-F10
cagataacagcggggcccgagnattgatgtgtattcgagtcataggagctagtaatcgccgatatgctcatattggtgacgttattgttgctgtgatcaaggaagcagtaccaaatacacctctagaaagatcagaagtgatcagagctgtaattgtacgtactcgtaaagaactcaaacgcgacaacgggatgataatacgatatgatgacaatgctgccgttgtcattgatcaagaaggaaatccaaaaggaactcgaatttttggtgcgatcgcccgggaattgagacagttaaatttcactaaaatagtttcattagctcccgaggtattataagacgagacccaagtatagttagagtatttagagtatttaaatggcatagattaattagtagattgtgtctcacgtatatacctttactaagtaaaaaaaaaagaccacgttggttatatcaaaattcgggagcaacaaaaattttagtttaccatgggtaaggacactattgctgacataataacctctatacgaaatgctgatatgaatagaaaaggaacgattcaaataggatctactaacatcactgaaaacattgttaaaatacttttacgaga

SEQ ID NO: 620 - DNA, 595 bp, Gossypium hirsutum
  Clone ID: LIB3825-009-Q1-K6-F11
ctggtttccaatgcttctgtttctctgctaccttttattgcaggagagaaaactcttcatttcttcaatctggtggttttagcctgaatctctccagtgcatgacggaccatttctgggactcccttctccaggtaaaagctttctcctctcttgagagcctccgttgctatagtgtgagcatagatgtttcttgcttttgggataaaagaaacacaatctcctggtaactgcttttcctgttttgaatgtctttgattattgctccaatgaccgatctgtctataatagaactttgacacttcttgataatcgttttcgagtcacccataacttcgattttgttgattctcaaaccgatacctagttttattgcttgtaatcctgcatatgcctctgctgtaaatggatcttcaatgttggagtggtgaactgcctgtgatgcaagaatttcccctttcccattccatactattagccccaatgccgatctggacgtctgacggtcaaaagctacttcaaaatgaatcgttgcccttccccttttgagcacctgttgaaaactttaagaagagtggagaagttgatttctacta

SEQ ID NO: 621 - DNA, 627 bp, Gossypium hirsutum
  Clone ID: LIB3825-009-Q1-K6-F12
tataactactccttttctctcgatctgttagggtttcttttaattctaggtaaattgtgctctctattttttcccttattttaatttcagattatttctttataattttgctttttttgggtttctgaaataatgattcatttatgttgttttgacaaatctgtattaagaagtaacggaatttttccctttgatttggtggctggaagattgaagaagggattttatttattgttcttttgcaaacattgcctttgtcttttgttttgataatttcacaggggttcaaagcatcattgtcttatggttattttgggtttttaaacttgtgagattatttgtgtttctagctgttggtttcaattagatgaggctaacatctccatcactggtgtatagaggtatcttcaccatgttcctcgtaggttcaagatatgtttcagggaaggtaggaaaatgctaatgtccttaggctcattgctttctgattttagttccattgcgtatttctattcttgtaagaaattttgggtttttttcttttctttcaaaatgttcttattttttattggaggtgatgtataggtattgaagcagcaccaaggaagaaggttgcagcagcttctg

SEQ ID NO: 622 - DNA, 596 bp, Gossypium hirsutum
  Clone ID: LIB3825-009-Q1-K6-F2
gtttctagtttctttatcaattcacacctgttttccctttttttctttttcataattccttgacgttatgcgttgtaagctcgatttataagtttcttctgctaatacactaactataataatagatatcttttagctggctactgcttataaacttgttagctgattattggaagagagaaagtagtgatataaaatatattgaaccgtcatgattgcatgtatctttccttctttttcattacatttgcaaaaggtatagtgagaaaccattgatcacaagtagtgcaattgcttgttagcatgtttttcttttttaattgactccaacatttcaacaactctggaattaagaaaaggaaacaaactttggtgaccaagttacgacataaaactactttcaatatacattatggttctaatagagcactacctaatatcccactactttgctggtttccgtttgtgccgtgattgcatgcaaaataccatgcagaactatataaaaatattatatgctaaaaattaatagtgttatttcccttttttgcttttcttatatcataaacctggctaaatttggaattattttgtat

SEQ ID NO: 623 - DNA, 628 bp, Gossypium hirsutum
  unsure (1)..(628): unsure at all n locations; Clone ID: LIB3825-009-Q1-K6-F3
gtagnactagnaggnaaaaaaaatcagaaacacgttgttacttcctgtcataatgaatcttttatcagttgaactggtttacttccagtcactgaatcccaccttttctaaccggtcccaattgattttttttcatcactcaccaaaacaaccaaagagtaacgaggaaaaagaaacccaacccccaagaatttagtcaattaccagcaataagaaaaattactagagcgctacatctaggatgagctatgcagatccaggggctaacaattaaatactcattcatgtttaaatcaaacacctcacaataataatgttcacgattcatagtctcttcatgtcaaaaaatttaatcgaaacaaaagtaaaattcaaagtaaagcttccgttatctcatcttttagttttttgatgaaacctttttcttggtttaatattatgtcaattgggtgaaaggtttatcatttggataatcttctgtgtatattgtgctttcagcctgcacttttgtatattttaccgactgttattggattcttggctgctcactgtgtatggaatggagatgtcaaaccggtttgttctccacccttgtttgattctctctagcattatttgcttggcatgg

SEQ ID NO: 624 - DNA, 596 bp, Gossypium hirsutum
  Clone ID: LIB3825-009-Q1-K6-F4
attttcagcagcaactttttccttttggcagttaagtgaaacgatgccatactactcgaggggtggcgaagatgacgttgacgagttcgacgaattcgatccgacgccttacggtggtggatacaatctcgaactaacttatggtcgtcctttggaaccctccgatgagacttgctacccttccgctacaccctccgatggcgactttgattacgcacgtcccgatttctcttccggttacgcgcacttagcttatgccgacgaagccctcgaaactgaatacagtagctatcttaaacccaagccccgacctggacgattcgaacctgcacctgcttttggtgactatggaaggaaacctgaatatgagcaattcgaatctggtcatggacgcaaaccggagttcggacgacccggctccgaatttgaatctgattttggccgaagacctgaattcgagcagcctcctgaggagtttggatctgggcatggccggaggccggcatatgagcattcacatcaaccggatttcggatccggccgtagatcagaatttgagcagcctccgccgcctgagtttggaactgggtatcgac

SEQ ID NO: 625 - DNA, 592 bp, Gossypium hirsutum
  Clone ID: LIB3825-009-Q1-K6-F5
gcaacttgagtttagattagagttggctgtgttgtgctgtgccatctcctaaccctactttaatcattagatctctttcaatgtacatatggaattttggtttcttttgcctctctggccatgtgacaaaggcttttcttattgccaggaatagaagtcaaaagcattcttttggtggttccatatatgtttctttgtgttgtatatatatcttcgcgggatccatagagtgattggtgagtgttatttaaagtttatgctatcaaccctttttattttaatcactagtctatatgaaattccccagggttagggttttgatgtaatttttgtatctgcttgtgatgggattctgaaatttgataatgtatctgggtttgtccgtttcctcattaacctttgtatcaacttcaattatcaatctcacttccaacaataggaaacccctccacttgacttcaaattggacgctgaatccccattcgacgctaaatttgcagtcaagctgagatggattcattacggttaagttgctcaagctttatttagctcgatcataggtgatgtattgttgcctgcctaaggcttttga

SEQ ID NO: 626 - DNA, 602 bp, Gossypium hirsutum
  unsure (1)..(602): unsure at all n locations; Clone ID: LIB3825-009-Q1-K6-F6
tttttcactttccacacacttaacttaattaagcaagctcgtaagctgttttcatcaatggccgaccgtgaccgctcttaccgatttgaccaggttgttcgtggtgatagaacgaactatcaaagcggaccatcaacaacccaagttctaaccgtcctcaccctccttcccatcggcggcactctccttgcattagccgggctaaccctcaccggcaccgtcatcggcctatgcgtggcaacgccactcttcgtcatcttcagcccggttctgctcccagctgccatcgcggttttcatggctgtggccggtttcttgtcgtccggggcttttgggttgacgggactgtcctcgctctcctacgtatttaaccgcttcagacaggcgactggcaccgagcagctcgacgcggaccgggccaagaggggcatgcaagatatggtggggtatgtgggacaaaagactaaggaagctgggcagactatcgaaaacaggctcatgagggtggtaggacatgaatatgaaccatggaaggttgctttgcttgcttgtaaaatgtactntaagtgtgtttcattttcgagaagtctttcgtctttgcg

SEQ ID NO: 627 - DNA, 622 bp, Gossypium hirsutum
  Clone ID: LIB3825-009-Q1-K6-F9
cagcaaaagacatctgcaggtgcaccatccactgcaaagaagcttctcctgtcactatgatgaatggaatggatgacctctcttttatttttggagctgcctcaatgtctggagaatttgaggaagttgctggggaaagtgaagaaagacgaagggccagattgggacgtcatcaaaggacccaggacagagtggcaagagcagttgctgatatgaatcagcgtgatcgtcaatcacagaatgagcaagaagagagatataggattgctgaagctatggattttgagataaaacgctgggctgcagggaaggaaggcaatatgcatgcactgctttcatcaatggaacgggtactttggcctgaatgtggttgggagccagtttcattgactgatttgattacctctggctcagtcaaaaaagtttatagaaaggccacattatgtgtccaccctgataaggttcagcagaaaggtgccactcttgaacagaaatatattgctgaaaaggttttcgatattctcaaggaagcttggaacaagttcaacaaggaagaactttcttaaaacctgtaaagtataaatagctcatttgaagaatcgagctatttttaattgggaat

SEQ ID NO: 628 - DNA, 606 bp, Gossypium hirsutum
  unsure (1)..(606): unsure at all n locations; Clone ID: LIB3825-009-Q1-K6-G1
taccgtgttcccacaaagtgtctctacaggaagcatattcaactccaatcttgcctttggaccatcttagctgaaanaacctactgaaaacaagcttgattgggctaagaggctgcttgctaaatatggatctcaattatctgtggtctcaatagtgttattgtttatctacctagtcgctaccccatcgaaagccagtgccgcaaaagcaagcaagaagaagagctagactcaagtgtcatgaaatgatggagatggagaagattagggaaggatggggtgaatggagtcattattcaaagaaaaccttggccctcctttgcaaactagccgctcaccctttccatcccaaagtattaccttgtccgcagcagcaccggcctctaggcgggctgtgggcttttctcttctcttctctctctctctcacacgcttgctaaggaggacgtaagcgagatccttgatcaaatgggacaacattcatttgaagttctttacttattcgaataaatgaaatttttataatttggtcccttttaaattttaattatattaatctaattctttttttttttaaatatagctttgcctcccccccccccccaa

SEQ ID NO: 629 - DNA, 611 bp, Gossypium hirsutum
  unsure (1)..(611): unsure at all n locations; Clone ID: LIB3825-009-Q1-K6-G10
caccaaaggnaattttatgtgaaccttcttcaatagccctattcttagatcccttttcccctcctacaattttacattaataatcagacccatacaatcaaaggaaccctctcctcggtggaaatactatagcaacccccngaaaaaaacttctccaccaacatcaagaatttcactttaccctacacccgaggatcaaactacacccaactcatttcaaactccaagaaaatcattgaactccaagaaaaaatgaaaataatgcaagaacaactgcaacgacaacaaggaccacaagcaatctgaaatctccttcaaaataaaatggccccggctgatgaagaagtagcctcatctcaccgagaccattgttaggagcatccaataaataatcctgcaaattgggttgtttcaaaaagtttcactattgctgtgtattaggtaagcatatccatatatggaataatcatctattctttatcctagcctctttgtgcattgatgttcatgaggtcacatgtatcggtatgcacaagtgcacaagttcttagagttgagtagccttttcgtgcctttgggattaaaaggcctattggtcattttagcttcca

SEQ ID NO: 630 - DNA, 609 bp, Gossypium hirsutum
  Clone ID: LIB3825-009-Q1-K6-G11
cggttctttatcatttctctctataaacttgtacggccaaagatccttcccgcaaaaaatcgaaagaaagaaaaaacatggggatgccgcctgccacgtgcgcctccgcctcttcctcctccatcgtcaactcttctccgatcggtggcgctggcggaggaggtggagagatcatgctttttggagtcagagtggtggttgattccatgaggaaaagtgtgagtatgaacaacctttctcaatacgaacaacctcatgagtcgaacaagcataacaacaagagcaacaaagatcaaggcgatgataacctcaccgctggttacgcctccgccgacgatgccgttcctcactcctctggaaatcgagagcgcaaaagaggggtgccgtggacggaggaggagcacaagctgtttctggtaggactgcagaaagtagggaaaggagattggagagggatttctagaaacttcgtgaaaactcgaactccgacacaagtagcaagccatgctcagaaatactttctccgacgaagcaatctcaaccgtcgtcgtcgcagatctagcctctttgatatcaccaccgatacggtgcaggcaattccaatggaag

SEQ ID NO: 631 - DNA, 611 bp, Gossypium hirsutum
  Clone ID: LIB3825-009-Q1-K6-G12
tttaatttctggggttttagtttcttggtgggttttgagtgtaaatggtgctaatttaccaccatgtcaattccctgctatttacaactttggtgactcaaactcagacactggtgggatttcagctgcttttgaacccattagagctccatatggtgtgccctattttcacaaaccatctggtagagactctgatggtcgcctcatcattgacttcatagctgagagacttaagttgccatatcttcatgcatatttgaattccttgggacaaatttcaggcatggagcgaattttgctaatggtggatcaaccataagaagaccgaatgaaaccatttatgaatatgggataagtccatttggtttagatatgcagattatacaatttgaacagttcaaggcaagggctactgaaatttataatcaagctaaagatccttctgaaaaagataaacttccaagacctgaggactttacaaaggcgctttacacctttgacattggccaaaatgatctttctgttgggtttaggaaattgagctttgatcaactgcgtgctgccatcccagatatcataaaccagttagcatcagctgtccatcatctgta

SEQ ID NO: 632 - DNA, 607 bp, Gossypium hirsutum
  Clone ID: LIB3825-009-Q1-K6-G2
acaatatacggggtttagttgaaaaccattgggaattccctaaagcattgatcagaatgtaaataatctgaagagaaaaagagagaactaaatggtcagaaagaagacgttgaatcaagaataaaatcagagctgcgtccgagaaagaaggtcaagaaagaagttgatctgtggattgaaaatgtaaaaaggataaatggggaaattcctaatctcgaatccaaagttagaggtagcagctttttccctcgtggatttcttgttaagaatgttcgtaagaaggaagaagaagttgaagaattgcttgaaaagggtagattttctgatgatttggttgtcaacgatctttcgtggattggtcaggtgttgccaacaccgagcttagtcgttgaaacaataaaatgtaaaaagaatgagattatgcaacacttgaggaatgacgaggttcaaaagattggagtttatggaatgccaggagttgggaaaacaagtgttgtcacgcttgtcaacaatgaactcttaaaaggtgaaatcgagttcaagatcatagtatgggtcactgtagcgaggaactgtagtgttattgaactgcagaataagattgcaa

SEQ ID NO: 633 - DNA, 601 bp, Gossypium hirsutum
  unsure (1)..(601): unsure at all n locations; Clone ID: LIB3825-009-Q1-K6-G4
ggccaancttggttcttaaacttgcttctacaatcatctcccgtagttgttgtagtcattactttcatttttttatggatagattttgaagtttgtaggtaagtagttagttctagtttggtttttgatataaagattttcccttctagaggagaatatagggagcttgattcttattaggaagatcagatcttttggtatcagattggcccatctattggttttagatattaatgttcaaaacttttgattgtattttgaagaagaaatttaagtgtgagagtagatggggaatacttgtgtaggaccaagcatttccaagaatgggtttttccaatcggtttccgccgcaatgtggcggtcccgaatgcctgatgactcggtttcgagttctaatgggggaattgggagtgaggtagcagctagagaacctgaatcaccattgccagtcctaaacaaacctccagagcaagtgacaattcctaaaccagagaccaaacaagaggccaaagaggaggccaaaccagagaccaaaccggaaactgaacccgaaaaaccggccaaacccaagttccctcatatgaaaagggtgtccagtgca

SEQ ID NO: 634 - DNA, 608 bp, Gossypium hirsutum
  unsure (1)..(608): unsure at all n locations; Clone ID: LIB3825-009-Q1-K6-G5
cggnagcgtgggttgaagtcttgcaaaaggtaatcccttgtttcataccttatgtatccatacactttaaagcacatattagcaacagggtaccctgggtatatgtagccgatgatatattctgtaatcacattcaaagctggtgtcttcaaaagaaaatttacccatgtcaaaatacccaaacaaaactaacagaatataaggtcaaatcaacaagcaatcattatctgagtggaagaaaattattctcaattatgtgagcaaataatctgcaaaatttagataaaattgcatgatatatatttttttaaaatacagaacttgtgaaatagcaaaactatacctgatttgttgtggcagtaataactccgacagggagagtgaaaaaaatggctagaccacaagctaacaaaacaccccaccatggcagctggagttgatcattgtaatactggcataaaaatatggttgctgcaatgtttactataaggatacacgtaaaccaccattcaggtacttgcttgtattttctcatcagctttgtatgcacatccatctttgtctcttggaaggcagatttgcttcgttgcaaaatttcgctgcaccac

SEQ ID NO: 635 - DNA, 607 bp, Gossypium hirsutum
  unsure (1)..(607): unsure at all n locations; Clone ID: LIB3825-009-Q1-K6-G6
ctcanacaaaatgctcgtaagaaggacttaaaataagcagcgggaagaggagcgtcgccgtaaggaggaggaaaaagcaccaaacaggctgcagccaaggcaagctcacatagtcagaaatctgctggagctgatgatgaagatatggatcccacgcaattccatgagaataggctgaaatttcttgcagcccagaaagcagaaggaaaaaatccatatcctcataagttctttgcgtcgatgtctattattgaatatatagataaatatggaagcttagccaatggggagcatattgaggatatctcagtatctttggctggtcgaattatgagcaaaagatcatcaagttcaaagcttttcttttatgacttgcatggtgatggtgccaaagtccaagttatggctgatgcaagcaagtcaggcttggatgaagcagaatttgcaaaattccattccagtgtgaagcgtggtgatatagttggtgtcactgggtttccaggaaaaacaaagagaggggagttgagcatctttcctaagtcatttactgttttatcccattgtctccatatgatgccaaggcaaaaagcaggtcctgatgccagtg

SEQ ID NO: 636 - DNA, 608 bp, Gossypium hirsutum
  unsure (1)..(608): unsure at all n locations; Clone ID: LIB3825-009-Q1-K6-G7
ggttaagggcaaggtttccctttcggtgcaaagtgacgagggaagccgagcctcgggcgttgtgtgcgctgacggaggcacgtggggtgcggcgctcgagagaaagctagggttaggctttggttaaatttgatttaagcattgggccaattcggccatcagggtttgggcttagatgggtttaggttttgggctttaaatctgatattttttgtaaatggactttttaaatttggacttattattttggtttatttatatcgggcccgggcaaatttgggcccgtacacatatcattaggtgtaagcaaatgacttgaacagaatcttagaagtaaaaatttcttttcaaaaaaaaaaaaaaaaaaaaaaaaaaaaaaaaaaaaaaaaaaaaaaaaaaaaaaaaaaaaaaaaaaaaaaaaaaaaaaaaaaaaaaaaaaaaaaaaaaaaaaaaaaaaaaaaaaaaaaaaaaaaaaaaaaaaaaaaaaaaaaaaaaaaaaaaaagggggnggcgggtttaaaaaaaacaaaattttaaggccgggggttggaaaagaatattttttttttagggcccaaaaaataaaaaaaccggccccggttttaaaa

SEQ ID NO: 637 - DNA, 600 bp, Gossypium hirsutum
  unsure (1)..(600): unsure at all n locations; Clone ID: LIB3825-009-Q1-K6-G8
cggnagcgtgggcggncgcgtgggttttttttttttttttttttttttttttttttttttttttttttttttttttttttttttttttttttgggagaaaagaataagggatttaaattataaagcaaataaccaaaatcctggggaaaaaagggggggggggggggaaataaaggggaaaacgttccccctagggtagaaaaaattggaccctttggttaatgggtttttatcctacagccttgaataacttttattcgaaaccattttagcccagtcatgaattggtttccaggattttttatttccaagggcagcaaattgaccctgttttttaaaaacaatgagttaggagttgagcttggagctaaaaataaagggatgaacaaacataagcgggaatttctaacccttttttaatataaagataaaccaattggtttttttaggaaaatatagaccttgggaaaggaatcataggagtttgcccaaaactggaatgaaggaaaaacttgggaataaggcaggtgctccaccttgaattcgaaacatgcataataaatggcaccagctttttagcccgggggggaatgccctttt

SEQ ID NO: 638 - DNA, 621 bp, Gossypium hirsutum
  unsure (1)..(621): unsure at all n locations; Clone ID: LIB3825-009-Q1-K6-H1
gnactcttctttggtgtcaaggtaatagctatgaatagtcatcgactccccggaagggtagaagaatgggacctattatgggacatacaatgcattacaggcgtatgatcattacgcttcaaccgggttattctattccacctcttagaacgaaaagaacttaaatcaaaatacttaatagcatggcgatacatttatacaaaacttctaccccgggcacacgcaatggagccgtagacagtcaagtgaaatccaatccacgaaataatttgatctatggacagcatcgttgtggtaaaggtcgtaatgccagaggaatcattaccgcaaggcatagagggggaggtcataagcgtctataccgtaaaattgattttcgacgaaatgaaaaagacatatatggtagaatcgtaaccatagaatacgaccctaatcgaaatgcatacatttgtctcatacactatggggatggtgagaagagatatattttacatcccagaggggctataattggagataccattgtttctggtacagaagttcctataaaaatgggaaatgccctacctttgagtgcggtttgaactattgatttacgtaattggaaggaaccaattaggt

SEQ ID NO: 639 - DNA, 623 bp, Gossypium hirsutum
  Clone ID: LIB3825-009-Q1-K6-H10
gccatggctgagcatcaccagcaattgcgccgaactgatgacatgaagaatttcttccatgaaaatggaccctcaacatcaaaagttcttatggttgccaccctccttcctgttggtggcatcctcctcttgcttgctggtttgagccttattggatccctcataggtcttgctattgccgccccacttttccttatttttagccctgttttggtacctgctgcttttctcattgcgggttccatagccggattcttgacctccggagcatttgggatcactggactgtcatcgctgtcgtggattgctacttatattcgtggaagcaggggctctatgtctcaggggctagacccagtgaagtggcccttgccggacacggcagtgagtatggagcagaagatccagaataggagccaaggaggaggaaggatctctgagggaggcagagaacaggaaggtggcaagagtaagacacaagaaggtggcaagagtaagacacaagaaggtggcaagagtaagacacaagaaggtggaaacaagactgtgggttgaagtttcctattgtagcagtcggctgatatgctagaaagtaatctatcaattttgttgctctgttctgc

SEQ ID NO: 640 - DNA, 622 bp, Gossypium hirsutum
  Clone ID: LIB3825-009-Q1-K6-H11
gcgctgatgatggagaaagcaaagagcccgccgcagccaacaggatggcgaagttggtaaggccgatagcgaggagattcaggaagccttacaaattgtcctctttcaagtctctgaatgttatgtttatttgatacctccaagggaaaactgcagcatcttacagggctgatgaatggaatgtcaacaaatgggcctgggagggaactttgaaagtcattagcaagggtagaagaatgcattatcaggcttgaagacaagaatacaggtgaattgtatgctcgagcatttctgagagatggagagccacatccagtggaatctgtaattgatagcagtagatattttgttcttcggattgaggagaatattggtggtcgccttcggcatgctttcattggcattgggtttcgagagagaacagaggcttatgattttcaagcagcgctgcatgaccatatgaaatacttgaacaaaaagaaaactgcggaagatatggagcagcaattccagaaatcttcctcagttgattacagtttaaaggatggggagaccattgtacttcaattaaaaaataaaggtggctctactctgaagtcaaaagctgcggagctgggcattg

SEQ ID NO: 641 - DNA, 616 bp, Gossypium hirsutum
  unsure (1)..(616): unsure at all n locations; Clone ID: LIB3825-009-Q1-K6-H12
gcgttttcccagcgtccggtgaanattgtgagctctgtaagttagcggcgacaacgtcttgtgaatcggaccaagccagtttgtgctgggattgtgacgctgtagtccacggggctaacttccttgtggcgagacatgtgaggtgtctgctctgtcacgcttgtcagtctctcactccatggagagccactggttccaagcttggtcgcacggtctccgtctgtgagaggtgcatcgacggcggtgatcgagaagagagcgaggcggaaaatgacgatgatggtgacggagaagacgatgaaggagatgattctgatgatgacgtgtctgttggagatgatgtggaggacggagataatcaggtggtgccgtggtccacagtagcaaatacacctccgccggcgcctagttcttctagtagcgataattattctggtggtgaaagagaggacgatccggatcgtttatcttcaaaacggaggtacggctaccatactgttgtggcgacgcggtgcagagcagagggtggaggcgtttcggttgactccaggactatgaggctatcgaaggaccaacagatcaaaccggagggcacggttcagttgcagtccaattc

SEQ ID NO: 642 - DNA, 325 bp, Gossypium hirsutum
  unsure (1)..(325): unsure at all n locations; Clone ID: LIB3825-009-Q1-K6-H2
caatctttcatctcatccgtttctccaaaaactcctctatctcttgtgcctgacagttactgggaagaaagtggagagtactgcataagaccgaggaactgaagcaagatagtttagaccaaactatctccaagtgggnnaaaaaaagatggtcggaaaaagtaaagctggtgctatctagaactgaatctgatccatcgcctgcaagagcagagaaatacaaaaagggccataagtcatctgttaggcgtagtttgcttgatgatttgactcggcaacttggcttggaggaaagagataccgaaaagggagctgttctgatgct

SEQ ID NO: 643 - DNA, 551 bp, Gossypium hirsutum
  unsure (1)..(551): unsure at all n locations; Clone ID: LIB3825-009-Q1-K6-H3
nngtctctttttctccagnaaacacaggnaatccgccgctgttgaacttaacagaataatttccgaagggttgtggattccacccgagctgtcgcatctgaggttggtatatttccacttgtgaatcttattgaacaagggagtgacagggcagtcgaagcagccttatcaatactgtataatctgagtatggacagtgagaatcattctgcaatcatagctgctggggcggtgccagcgttgaggaagattgttttatcgcaaagatcacactggtcacgagcacttcgtctgctaaggaatctgcctgtgtgatgccaacatgaatactatgtttttagggccttcgtacagatcctacaatcatttttgttctattcagcaggagccatttctatcgagttataacaatcgcattggtataatttcattggaaagtccatgtttttgtgacaaaagttttatactcagctccttgccttttatcataataatgaactcatgtcagatattgtggaaacctttgatgataaaaaagtttgtccttgaag

SEQ ID NO: 644 - DNA, 540 bp, Gossypium hirsutum
  Clone ID: LIB3825-009-Q1-K6-H4
agcgactacctatcttatatagagagctacctaaaatcaactgaccggccgtcgacaacacaacggactgacagagaacaataccctggacccacccaactcaattggcatgacatacatccttcttcagccagctggctaactaacaagaccagccccgaccgaccgtcctaacaaacacgcacccagactggatagtgaaacgcaccctccctggacccattcatcaagcgcggtggggggggtactcacacccagaccgacccactcactagccacctacctaccgcccgttcctttcgctttctttcctttctttctacccacgtccgctggccctgccaagcaatcaataaatggctggctccatggatgcgaccgattgattgactgaccgtacccccaccaaaacaaacttaaggagagggatgacttacggagccatccatctgacagacagacggtcgtcctcccacggacgagggcacccacttaataaataactgactctccaaacagacacaaacatcactcatacct

SEQ ID NO: 645 - DNA, 595 bp, Gossypium hirsutum
  Clone ID: LIB3825-009-Q1-K6-H6
gaaaaaaaatctattcttactgctgcaactttcatagtgtgtgtaaatcttttaggccttttactactgctaatccagctgtatgttgccagtccatactgcatcttcttgtctgcttttgaccctcatactgattatcaagaaaggaacctcaaacacacctctcaagattgcccgttttgcagacttcagtacactcttctttttatactctctctctcttgactatcatgcataggtaaaccttttattttctttttttgcagggatgtggacttacaaacatggtacagtaatatgttgagtggtggagaagggtcacctccaattggactaggtcttgagcttggacgtggatctgatcatagaccaactgggttcacaaaatacagtggcttcactgtttttcaactacaagaactgcagcttcaatctcttatctacaagtacatggaagctggtctccctgtccctaatcatctacttctacctatatggaaaagtgctgactggttctcttggcggtctacatgccaatccttatcaactctactctaactgaaaacactaaacacccgtttttctgttggttcat

SEQ ID NO: 646 - DNA, 613 bp, Gossypium hirsutum
  Clone ID: LIB3825-009-Q1-K6-H9
cagatttttattttacttatttgatctgtaaaatatatgaaatccttttcttcatcgtagagtcatttcagttatgaatctttagttcacctttgtctttagggttttagggtttattggtttgagtgtaagccgcttcctctaatgttactgtgggatagtttgcttatgttgtgaatgctgtgattacaagagtgtctttttgcatatgatttccatgactgcagtgattatattttggacttagagtgttacatacggtgaattactagatgcttatctctaacattacatttgtaaatgttattgttatattctggtgttaatcgaagtgttttctgccatacaggttgctagattattcaatgaagctgctcagatgtctcctgaggatgttgatgtacacattgtccttggtgttctgtataatttgtcgagtgaaaatgataaggccattgcatctttcaaaactgctttgaaacttaaacctaatgattattctctttggaacaagcttggtgtaacacaagccaacagtgtgcagagtgctgatgcaatattagcttatcaacaggcactagatttgaagccaaactatgtgcgtgcttgggca

SEQ ID NO: 647 - DNA, 630 bp, Gossypium hirsutum
  Clone ID: LIB3825-010-Q1-K6-A10
ccgtccggcaaaaagcctacattgcaagttagcatgcatgtatgtgctgtatgatagttattgccgactgcaaaagaagctattgagtttataaccttgtctaggtgagttatggtatcctcaaaactttcacttttccttccatctttttggtgttctttgacaaagataatgaaattttacgtatttgatagggaataggaaacagcaaagctaggagttcctttttaggtaacaatcatatgcttttttccccaaaaatcagtaacaaatgattttgaccttttaagagtgactaagttgttcaattgaattccatgcaaactttgaagtaactaactaattatttcttgattgaatatatggaaaaccatttcatgataagtttagtaactaaaacattttcatggcaaatcaggtattaaaattaaaagacaaaggatataaattgtaaatataacattattctgtttgctactcagaaaccatcttaaaatttcaaaatttccttgcaaaacataatgggaacacaattgcatctgaacataaagaaaagaaatgagtatagtaccagtgagaaaccgaggctgactaatttcttaaacaagaaataagctttgtggagctccg

SEQ ID NO: 648 - DNA, 457 bp, Gossypium hirsutum
  unsure (1)..(457): unsure at all n locations; Clone ID: LIB3825-010-Q1-K6-A11
gggnaaaagcacgggtagtgtcgtgaacgagttaagagttgaagatagagatccactatttgttgcgaacgtgggtgattattattcaggcttggcaaagacaggttcagcgcgatggattcgaggaggtaacaactgaaatatcctcattatctatgatgcttatctggcacaaagttatttatagaacggccaaggcaaaatttccccctccttttatgagaaatctccttgtaagtcaaagtaggtaaatgcgccatgctgcattcacagaaggttgtatgtaaagaaattagttaaaggggtgtaggtgtattgagcttgtaggtatccatatggattgttatttttaaaatcgattccctgtataacagaataagaattattaccatttccccggtacgtaagcttcagcttgcaatgtaaatgtggaagtcaagtttatgttgtgatttgc

SEQ ID NO: 649 - DNA, 575 bp, Gossypium hirsutum
  Clone ID: LIB3825-010-Q1-K6-A12
ccgggtcgacccagcttttctgtgccgcgtgcgggacagctccagagggggaagggctacatgacgagcctgaaggcggccagaagcagcggttcaaaccaaaagagcagtggcacccccattgcaaatagagctgaagctgcagtgacggcaggctttttaggtccttcccaaaactggacgttaagcatacgcctggggcggggcctggggctgaagcatacaacaacagccatcccagtgggaggaatctcaagcagaggatgatggggctgttgaaactgtcagtaccaaccatgctagggccccctttcttccaagtagaaatattcaagaggatcactacagaagttcattggtctatgataatgacctatgtaacgacgtgaatccctatcagccccaaagacctgcctttgagaaccaacaacctgaagatggctcttcatcagtcgctgaggatcggcaccaacttaatttgcataatgatgatagggagcccccaactgaagaggctcacccttctgggataattacaaactgtcgtcgagtccgcaccccgcactgtgcccatt

SEQ ID NO: 650 - DNA, 85 bp, Gossypium hirsutum
  unsure (1)..(85): unsure at all n locations; Clone ID: LIB3825-010-Q1-K6-A3
ggccggcggccnacaccgncgggacggggaaaacccttttttttttttttttaancgccnngcagcacatccgggggggggcggg

SEQ ID NO: 651 - DNA, 617 bp, Gossypium hirsutum
  unsure (1)..(617): unsure at all n locations; Clone ID: LIB3825-010-Q1-K6-A4
ngatatgctggcctggtttgtgctcaagctcatcgtcaggagctcatccaagatttattcaagacatggcaggatcccgtaagggggactgtttctggtggcatgattaaggagctcctaatatctttccgacgagccactggacagaagccacagcgcattatattctacagggatggtgtcagcgaaggccagttctatcaagttctgttatatgaacttgatgctattcgtaaggcatgtgcctcgttggagccaaattatcagcctcctgttacttttgttgtggtgcaaaaaaggcatcatacaaggttgtttgctaacaatcatagtgatcgccgtgctgtagacaggagtgggaacattttgcctggcactgtggtggactccaaaatttgtcacccaacggagtttgacttctacctatgcagccatgctgggattcagggtacaagccgtccagctcattaccatgtgctatgggatgagaacaagtttacagctgatgcattacaatctctcacaaataacctttgctatacatatgcaaggtgcacacgatcagtgtctattgttccccctgcgtactacgcacatcttgctgcattccgagctcg

SEQ ID NO: 652 - DNA, 599 bp, Gossypium hirsutum
  Clone ID: LIB3825-010-Q1-K6-A5
gtaacctcattgatagtatagcttagtaaattccccgggataaacaaaaaaggagctcactttccctgtaatcgacttctccaaactcaatggtgaggagagagcagccgccactggaaatgatcaaagatgcctgtgagaattggggtttctttgagttggtgaaccatggaatatctcatgagctgatggaaactgtggagaggctgacaaaggagcactacagaaagtgcatggagcaaaggttcaaagaaatggtggccagtaagggtcttgaggctgttcaatctgagatcaatgacatggactgggaaagcaccttctttttgcgccacttgcctgaatctaacatgtctgaaattcctgatcttgaagaagattacagaaaggtgatgaaggaatttgcagtggagttggagaagcttgcagagcaacttttggaccttttgtgtgagaatctggggttggagcctggttacctgaaaaaagtgttttatgggtccaaagggccaacctttggtaccaaggtcagcaactatcctccatgccccaaacctgacttaatcaagggactcagggctcacactgatgctggtgga

SEQ ID NO: 653 - DNA, 614 bp, Gossypium hirsutum
  unsure (1)..(614): unsure at all n locations; Clone ID: LIB3825-010-Q1-K6-A6
ggnaaaaataaaattaccaaccattttcttttctcattcgtttccagaaaatggttgatttagattggaaagcgaagatggtctcttccgatatcccaaacaaatccccaaaactttctaataagcttcaggtttcgattcctacgccgtttcgcttctccaatatttcatctccactttcgacttcagcttcggcttcctccacttacgattattatctccggctaccggagttgaggaagttatgggagacaaaggagtttccagcttggcaaaacgagcgcgttttgaagcccgctttgcatgctctcgagatcacattcaggtttatttcgattgttttgtctgatcctagatcgtattcgaaccgtcgcgaatggaagcgtcgactcgagtcactcaccacgagtcagatcgaactcatcgccatgctttgcgaggaggaaaacgaggacaaaacggcagctggcacggcgccaatcgtcgatctaacttcttcgaacggagtactagctcgtgagagcagctctgccgaggtctggaagcttcatggagaaacaacggtggtcagccgaaccagcaaagacagcttgttgcctcgacttgccacgtgg

SEQ ID NO: 654 - DNA, 601 bp, Gossypium hirsutum
  unsure (1)..(601): unsure at all n locations; Clone ID: LIB3825-010-Q1-K6-A8
caaaacccaggnaccttcctgtaccaggacgagnattatctggtgttcattttgcaatggaattcctacatgcaaatactaaaagcttgcttgatagtgatctccaagatggtaactacatatcagctaagggcaagaaagtagtagtcatcggtggaggtgacactggtacagattgcattgggacatctatccggcatggatgtagcagcattgtaaatcttgagttgcttcctcagccaccgcagacaagagctcctggcaatccttggccacagtggcctcgcatattccgtgtagactatgggcaccaagaagctgctaccaaatttggaaaagacccaagatcctatgaggttttgactaagaggtttataggagatgataatggaactgtgaaaggacttgaggtggttcgtgtgcgttgggagaaggatgccagtgggaggttccaattcaaggaagttgagggctcagaggaaataatcgaggctgaccttgtcctgctagccatgggattccttggccctgagtcgacactggcagaaaaattaggtgtggagcaagacaatcgatcaaacttgaaggcagagtatggccg

SEQ ID NO: 655 - DNA, 613 bp, Gossypium hirsutum
  Clone ID: LIB3825-010-Q1-K6-A9
ggagtttcaattggcattattcaaacaaaaaaaggagagcttgtttgcagatcgggtatttgacttgtttgatacaaagcataatggaattctaggttttgaagagtttgctcgtgctctctctgtcttccatccgaatgcacccattgacgataagattaagttctcttttcaactatacgatctcaagcaacaaggtttcattgagaggcaggaagtgaagcaaatggtagtggctacgcttgctgaatcaggcatgaacctttcggatgatgttatagaaaacctttgaggaagctgatacgaaacacgatggaaggattgacaaggaagagtggagaagccttgttttacgacatccgtcccttctgaaaaacatgaccctgcaatacctcaaggacatcacaacaacattcccgagcttcgtttttcattcacaagttgatgatacctgaatgcaactggattcaaagcttgttcctatccgtggaggtatcaaatcaaaatggccaaaagagccgtttgccgttcgacgttcgagtctcggacatgctggaatccagtgttttttttcccctcaatggtgttacaatgtaaattttattcttttttc

SEQ ID NO: 656 - DNA, 397 bp, Gossypium hirsutum
  Clone ID: LIB3825-010-Q1-K6-B1
cgacccagcgttcggcaggtgaactccactgaggcagttgcgggtgttaagtattcccttgaaaaatattttcgaagattaagagctctctacctcctggcaatgtccaagaaatattgatgatatacagcacatatagggctggaatgatggccaagatgcttttataaagaaactacggcaggttgctggggatgaggtcctgagatccgctattcaggatatcaatgcttctggatgatttggaagttttggaattgtttcggttacctatttatttgcctatgctgtttgagagagggaaatgccaaatgtaattgttacctcacaactagcttaggaaagcaaatgcctagaccactaaaacgacagaagtcattcttagttttttattgat

SEQ ID NO: 657 - DNA, 592 bp, Gossypium hirsutum
  Clone ID: LIB3825-010-Q1-K6-B11
cacaaccatcatcattgcttactgagcaaccagagcaaatataggtattaagatgaaaaagcacaatcaaaagcacaacattgaaaatcaaacccctctttaaaagcaagcataacaattcaaattaagcggacgcgtgggttattagtaaaggtacgttcaaatggaaaacagtgagaaaataatataaatagaagaagaattcgatcaaatgctgagaacaggcgcctgccttgacaacactgattggcaccttagatagataggctgcacttaatctgttctgtatatatggcatgagaaaatctctgatcaatatgagatgattccttggtcaagtttcctatgtaaatggagatagaagaaggaatgcagaattgaagcttaccatgtgcaccccaacacttccacataacgtggtaagaggaatatcgtactctcgatatgcacattacctgatgatgaccttatgattattaactctaaacacctactgatctttggcactccttattgcacgtgtctgccatgtggcattcctcatccatgctaaccatgactacttttttcagactcgaaactctatattaat

SEQ ID NO: 658 - DNA, 616 bp, Gossypium hirsutum
  unsure (1)..(616): unsure at all n locations; Clone ID: LIB3825-010-Q1-K6-B12
cggccgcgtgggcggacgcgtgggtggcaaattgccattcctctgagtcataaaccgaagacccaattattagggtttcggcgcaacagactttgaggcttttccctccccttttgacccttcaattgccaccattccaccattgaaatcgatggatgatagctcgcaatgaaatcattccatatccctattttaaacctcgcctcagaaggtcagattttttagcctcgaaaacctatctcaagcttcgatttcaacgaagaagatatggcctccgatggctcgtttgaagatatgctttccttcttttaattccttatacagaaaaccacatgcaaactctaaaaaaagcaaaaatagattcaaaaggaaaagaaacagaaaaaaaaactcgagatcaccttttggaaaaattgctttcgaattttctatttaatctgcgtattagtgtgtgtaaaaaaaattacattaatcactacatggcttttatagccgaaacaaaaaaatgaaaagaaaaatacactttcctttttttgtttttccctctttgttgtgctgtggcttttgtatttgcttgcaggtacggngtgtgcgtggcgcatgtacggnggctgtg

SEQ ID NO: 659 - DNA, 625 bp, Gossypium hirsutum
  Clone ID: LIB3825-010-Q1-K6-B2
ccgtccgcgcctagcaattttcctggaaacccctagaacccagcggctctttcttcattttcgcttctttaggcggcggtaacctcaagagtcgttttcttcttcttcacaagacacaatggcagatggtcatgaaaactgacaagaaacatcgagatttggaaaataaaaaagctaatcaaggcactagaatctgccaggggaaatgggaccagcatgatatctctcattatgcctcctcgtgatcaaatatcccgtgtcacaaagatgttaggtgatgaatttggaactgcatcgaacatcaaaagtagggtcaaccgtcagtctgtgttggctgccattacttctgctcaacagaggttgaagctctataataaggttccccccaacgggctggtgctgtacactgggacaattgttactgaagatggcaaggaaaagaaggtgacaattgactttgaacctttcaaacctataaatgcatctttgtacctctgtgataacaagttccatactgaagctctgaatgagcttttagagtctgatgacaagtttggatttatagtcatggatggtaatggcacgttatttggtacgttaagtggaaacacaaaagaggtacttc

SEQ ID NO: 660 - DNA, 590 bp, Gossypium hirsutum
  Clone ID: LIB3825-010-Q1-K6-B3
ctaagttcttcccacaaagaaacactctttgcttcttcttcatgctttcatcagatcccatagttgatgaattagatggctgttcgggtccaaaattttccgaagaaacatttgacgaaagctctgttcgttccctatcccatttatctgtcagttgcacaccgtggtggagtttgaacgagcagcaaattgaagagcctttaccccacaacataagcttgaaagtggaaactccgtctcaactctatcatcaagcgaagcatttagatcttcaactacctgaccaggaattgacaacggttcaagcaattgatcgaactcattgtgaagttggtgccattggagtgaccagttctcaacgtgatccatcagaatccgcaggtccatttgaaagttgtgagaaggataccgagggtcaattgaagccggttttcttgggtaacaatccaaacactttattcagcccctctcatcagaattattacttctcaatggcttgcactcaatatccatatgccaatgcttacttcaatgggctgtttactccttatgggccacaggctatttttctagcccagttgggaggaaat

SEQ ID NO: 661 - DNA, 632 bp, Gossypium hirsutum
  Clone ID: LIB3825-010-Q1-K6-B8
cccgggtcgaacccacgcctgtccgaaaaaaatattaataactcaatcaaaattactctccaagaaacaaaattttgttatgcttaatatctttaatttgatctgtatctgttttaattctgcccttttttcgagtagttttttattcgccaaattgcccgaggcctatgcttttttgaatccaatcgtagattttatgccagtaatacctgttctcttttttctcttagcctttgtttggcaagctgctgtaagacttatctgatcttttcaattgttagaattttttttttcttgaatcactcatgaatttttctaggacagtattaaggatctcactccctccctcccttccaaatcctaattttctttttccttccaattattctttttttttcttttgggaattttttgaattcgaaaattgattccatttttccatgatttcaaggtattgttgaggctgcatatttgaatagcacttaggaaaaatattaagccgaacatgagcacaatagaagtgagggggccttctgttagagggtatcgacgaaggaaggcactcctggatctcaatgttcctcccactgaaatcagggaacaggagggtacttcgcagcaggctggatctg

SEQ ID NO: 662 - DNA, 613 bp, Gossypium hirsutum
  Clone ID: LIB3825-010-Q1-K6-B9
tgactttgatatctgggctgtggttaatcttagctcaaactttctccctttttatggcctttttggctactcggtgtccaaaaggagagaatagaaccggaggacatgtacgtattatcaggagatggggctatcatatcttcactttctccaaagccataccgtcataagcctcctaaatgctctgattgtgcttcgcttttcatgaaggcgtatcgtatgcgtaatgctggggctgtgatccacagtcacgaaatggaatcctgtcttgcaacaatgatcaatccacatttgaaagaatcactcatatggaaatgataaaaggaatccaaggacatggttactacgatgaacttgtgaacccaattatcgagaacacggcttatgaaaacgagcttattgattctcttgctaaagctattgaagcctatcctaaaacaactgctgtgcttgtccgcaatcatggcatatatgtatgggaagactcatggattagtgctaaaactcaggtgcatatttggctttctattctagtgttttggattctctggcggttgaattgaaagcagcaaaggacttctctaagttatatgcaggcattgcaatactttgg

SEQ ID NO: 663 - DNA, 621 bp, Gossypium hirsutum
  unsure (1)..(621): unsure at all n locations; Clone ID: LIB3825-010-Q1-K6-C1
caacgaagtaataagagtactgtgnttgaagacaccaatgaagtattagagtactctgttgaagacactttcaactaatgaaaactgttcacgatgaccttaatttacatcaagtttggaaggaagttggttttgatttcattgtgaagaagtgcaagtcttgaagaatatcaactcaattaaaatttggctcccacaaggcaaccacgtggttttggatttgtccagtatctagatcctgctgatgctgctgatgcaaaatatcatatggatggctatgttcttcttggaagagaacttactgttgtatttgctgaggaaaacaggaagaaaccttcagaaatgagggcaagagaacgcagaaggcgctctccaccaagttattctcgatcaccaagatatgctcgaagttactcccgcagtccatactattattctcctcctcctaggcaaagacgttactcaaggtcaatttcacctggagataagagatatagagaacggtcttactcgaggtcaccctgtggctcaaggagtccaagccggagctttagtaggagcaggagtcaaagtttggactattctaggtgactgatttgaaggtggctgggttagtatgta

SEQ ID NO: 664 - DNA, 608 bp, Gossypium hirsutum
  unsure (1)..(608): unsure at all n locations; Clone ID: LIB3825-010-Q1-K6-C10
aaagctagattttntgcggggnaaactatttcatataaacttaacccaacttcttgtgggaattgtaaatactgattccatgttggtttggtgtaggcaattgttgtcagatattctttgtggttataatacttgtggccatgcctggtacaaagaaggttgctttacatttttctgcctgctataggtttctttaattctagtagttcagggttttctttttcttttttttttaattgtttttctttttgtttgttaaaatttttgaggtgtgtgctatgaaatgttgtctacattgaataattttgtttctttagaagaatatttctcttcttgaatatatactagtattaatcttagtcagtacattttctactgtgatatctaattttctgttggatttttatgcaattaaattgattgtttattaaaacctttagttgtactaacttgtattaaggtttttaatcttttatataactatggatatatttattaacctttagactttcttgttgaccttcctgtttcttatatagttttttggtaaaatgtcaagaaagcttgtgttctggttttcgggtattctattgtgtataatttttttc

SEQ ID NO: 665 - DNA, 617 bp, Gossypium hirsutum
  Clone ID: LIB3825-010-Q1-K6-C11
acgaaaccctagtatcaatcaaaaataaagtgacgaaagcgtggcaaaattttctattctttttcttttttttcgtgtctagacactcatcgtcttctctgagaatcgatttcgtttgtcaggtaaaatccccatattttgcctattattatttcccctttatttgcattctttcctgttgatttctctgttcttttttttctttctttataatttttttctaattcgagtctctttttactagatctatcttttttctgctgttatttataatctctttgcatgcaatctattgtttggggggtgattttgggttcaagttattgggtttgaaaatgttgttgttttctcttttcccggtcaattttagaagaccatttatatgtatgctgttcaaattttcgggtttcatttgttttttttttcctgtgatagaatctttgagatattgttttctttttcctcattatatgttacattaaggatagttgattagaagcgggattttagtttgttatagaatataaatttgtaggtcgaagttgtaactagtaggttacattgtgaatttgtgtagttgaaatgctaagttgtaggaagtgttgagtatttattta

SEQ ID NO: 666 - DNA, 622 bp, Gossypium hirsutum
  Clone ID: LIB3825-010-Q1-K6-C12
cagcaggttttgctggtaatagtaactaccctcagtccctggcagcagtgctcccccaatacaaaatagtgtttctgttagcagtttgcctcaatctgctgcaattgcatctggctatgggtttgggagttctaccaatattcctggaggacttcctctgaatccgcctacagcacctgcaggcacaaccattggctatgatgatattctgagttctcagtacaaggacagcaatcatttgatgtcgcttcaacagactgagaattcggccatgtgggttcatggccctggctcacgaacaatgtctgctgttcctggaagcaattattacagcttccaggggcaaaaccagcagggtggtggatttcgacaagggcaacaaccttcgcagcattttggggctcttggatacccaaatttctaccattcacaaacaggagtattgggggaccatcagcagcaaaaccctatggatggatccctgagtgggtctcaaggccagccatcaaagcagacccaacagttgtggcaaaacaattactaatgttatcacctccgggtttttcagggtcttggtagtgagtttgaaagtggccaatctaaggcattcgtgcgattgaat

SEQ ID NO: 667 - DNA, 621 bp, Gossypium hirsutum
  Clone ID: LIB3825-010-Q1-K6-C2
gttctagatcgcgagcgccgccctttttttttttttttgctacaacatggtaaacaggaaataaatatagatataacatttatacaagaatccattactatatttacatttatatgtacagttacatcaaagagatggaatctcagagtttgagacagacgactccccaccaccatgacgaacatcgcctctgcaaagtgggcacactccgtgtatctctttgagccatttatccacacaagacatgtgaaactcatgctggcaaggcagaattcttatttggtccccttcctcatattcacccaaacatatatgacactgttcaacagcatccccgtcctcagctacatttgcttttctgttgtgacttctgagggggaaagaatcaactacagattcgggagccggcggtgataccatggatagggaaagtgaaacaggttgacgatgcaaaacctcaaatagagcctcagcaagcataactattcgagatatgcttacacgagcactaggctcatcagtcatcagggaagaatcacatgagcaagtgccatcagggtggattccagatggacaaaatgtagttcgccgatgattttcatcatgtccaccatgcagcct

SEQ ID NO: 668 - DNA, 611 bp, Gossypium hirsutum
  Clone ID: LIB3825-010-Q1-K6-C3
aactcgtaaaattcattaaattttattagatttaaaaaaatttaaattattttagtataaaatagagagggtgaaattcattttgattaaatattttataatttattgactgtacttcgaaccaacaagaattttctcattgatctctgtttcttcactaagattgtgacctttcccctaagttccaacactcggtacacaatttctcttactttacctttcatgaaagcagctcatgtcaaccctctcttcatctacattcatatataaaatctgcctatctaaataagtacagagaaataaatatatgatgtacatatatagcatgggatttgtctcccttttgtctaagataaaaaatctgggtagattttgttgggttttttaagtggatatcttcataatttcgcttctttattgccatttaaaataccattggggatgagccatggttttcatataagagatgaaaaaggaaatataagccgtggtttttactttttgtttgtagagctgagattctcaagaaccagaagcagatacgtagagttttaacatacagatacagctccatacagaaccagaagggattgaacaacacatgaagcaaa

SEQ ID NO: 669 - DNA, 623 bp, Gossypium hirsutum
  unsure (1)..(623): unsure at all n locations; Clone ID: LIB3825-010-Q1-K6-C4
gnaacaatcaaattgcagaagaggggcaatagctactgagacgttcaatgttgcaatggcggctcttaacgaagttgggaagaaggtttctgttgtaaagaaaactgttgcaaaacttgcacctcccgactcactggccactggtgctgcctatgatgacaagaagagctcaacatcagcaccagatacagccccttcgctatggccacagcaagatgaaattacacgtcatttcaatcttaatgacactggtactccagctcaatctgtctcagatttgaatctgccacgcatggcacctgtttcccttcatcgggatgatactcatcctgataacatgccggttcttccttgtttgaagtcaatgagatggttaatggagaacaagaattctaaacctgaaaataggttggcagtcattattttaaagctctcaaggattactttagaacccatgttgaggtcaatggcttatatcagtgaacagctttctaccccagctaacagggttgccgtcatcaatttgaagcttcaagacaccgagactagtacaggagagtcggaggttaaattccaggtgtccagggatacattaggagcaatgttgagatcaatggcataca

SEQ ID NO: 670 - DNA, 629 bp, Gossypium hirsutum
  unsure (1)..(629): unsure at all n locations; Clone ID: LIB3825-010-Q1-K6-C5
gtgaaattggtttaaaggtcaaaaccttgggataaaagaaaagcccttagcaccaaggttcatggaagttgttaacaaaatacttccttcagaatgggctgcaagatcatctgaataagcagggacttcactattgttggaaatggctgcacaaacatgtattgngaaattcaggggacttagatgaatcagttgcctctgctatttcaagaaaatgacattatagcagctgctgtgctttctgggaaccgcaattttgagggtcgtgttcatgccttaacaagggccaactaccttgcttcacctcctttagtggttgcttatgccctcgctggcacggttgatattgacttcgataaggagccaatcggaacagggaaggatggtaagagtgtatattttaacgatatctggccatctactgaagaagttgcagaggctgttcaatccagtgtcttgccgaatatgttcaaaagtacttatgaggctattacaaagggaaatcccatgtggaatcagctatcagtgccttcttccaccatgtactcatgggaccccaagtcgacttacattcatgagcctccatacttcaagaacatgactatggagccacctggtgcccatggtgt

SEQ ID NO: 671 - DNA, 622 bp, Gossypium hirsutum
  Clone ID: LIB3825-010-Q1-K6-C9
cggccgcgtgggcggacgcgtgggagaagtaaaaagacagagcttggatatcctaagctaatgtcggacgaggagcaccatttcgagtccaaggccgacgccggcgcctccaaaacctatcctcagcaggccggtactatccgtaaaaacggctacatcgtcatcaaaggccgtccttgcaaggttgtcgaagtttccacttccaagactgggaagcacggacatgctaagtgtcactttgttgggatcgacatcttcactgctaagaagctggaagatatcgttccttcttcccacaattgtgatgtgccgcacgtcaaccgtactgattaccaattgatcgacatttctgaggatggatttgtgagcttgctgactgagagcggagacactaaggatgatctgaggctcccaactgatgaaaacttgttgaaacagatcaaggacggtttcgctgaggggaaagaccttgtggtgtctgttatgtcggcaatgggggaggagcagatttgtgcactcaaggacattggtccaaaatagtaagagacttttatttgcagcctgtttattgcgattttaaatggaaagatttttgttaaaaagcgtttatagtttgtgcctg

SEQ ID NO: 672 - DNA, 623 bp, Gossypium hirsutum
  unsure (1)..(623): unsure at all n locations; Clone ID: LIB3825-010-Q1-K6-D1
ctttaattttggtcaaccaggnagattcatatctggatagctacatcagtaccattggtgttgactttaaaatccgtactgtgngaacaggatggaaaaaccatcaaactccaaatttgggacactgctggccaagaacgctttaggacaatcactagtagctattatcgtggggctcacggtatcatagttgtttatgacgtgacagaccaagagagtttcaacaatgtcaagcaatggctaaacgaaattgaccgctatgccagtgacaatgtgaacaaacttttggttgggaacaagtgtgatctaacagaaaacaaagttgtgtcatatgagacagctaaagtaataaaaccgattgcacatacaaacccatcccaaatttatacagttttaggtattgaaaaaaagtcctcaacttctcatcacttatttcttgttttccttctgtacaggcttttgctgatgacattgggattcctttcttggaaacaagtgcaaaggatgccactaatgttgaagaggctttcatggccatggctgcttcaatcaagaataggtatgtataacatatatgtgtgtatatatgcatacgagttatgatatattagtgtataactaaa

SEQ ID NO: 673 - DNA, 529 bp, Gossypium hirsutum
  Clone ID: LIB3825-010-Q1-K6-D10
actatctcgtgctttgagtagtctttacatgcatgtcaccttttagcctgcttttcttgcataacacaattaatgagctaaacatacaggaacaagctcaggtaacgtctgtagatcaaatgagagggggaaatatagaaagtttatctttacatgcatgtcaccttttagcctgcttttcttgcataacacaattaatgagctaaacatacaggaacaagctcaggtaacgtctgtagatcaaatgagagggggaaatatagaaagtttggctgcaattcagtggactaggatgcttgcacatacactctctcaaaacagtgatcctaagtttcgggttatttaaaactgtttggataaatacttgcaatgtgtcaagatagctcttaatgatatcatcgttactatgcatgagttaatatatgcacttatgtactgtatgttttggggcatgcagaattcaaaatttcttcaatttgtatccaagatgagtcgtggtgaacttatcattgatgataatcaggtcaaa

SEQ ID NO: 674 - DNA, 619 bp, Gossypium hirsutum
  unsure (1)..(619): unsure at all n locations; Clone ID: LIB3825-010-Q1-K6-D11
cggnagcgtgggtgaagatttgcaagctctgccattttttttccctttcgagctttgtaattaaacaaatggttccctttggtgtcgaattatagaaattttgcttctccaatctatctagggtttagttttcagctaaaatttcataccgaaaccctctattcgagagcaatttccattttattgaggaaaaaatggcttcaacagggcagccaccgtcacttaaaagaagagatgcgccgttaacaaaagaaggagatcagcttactattacccctttaggcgctggcaatgaagttggtcgttcttgcgtttacatgacttacaaaagcaaaactgtgctgtttgattgtggaattcatcctgcttacacgggtatggccgccttgccgtatttcgatgagattgatccttcaactattgatgtccttcttattacccactttcacttggatcatgctgcctccctaccttattttctggagaagaccacattcagaggtcgagtttttatgactcatgcaacaaaagctatctataagctccttttgactgattatgtaaaagtgagcaaagtttcggttgaagacatgttatttgatgaacaagacattggtcg

SEQ ID NO: 675 - DNA, 619 bp, Gossypium hirsutum
  Clone ID: LIB3825-010-Q1-K6-D12
atttttaaaagacaacttcacggaaacgccgcttcctccaacatggctagagggttgaagaaacacttgaagaggctcaatgcccccaggcattggatgctcgacaagcttggtggtgcattcgcgcccaagccatcgtctggaccccacaagtcgagggaatgtttgccacttattcttattctgcgaaacagactgaagtatgctttgacatacagagaagtgattgctattcttatgcaaaggcatgttatggtagatgggaaggttaggactgataagacctaccctgcaggttttatggatgttgtgtcaattcccaagacaaatgaggacttccgtctcctttatgacactaaaggtcgtttccgccttcatgccatcactggtgatgagactaagtttaagctctgcaaagttaggtctgtccaatttggccagaagggtattccatacctgaatacctacgatggacgcacaatccgttacccagaccctttgatcaaagccaacgacaccatcaagcttgacttagagagcaacaaaattgttgatttcatcaagtttgatgttgggaatgttgtcatggtcactggtggaaggaacaggggacgtgttg

SEQ ID NO: 676 - DNA, 578 bp, Gossypium hirsutum
  Clone ID: LIB3825-010-Q1-K6-D2
aaacatacttgcatcaaacatatacatatgatcctatttgacaatcacacccaagtctgaaaagtaacaaagcaatgcgtattattaagtacctcagtacagtgttggattaacattgccaatacctaaccacaccacaactacgatcaagtcacttctagtttcattcagatctggcatacattgacagcattttagttttatttttatgtacttgaggcttatgaagatgcggactacgaacagctaactcaagcattctaaaggactcctcatcattctaacaactagcactctcgaatggaagatttagtgtctcaagccttttttgcagaatcaaccaaagcttcataggaggaaaatcagaccaagttcacctcttctcaccacataaagaccttgcagcttgtagagcaaaatatgtaaggataatgtcggcaccagctcggcggagacacatcaaggattccatcatgaccctttcttcatcaatcattttgagaacaccaccagctttgatcatggagtattcacctgaaacctggtaggcagcaataggcaaaggagattgatccctg

SEQ ID NO: 677 - DNA, 510 bp, Gossypium hirsutum
  unsure (1)..(510): unsure at all n locations; Clone ID: LIB3825-010-Q1-K6-D3
gcaaagacaaaaaagaggcaagaggggtaaaagattcagatgatcagatggttgacaatctagtagctcctccaggcatatcaccaagtcaaaatatgactccaagtgcaccggcaggggtgtggcctgggtcgagatcaatggatatgcgtaacaatagccatgtcaacattgatctaatgcgcggatgatgactgtttcctggtaatagtttggggagaaatgtttatagtttggtgttgaagggccagcggattgtaatttgaaagtgttattgtgggaagtgttgagaaagggagggcggagcctgatttttggctttgatgatattctcacatccatatctactacccatgacaatgacagaatgggagttgctctgatatttgtagctttgatgaccagttagttaaatattttagtaggtcgtggtttcaactgatcctagacttgcatttcatttctcctgcttgaaccaaataagatatgcttctcttctctttgtngacc

SEQ ID NO: 678 - DNA, 615 bp, Gossypium hirsutum
  unsure (1)..(615): unsure at all n locations; Clone ID: LIB3825-010-Q1-K6-D4
gattttcccatcagattttggttctacaagttgactgcaaaccgaaagataaactatcagagttatgaccctttgttcagcagcacccgctgattcttgtgatatcatgggatgttcacggttacatcacttacacctgcnaggaaaaagcagctcaactacatttcctgttccaagagaaattgtggtgcccaatgatggaatctacatctactcaagaagtaatacaaacttctctcacaaatcagcaaggaattcagggcagcatcccatatatcagttctgcaactacagcttgggtagctgtaccgctggtaaatctaattaggcttcaatctgctggtatatatatatcttctctttgttcatttctaatacaagtttcaatattccatgctaactgaactcatgtatacttttgaacttatgtgtgaactttgccatgaaccttcatcattttcctgattcctgtggaatatatttagataagaatgattagagttttgatttattaatttttacttagctttagtatttggtctttcatagaggtgtcagatcagaacttggtggatgaagaccaaggaaaaaaaaccagcaatgtccggtgcaaaa

SEQ ID NO: 679 - DNA, 621 bp, Gossypium hirsutum
  Clone ID: LIB3825-010-Q1-K6-D6
gccaccccaaccgttcctctcgctgatgtgatgaaagcctcgattcgacccgacatcgtcaccttcgtccacgacaatatatccaaaaacagccgtcaaccctatgccgtctccaaacgcgctggtcaccaaacttcagctgaatcctggggtaccggtcgtgccgtctcgcgtatccctcgtgttcctggtgggggtactcaccgtgcaggccaaggtgctttcggaaacatgtgtcgcggtggacgcatgtttgctcctaccaagatctggcgccgctggcaccggaaaatcaatgttaaccagaagcgttacgccgttgcttccgccatcgccgcctccgctgttccttccctcgtcatggcacgtggccaccgcattgaggctgtaccggagatgccgctggtcatttctgatgctgttgagagcgttgagaaaacctcgggtgcaatcaaggttttgaaacagatcggagcatatcctgatgttgaaaaggctaaggacagccaaggaatccgacccggaaaaggaaaaatgaggaatcggaggtacatttcccgtaaaggtcctttgattgtttacggaactgagggagctaagcttattaaagccttccgtaac

SEQ ID NO: 680 - DNA, 617 bp, Gossypium hirsutum
  unsure (1)..(617): unsure at all n locations; Clone ID: LIB3825-010-Q1-K6-D8
gttccaaaacttgccatcttttttctcctgctccttcccctataagcatcttctttttcgccgcttcattaacattgtcattatttctcttttcatcgagaaaacatgaagaggcaagggagcaatatagaggccatggctcaagcagctgngaaaacatcaagttcgaaacaagagcaggagaggtttggatgccgatgagggagaagtagcgttatgtagcatgcagagtactttagtgtggtgggaggaatgggcgtacgtggatgagcaaatgtcatgggcatccatctggtcgcctttctgggatgtggattttgttgacatggcttatggtgcattgttcaacgatgttgcttgggatgatgatatttgggacttgaagaacgtcacggtcatacccaaacaatgagagttgggtgatcttctactttcaaagttgttctgggaatatcctgatttgggcttgtaacagtgtagctgtttgtcagcttttattaagttagctttgtttggatataaattggtacatcaagaactcaggtctgccttaaagatagatcacaacctctcattctgctctttactntgtctaattgtaattttataagttgcat

SEQ ID NO: 681 - DNA, 623 bp, Gossypium hirsutum
  Clone ID: LIB3825-010-Q1-K6-D9
gtaattgcaagcagcgcagtagcctaaccgcactgaaaaataatggactatcctggaaattcgcaagatatggctgtgccgccagttgaaggtgttgcagggggagggacagcatatggatggaatgatggtggtttaaatgtttcaaatccactcaagggctcaattgaccccacagaagttccaactgctgatttagtacatgtgtggtgcctcccaagcacagcaaatgttggaccacaagaagtgcctagaaatttagagcctgtaaaccttctggcagctagaaatgagagggaaagcgttcaattagctatccgtccaaaagtctcttggagtggttctagtgtggctggagttgtgcaggttcaatgctgtgatttatgctcggcatctggtgatcggttgattgttggccaatcattaaaattgcgacgtgttgttcccatattgggtgtacctgatgctcttgtacctcttgacctccctattagccaaataagcctacaacctggggagacaactgctgtctgggtttcaatagatgtgccaaatgaacagcctcctggtttatatgaaggggagatcatcattaatgctacaaaggcagatacagaatcatc

SEQ ID NO: 682 - DNA, 412 bp, Gossypium hirsutum
  unsure (1)..(412): unsure at all n locations; Clone ID: LIB3825-010-Q1-K6-E1
naaaaaaaatattctgatgcaagtggtcatttttcttcttcagttaatgatgctgccattttattggctgaaaacatgcgtgcaattggcgaacaaatcagtaggagttttgcctccgatgtggtagttcaccagggcatccaagaaaaagcgtcaaatttatatccaaccttatgtgaaatagaaggtttaactgtggatgaacggtttcaagcattgagtaaaattccagatcatccaactcaaatggtagttttctttagtttaccttctgatatacggttggaatgggtcagaagatttcttactgaccattaaaatttatggttttgttgatgacattttcgtaactttttctgtttgtaatatttgggatggtatgtcatatacaatgttctaactttttgatgtg

SEQ ID NO: 683 - DNA, 624 bp, Gossypium hirsutum
  Clone ID: LIB3825-010-Q1-K6-E10
cccgttccctttctattcaccaagtcctttctcctattaccctttcccctctccctttctctctttcctcttcacctgaccctatcaaagaaacccagctttccatctcggtaccagacgacgatgttttgaactccttcttcatcattttctctacttccccttcttcttctgctctccaatggctatccccgccgcaaacgtttaacaaaaaaacacccttttgtttatacccaatgccagtgtatccacgcgcgttatgtctttttaatttgtaaccaagattatcaaggtccctaaaggcttcgattatgagctttacaatagaacgacatcaacaggattttgggtcctaagtcttcttatatctctttcaaggattctgcttgtaggtgctttgggtacatggtttccaagaagaaatacatctatatataccattgatgatgactgctttgaaagatgtgcaggtgctgatactgtagctcttgtagctcggatattgcatagatctagaactaatctccaatcattgctattaaagagtaatacagctgtagttgaagatttctttgtgcacctggctccttgttgccccctcccgcctgaaaaaaggccctctga

SEQ ID NO: 684 - DNA, 597 bp, Gossypium hirsutum
  Clone ID: LIB3825-010-Q1-K6-E11
gttcaatctagtgtgttgcctagaatgttcaagagcacctatgaaaccatcacaaagggcaacccgatgtggaatcaactttccgtccctgcttccatgctctattcttgggatccaaactcaacatacattcacgagcctccatatttcaaaaacatgaccgtagaaccaccaggcccgcatggagtgaaagatgcctattgcttgctcaattttggtgacagtgttaccaaccgatcacatctctcctgcaggtagcatccaaaaggatagccctgctgctaagtttcttcttgagcgtggggtggacaagaaggacttcaattcctatggtagtcgtcgaggcaatgatgaagtgatggcaaggggcacctttgccaatatccgcattgtcaacaagctcctgaagggagaagttggtccgaagactattcatgttccgacaggagaaaagctttatgtatatgatgcagcaatgaggtacaaggctgctgggcaagacacgattgtcttagctggagcagagtatggaagtggcagctcaagagattgggctgccaagggcccaatgttactgggcgtgaaagcagttatcgc

SEQ ID NO: 685 - DNA, 624 bp, Gossypium hirsutum
  Clone ID: LIB3825-010-Q1-K6-E12
ctccgcggaccgtgggtgattcttacgctttacctcatgaactgtaaagtgaaattacgctacaagcggatgtgattgaaccaaaccaagttgacattgaagatggataaagcgtatcatctcttactttttcttttcatttatccttttctcctcatgaatgaattgttacagcttttacaatcttgaactgtaataatgaaacaattgtatgatacaagcggatgtgattgaaccaaaccaagtcgacgctgaaggctcatcaaagtgagaggtatggttgtttatatgaaataatcatgatggatggctgtctgggtttgctgttaaagatatatatgagctaataatgatttgaaggaattaactgacaattagaacgcaagttggagttagtagtgttagctgttacttttctaacatgggaactgttaaaaagcagaactgatgagtggtgcccggcctaatgctatagaccaaattttcataactacgaagcttgttgtcgggatgatgatgatgatgacgttgaacaaatgatatggcatatggggtggggtggtgattctactgcgaaatgggtgaaaactatgcactgagtttctccgtgcagaattgtctctt

SEQ ID NO: 686 - DNA, 385 bp, Gossypium hirsutum
  Clone ID: LIB3825-010-Q1-K6-E2
atttattcatatattttctttaaaaaaaaaaaaaaaaaaaaaaaaaaaaaaaaaaaaaaaaaaaaaaaaaaaaaaaaaaaaaaaaaaaaaaaaaaaaaaaaaaaaaaaaaaaaaaaaaaaaaaaaaaaaaaaaaggggcggcccgttttgaagagaacccaactttacttccccttccttccaacttaatactttttttttagggccccctaaattaaattaattgcccgtcttttaaaaacgtcggaactggaaaacccctggcttaccccaattaaatccctttgcaaaaaatccccttttccccagttggcttaataccaaaaagcccccccccaatcccctttccaaacatttgcccaccctaattggcaaatggaacccc

SEQ ID NO: 687 - DNA, 623 bp, Gossypium hirsutum
  unsure (1)..(623): unsure at all n locations; Clone ID: LIB3825-010-Q1-K6-E3
cttccaccacaccaatacccanacccananaaaaatggccagcaaatctgagggtaaggaacctgtgaacgaacaagtggttgcgaatatgtacggagctatgagatctgaactaaatcaaatttattctaagatcaccgagttggagatggaagtgagcgagcattcgctagttataaatgccattcagccacttgaccagtcgaggcggtgttaccggatgattggaggtgtccttgtcgagagaaccatcaaagaggttctccctgctgtgcaacgaaacaaagaagggctcgaggaagtaattgctcgtcttaacgagaccctggagaagaaaaagaaggaaattgctgatttcgagacaaaatacaaaattaggatcaaaaagtccgatgatgactcgaaagatgaaagcaacaagaaggaaggctccgctcaaggagtccttgtcggccctgcaagttcgagtcagtaataggtatattccttcctatttccttccttatatgcttgaacttgcttttgataaaccctaaatcgtaccattgtagaactttgttcagttattgctaagatttatcaggttttagagaatcgtatgttttgttcgattagggtttata

SEQ ID NO: 688 - DNA, 51 bp, Gossypium hirsutum
  Clone ID: LIB3825-010-Q1-K6-E5
acgatcaagcgttccgcccaagcgtccggttctataacgcgggccagccgc

SEQ ID NO: 689 - DNA, 593 bp, Gossypium hirsutum
  Clone ID: LIB3825-010-Q1-K6-E6
tctttattcctaggctccaaggttggtgagaagaagcccgccgagaaaaaccagcggaaaagctccggcggagaagagccaaggcggagaagaagatctcaaaagaaggcggcgcagataagaagaagaagaaggttaagaagagcgtcgagacttacaagatttacatcttcaaggtattgaaacaggttcatcctgatatcgggatctcgagcaaagcgatggggataatgaacagtttcatcaacgatatctttgagaaattggctcaagaagcatcgagattggctaggtataataagaagccgacgattacatctagggagatccaaaccgccgttcgattggttttgcctggtgaattggctaagcatgccgtttctgaaggaacaaaggcggttactaagttcaccagttcttagatttctttttctttttgttttgagattggattctgattagggtttccgatttgggattttagggttttttaaatgatggtttaataatgttcttgagttgtaggctttcggattcaatgatggttgttttgattatacccaatatagatattgaatgatgtttctttccct

SEQ ID NO: 690 - DNA, 610 bp, Gossypium hirsutum
  unsure (1)..(610): unsure at all n locations; Clone ID: LIB3825-010-Q1-K6-E7
anaaaaccaagtaccagaaatttgtaactgaaaaaagacactgttttctacaagactgtcctgttttgttccttgtatccctcttatccattgcaatccaacggtttctttgaccttccctttttgtccaaagaacgacttcttttactttacttcctaatttatactagatctatgcagttaccgcttactcacctcttttctatcctcctccttcctggctaaatgtgtagcagagaaagattgtaaatggcagcagcggaagcaagggcagcctggcaaagaacagctaatcgttgctttgtccaagaagatgccaaaagagctcccaagttagcttgctgccaatcatcatcttccactaaacaagccgattccaaccccagtggcgtggcagataaacataatcaccctgcaataggtttcatgcctctcaacaggaacccttcttattccaatctaccccctgatacgaggtggtggcttcagctgcaacctaactatggtccccaaatgggtttaacaaatgagcagctgaatgccttggaggatgaagtggaaagcttgaaagctgaaataaactcctccaaagaaacaatggaaagctttg

SEQ ID NO: 691 - DNA, 623 bp, Gossypium hirsutum
  unsure (1)..(623): unsure at all n locations; Clone ID: LIB3825-010-Q1-K6-E9
tgccgtccgaaaaaaaatggccactgttngaagcaatagcagcactctccttttcatgttacccttcttcttcttcctctaaattcctcttatatgccaaacccagtagactctcttccctaacttcccacattcccaagtctactcctttactttcccacaatatctccatctcgccattaatcagcacccaaaagaaattgagttttcaactctgctctacactgcaagaggtgagcttagaagctgaaacagataaaacccagaaatcaaatgtgaaaaggaagctttttgtgttgaatttgccttggtcttatacggttgctgatatcaaagacctctttggccaatgtgggactgttaaagatgttgagatcataaagcaaaaagatgggagaagtaggaacttcgcatttgtgacaatggcttctggtgaagcagctcaggctgctatcgataaactcgattctcatgaagtgtcggggagaattattagggtagagttttcaaggagactgaagaaaccttcgccgccttctttggagccaatggttccttcccgtgagacacgccataagctntatgtctctaaccttgcttggaaagctaggtctactcacctc

SEQ ID NO: 692 - DNA, 600 bp, Gossypium hirsutum
  Clone ID: LIB3825-010-Q1-K6-F10
cttcaagtgctaaaatctagggatttgcgggtgggaaaagacgagagcccatctctctgcttcaaagctcctgtccaggtagaattctcttcttcccttgcgttgtgttctttgctgttcaatcgccatggcttcaaagcggattttgaaagaactcaaggatttgcagaaagatccacccacttcttgcagtgctggtccagtagctgaagacatgtttcattggcaagcaacaatcatgggaccctcagatagcccttatgctggaggtctgtttttagttactatccatttccctccagattatcctttcaagcctcctaaggtcgcgtttaggaccaaggtcttccatcccaacatcaacagcaatggaagcatttgtcttgatatcctcaaagaacaatggagccctgcactaaccatttccaaggttctgctctcaatctgctcgttgctgaccgatccaaaccctgatgaccctcttgttccggagattgctcacatgtataagactgatcgggcaaagtatgaagccactgctcgtagctggacccagaagtatgccatgggatgacagttgttggtgtgtaatatgtatca

SEQ ID NO: 693 - DNA, 542 bp, Gossypium hirsutum
  unsure (1)..(542): unsure at all n locations; Clone ID: LIB3825-010-Q1-K6-F11
accacctccaggccagctngatttgatataaactccgctgtttaccctggaggccctcccgtacctgttcaagctcctaagcttttgaaatttgttgatacaacagagataacaagaggaccacaagaggttcctggatattgggttgtttctggggcaagattagtcgtcaagaagggaaggatctctctcctggtaaagtattctttactgactgcactattacctgatgaagatgacattgatgagcactagcggattttcccttccacttatcaccttgctttctttgcccgctatgttagtaaatattaatagaaaaaagttactgaagatgagtatagagaatgggtagtggggagtggaaacataacaagtcatatttacagggataaacttaatggggatgggtgaatggatgggaggttaaagagcttaggagatataaattcaagttgcatttcttgtaatgtaaattttatcattgcttgtttctaatataaattcttcaagtttcatgctcaatgatgattatgatttgc

SEQ ID NO: 694 - DNA, 629 bp, Gossypium hirsutum
  Clone ID: LIB3825-010-Q1-K6-F12
ggcggtggtggaggtggtgggggggctgagagtgccggtgtggggatggtagcaatgaggtcgtcatcatcaccatttacagtgtcacagtggcaggagctggaacatcaagctttgatctttaagtatatgatggcaggtttgccagtgccacctgatcttgtgctccctattcagaagagctttgagtccatatctcaaaggttctttcaccaccctaccatggggtattgttccttttatgggaagaaggtggatccggagccaggacgatgtaggaggaccgatggcaagaaatggcggtgttccaaagatgcgtatccggactcaaagtattgcgagcgccatatgcaccgtggccgtaaccgttcaagaaagcctgtggaatcacaaactatggcacagtcattatctactgtgacatcattgactgtttctggtagtactaccagtggtggtgggactgggacggcaagcttccagagccttccattacatgcctttggtggtacgcaagtcactgctttggcaaccggtcagtctaattatcatgtggagtcaatcccctatggaatcccgaggaaagattataggtctcaaggaataaaacccgacgcgggtgggcatag

SEQ ID NO: 695 - DNA, 575 bp, Gossypium hirsutum
  unsure (1)..(575): unsure at all n locations; Clone ID: LIB3825-010-Q1-K6-F2
cccgcgtccgnaaaaaaaaaaaaaaaaaaaaaaaaaaaaaaaaaaaaaaaaaaaaaaaaaaaaaaaaaaaaaaaaaaaaaaaaaaaaaaaaaaaaaaaaaaaaaaaaaaattggggacggccgtttttggggggtgcctgttttcttttccccgtccttccgcactcttttccctttttttctggggcccctctattttcatttctggtgaccgcctttttttcaccgctggtttttgggtatacccctggggttccccattttattcgccttgcataacttccctttttggccagctggtttttttccgagggggccccccccgatggcccttcccaaccgttctccgccttgattggtaattggcacccgccttggagcggccctttttccccggcggttgcgttgtttcccccctggtttcccttttcctttgccggccccctttttccccgcccctttcgctttttttctttcttttagcccccctttcgcgggttttccccggagggcttttttttgggggttccttttagggtccccttttacttttttacggcactttttcccctaaa

SEQ ID NO: 696 - DNA, 614 bp, Gossypium hirsutum
  Clone ID: LIB3825-010-Q1-K6-F3
gttgccgtcgcatatccgccgccggagttgataggatgtcgagtcggcctgaattgcaagccccgccggagattttctacgacgacgtagaagctcgaaaatcacttcctcatctcgtattgctgaaatacagacaaagctctctgagagagcactggaacttctggctttgcccgatgatggagtcccaaggttgctccttgatatcggttgtggatcagggcttagtggggagacaataactgagaatagtcaccaatggattggtttcgatatttctgaatcaatgcttaatgttgctttgcaaaatgaggttgaaggagatttgttacttggtgatatgggtcagggcttaggacttcgacctggagttatcgatggagctattagtatctctgctgttcagtggttatgcaatgctgacaagtcctctcacgagccaagattgagattaaaggcttttttcggatcattatatagatgcttagcaaggggagctagagcagtgctccaagtatatcctgaaaatctagcccaacatgagctaattttgagttatgcaatgcgctctggatttgctggtggcgtggttgtcgattacccgcacagtacca

SEQ ID NO: 697 - DNA, 555 bp, Gossypium hirsutum
  Clone ID: LIB3825-010-Q1-K6-F4
tttctccatcaccgctcattgacgaaacataaaagtacataaactcctctattcaatattccgccgaccgatggttacccacgcattgttcatctagcctctcctcttcaaccccttagaacggacaatcgcaagctctattgtaactgatgggatacaagggtcttgcctaccagccccaaatcgccactgtgtttatatggtggcaaaacaagcggagactataacacttctaaacgcatgtaatcttaatcactttcttttttctttcagatgataaagtaacataagactcgagtaaataaaaacaggaagagcggagaattaataaaagagaagggaaacacaccttatttacatctattgctttttttgcttacgctatagcatatgttctctatatattttcaaaaggggaactccattacaatcagaatcactaggctttatagccataatgttaaaactgaaagaacatacaatatgttgaaacgctatgtctataggctgtcgattcagccaccactggtatccagtgcaggctcatgcacatac

SEQ ID NO: 698 - DNA, 600 bp, Gossypium hirsutum
  unsure (1)..(600): unsure at all n locations; Clone ID: LIB3825-010-Q1-K6-F5
cgaaaaccgttccggnaaccgaaccggattgtctcccactctttcgtttcctctctcttctctgccgtcgtcgctgccgccagcttccgtttccaccgccgcccgatatggaagccagccggcgttcagcggttaaacccgttattgttctcaagccaagtaagagggtccctttagtggaagataccaccggcaaagcctccgacgcgttgcctcttcctttgtacctaacgaatgcggtgttcttcacgctcttcttctccgtggtttattttcttctatcccgttggcgcgaaaagatccgagcttcaatccctctccacgccgtcacctttcccgagatcgtcgcggttttcgctttggtcgcatcgttgatttatcttttggggttcttcgggatcgactttgttcagtctttgattatgcggccatcgggtgatgtttggagtggtgaggacgatgaagagggaaatgaagtgttgcttcgtgaggaagatgcccgtacagtcccttgcggccaagctcttgattgttcggtcccttcgntgcctcatatggtacggaatgtaactgcccagagactgttcgatgaaaagcctg

SEQ ID NO: 699 - DNA, 596 bp, Gossypium hirsutum
  unsure (1)..(596): unsure at all n locations; Clone ID: LIB3825-010-Q1-K6-F7
ctttacagttttttgntctgaaagaaaaaaatggctactggtaggaagaaacgcagcagctcctttgttgttccttaacctgatcatgtatttcattgtgttgggatttgctagttggtgtattaataggtttatcaatggccaaactgctcatccaagtatgggtgggaatggagcaacaggtttctttttaaccttttcaatcttggctgctgtggtgggtatagtatcaaaatttgcaggtggtcatcatattaggtcatggagaagtgatagtttggctgcagctggttcttctgcacttattgcttgggctctaactgcattagcctttgggtttgcttgtaagcatataaatataggaggatggagaggatggaggttgaggatacttgaagcattcataataatccttgcattcactcaacttttgtatgtgttgttgatccatgccggtgtgttcagcagtcggtacggaccagggtatcgagattccgactatgggatgcatgcaccgggggatgaaccagggcacaagaccggcactgctgtaactggatctagggtctgaaagggactgtagtttaaaactagct

SEQ ID NO: 700 - DNA, 609 bp, Gossypium hirsutum
  Clone ID: LIB3825-010-Q1-K6-F8
ctgatatttgggttttggttaaggtttcaacaatggaggttttgcatttcgtgtttggtgtttttggaaatgccactgctttgttcctcttcttgtctccgacgattacatttaagaggatcattagaagtaagtccacagagcaattctctggaattccctatgtcatgaccttgcttaactgtctcctctctgcctggtatggccttccctttgtatctaaaaacaacatcttggtatcaacaatcaatgggactggtgcagcaattgagtccatttatgtattgatcttcatcatctatgccccaaagaaagagaaggctaaaatatttgggcttttcacttttgttctcactgttttcacggccgtggcactcatttccctcttttccctccatggaaatggcagaaagctcttttgtggcctagctgccaccattttctccatcattatgtatgcttctccactttcaatcatgaggctggtgatcaagaccaagagtgttgagttcatgccatttttcttgtcactatttgtgttcctctgtggtacttcatggtttatctatggtctccttggtcgtgatgcttttgttgctgtccccatgg

SEQ ID NO: 701 - DNA, 466 bp, Gossypium hirsutum
  unsure (1)..(466): unsure at all n locations; Clone ID: LIB3825-010-Q1-K6-F9
ctagatcgcgagcggccgcgaagtcgtagatatcgtgngaagcaatcattcctattatcagaatgcaagaaattctgtcattatttcgggaggtgagtatactataggggtgctctcactggaatcaatttcaacaccctgaagatgctacaattgaggtaggaccatttgggggagctactgcagatggtggtgttagcaaggatgtttccagctcttatgatgatggtgacgatggcattgatcttggtacctttcttgacaaagggaagggtctcgcagatctgaacacttcttttgacaagggaaaaggtctcgttgtacaataattttgtacaaattttttctttgtatacatcatttcgttttattgaaatgtatacaattttcttcaatctttgtgtttctgtatttatatttttattcccggtgtcatgatattatattaattgacaaattaacattc

SEQ ID NO: 702 - DNA, 647 bp, Gossypium hirsutum
  Clone ID: LIB3825-010-Q1-K6-G10
gccctatgcgagtcattggcaaagtcaagtcgaagttcttgaatatttcagagacatgtcaaaaagaaatttcagttagtgcttcagtttaccctgccttgttacacactagtttgcagttgaagaattattcggagaaaggcaagtgatccaaaaggaggattttgcttttgcttcgataagctgaaatggtatttcaggagaggctatataaatgtgctgtggatagccatgactgggtaagagctgggttagaatgaaacaaagggaatgtatggatggaggcggtgggtagaatgaagaacctgagaaaggtatataagcttacaagcacaaatgcatgtcttgttcgatggccaacagtctaaaggagacccaaaaagaaacctatcgatgcactttacacaagaatggcacttggttctcgaatcttgaaatctaggatacctgtctccaacatcaatggctagtttctcaatttgtaaacttagcactgaatacaaaacttacgcatcagaactgtacttaaaaaagcgtaatgtcaaaaatagcccttattcttattctttttcttttaagcacttcagcctccaatttggatggaaaaactgacgtgtctgttagctagcaaaaatcaaaaaataaaa

SEQ ID NO: 703 - DNA, 617 bp, Gossypium hirsutum
  unsure (1)..(617): unsure at all n locations; Clone ID: LIB3825-010-Q1-K6-G11
gtcaagccctatccctttcactgatgctacttactatagggttggattttatggtgagagatttggtaagctggaccggaaagaattgtttaccgagaacctcgtgatgtgcgcttgggtgatataatgngaaaaacttagtcatatatatgaatctaggatggatggtaatcatacattgcacattattcctgattccagacaggtgaaggcagaggagttgcagcctggagtctgttacctgcagataacagctgttgatccagtcatggaagatgaagatttgggaagcagaagggaaagaatcttttctctttctactggaactgtccgtgcacgtgtttttgaccgcttcttatttgacactccattcacgaaaaatggcaagacccaaggtggattggaagaccaatggaaaaggaggactgttcttcagactgagggctcattccctgcacttgtcaataggctcttggtgataaaatctgaatcacttgaattttctccggttgagaatgcgattggaatgattgaaactcgaacagcagccctacgaaatgagttggaagagcctcgtagttccgaaggagaccaactgcctcgtcttcagagcctgc

SEQ ID NO: 704 - DNA, 627 bp, Gossypium hirsutum
  Clone ID: LIB3825-010-Q1-K6-G12
gaaagaacacacgatcttcccttccccttccccttcccccatcctttttggacatttggaacaatacatggtatcccaaagctaaatataacaaaaatacagaaaaaaaaacatggtatattgttgatgctacggataaaattctgggaagactggcatcaacaattgctgtgcatattcgtggaaagaatttggccacttatactcctagtgtggatttgggagcctttgtgatagtggtaaatgctgaaaaaagttgttgcatctggaaagaaaaggacacaaaaagctctacaggaggcattcaggaagactaggtggcatgaaagtgaaacattcaaccaactgcagtggataattcctgaaagaattattaagcacgctgttcatggtatgcttcctaaatgaaggcttggtagagcattgtttaaccacctaaaggttttcaagggtccagaccatccacatgatgctcagaagcctattgagctgccaatacgagacaagagggttcagaagcagagataatcaaaatataaagcagggtctggcttgagagtgagcaggtttgttgaaattacggaatggtccgatcaaccatcagtgaaggtggcggtcacagttgat

SEQ ID NO: 705 - DNA, 617 bp, Gossypium hirsutum
  Clone ID: LIB3825-010-Q1-K6-G3
aacagagcacccaagcaccattgacaagtgaaaggaggttagagcagaccttgaagaatatatacccaaaccctatttggcaagggcattggctgctccagatgtggaacatccacatggaacaccagggcatgacaaccatggaatgagtgttcttcagcaacatgtttacttttttgatcaagataaagatgggattgtttatccttgggaaacctacacagggatggctaccaaatctatattttcccatatacatagacagaatacacaaatgcaagcatggtagtgattcttcaacatttgacactgaaggaaggtttatgccaatgaactttgagagtatattcagtaaatatgctcgaactgtgcccgataagttatcattcggagaagtatggcacatgactgaggctaatcgaaaatcatatgatttcattggctggctaatgacaaaggcagaatggatgcttttgtatctgcttgcaatggatgaaaatggttatctatcaaaagaagctgtcaggggatgttttgatgggagtttgttcgagtatgttgccaaaatgaacaaggctggcaagaataaggtttaatttatgtcacgaagatgttag

SEQ ID NO: 706 - DNA, 633 bp, Gossypium hirsutum
  Clone ID: LIB3825-010-Q1-K6-G4
ctcaatttcttcccttgtttaaacctaatcttagattcaaataccattagcaagattgaaatccatatattttctttacccagtttgtaaaatcaatctatctttgaaacccatatcccattttttttattgaaagggagttgaattggagtcggagatggagaacaaccagcaatccttttggcaattcagtgatcaacttagggtccaaaattccaacttggcgaacctttcgctcaacgattcgatatggagcagtggttacgtttcgaagaggcctgacgagaggaggaattttgatatcagagtaggcggcgaactgaactccgtcaacagcttgaagccgaaggtcaccgatttcaactctttcagcaacgatgggtggaaaatcggagccaccagcaacgccaacatcgggttcggtcccatcggtccgattggatctcagaataacgttggggtcaacggtgggatcaacaaagggatctattccaagccagggaacaacaacaataacttcaatgttaatttgaaagggagcaagaacaaaggagaagataatcatggaaccaagagtgggaagaagaacaccaacaagaaaaacaataacaacaacgacaataacaacgaaaa

SEQ ID NO: 707 - DNA, 613 bp, Gossypium hirsutum
  Clone ID: LIB3825-010-Q1-K6-G5
aaaactccaaccgacaaaaaaaaaaaaagggttgtctccaaaattaagatctcaatatattattcttcgtcgttctcctttacagatttccttttaagtttgtttttccccccttagtttaaaagatgtcatcaagtgaagagccattctcacaagtgcaggcacggttagctgtgcttgcagctcatttagcagctcctgattgctcctccaacaacctcaattcttctgtcctcgagccatggtgcgtgtcggctcagaacggtggctctgttggcctttcattaaccatcatcgacgagcgaaccgggaagaagtaccaggtccctgtctccagcgaaggcactatcagagctaccgatttaaaaaagataacaacagggaaagatgataaggggcttaaagtttatgatccgggttacttgaatacagctccggttcggtcgtcgatttcttatatagacggtgatgaagggattcttagatacagagggtatccaattgaagaactggctgagagttccactttcttggaagtggcatacctcttaatgtatgggaatttgccttctgaaagtcagttagcagactgggaatttgctgttagccagca

SEQ ID NO: 708 - DNA, 597 bp, Gossypium hirsutum
  unsure (1)..(597): unsure at all n locations; Clone ID: LIB3825-010-Q1-K6-G6
aaagtccttacaggnatcttgctgctccagttgaatcctttgttgataagcccgcggcagccgagacctcggcagctgctcctggagctggaaagggagcctatgttccaccaagcatgagagccggtgcagagagaacaaccggatcggatatgagacgtaggaacgatgaaaactctgtgagggtaacaaacttatctgaggacactcgggaggctgacttgcatgaacttttccgaccatttggtgctgtgacgcgtgtgtatgtcgctatggatcagaagacaggcacaagtagagggttcggttttgtcaactttgtgaacagagaggatgctcaaagagctattaacaagctgaacggatatgggtacgacaatctcatcctgcgagtcgaatgggccacaccaagaacaaactagaacattatcatcttcgtggtgtttagcttttctcaaacattgttaacagttgcaattcactgtctgaagtgcagattttggccttttttccccctttttttcttttaattttaatttacattcgtgcatgactgttatacttgagatcttatttatttaagttgaattcttggtt

SEQ ID NO: 709 - DNA, 629 bp, Gossypium hirsutum
  Clone ID: LIB3825-010-Q1-K6-G7
ctcgcaccaatgccttcgggacttagcccgggtatagtaactcgcacaaatgccttcgggacttagcccagatgtaataacttgcacaaatgccttcgggacttagcccggaactagtcactagcgcaaaatgccttcgggacttagcctggttatcatccaaatattcatgcacatatcaataaatcatgacacatctatatttcattttcataattatagttcaaacacaagtcacgtattaagcaatcccatttttggctcactagccacatacaaacagcatggtttagtttgctttatgacacgatctctatgcacatacggctacccgtcatacgtatagactaattaactcaacatataattcaagtagaatcatcatatcaccgtatatttgttatgctcatacgtcatgacttaatcaaatcgtaaactaagtctcgttactcgaaaacttacctcggatgttgtcgaacgattccgatggctattcgaccactttttccttccctttatcggatttagttcccctttgctcttgagcttaatttaacaaataaattgatttaatcatttgagcatcgaaaagaggaactcaaagtacttagcccatatatatacattag

SEQ ID NO: 710 - DNA, 618 bp, Gossypium hirsutum
  Clone ID: LIB3825-010-Q1-K6-G8
tagagcggttccattttagtaatggctatgagcaccctgctattttgtgttcttcaagtgctatggcaggttcgtattgtttgactttgacaattgtgcttgtttctggatcctttcggtgtatgcattggtatttatttccctgttaaacatataacatctagacctatcaatcttgatttgaactcgaaaatcctatctgattaattgattttgaactcggcccaacccgatttgactattgaaagtcaacaagcctaacatgtctaacttgatcctgaaaaatatgatccgaacaagaaaagacctaaactcaaaataacccaattgtgaagctgttcaaacccaaaatgaattgaacccgagatgatttgacttgaaaaatctaatagtaattacaaatggctggaatttgaaacaatctgaacttgatgttgacttgaatccaaaatgagcatgaaactatttgaacccaaaatgacttaaaattttaaattccaaattgacccaacctaaattgactcaatccaaaaccatcccaaatcccaattcatctagttgaaaggtctatattaaaatttataaaaaaagggcctatgttacatcagatttttttgt

SEQ ID NO: 711 - DNA, 618 bp, Gossypium hirsutum
  unsure (1)..(618): unsure at all n locations; Clone ID: LIB3825-010-Q1-K6-G9
ngataccctaaaaaccctttcactaaaaattgaagatgcagtcaatgaaggatgctgctgcctctgctaagccggcatggagaaggccaagcctccatgcagaaaggtggaccaaatgaagacaagggaccctaatgagaaagagatggcgagggaaaggaaagaagagagacaagaagatgcagagctgaggaaacaagaggcccgccatcataacgccacggctggccatgctggtggtggtggtattggtggtactggctacaccacagctgggtacaacagaggggatactggtggctatggcggtaccggtggacatgacaaccgtgggtaccccaccgcaggtagtgggtatgatacaggcaggcaagatgacctcagcagtatggggtttggcggagatacagggggtgcttacggtacaacgggaaaccaagacttcccaagtgcggcgcctaacaatgctgggactagaaggagcacccgcggaggtacccaggatgatccttattatcgatcctattaaatgaaaggagcgactttttgtgctctgctactgccttgagtctgtgtttgttgtttgtttgcttctactttttttctttttcaagttcg

SEQ ID NO: 712 - DNA, 611 bp, Gossypium hirsutum
  Clone ID: LIB3825-010-Q1-K6-H11
gccgccgcctgcgtctctctcttcatctctctgaaccaaaagtctttagcttttcgcttcgagagagaccatgttggtttaccaggatctcatctccggtgacgagcttctttctgactcattcccctacaaggaaatcgagaatgggatgctgtgggaagttgagggaaagtgggttgtgcaaggagctgtcgatgttgacattggtgccaatccttcagccgaaggtgctgatgaggatgaaggtgttgatgaccaagctgtgaaggttgttgacattgttgacactttcaggcttcaggagcaaccccctttcgacaagaagcagtttgtcgtgttcatcaagaagttcatcaagaacttgacaccaaaactggatgcggaaaagcaagagtccttcaagaaaaacattgagggagcaaccaagtttttgctttcaaaattgaaggaccttcaatttttcgtaggagagagcatgcatgatgatggatgcttggtgtttgcttactacaaggatggtgctgttgacccaacatttttgtactttgcatatgcattgaaggaggtcaagtgctgaggtttgaagcaaagaaaaaaaaagtggttgctga

SEQ ID NO: 713 - DNA, 576 bp, Gossypium hirsutum
  unsure (1)..(576): unsure at all n locations; Clone ID: LIB3825-010-Q1-K6-H12
gnaaactgccagnagactcgacctccaaggactggctcaggtgccaactgtactccctccccctcctcctggaatgccccctaaattggctactaatcaaggtgaaggtgctccgtcagaagctgataccaataaccatacagcaatttctaaaatggttccaccacctccacctcctcccagacaacctccggtgcctggacctgccatggtcccagctttaaagccagatgtattaccccctggaataccaggtttccctccaccgccgcttccagatatgcgggcagcactatctgccagtggacttcctagtcaaactgctcctccaggaatgatggttccacttattccaaaaccacctttaggccctccacctggacctcctccaatgatgagaccaccacttccgcctggtccaccacccgccgcgctggatgattataatcttgcaaaccgaccacccttaccacagaaaccatcatatgttaaatctgctgcatctactgttgttaagcggccactggctcagcaccagccggagcttacggctatggtgcctgcatctgttcgagt

SEQ ID NO: 714 - DNA, 594 bp, Gossypium hirsutum
  unsure (1)..(594): unsure at all n locations; Clone ID: LIB3825-010-Q1-K6-H2
tctcgcgcctcttcaanacccaaaaccctanaagcgccaaacaacccatggaaaaggaggtcagtgaaaggccatcaacaaccaaaaaacgaagttcatataaatataaatactttgcgattcaaatctaaaagctcaggcaccaaattggcaatggcatctactgaacaacaagtcccatctggaattacagctcctactgctgatgttgtgggtaatgccttcgttcatcaatactaccttatattacaccaatcccctgcactggttcaccgattttaccatgataacagcaaactcggtcgccctgaagaaaatggcggcatgagtatcacaacaaccatgcaagccatcaatgagaagatactctcacttggttatggagaatttctggctgagataacaactgtagatgcacaagactcacacaatggtggagtaattgttcttgtgactgggcatttaactggaaaggacaaggtaaagcggaaattcactcagagtttctttttggcacctcaagacaagggctattttgttttaaatgatgtatttagatacattgatgaagccaaacatcaaagtggaagccag

SEQ ID NO: 715 - DNA, 621 bp, Gossypium hirsutum
  Clone ID: LIB3825-010-Q1-K6-H3
ctgacatccccttcctttctcgcctccaaatcccctcttctcccccgccgccatctcctccctccaagtcttaaacccatcaccgccgtccattcggccgacccgactaagtcaaccaaatcaacggcggcggcggcctccaccagctccccttcgatccccacgcaatggagcctcgaaagctggaagtccaagaaggccctccagcttcccgaatacccagaccaaaacgacctagtatccgtcctcgagacgctctctacgttccctccggtcgtcttcgccggggaggctaggagcctggaagagaagctgggacaggctgctctcggcaacgctttcttgctgcaaggtggtgactgtgccgagagcttcaaggagttcgatgctaacaacattcgtgacactttcagggtcctcctacagatgggtgtagtcctcatgtttggtggccaaatgcctattatcaaggtaggaagaatggcaggtcagtttgcaaagccgagatcagatccgtttgaggagaaggatggggtgaagctcccaagttatagaggtgacaatataaatggtgattctttcgatgagaaagaaagattccagatccccataggatgatca

SEQ ID NO: 716 - DNA, 621 bp, Gossypium hirsutum
  unsure (1)..(621): unsure at all n locations; Clone ID: LIB3825-010-Q1-K6-H4
ggagaaatacgcaacaagnatctgatgaagtgggttttcgttttgccagatattgagagctacaaagctgaatatcgtggatttttttaaggaattgcctcagtttgtggtaaaagctggtcccgttttacgtaacatgtatggtgaagattgggagactcgacttgagggtacggagatgcaggccaattttgtgcacttgagccttttaagcaagtcatacaagcgtgcattttgggaactcttcttgacaagtgatgcaaatattgacaagcagcaaaatgctaccagttcgtcagattatatatcagagtgtcatcgatttggatggttactgtttttggcactccgcgtgcacgcattcagtcgttttaaagacctagtgacttgtgcaaacggttttgtttctatactggctatcttgattatacatgttcctgttcgcttcagaaacttcaagatcaatgactctccacattttgttaagaaaggtgacaaaggtgtcgacttgcttgcgtcactttgcaacatgtatgatgcttcagaagatgatttgaggaaaacaatggagacgtccaataagttaatagaggaaatattgaaaaaaaaccatgtccagca

SEQ ID NO: 717 - DNA, 501 bp, Gossypium hirsutum
  Clone ID: LIB3825-010-Q1-K6-H5
gccagcggccgggcgcgctcataaccgtattaataatcgaatgagaacagcctgtggaacaggcaacaatgaatgcaacgaaagagacgcaaagagaagagatccgaaacacggatccagaaagctcggcaaaagaggtctgctctcaggggtgccaaccccggaacccatcccctgaaccccgcacttgtcgagccactgctccagctacagccgctcggagagcgcctcgccggggaccgactgggaaacggtctgtgaacggcttcctccgggccactaacagggcaatcaacactggacccaacactgggactgccactgggaaatcaacacaaaaattaaaaaagatccctgcgaatgctcacgcagatgcatacgcaccgagagctctgaccgtcactctgaataaaataaaccaaaaacggatcaacgggcggagtaactatgacagtcacaatgactctaaaaacgtagccatataactagtgacccacatga

SEQ ID NO: 718 - DNA, 621 bp, Gossypium hirsutum
  Clone ID: LIB3825-010-Q1-K6-H6
ccccgcgtccgtcaaatttgtgcgaggaactatctattgtacaaacattgacaggaaggttactcaagctgatgttaaactctttttcgaaacagtctgtggggaggttcatcgcctaaggctgcttggggactatcagcattcaactcgcattgcttttgtcgagtttgcattggctgaaagtgcgattgctgctctcaactgtattggtgtggttctgggatcattgcctataaggatcagcccatcaaacaccccagttcggccacgagctgctctccttccctcgcactaaatcattcaccctgaaccaattttagttccaaacttatatatatatctattcaaatacatacacacccatgtaaggatgcttcccgctgatgctcttgctgatctccatatatacacgactcactcgctgcctatatcattggactccactgcttgccgttttgaagctggtatttccaaggatgggcagacccgtgagcatgctctccttgccttcactcttggtgtcaagcaaatgatttgctgctgcaacaagatggatgccacaacccccaagtactcaaaggcaaagtatgatgaaattgttaaggaagtttcttcctacct

SEQ ID NO: 719 - DNA, 620 bp, Gossypium hirsutum
  Clone ID: LIB3825-010-Q1-K6-H7
aaccctaaatttgatttctctttttggaaaagatggtgaccggagcgacccaaaacccggccccgccaacaaagctccgatggggtgaattagacgaagacgacggcgaggatttggatttcttgttgccgccaaagcaagtaatcggacccgacgagaacgggatcaagaaagtgatagagtacaagttcaacgatgagggaaacaaggtcaaaattacgacgacgacccgggtccgaaaactcgctaatgcccggctcagtaaacaggcggtggagcgaaggtcttggcccaagtttggggatgctgtaagggaagatgttggtagccgactcactatggtttccactgaagaaatcctccttgaacgacctagagctcctggtagcaaagcagaagaaccgaaggctgccggagattccttggctcaactaggaaaaggaggtgctgtccttatggtgtgtaggacttgtggtaagaagggtgatcactggacatctcggtgcccatacaaggacctcgctctgccggctgagtcattcgtcgataagcctgcagtacctgaaactgcaactgctgctgctggatcagggaagaatacttatgttcctccaggtatg

SEQ ID NO: 720 - DNA, 519 bp, Gossypium hirsutum
  unsure (1)..(519): unsure at all n locations; Clone ID: LIB3825-010-Q1-K6-H8
gaaactagtaaacctgctcctttgatggttggtgtggagaggagggcgtgctggctgttacacagtaacttgatganagaagctatcgctgcaaacaaggctgaacgtttctatgaatcacaagaagagatggggatatgtctgatgagtatgaaaatctcaaaaaagattgctatctaatacacaactagcctattctgttctagtgctaccactgtcatgcctagctggctgtgcagatagggatactcggatggtagaaaaagatcgtatacagaggaatggaacggggtgatagaaagagcgctggtatagagagcgtgaaaatagggaaagacacctctggcgaagctaaaaaaagggtatgggaaaggatcgaccccgttactatgatcttcagccccataaacattatcgacgagatcgacaccgacgcacatacttccattgtcaaagaaagactctgagactacaatggggacctgaattgtagctcctctgaaacatttgtgagactaa

SEQ ID NO: 721 - DNA, 620 bp, Gossypium hirsutum
  unsure (1)..(620): unsure at all n locations; Clone ID: LIB3825-010-Q1-K6-H9
ctccttcccttcaagctggtccagtgaagaaggtcatcatatgggcgattatatcccacaggaagagcttgaaagtttatggctgcctgcaatgatgctgctgcacaaaaagctgcaaaggagactgcccagaagacaaagattcaatctgataatgttgggcataaactcttatcgaaaagggttggaaagaaggtgatggtttagggagttccaggaaaggcattgcagatccaatcatggctggtgatgtgaagatgaacaatttgggggtcggtgctcataatcctggagaagtgacgccagatgatgatatatacgagcaatacaagaagcgaatgatgcttggctatcgatacagacccaatcccctgaacaatcctcgaaaagcatactattgagaacacagttgtggaagaaatctactatgtgtagggtgggtggctggttggaggaataactctaaagagttgaaggatgcttattgcatatcatatacatacactttatatttatgtatatantttgngtttatgactgaggttcctttcttttctatgggattcatttcgtttcgtttattcaggtggctaaacacagcttttttcccttcttaaaaa

SEQ ID NO: 722 - DNA, 589 bp, Gossypium hirsutum
  Clone ID: LIB3825-011-Q1-N6-A1
gcttaaacagctcaatcccaattatacattggatttcaaaataaagacaatcaagaaccaaaactgtgttaaaatagaaacttcacagaaataggcttaatgcaaagccaaagaggtttcgaggggtgccttttcaataactttgatttggtatacaaaaactagatgccagttcgatatgtcattgatcaacataggaaggaacagggagaaagggaaatggagcaatggatgcatatgccacaggtgcgcgtccttgtggaccagcagtgacatacctcactttcttcttctgatcatcttcttcactttcagttacagcttcggggaatgatggaagctcaacaatactgttgggattttccgcaaggcactgcggattgtctgagagacgatgaaataggaggccagacataaatacaggaagatacaaaaggctggcataaaacatccttcttgctttttgagtagtccggtcacgataaaatgaaaatgctgcagcacttattgcaagggtgataactgatgattcaacacaaaaccacccagaagccacaccccagtcataggctatgaaccccaaagggat

SEQ ID NO: 723 - DNA, 585 bp, Gossypium hirsutum
  Clone ID: LIB3825-011-Q1-N6-A4
aaacaaaagcttattatcttgttattgatgttagcattagcattagcattaatttaatctaatataataataatagtattacacaagaaaacatgattattctcttgttaatcgaaaaccttttcatcctcttccttctttctttttttcggtctaccatgattgaaagtaaacgataagagcattaaaaagctgccaccatagccttcgacatttctacttcttcttcatcatcttcctctgcatcccacagaaagttggcgtaagatcccagcaccatgcagtcgtcaggagaagcagtgacggctcggtcgaagtaagacttagcacggctctcgtctctgtgtcgttcccagattaggttcccgtacaaagacaaaacttccccatctccagggctggctaagatagctctcccgtaatactcctctgctctctccatatccttttccacctgcaaaaccataatgcaatatccatcagattttcgaaagatcaaaacttttctatgtattagtgatgtcaaacttttttacctcgtgtaagaacctgccgtagtttctcaaaagaatgggtcaccggggt

SEQ ID NO: 724 - DNA, 579 bp, Gossypium hirsutum
  unsure (1)..(579): unsure at all n locations; Clone ID: LIB3825-011-Q1-N6-A6
agcaagacctaacatagcttttttaatcgcagacaatggtaacaatataaacataaattgcatactttttcaacatgcagcagctatgtagcttatcatgagagattaagacaaataagttaatcaaacagcaaaccaacacattaacacccaaatcaatctccatctcatttctctcttactacgctttttcatcatcatcatcacaacttttagctgtcaccagggaaggtgcccctcacaaaagaacctcgacagtggccaccaacgatgacttctttaagacgatatatggaatcgagcaccctaccagtcttctcgttgttgatgctgagctgccacttaagttgcaatgcctgccacctctcttgttgccaacgctgcccaagaatcacaaggcccatcacagctgcagcaatgaaaacggaccaaaatgcatttgtctcttttgcatgaacatacaatgaaactgctcttctcttccaccaagcttcgcatgnggagatcagaggcatcacatttatcatcttgaggctttggggactgagggatatctgaaggaaaacctaagccttgctc

SEQ ID NO: 725 - DNA, 554 bp, Gossypium hirsutum
  Clone ID: LIB3825-011-Q1-N6-B2
accaaatgactttttgtatatttaaaaagttcattctctatactcatgatcaaatataaagccatggtcgaatttaagaaaaaaagatatgaaggtccgtgtctgggtaccatcataactgtgcatttactaaagagtccaagataatagccatgccatcaaagagtccgtactcaaaaatgttggaaaggaatcctctttacaagcactcctctagttagtcactgaaatcggagctacgagaactgctagcattacgactgtgtaatgacaagcctctcatatgaccagccacagcagaaccgtcaacctttttctcctgaaagtacctttctctctcaatgtgttttgcaggagggggaggaattgcaacagctgaaggatgtccattgttttcatatgatgtttccgaaggcaatggtcgaataagtggacggtttagccgttctttttctcccagaatgtttgatccatacaatcccacgtgtggctgctctctagagcactcttcatcttccggtcttgcacatgctttcccttttcgtatctgtctt

SEQ ID NO: 726 - DNA, 82 bp, Gossypium hirsutum
  Clone ID: LIB3825-011-Q1-N6-B3
tcgcgactaaccctggcccgacgcgtgacccgacacttgggcagcacgccgtgcggcgcacgaggcggccgctgatgaggca

SEQ ID NO: 727 - DNA, 490 bp, Gossypium hirsutum
  Clone ID: LIB3825-011-Q1-N6-B5
aactccctcccaaaatttccatagataaaaaagatgttaaatcgcaaaaaccaagggcaaatcttttaacctgaacaaggggtcaaataacgagcaaatgggagttgaatgcttacataccacaagaaatctagcctcaagcagtagtggtctcctttgataaaaaaacctttacccttttggtgaaatctctcataacatctataatcacggattttttttgcatccggaactgtattgctaactcagttgaaaccgaaaccccttgttttaggagaaattcatcatccattatctttgttgggaagtgtcccagtgcaatgacacaaagtgcaataatggtacgaaaagcagctacttcatttgcaactccaaggggaccttcggctgataaggattttaggacactcaaatcatacctctgcaccatttctctgtcattcgatagtagaactcgtaaagcagctaataaacgtccctctaccaattc

SEQ ID NO: 728 - DNA, 533 bp, Gossypium hirsutum
  Clone ID: LIB3825-011-Q1-N6-B6
agtcacaaaggccattttcagggatcttaaaccattgaattttcacttcattttcaggtgtgatgttaaggccttagaagatgcattgtgtaaacgtgttatggtcacacccgaggaagtaataaagcgaagtctcgatccacaaagtgctacagttagccgggacggtttggctaaaacattatattcgcgattgtttgactggtgagataagcttgcatatgatcaactatgaaatgtattttaggttctgagataattcttctctgtttttatgcacaggttggtggacaaaattaataattcaatcggacaagatccaaactcgaacttcctaatcggagtccttgacatctatggttttgaaagctttaaggctaataggtatgctccatgcttgtaggtttaatctaggttgttccgagtccaaggatcctccaatacatgaaaaaaacttaaaaataagtaaacatatctatctctaacacttaaacccaagtccgagttatatagggtatctctctctatgcagc

SEQ ID NO: 729 - DNA, 573 bp, Gossypium hirsutum
  Clone ID: LIB3825-011-Q1-N6-C2
cgaaatctctcttccgacaaaaatacggccgaaccgtactcttacagagctctacataccacaagtacccagactaacccttcttgcataccatcaccccatactacactattaagttacacatttgaaagacctaagcatgcaaacagtaccaaaacccatttgatttgtcgccaaatatgggagaggactcatatctcacacgtcgtaaggaggaggacaagggctccttggtccaacctcgttagccttctcgtatgcatccgatgtggaccttctccgaaaccgatatgattctctgcctccggaaaaaggagataccggaggggtcgatccggccggcgaaaccggaggcgatccgctctggtaaccaggcggctttacgatcataatactacgtgtcactctcgtcgcttcctccggcgcttcatcaccgtacgatcttacactcccgccatcagattccttggcagagttaggccggaaagtgaaagtggagtgctttcggagcttgccaaggccattatcgggtcggggaccagcaacggtatcatcccacaactggtcaagcag

SEQ ID NO: 730 - DNA, 585 bp, Gossypium hirsutum
  Clone ID: LIB3825-011-Q1-N6-C3
gcaacgagtacaaggtttccgatggattgaacgataatttatgagttttgcctaactaacaagctgaacaaaaaggagataaagtgctatttgaaggaaacattacaactacgcaaaacattaacaagaacattgttacatggatggcctagtcgactatgccacactgtaagtgaaaacacattttaagctatgtataacgacacactaggctgaaaagatgcaccactactgttggagaccaatcgagaagtatcaaacttgtagaaaccattatgcatgcggcccactaggagagttttcttggttagaatatcacacagtgggaacatggagcacattctgtaggcgtaacaacctaaaaccagcctgtataaggagaaactgttaaaagattggccacgtcaggggtgatgtgattagttgccccagaatctagataccatgattgatcatgagcaggagacgaatactggcgatgaccagattgagaggagacgatagcctggtttgaggaactacaatgagacatataagaacaaggattaaaagtaaaggaacttccctaatcttggatttgatgat

SEQ ID NO: 731 - DNA, 612 bp, Gossypium hirsutum
  Clone ID: LIB3825-011-Q1-N6-C4
gagttaaaacgttcccttttattcccattggcagatcaaatttataaaacaaccctatacccttttttgaaccatatcccacaaaaatggatcaaatctttctcggcctttgccacaggttgtacaatttcatcacgaaatatctagcaacatatgccatgaaaagtgtaacattaggcgatgtttctcatcaggcttcagctcagttaccttctccaggtgctgaatcagctatatcgagctccatgaccgaccaagcaacacaccctgtggctgaagcaacaccagttgaagactcaagtttgcaggccaaagtagagccagaaccaatgtataatcatagtgaaagtggaattccttctgcaacatctaatgaagagaaaaatgaggatgttattgaagcagcaatgtctgaagctcgacctccgaagaaaatggttagcataaatgatacagtagaggagatgactgcaactgcaagcaagaagaaaagtaagaagaaaaaaagagcagaaaaaatgggttcactttgaccaagaaatagaggaaccaaaacctttgaaatcgattctaaaagtagggtctaagatagattatgagagcaacagtttg

SEQ ID NO: 732 - DNA, 573 bp, Gossypium hirsutum
  Clone ID: LIB3825-011-Q1-N6-C5
tttcttttgcacttaagaaagcacaaagctcaaccagcaccaccactcttacttgaaacaatcatatgacagtttaggctttaagatgaaaaagaaaaatcagaagcacaacattaaaatctgacccgtctttaaaggaagcatgaaaattcaaagcaacctatatcttagttgcaagcatcggggttagctaagaggtaagcttcaatagctttgtaaactccctcactccctttaatgagagccttgatttcatcttcagtgattacatagtcaccaaaagtgtaaaatttcatcgagctcttgcacacacttcctccacctacagctgcctcaaacttattctcgtagttgattttctcaagcttgtcccccaaaggcccaccttcaatcaaactgtaactgtatgaaaatttgttttcatcatgtcctccaatctggtgcttcatatattggaatggaaggccttcaacaaagttgatctttacgatacttccagggccaggattagcttcaacctcaatactcttgattgcatgaggggcagctatgggccagaccttgtcagcttca

SEQ ID NO: 733 - DNA, 574 bp, Gossypium hirsutum
  Clone ID: LIB3825-011-Q1-N6-C6
cattgacaaactggcacttcattatcaaagcaaaggtcaatagaaaaccaagccactctctcaattatttgtaacagaacacaacacatgtatcatatcatggttattgttaagaaaacacacaaacggaagacataactgataaaaccaaagctctctagctcatttcgatatttggactccatcaatatataataccccaagatatgcattattattaaaaagaccatctcatcattccacgctaccttctttccggtgatcaagtattagtagggttggcaaaagaaacatgtcgttaaaatccgcagtccacagaaccccagcctttatattcagagtgccttatttgcccaacattcagccgccgatttccaattgtaacatttgccaacttctccgctacatctgaagctccaatggcattcctatccttgttgatggatgtggcaaatggactctttcttcctggtggtcgataccttggttgtttggcaaagctcttcaaggatttatcattcttattaagatcctgattaaccatctccagcttgcgttgcacacctgtgcccaa

SEQ ID NO: 734 - DNA, 228 bp, Gossypium hirsutum
  Clone ID: LIB3825-011-Q1-N6-D1
attgaacagactggcgtgaacttgggacataaaataggtacatattgctcaaaattgttaaatcctgggaacagggtactataatttatagcatgtgcgttaacgtctactgccttatttaaaattctcatatttacccattaaagaaagtatgttgggatttgctacgaatctggttctatctagctgttgatggaatataacttgaaaccatctttttagcttctt

SEQ ID NO: 735 - DNA, 357 bp, Gossypium hirsutum
  Clone ID: LIB3825-011-Q1-N6-D2
aaaaaaaaaaaggattgggcccccaaaaaaaaaaaaaaaaacccccccggaaaaaccccgggggggaaaaatttttcctttgaaaaaaaaaaaaagggggaaaaaaaaaaaagggggaaaaacccgaagaaaaaaaaaaaaaggtttgtaaaaaaaaaaaaaaaagaaccccctgggcccaaaaaatttaaaaaaaaagggcccccccccggaaaaagcccccaaaggaacccttcaaaaaccccccccgggggggaaaggggaaaaccctttttccgggggaaaaaaataaaaaaggcccccagaaaaaaaggttgggaaaggaaacccccggccccaaactaaaaaaacaaattt

SEQ ID NO: 736 - DNA, 578 bp, Gossypium hirsutum
  Clone ID: LIB3825-011-Q1-N6-D3
ctctaattattcccaacttttattgatttatagaactgccctggctaaccctataacattacaacaggaccaaacttctttttatatggtacaacagtacgatcttgaaaaagaaaaagtagaagcaaacaaacaacaaacacagactcaaggcagtagcagagcacaaaaactcgctcctttcatttaataggatcgataataaggatcatcctgggtacctccgcgggtgttccttctagtcccagcattgttagacgccgcatttgggaagtcttggttccccgttgtaccgtaagcaccctctgtatctccgccaaaccccatactgctgaggtcatcttgcctgcctgtatcatacccactacctgcggtggggtacccacggttgtcatgtccaccggtaccgccatagccaccagtgtcgcctatgttgtacccagctgtggtgtagccagtgccaccaataccaccaccaccagcatggccagctgtggcgttatgatggcgggcctcttgtttcctcagctctgcatcttcttggctctcttctttcctttccctcgccatctctttct

SEQ ID NO: 737 - DNA, 78 bp, Gossypium hirsutum
  Clone ID: LIB3825-011-Q1-N6-D4
tatgaacgtccgcatcgcacgcagtacggtaagcttggtatgcctgctgggaccggccgtccctattttttttttgtt

SEQ ID NO: 738 - DNA, 580 bp, Gossypium hirsutum
  unsure (1)..(580): unsure at all n locations; Clone ID: LIB3825-011-Q1-N6-D5
aaaataagacaatgaattaattaccacagngaaaaaaattctntagaattggggngaaaattacaaaatagtacaaaaacagttcttaaatttcaattggaggcagcagctggcccctccttataaatctgtctccatcaccgatgggttaaccattgaccctatattataccaaaagcggagttcacttcatgcctgttgttttctcttttttggtctcctctttctgcgtggtttgcgagcatcagaattggaacttaagttactattgtttccagtctttgaatttgaggattcccccgccttaaaggaagaactactgctttttgaagtgtggctagatgtggacatttcagttcttcgtattgatgaatttcggctagatgaagatccaaaccttgattttgcacgtacaaagtttgaaaaagaattacttgatggcctcggaggcggcattaaatctctcgcagatacctgtttctgattcctttcatcgctagacatgccggacgccgctatgccagaagcacgctcccttgtactttctgtccattcatcatctgcatcagcttcctcactc

SEQ ID NO: 739 - DNA, 501 bp, Gossypium hirsutum
  Clone ID: LIB3825-011-Q1-N6-D6
gcccggcccattgaaagccaagggataatccaaaatttcaaaatataaaggcttttaacaggcctttacccaaatacaaaagcctaaacggggggcccaaatacaagagaccttacccagttacaataaccaggaggcccacttttacatcctacctagatacactaaaactaaaacccattacaacagacccaagggggcccaggacaaaacgggcccaaggggcccaacttgttacaccaagggatgaaaccctaggggttttggctttttccttgcgccgcaaacaaaagggtccaaaagccaaacctcatgacttttcaactcctggtggtccaactaccccgtcaagggcatgattccaggccccaagtcaccccgagatcaacgccaccaggggaccattggcaaacctttgccattggcggatttttcgcaaggacctgaaaattggcaaaaaaaaggagggtttttgaaaccctaaccaccgtatacgggggg

SEQ ID NO: 740 - DNA, 594 bp, Gossypium hirsutum
  unsure (1)..(594): unsure at all n locations; Clone ID: LIB3825-011-Q1-N6-E1
ataaacctagtgacttgaatgaaaactttcgaataatacattanaaaaccaacacgtgaaataaaacatcatctacaataccttattgaaccatttcccttaaaaacccacagtgaaaatgacgattatgattatttgcttatttagcaatggcactattttttttttcactcaaaccccatagttctaagatttcatggaagcttcatcaaagcttagaagaaacatcctttggatgatgaatgacaatgtaattataagcatcaagtgtcaaaaactcatccaaagttgaagcagtgcattggcgagtaaaaatcttgcatgcttctttatacattcctttcttaaacttctcttttccgacctcacgttcgatccgagccatttcttcttcaaccactcgcccgaacacatggttcactcgaaccccaagtccatcaccgtctaattcaacaccatatttcaaccactgccagatttgaaccctactgatctcggctgtcgcagcatcttccattaggttataaagcgggaccgaacccgaaccggttaaccaagctgctaagtattggatcccgacacgagtgttcaaac

SEQ ID NO: 741 - DNA, 660 bp, Gossypium hirsutum
  Clone ID: LIB3825-011-Q1-N6-E2
acgccgttacgttaaagctatgggaatcttctaagagtccggcccgccccttttccccctttttttttttttttttggtcttcaatttctagtaattaataaggtccttttttacatgaaaattaatgatccgaaactttgttaaaggcaaaaaagaaaagagaacaacaatagaaaaaatactctgaattgagtggctattctcccacgtaataactacacagcaagatgggaagtattaaccgattcaaaactaactctaaacactcttttcatacactaacactgtattcgttaatagttattacctataggaggaaataaaactatggagctagataagaggggggggggacacatgtttatcatacacgtccaaaatacaatcaaatctcaccaggacaaacatgatcgcagcagaacgggaccaactgaggaactaagcatatcactgagagctacctggacctcagttgaaccatgctcagtacttaccaagttcgaaataagagggaagaactgaggtaagttcttctcaaacaaggtttctcccaaacaacaaatggcctggagagtcgccacaacgagaggtgcacgggcagccaattctcttcgtttcccagaaccaagaggaatcagccattgagtttgtccattggc

SEQ ID NO: 742 - DNA, 543 bp, Gossypium hirsutum
  Clone ID: LIB3825-011-Q1-N6-E3
aatattcaaaacagtcatgacttccatttccgcttatgcaatctgcaatgtcactaaaactactttgggcaagctttaagtaaataaaaaacatagaacatccttaaatacttgaaaatccttttcatctatgctcactatagagcagaagcgctagcaaagcacggttcaagcaaaaatatatatattcgaggggaaagcaaggggcaaaaggtgataacatggccaatggcactctcaactgctgtagaaaaaaactgagtcctctaaatcttgttgaatgcaacaatgtcacagctttgaatgtattcgttgcgtggctctgtcgtgaggtactcctctataagagtatcaaccgaaacaagatcatccactatggtaagcatgatctgtagcttcttgatgccataaccaacagcaaccagctttgatgctccccacaaaagtccaggcatctcaacggatcgaacagcttcttccaacttcttcatatcagtctcatcatcccatggtttaacatccataagaacagaggactttcca

SEQ ID NO: 743 - DNA, 581 bp, Gossypium hirsutum
  Clone ID: LIB3825-011-Q1-N6-E4
aaacaaaaacataaactccaataactattggcatccgaaggtcctaaccattgccaaaacctacaactttgctaactcttaagcttccgttttctctacctttttccctcaatttttctcataacaatctctccctattatttaaacatattggtcatctattgctctattccccccatttcaaccctgtacaagaaaaagaacaaagaacgaagagataaataaaataacaaacctatactacttggactcgggtgtaaatcggataaaagtatgtatccgatatactaccttcgatttttccaacactttccatactcatgattggatgtgtacggagtaagacactcatatataatccaatgctgggttgcttttatttggaatcaactctggtaaattgttggcaaccattgttgtggtgggcgctagtgcacaacttttggttctcatctccagcactttcttgtgagaatttgagtgtacagacggaacaaatgtcggacttgcagcaggccggtactcggggaagagcctgccagacttgtatcggacaccacaggcattgcaaagggttttcg

SEQ ID NO: 744 - DNA, 583 bp, Gossypium hirsutum
  Clone ID: LIB3825-011-Q1-N6-E6
cagaagtactgatttgcaattgctttatcctaattaaatatgataaaaccatttaacagagtagcttattgaagttcagcaacatgcacgcaaacagtatagaaaaagaagtcaactaattttgaaacatgttccaggttagcgatatgaagggacttttagctctcagcgatagggcaaagatgcaccaccaaaagaataccgggatgaaactgatgtagaagcagatgcagggttaacatcttgatgacgctgcatccggttatgatctactaaaacgtcagaaggatattgagaatacaatctctctgcttggttgctttctatcctcctcaaatgatcagtttgaatcaggtgtgcttctcttggacgcgacaggtaagcatccaccaatggatcaccagaataacggccataatatggatccgcaatataggagtccaagatagaagcaacaacgccagatgtatttgcagttgctgcagaaactgtcggttgcatttctcgtgttgcgcccaaatcataagtccgatattctctttcagtcaagcgaagaggatcagagcgaactacatctctctgc

SEQ ID NO: 745 - DNA, 212 bp, Gossypium hirsutum
  Clone ID: LIB3825-011-Q1-N6-F1
attcaacaaactgccgtgaacctggtacatataataggtacacagtgcacgactatcgttaaaacctttcaagaggggagtaaaaatataacacttgcattatcatcaacagcctcatctaatattattctaatctccccctaaaaacgattgtgatggagctatgcttcaaaactgggtgtcaccagctgttaatgaaatgaagccagaaa

SEQ ID NO: 746 - DNA, 601 bp, Gossypium hirsutum
  Clone ID: LIB3825-011-Q1-N6-F2
agaaaagagtaataatattaactttgcacactaacagtaacaataaattgtctgccatttgaagtcagctaccacaataactaaaaaacacaagaaccaatctaaagcctaccttcgggccatttctatggtacttttttcctcaccagcacctttttactgtctttttcaccttaaaagtcttttatcttttactatcaaaccatgtttacatgtacatataacaaataaggcattttcacaaacagctaatactcatatagaataaaggagcaaaagaggctgcctgagacttacgtgccgttgagacaggctcagatcgatggtggttgtccaacgatagtactttcctttgtgtcccatgtcgagtaggagatactgagtcttgtatcaattttgatgttttatgttctggctggatgcatgaaatgttggagccctatctgtcgtttcacatgatctggaatcaacttgttaatcagctccggtgaagccccagataattcctgtttgaagttgaaaagtggtggtaaaggtcgactatttggtaggcgagcattaggttctcgaagctcatcaaagaaggatgagcacatgcttc

SEQ ID NO: 747 - DNA, 572 bp, Gossypium hirsutum
  Clone ID: LIB3825-011-Q1-N6-F3
agttgaaagttgaatataatagcatgagacttcataatgggagtctgtacaattgttgataattacagagccaacaaataaatgattgtctgttagatatctgcaagttcatgtacaaaatactcgacaaatatcgatttatatttaaaacagaccatcaaccgttttatgtagtttattacttttgttggacttaagtcaaccccatgctttatacatccttggattatgtggctaatgcctctgatttgcatatggggcatacgttcttcacgagcagccactttcttaagcaacttgcatggtactcgtgtccacaatcaagggttccgattttctcttggttcttataatcctcctggcaaattgtacaaaaatcaggttcctgttcaacgggtgccgcctcttccagattaatatttgtagcaaatgtcgaatacgatcttgttttcaatttacgtctaatcatttcttctgataaaccggtgttcacattgccaatccgctctcccagagcaagcaactcctcgtaagacatatcctctatatccaagcgcatatctctgtgatga

SEQ ID NO: 748 - DNA, 586 bp, Gossypium hirsutum
  unsure (1)..(586): unsure at all n locations; Clone ID: LIB3825-011-Q1-N6-F5
accacaaatctaatatattagtatattacccattatttcacaactagagaaaaagaagaagataaaatcaacatgcacgaaaatcgcaaagacgaaagacttctcgaaaatgaaacacacttaaagtacattttacaagcaagcaaagcaaccttccatggttcatattcatgtcctaccaccctcatgagccttgttttcgatagtctgcccagcttccttagtcttttgtcccacataccccaccatatcttgcatgcccctcttggcccggtccgcgtcgagctgctcggtgccagtcgcctgtctgaagcggttaaatacgtaggagagcgaggacagtcccgtcaacccaaaagccccggacgacaagaaaccggccacagccatgaaaaccgcgatggcagctgggagcagaaccgggctgaagatgacgaagagtggcgttgccacgcataggccgatgacggtgccggtgagggttagcccggctaatgcaaggagagtgccgccgatgggaaggagggtgaggacggttagaacttgngttgttgatggtccgctttgatagttcgttctatcacca

SEQ ID NO: 749 - DNA, 625 bp, Gossypium hirsutum
  Clone ID: LIB3825-011-Q1-N6-G1
ggccgccccctttcttttttttttttactcaacaagactggcatgaacttggtacactttatgttacagagtgcacaaaattgttaaaacctttcaacaaggtactaaatttatagcaattgcattaacatcaaatgcctcatctaatattctcatattttccccttaaagatgagtatgatgggatatgctacaaaactggttctaaccagctgctaatggaattaagcttgaaaccaccttctaagcttcttagaaccttgcttttccgcgtcgggtgttccggatttcggctgtgagaacttagatctgtattgttcaattagcatgtcgagtttgtctaccacgtctcggcctgatggatctttattcctttttggccttttcctttttaaatttgtctctccctcctccggctttgccttttcttgtcgtgtcctctctttcgggtgtgaaattgctttcacctctttcaactttaatttgctggtctcattaatatttgtttcaaccttgtcggaactaccaacagcaggttttgcgccacctttacgatccttgggcttatgccttgatcctttcaacttctgattgtagccttccaaattttctttcgaaaaggttc

SEQ ID NO: 750 - DNA, 594 bp, Gossypium hirsutum
  Clone ID: LIB3825-011-Q1-N6-G2
ggatgtaaaggaatgggaaacactaaaataagaacagaataaagagattggtgttcaatcaactatccaaacatgttgaagacaacgaaacaacaggaaaaccaaaacagttttgggacttttagtcagctcagacacaacgacagcaacaatcttgttattcctctagatctgagtacaattactagactatgaattagcaatttagcattgaatacgacccaatataccaatcccattcactcataccctgagaatctgaagcttggtggagaaggcgatggcaacccaatcaggctgggaagatgaccactgtaactgctcgatttcagccccagcggtgtaggcaaggatggggtcaagcccaccctccacaggctgactcatggaggacaagtcccaaatcaaggcctgggaatcatccccggcggtgcaaatgtggcaagagctgtggggtgcccatgcgatggcattgacgctagcctggtgcctctgcagctcaactaccggcagtgtcgggaagcggatatccaaaacaacaaccttagcactgtccataattatagtagccatatatctcgggtcctgcttgtt

SEQ ID NO: 751 - DNA, 573 bp, Gossypium hirsutum
  Clone ID: LIB3825-011-Q1-N6-G4
caaatataggggaagtttttactgtatctttatctgcctcttacatcagagagtttgaggtgattatgtacaacaaaagacatgaacatccatttacatgatcacgtccccccatactataacaaccatctttcccaccatcccatattccaaaagtccagtgaaactatacaaaaacgatcagaaaaccctttcttgatattcccctccttcaatcctgggcgtccatcactgtatccttctcttcaaacttcactcccaccaagaacctcatgctcacctgtctgggatcatagactgtgtattcattatattcgagagggctatcctggtgttctgaggggatcaaactgccacaagggactttgatatcatctttccaatctatatattctgattcatctggtttctttctccccagtcccttcacacacactttcttctcttagcaatggcttagtatcctccggtgggttcttgagctccacaatttcttcaccttgtgaaaacacagcgagaaccaagaacccttcaggccggtctacagcagtgaagccatacctggcagcttct

SEQ ID NO: 752 - DNA, 574 bp, Gossypium hirsutum
  Clone ID: LIB3825-011-Q1-N6-G5
gaaacacaacgcttaaaaatgcatcaagacatagttgaagtacaaaattcaaacaaaagattcaaaattttctcaagaataaataaagataacatccttgtactctgcagttgaattcaatcaaaacaaaaaccaagttctcaataaagcagaactacaactatgtctcaagagaaaatcccatcattcattcctcttcagcgattcttcccttctcactaacatagataccatcaaggaactttctaatatccttgttcttcacatggcatttctgatttattaaagctgctgatcgtgacacaagttcaatatcattaccatccaaaacaatctcatccttcaccttctcagatcgaactatggaaaccccttccaacatatccaccttacgcaccttcttctcgccaaggaaattacggatctcgatggacttgttggcattagtgatggaggcgttgatgggaaagtgagcatagacgaacctcattttgtaacggtatcccttggtgacgccggtgatgaggttctcgacgtggctgaaagcggtgcggatggcggcgctagtcttcct

SEQ ID NO: 753 - DNA, 581 bp, Gossypium hirsutum
  Clone ID: LIB3825-011-Q1-N6-G6
gacagaattgccatttaaattatggagcaaaacccaaaaacaagcttctgaggatttagaatctgtaaagaaaaaaagaagaagctacagtcagatccttaagatctgcccctgatctcaaccttttcggcatgaatacggtgtttacgcgaacagatagtcgacttctattctggactcttttttttttgtccgatacattttttctaatcgaaataacatccatgctcaaaaaatctaactaaaggcataacaagaaccatatcaaacctgaatgatctgaactccgtgaaaatattggagtttttcgttcttcatgcacgatcattgcttacatagtttggaacttctccttgactatccagaggcatgtattgtgccattatagctctgatttcggaatccatgtatgaccttaatcgatatttgtaaacaagataagcaccaccaccagccattgccaagccgatcaaaatgaccgacatggcagcccatgctgatcgtacttcagtaccgctcttacttatgcaggtatcatggtccctgatatacaaaagatctccattgcaagtgcactcgta

SEQ ID NO: 754 - DNA, 575 bp, Gossypium hirsutum
  Clone ID: LIB3825-011-Q1-N6-H1
gagaaaacgtagagtttaagttcccatgtggattaaggaaaaaatgggaatggaacaaagaaatttactaatatgaattttctgtaaaaaaagaaaagagctggagaactattaccgcaaggaaaaggcctccagagttctcactccaagacacaacacacaattcactgcactccaagcttctctactcttaaatctaatgtctctaatgtcacaaactataaaactaaataagtaaagttcgaccaagtacctaaaagcaagtccataatgaaccacattcctattgaactccaactacagatttgagaaacccaagcttcgcatcgacttctgcaggatcacacgtgtccttcaaggatgcagggggctcaattccagtgaacacatacagagctttcaattcatctatgcatgtctctcttcgggcggctttataccccactattgttctcagagcattcatttgttcccaaatcttctcctcacagtgaattgcctcattggatggggcatccgtggcattttctacaggaattatagtgttatctgcttcctgagcttttgtagaaaca

SEQ ID NO: 755 - DNA, 605 bp, Gossypium hirsutum
  unsure (1)..(605): unsure at all n locations; Clone ID: LIB3825-011-Q1-N6-H3
aaaaattcagaaaaacactggtatatctgaaacattaaactaaatggaaaacacaaattattgaggtttttctatcaaatcgaatcatgaatgtagaaatctggacgtcaataaattacagaacatgacgttatatagttatcgacacaactaagacatctaagtccaaaccatgtaacattactaaagaactgctattgctttgataaacgcttttcacttccggaagtatttcaatggacttaacttgtatgcattaatggctggaatgctctaatcttcgcacccctatatggtatcactgtgaaaactttgagatcaacttgtctacatgaattatgatatcatctagctgtgggcgaacagcagcctgaggctgaagcatccatgtcacaaactggtgaagagcttccggatatggtggtttaggtccagctggccacttgatctgtgcatttataatggccaattgtaggcttcctccggattctccaagtgcgtactcaaacggagataccccatacattattgcatataaagtgcatcccaacgaccaaatatcagntctctcatcaatatcagcatcgcttgggcaatcccacaac

SEQ ID NO: 756 - DNA, 559 bp, Gossypium hirsutum
  Clone ID: LIB3825-011-Q1-N6-H4
cgaaagagagcaattttatttaagagaaatagctacagcacggtagaggaccccaattacgtattaccactagactagactagactagaaagccatgaaatctccctcaatacaataatgacttttaatatgatggcctaataaaataacctgaagctaaacttagacttgaatttctacgtgccatctgtacatctcctccgatggcactggcaatgtaagtgtcaccaatccggtggctgagtcatagttgaagtgagtgtcggcattgtccacacaacacttcaacggatgctgagatgagtatgcaccaaacctcccacaaccccggactttgagactgatcgctgctgttggattccggttgttgctgagtgaagttgtcaactccgaggaaacctcgccatcaaagaactgcagtttctcattggatgtcatttgtacttcgaacttctccacggcaccgctgctgttgaacatgtcaagaaggccgattggtgcaaatgaaatggtgttggaaatttccttgacgggacagaagtggaatagttcatactcg

SEQ ID NO: 757 - DNA, 567 bp, Gossypium hirsutum
  Clone ID: LIB3825-011-Q1-N6-H5
catggaaaaccatgcattttattaattattacacgataacatcatccaaattattcatggctagctcttcaatggctgtgatgaccaggcaatttttcctttatcttctccatcatactcttcttctcatgttgatcatggtggtggtagtgctgctcaggcggcggcgttgttgcgttgctggttgttgtgattctggttttggcaacgtaggttacggtttgtgattgcccctcctcccccgcctccgtcttatgctttccacccgttagtttctcctttattttctccttcagccctttcttcttccttctaccgcccatcccatcgtcctcagacgagctagggctggaggcgttggagcgctgaatctcttctgtggtggaaacctcgtaatgcaggtgctgtggctgatactgcggctgctgttcctcctgctgcaggtactgaggccggagctgctgttgctgctgatactcagtagcggcggaaagagtgggatcatatcccatctgaccaccatacatatctgtctgcttggcggctacaccagagacgtaaacgggg

SEQ ID NO: 758 - DNA, 573 bp, Gossypium hirsutum
  unsure (1)..(573): unsure at all n locations; Clone ID: LIB3825-011-Q1-N6-H6
agcttaaagttcagcacactacactctttatgcgaaaaaactaccgactattaagataaaagattttgaactcaaaaccaaaacaaaatacaaaggcacccaaacatctgcaaaacattatggctctgctctgctacggtgatcacatgcggtggcaagtttctactgtgatctaaccctgtgattcaacaacatctcccggagctccgccgcatcgatctcagccccacaattctccggccggtaataccccgtaacagggtcaggcgcccaagctgaagaataagcccttgtctccgacgacgacgactctttcatcgcatctcttcgttccactttccccatcgccccaggcctaccaaagctagccgtcactgccgccggcggtgcacccgagtaacctctccttgatatggagacataaagaccatcaaaaatagaagcaccaaggagcttaaaggaagaaacagagcgagccatatttatttttacttgcttatatatgggagttgtagggtaaaaaggatgtataaaatntatataatatataacgatattattagctactgcaga

SEQ ID NO: 759 - DNA, 668 bp, Gossypium hirsutum
  Clone ID: LIB3825-012-Q1-N6-A1
tggccaccgcgctacgtaaggctttgggaagcttcttaggagcggccgccccccccccccccccccccccccccccccccccccccccctacacctgggggaagaaaaagagattttatttctggttcacaaaaactcttggggaggtggagatatcagtacattacagtactttaggattacatatataacgataataatacaatcccatcatagtatatatttatatcaaccctttttgcgaaaatagttgctctctgtcttgcattatagatgaacaacatatctatacctactatatgatatacgtgccataaaagaagcgctgcaaatcacacgatggaaggaaatttgacaaacttagaagctttgtgacgtactaactgctaaaatgatattattacgtatggcacatgggataatatagggtcaagggcatgcgaaaatccaagaggtctaaccaacactgggagcacgaaccaaaaatggaggaaggtgatgctccaaagtagctagaagctctccggcttgacttacttcttctaaagacccacctccaagcattcgaacagcttcaacaagctgccccctcagcctttgcgataacagacgaccacccacctcaacacattccctgtacagtggcatgtatgcaattacaaccctca

SEQ ID NO: 760 - DNA, 581 bp, Gossypium hirsutum
  Clone ID: LIB3825-012-Q1-N6-A3
aattgatgggttatttatattaattatatttctgtagcatatactattaaatcatggccgcaagtgtggacacctaacaatgattgtgactcattcggatagaaactattggttcgtgttacaacttaagatcattggtaactacagctccaacatcaacttctttctgggcttgagcttgagcttgggctctggctttagtgaactcaccgaagtcatcatatgtgattttctctatctccagtatcaagtctttgaatatcatttagagaagaagtgagactaacaggcagggcagactgtgcatcagcaatccagtggggtgaagcttgccctctcttctgaccatctaaccgcatggcatgttccttactgaaccctttttcctcaccttcaagaactaagctacgtaagtatttggcatttgcaggccctgtacactgaaccattttcgagaatgcgctttctctgttaactagcagttcctttggagttttgtgttagaatggagtcaattctgccttgaagatatcatatagctgaccagcatcaagtacaagaatccggtcacagtcgatgat

SEQ ID NO: 761 - DNA, 222 bp, Gossypium hirsutum
  Clone ID: LIB3825-012-Q1-N6-A4
aaaaatgggctttttggagggtccagaagccttctccttttcatagtacaataagaatttatgagcaggtggaacttgcttcaaacgctaacatggcaaccaacgtggttcaaccggatcttgccaactaatagttggggctccatcaatgttttatcgaaaaacaggccttggtttttaagcaataataaccaaggtgttaaaaagattagtactctcaaa

SEQ ID NO: 762 - DNA, 562 bp, Gossypium hirsutum
  Clone ID: LIB3825-012-Q1-N6-A5
acttaagtacttaacattttattccttaacatagaaagacaaaaaacgcactcaaaagttcatacaagttattgcactacaaaacaagggtctcctcctttacataggtcaccatttttatttcattacatgcctgcttaaaactagaaaatttcacattagtccataaacacgagactatgtgattattattgcctttaactctttattcagatgcacgctgcctctgtcgagacacgaagtaagactcttgtgggttgctgttgaatatctcatccaccaacctcgatgacaccccaaaggccaactccttggcttggctatcccattgtctcacatggttgattttcccagccacgaagatcctctggttatggtctgggttaatgttctggttgtaaagaccgaacccagtcatcctcaggttctggttttgggatgcaacgaatgtaactggaaagtttgctgggactacaaatatgtctccacgcgacaaccgggaccttattttcctgtattggccacttctcctttcctcttcttggtcttggtcttcttcttc

SEQ ID NO: 763 - DNA, 588 bp, Gossypium hirsutum
  Clone ID: LIB3825-012-Q1-N6-B2
aaacagaaaagggaagaattgttgtctcgagagaaaagtgctattatgtacacagccatgttacaaacccataaaaacagcagaaactattgctccactttgcccataatgaggaaaaatactacgtccaaaccatttctcccgtcaaacacagtgatctaagaatcaatattcattaacagaaaagtaaaagacacaactgaacaaagaaaaataaggggggaaaaaagcattgaatccactgaacagatctgattaccagtatgtcaagccaaaaacgccacatgctgacatcactgtccaagatccttagtttgcaataatttcaggatactggcaatcttcagttttgtagaaccagtttctatgcaattgatgtcttgctagaagatggagacatatgaaagaagccaaagatttaaccaccaccactaacatgaaaccaagttaaaccatgaaaaaggtaccaatggttgtttggcctagaaccttcgaactccgatcaaggccatgagaagcaaccatgtaagttagagctgcataacgttcctcgttcaagtagcggttttcctctatgcatttcaatat

SEQ ID NO: 764 - DNA, 468 bp, Gossypium hirsutum
  Clone ID: LIB3825-012-Q1-N6-B3
aaccaagcatgtactttatgttactccgcgaaacaagagaacctagttcatactaaaatccaaactcacaatgggacatcagagagagagggttatttattctattacaaaaaaccctctccttttcagacacagcacatgacattgaattgccattgcaaaggtacttggcagacttaatccttctcttacttaacctttctgatatggaaaaggctatctctaatgactgcgatgcatttaatcctacttcgcaatgcgtgtgataccgagattcaagtcatcaaaagtgaccccgtttgaccctgcgatacactatgctacgttctgccccgtcatctgcatatgaacttctacatcatagctcactttttgttgatgaacatcgaacaatgccctgaaatcagatctgcttgcatcatatggacgagttttgataccgcctggagctttaattgtgttcccatg

SEQ ID NO: 765 - DNA, 567 bp, Gossypium hirsutum
  Clone ID: LIB3825-012-Q1-N6-B4
ccctccccctccccccccccctccccccccttccttcttttctttgcatttaatacttgactaaacctatcaaagagtcaggcaacccgtccagtgtgataaacccaatccgtatatggctgaacaccgcatgaattattattaataataaaatattctttttatttcaatttaattataaaaagaattttataactttttgaatagtaaaacgggctgtcagtccaacacagctcatggacaggtctacatgttacattaagctatagttcaaggggcaaaggggtaggggagattaactttaaaccctatcactcctaaggagtagtaaaaactattagagtaagccttggttgttttcttcttaataaaaaatgggtccttacctaaaggtgttcatgagccggttcaaggcctgattctatgaaaactcaggctggagcccgagccaacctgcccaaatgactagttttaaagttttaaaaacaaaaaatatttttatttaatttaattataaaaatatataaatattaatatagaattatatttattattttaaaacagtaa

SEQ ID NO: 766 - DNA, 568 bp, Gossypium hirsutum
  Clone ID: LIB3825-012-Q1-N6-B5
aagactaaaaacagtttctttattaaggcaccagaaatatcttacagaaaacatgtcccgagtacgaactccgtgaatagctttcagttcacacgaagcagcacacataattttcaccatcatcaatataacctattcactgtttcttctgctgagacttgagttccttcaccctctcctctgtagccttcaacgctttcccatatttgcttatcaactgcagagggtaacgagttcagggttattacaactctgcttaacaacacctagaattgctatttccatatgtcaaccatagttattcatctttatgcagtttcagctttgattaaaccaagaaagttgcctgaggaacttttctagaacatactatgaaatctatagataattcagcagacaggggtaacatccttaaaacttacttcatcaacctcttgaggagtaattataaatggtggagacatcattatgttgtcccctgcaacacgtactagcaacccatgtttctcacattgtgctccaaaatatgtaccaacccctatggaggaaatcatcaataatttgccca

SEQ ID NO: 767 - DNA, 579 bp, Gossypium hirsutum
  Clone ID: LIB3825-012-Q1-N6-C2
ggaacagaacacagaatattattattatgaatttaagccaagttatacagtgtggactgaattgattatggatgctgttcggctcggtttataaaaataaaaaaaccaaaatgttacacattaaccatagaaaaagaacaaaattaaaccattaccaccctaacttattgcccctcccaaaaaaaaagtgcattagtctgaagacgaagagtttcatatgtcgatttccatgttatctatcagcctaaccttgccaaaccaagcagcaatgcaaaaaacaacaggacccttaatctcttccactgacttcaaattctcctgatcaactatctcagcataatcaattcttcccccagcttgagttattgttaggatagctgaatcctttagttctctacatttaacttgcccttctttagcagcagctttagcctttgacaatgacctgctaatagacaatgccttttgcctttcttcaggggagagatgcacatttcgtgaactcagcgcgaggccatcgctatcacgggttatttcagaccccacaatttcaatggcgaaatcaagatctcgaaccat

SEQ ID NO: 768 - DNA, 531 bp, Gossypium hirsutum
  Clone ID: LIB3825-012-Q1-N6-C4
attgatacaaattccgtagcatagccctattccacccaagaagaatgccagccccgctggttttgactgaacaccccaacatttaaaataaaaaagacaattccacaaggaccgataacagccggcaagaggaaaaaaagtcaagcacagctagggggcactgcaaatgcatgaccctacaacacgaccctttcccacatagggataccctcttgcataatacccaaagggataacgaccaccaccttccaggcccacctccacgcccacgttcaccttgttgtgtagaaaaatcaccaaaggtctaaaaccctaacttcattgggtaaaaaaatcacggcctttcgttttgcaagaaaatatcaagtgcattgcaggagagaggctcaaaaaagccatccttattgtaaacaggctcccgtttgaatcttaggtattacaccatcatcttcatcttgagaaccatattcatcaacggcatctgctgctttatccttagaaagaaatcccctactgaaaccaagatgaccc

SEQ ID NO: 769 - DNA, 543 bp, Gossypium hirsutum
  Clone ID: LIB3825-012-Q1-N6-C6
attgaaaatgcctatacaagcaagcaatctcaatgtcatcccattttcaaacacattcagacttcgtcacatatatttacacacctttgtctgctacttattcacaaccttatttatatgtgctttgtttcatcttagattaacacttcttccttaatttacttggtggtggaactagcatctctaaatatcctcctccatcccgacttccggtcaccactgtcttggctattcggccggtttttcttcagtcgtgcgcttatcccgcgccccatcaatatagtgagcttcatggctgtaaataaaccaaaggcaattgctagtggtctcactgcccaatggaaatcctcaacatgatggtatttctcgactataccaggacaagtatagaaggacaccgattccacttcgttggggtcggctaggaatctgttgggttcgtttccgagaacaaatctacctggaaactctacaacgaggcacccgtttggaagtatttctgaaattcttccactgcaccatgttcctccactcttccgtggc

SEQ ID NO: 770 - DNA, 606 bp, Gossypium hirsutum
  Clone ID: LIB3825-012-Q1-N6-D1
ccccccccccccccccccttctttttttttttttttttttttccttccaagtccggagcattagacagttttgatctcataaagcatcttacaccttaatgacaaataagatgatgttttattgtacatagtctcactcaaacactgaaacatctccattccaactgcatgaagcaattacattagacaagatagggtggaaagcgatgtctacacaagcttcctcgtatgccttgatcttcttgacaagcaccgacgatcgggagttatacaagtatatagaaccatctgaggaaccagaggcaagcttctccccatccaagctgaaattgcacttaattggaaatccaaacactccatggctttcataccttttatacttgtctagcttgaagggaggttttgaagaaaaaatgtataattcccatttgattgggccacaaaatagggatcgaatggatggtacctaacacaaggacaagtgtaggcttctgcataaacctcattagacagtggaacctgtctagagatgtcccagacaataatggaattttcactgatgttactcccggaaacatcactggaagatcaaattgcttcccatca

SEQ ID NO: 771 - DNA, 511 bp, Gossypium hirsutum
  Clone ID: LIB3825-012-Q1-N6-D2
ccccccccccccccttaccttttttttttttaacaaagacgattatagctaagataaaaggaaaaaaagtgtagaaatatagaaattaaaaaaaaaaaaaaaaaaaaaatttaaaaattttttctttttttacaaaaaaaaaaaaaaaaaggggtctttaaaaaattttttttggggtataaaaaaaaaaaaaaaaaacaaacaaatacaaaaaaaataaaaaaaaaaacaaagagagggggggatcccacacacacatacaaggggatttgcaacaaccccccaaaaataaacctttaaaaaagttttttttaaaaaaaaaagggggaaaaatcctccctggagcaattgagtttaaaaagggggctaaaaaaactaaacccccctcaaaaaaaaaacaaaaaaaaaaactcccccccgaggagggccccccttacaaaggtggcaaacacccttgattttgctccacaaacatatttttttgccccctcaattcaaaaaaggttaaaaa

SEQ ID NO: 772 - DNA, 600 bp, Gossypium hirsutum
  Clone ID: LIB3825-012-Q1-N6-D3
gtgctctcctttaataaccagagtatcgtcctctaccgaaaccttcacatcctctttcgtcagtcctggcatgtcgaatcgcattttgatctcttgttcatcgtctttgatatcccacggtgcacgcacctgtcctcctgttcggctcctgctgcccggcaatatcatggcatcctcgaatatccggtccattgtgtccagcatttgacgcattgatctcaaaggagacaaggggtccaacaaacctgtcatcaatgaatcacgttaagatagtgtgaaaatggatgatgaatggtacgtacccaaaatgcaaatactttccaaaaggagagacatcgacagccaaccctctaggcctcttctcaacagctgtgccttggttgtctttgttgacatgcacgtccactgacgtatctttgttattatccccagcagcctgtgcccttacaagagagagtcggctgatgcagggattcttggatggaaaagatcagagaatggcgttacagctttaatggaacaagaaggcttagctctgtctgataccaatggagaagatgagcaacacaaagttgaagccgccatttttatattaaacgc

SEQ ID NO: 773 - DNA, 575 bp, Gossypium hirsutum
  Clone ID: LIB3825-012-Q1-N6-D4
tttcttttacaaaattctggttacctcaccggtagactacccaacagaactaaaggaagcagtgtttgtatgtacatgctacacactaacaacaataatgcactaccaatacctaaccctcatttttatttgccaggccttctttagaatataacagaaatgaagcatagcaatgagcatgcctccttcattgactgtatgtaatatctagtttagtctagatgagctatagaaatcttaaaccgttgagaagcttctgcaatgttttacgaccccactggacatcactttgcaacacattgctgtgaaaaggctccacatcaggaagttcttctttggctactgggggctcctgaatatgctggttgggctgctcctcatcgtccttggctactgctcctgaaaagcttccggttgttcaccttcaggttctggcttctcatctaactgaatattattatgctcagacaaattgtgatctaaggcttcatcgaccccaatcaatgcattaattgtactattctcatcatcactcaacatctcttcttcagttgacactgttgttaatggaccca

SEQ ID NO: 774 - DNA, 582 bp, Gossypium hirsutum
  Clone ID: LIB3825-012-Q1-N6-D6
atcagagaattgtttataaagtacatcctgaatttacaactctaaggtcaacaaatatcaaatatataaacaagttacaacagagtcactgccgtgggtacaaaaatccccacaaagaatggtcagtaaagtctaaatcatgccaaaaaatatcccaacttccaccttgactgcatctggtatcgcttttgagtctcaaaacacctccaataactagctctaaacgaataactcttgtactgagaaactgtcgtctcctcacatcctaaaacgatcagtaaactaggaggcagagtcaattctatgagttaattgaattggttgcccaccatttagatactagcaaaatcaatactgccccagctgaatcagcatcacactaatatcatcagatgagcctcgggaaacagaaaggtcgacaagctttttacatgcagacaatggattttgcttattgatgccaacacatgaaggacgagcaatgtcaactgcttcttgattactaatcttatcccacaagccgtcagaggctaatattaagaactcgtattcaggtttgatggtaacgatctttgtctctgg

SEQ ID NO: 775 - DNA, 555 bp, Gossypium hirsutum
  Clone ID: LIB3825-012-Q1-N6-E1
aactatcaaagcaggtatccttaatctcaattgataaaaagatcaaacaatcgattaaaagagaaacactacttgtctgcaaggtttaaaaaaccaactaaaacaacaaaaccaaatccaaaattttgtctttgatgcaaacatcgcttaaaagcaaagaaataaatatctgcctcgtcatactatagattatgttatgaagaattcaacgcttcttagacacaccaacagtctttcctcggcgaccagtagtcttggtgtgctgaccacgtacacgaaggccccagtagtgcctcagaccacggtggttcctgatcttcttcaagcgctccaagtcatctctcaacttcatgtcgagagcattggacacaacttgggaatactttccatccttgtaatccttctgcctgttcaaaaaccaatctgggattttaaactgcctcgggttcgccacaatcgtcatgagattgtccaattcctgtgcagtcagttcaccagccctcttgttcatgtctacatcggctttcttgcaaacaatgttggcaaaacgccttc

SEQ ID NO: 776 - DNA, 604 bp, Gossypium hirsutum
  unsure (1)..(604): unsure at all n locations; Clone ID: LIB3825-012-Q1-N6-E3
attcaaagatttctcaaatacacgngaaaaaaaaatcgagtttaagtgtgtttagaacctcaaattatcaagtaatgaagatccagctaatccaggcaaaataccatttcatgttaatctaatttacaacatttaattctgtttttccccttaataagtaaaaactgtggtgaaggatgggagggagatctcaaacctttttgacgctgttgatttcctgccgcataaagtacaatgacatataacccgaatttcatccccagctggctaaaatcatgaggaaggctcctcttgaagctccattttgcatatggaatattccctctcgaacaataaaaattcctgcaattgttgctgactgaagagattgatgaaccctgtctccgaactcgagactagctcaatcaactggtcatggctttcaaaaggattaccagactccataagtgaaacagaaacctgcatgcatcggagaatgacttctggaatacaacacctacgacagaggccctgcacaatatacgttgcaggcccttccaaggaaccatctttgcttgaaaaccaagcatctaatcgggatatctccaatgtaactcctgcttga

SEQ ID NO: 777 - DNA, 599 bp, Gossypium hirsutum
  Clone ID: LIB3825-012-Q1-N6-E4
ttttctttttcagaaattttgtatgtaattttttttatttaataaaaagagcaaaatataattttacaattaatagagagatacatgtgtatatatatgtatgaatctaaagtttagaacatttgatcaagaagaaaactaaagccattgcaaaatccgtcctgatattattaggctgaacaacaaggcggaaaatgtcggttccgaaggcgacccctctgccaccctctttccgctttatctctgccgctaacctccgcctgtcatccaacacggcgcaacgccgtcgggaataagacccctcgatctcgtacattgttttgttattccgaccatcactctcgccggcggtaacgtaagccaagcacttgttgttaaagatgttcagtgatttcttgactgaaagtcgaggaatcgccatggtttcttctccttcgtaaactagccaattgtcacccagtcccaggctcattttcacgagtgagagctctcaatccttttttccaatcccatgagacatgttatagatccctcgtccgattaaaaacaaggaacttgcagctagagcggcaggaatggcgacagatgtgatcttatcg

SEQ ID NO: 778 - DNA, 552 bp, Gossypium hirsutum
  Clone ID: LIB3825-012-Q1-N6-E5
cccaaaattcatactgttctgtttatttagaagatatgcaacaaagaacgtacttgttttacaaaaagacaacacaaacagaagttaaaataatgaaaagcaacgcaaatattccacccctatattaagggtatgtgcagtgtgagatcacattttggttttgctggagcgatcacaaatagcgccttcctccccaacacgcccaacatcattgaatgtttcatcagatgatctcacggtagcatcaacggctcctgccggggattcttcaaccttaatcactatcgtctttgaaagcccttcacgaccttggcgtttcacatcatcatcgtaagtcttccttctaccttaataacctttaagcttaatcttttccatcttctgtctagctgactccgtcgtttcactcaatgtttccctggggttctgggcagtctcggatgtcttctgcttcgtttcttccgtcttcccagtgaggaaatccatagctttcttagcagcgtttgcagctgaatctttaaattctccaatcttactaactgttgtatcctt

SEQ ID NO: 779 - DNA, 580 bp, Gossypium hirsutum
  Clone ID: LIB3825-012-Q1-N6-E6
cttctccaaatagcaaagcatcacagatggaaacttggtgaatacatttctttatacagcttttgagaaaagaaaaaatgaatgaagaagaacaactgaaactacagcacaatgttgctgggaaattcaacatttatatgaaatattcccatttgagatactctaacactagttacggtcagcaatttaccatatgtcagcttacacaaacaatccatgcccacactttaccatctctgcaccacaattaaatttcatttctttggttgcacacaaattgtgggaaccagaggtaaaataaggtgagagtttttagatctcaattcaacttacattgccgttttcaatcacctctggaaccttgtaagaatccaccctcacctccctcagttgtaagcccgggaacaacgaatccaattccctttgaacataacgtgcgcgtttctttggccgttttcgaggaagacgcccaaccatcaccatgaaatcctcctcgatctctttcttcgacagcggcaccgagaatttcggtcgtgctcttttgttctcgtctgccgccgtcgccgacgctaccgacggt

SEQ ID NO: 780 - DNA, 564 bp, Gossypium hirsutum
  Clone ID: LIB3825-012-Q1-N6-F3
gccaaaaaagtcgattcaatattgtcgatttagaggaaatttgattcagctgcaattttcaccttaatggttgagcatctatataacaatttttttccctagaaatagaaaagaagagtaaacaatgggagcagcagcagcaattaaaatgcagagtcatgcacaaaagggtaatcattacaacaggaaacatctctcacctctcatctcttggaagaaagaatgcaaccaattactagataattcctgagctaaagtagcaaatgtgacaaaacactgttcatctctaaacactatggccggcccaaaatccgggcaaaatcaggatgtgaactcgaaaggctgagggggctgaggttcatcatcaacagccatagctaatgaggaactctgttgacctgctgctgatccagccgctggagatgctgctaatgcaggtgcatctgttagggacagtgcctccggttcatcagggcgcaggtctctaagaagaacaaaccctgatggtgccaacttcacaggcgcatatcggctgtcttctagaaacttaatgaacttctcctg

SEQ ID NO: 781 - DNA, 506 bp, Gossypium hirsutum
  Clone ID: LIB3825-012-Q1-N6-F4
agaagggcacagacccaaacttaaactaaagaacaaagttaataaaaacaaagccgggtgataaaagataaaaaaggtcatcccacccaattatattcaggggaaaccaaaaacaaagcgggccgccaaacctaagaatacaagaaccaacacgtaacatgacaaaactaaaacaaaacccacccaaaaatagcaatccgccagagcagtaaaacagaacacacaactttatacagcatagggacagagcaacaaagaacagaggaaaaaagggttcaaatctatgataaaatcgggaaacaccaaaaacgggaaagggcaaaagacagcaaccttgcaaaacagcaaaaacgcaaacaaaaaacaaagacgggcttaaaaacgcaaaacaggggaaaaagcactaaaatctatgaaaaatgtttctttaacagcaaagaagccgaagaaaaaaaaaaacaggcaaggaatcaccttcgaaaaggaagagatatcggcaccgaaaa

SEQ ID NO: 782 - DNA, 559 bp, Gossypium hirsutum
  Clone ID: LIB3825-012-Q1-N6-F6
tttttttttttttttttttttttttttttttttttttttttttttttttttttttttttttttttttttttttttttttttttttttttttttttttttttttttttttttttttttttttttcccaaaaaagagagagaaaaaaaggcccccgggaaaaaaaattggaaaaaatttaaaaaaaggggggggggggggggaaaaaaaaaaaagggcgaaaagaaaagggaaaaaaaaaaaaaattttataaaaaaaaaaaaaatgggggggggaaaaaaaaaaaaaaaaaaaaaagtttcattggggggggccccaaaaaaaaaaaaccagggggtttaaaaaaaaccggaaaaaaaaagttccaaaagggggaaacccaaaaaaaaaaatttgggggaaaaaaccaaccggggggaaaattaaaaaaaaaaaaaaaaactctcagccccaaaaaaaaaaaaaagggggggggggaaaccaaaaaaattttgaaggggtaggttgggcaccaatttttggaaaaaaaccaccccaaaaattggaaaaaaactcccccgg

SEQ ID NO: 783 - DNA, 424 bp, Gossypium hirsutum
  Clone ID: LIB3825-012-Q1-N6-G1
gttgacagggaaaaaaatatcccagagcgaagctggaaaacatacttgttttttaaaaaataatacccttaaaaccgaaaaggcctatcaagcacccccccttgaaagctgggtaaaaaaaaaaggaaagtgcgaaaataattccctttccctaacatcatgcagacaaaaacaaaaaggctccggtcatagaattcccacccgggagggaaagggctcctaaacacccaacaccccatttgtaaagtagcccgaaagactgctatacgcttaaaattttggatattagcaagatttaaaatgtttgcccggacccttcataccataatctaaattggccaggacttgttcaattttttcttttaacttttcctaaaaaccttgaactttggttggccatcgtttcttggccataggaaaagtg

SEQ ID NO: 784 - DNA, 584 bp, Gossypium hirsutum
  Clone ID: LIB3825-012-Q1-N6-G2
gacttcatcaatatttcataagttcaaaaagtacataaataaaaagaagatcatattagatctcttcaagaaaaaaaagccttacaaattgaaattaacttggtttgcaatatgaaaatatttaaaaacaatcatcagatcagcaatctttttaaacccaatcacacataaaatatatacactttgcagatcatatatatatatatcttcttcctctacatcaagagctcattaacccacccgaggtcaagatcatgatccaaaacgacaccgtttccattgtttttctcatcatcaccaccaccattgaaatattcaccagaaccagaaggacttaccgttgaaggagctcctttgaatgaaacatcgaaccatggaatgtttgtatttgcagtagtagccattggtgaagatacttcggacaaattcatggttcctaaataactcatgacttccttcaacaaaacatcatcgtaactgcttgtcatttcggttccaaatttactaatacgatcaccgccgtaccttggtgttctttgctggtgttttaagggagatagaggcggtgacagggatgggggatc

SEQ ID NO: 785 - DNA, 591 bp, Gossypium hirsutum
  Clone ID: LIB3825-012-Q1-N6-G3
aagatcaagacccaaaaaaaccatagatttagaaagcttttcacagacgctaaacatggaatctaattacctagacttgatagcatagtagggcagatcttattcactactgcaaaaccatctgcgaatggattaagactaaatcaaccacactttctttgcagcccttctgcggtcacggccctcatcgccacctccttccgtttctttttcctctggttgtcctctttgtttctccctctccctccaaccctttgctgcggcttcttctgctctcctttgcctttcttcttcctgtttccaagcttcctcttgctctctccttgcttcttcttctcttctcttctttgtctcccttcttgtagctccctcttcctcttctctccttcgagcatcctcttcctctctccttctggcctcctcttcctcttccgtactagcttcttcttcctcctctctcctcctggcctcttcttcaataatgtcctcttttaactcttcttcctccctctctatgctaatatctcctttaataacttcattttgtactccattagtttcttcttcttcttcttcttcttcttcttcttc

SEQ ID NO: 786 - DNA, 561 bp, Gossypium hirsutum
  Clone ID: LIB3825-012-Q1-N6-G4
ccaaatcgagttcttgaatacacccaaaatttacagaaattggaatctctcaagccacaagtaacttttaagtacaaaaggctcaccgatgttacaatctgcgtatccaattagtatcccaacacacaggcaaattaaaaaccaggaaatcgcaaaaaaaaatggagtttcatcgttcatgtaggaagcgtaaggacttgtttgattactcttttaaaccctgctattttctggtaaaggcaacacaccatcgaagaaatcaccaaagtagccacgcggttcgtgtactaaccttgaaatgatgtctctaagtgtgatcactccttccaagttcccgtcctcgtccgtgacgtacactcgttggatcttctcagagtcgagcttttgaatcaactctttgactgtttcatccctcttgcaagttatcatgccactcaacattggcgacctcttctcgtgtttctccaagtagtttcgaaccgctattaggaagttcttggctgtgattgatctgtagtcacggtatatatctggtgcggttaaaaggaactgtacatctcg

SEQ ID NO: 787 - DNA, 545 bp, Gossypium hirsutum
  Clone ID: LIB3825-012-Q1-N6-G5
gaaaaaaaaaacagttctcatcattcttcgtgatgcattaacatttcttaagaaccccaaaaaaataaaatctaatcagtaattaacccccaaaaaaccccaaaagaaaagggagccatatcatagagtagatcctgggcaggctaatttcatatcctcatatagatataacattcacagagctaaaactatagcagtatgttttataaagggtataacaaaccactcaaaatatagatttcttcatcctctcctctctccttggcccttttcttcattaatgatctccatcacctttctcttctcttctttattttttttgaactattcatatatatatatatagatatatagatatgtttttgtttatttcctttgtggtgtgatttaagcagctgcaactgtgctagttcgaatagagtaaccttgagcttcattcggagatgtagactccctttggcccttttttctcatagctttcactgaggaagaaaggttcatgttcttttctttagcttcatctatctcgatttgttcttgtctgc

SEQ ID NO: 788 - DNA, 569 bp, Gossypium hirsutum
  Clone ID: LIB3825-012-Q1-N6-G6
gcttccaaattgattgccattaaagttgattatatacatatatatagatagacagatagatagattgatatacttcaactgatgacacttaatccatcttcagtttgaacaaacaaagcattggaagttccgacaaaaggaaacattggaaagcctaagataatatcaaagagctaagacaagtagctgggagtttcactccatgaagaacaaaagaatcttaccctttttttcagttctgaattgcttctctgaaaccaagttcttcggcaatcatgacatgttttctttcgtgtcgtgtttatcgcaagtgtaaaacagttgaccaaagagaataacaaccgcaaaatagctcatcccattacagtttcgatttgaatctccagtcacttctaactccatcccattcgtctcctttatattccgacccccaacataaaattcttgatttcacctttatggaaagatttggcactcgaaacttttgtagagatggaaagaatgttgattggaaaaggtggttttaaaccgtaacaaaaccttaaatcttgaacacttgatgcaataag

SEQ ID NO: 789 - DNA, 588 bp, Gossypium hirsutum
  unsure (1)..(588): unsure at all n locations; Clone ID: LIB3825-012-Q1-N6-H1
atatatcataccttcaagtttggttcttttgactgattacagcccaaatacaacccatggttttacaaaggaaaatacataataaaattattatactatcaaaggtaaatttccgaaattttaaaccccttcggatttagccattttatgttggaagacattctatcccccatggttttcaaaaacaaaacctgttattagttttaacacggcaaagtcaggtaatagtttgctgtgatttttatttataggttttttgttttttaagatgggattttaactgccttccaaacgggttagtaagataggcatctacagttgcggctctgttagtggaataacattatacagccaagtccaagagttgcttggctgcaaggttaaaaaatagatccctggaatcggctttattcgaactatttcacagtaggaatgaccgttaagggccactcggtcactgagttcccatttgcaccaactgcaatggtgacttgagaaacttctttagtgcttctactatgttagcaaatgacggccgttcagccggatcgtcggnccaacaagattccatgagggaagccaactttg

SEQ ID NO: 790 - DNA, 479 bp, Gossypium hirsutum
  Clone ID: LIB3825-012-Q1-N6-H3
gttacaccataaccacctaaactgccattatccacatatctttattttcacatcataaaaaactgcgaatttcgttttcagggacagcttgcaacatctagcttgcattttttcaaatacgcacaagctaatggtatactgccgtctgttacaaacctgatcctagatactaattaacagtcatgttcatagtggtgtaacacctaactatgcgttccctgagaaccaagcctcgacgagactacatgttttatggcagagaccttaatagcaataatcatttcatgaccttattctaggcagatgactatgcttgaagtataaaatacacactacaggcaccacaaatacgagttggatactgaccttcaatgctgctgctacgttgatcgacaaaagcatcgggttttacttaatctacattccaatcataaatcatttgctcaccactgctagctccagcttctggaacagcttct

SEQ ID NO: 791 - DNA, 590 bp, Gossypium hirsutum
  Clone ID: LIB3825-012-Q1-N6-H4
aaaaaattgtccaattttccatgtaatgggctaaatttgcccagcccaatcaaacacaaaaaaatcaaaacaaaatataaaataaataaataaatataaaacccaagttttataacagtccaattacatggcctaataaccaataacaagcccagttacatgacccctagccgaaatttgcaacaaacccaaatggcccgaatgcggaaaccaaggcagaaaccctagcaggtccaccatgcgccgcagccaagccccggcctccatgcctccgtacgccccaacgttcagcagccacgccacagccctccctcagcgccgtacgctccgtacaacgcctccagcaaccacgccaagcctccgtacgccagcacagcacccgtacctgcgaaagagaacaaaccacagcagcaaatacatacaaaaaagacaacagcaaaatgagaatgtgtattcaatttttatttttatttttatttttgaatatttcttatttctgtttcagctataaagccaaagcctctgctcattgtaatttttttacgcacaaatacgcaacaaaaaaaatcaaaaactcaagcaatacaaaa

SEQ ID NO: 792 - DNA, 574 bp, Gossypium hirsutum
  Clone ID: LIB3825-012-Q1-N6-H5
aaaaaaagcaaccctgtaattcctttaagcaagaaccttataacaaaatgtagtgattgaaaaagcatttcataaatggtcataaaattgaaacttaagctagtactaatattcgctttatatagctaaaaatctttgtaaaaaacagcaatagcttgaaactagaatccgaaaggaggcaacaaagataagccgtaggaagcatacagagagtcctgattgtgccacgcatgctgtccagtagagaagaactctacagaaagtcatactgtgtagcgattcttggcagatctctcgtgcgtctttgcatcatcatgaaatatgaagccgatagtgtcgttgtaatcaagtaactctttccactgtttcccgatgctcatctgcgcagtttcattggcagcattcttggtccacaatgctattctgtcctgcttgcctctcacattgacaactgctccgcatatttcatcaccgtactcaaactgttcccctatcaaagccagcaacgtgtacaaccaagacgtatctgatttccccttctggaaaactacagtccacttgcctccgttagcac

SEQ ID NO: 793 - DNA, 577 bp, Gossypium hirsutum
  Clone ID: LIB3825-012-Q1-N6-H6
cacagtaaaattttgattgttggatcaatacattgaaacttattagatattcttaattatgatttcattaagggactcatccattaatccctctcaatcatggcacttcgattttttcacaaacttcagaaaacgtaaaacaaaacaaagtatcacaaaattaattgtgcttgctagaactgtcctcatgacctccaccacttccgccaacaacagggcggctctcgttcagcgcttcggtgaaggcccctgtaccttcgtctatcatgaccatggttgcctgttcaatgttgaaatcattatcaattactgctttaatgaccaggttcaccaagtcttcaaccagttttgcctttgcttttaaatcccaaatcattctcttcagctcttcgagtgaactctccacagatagtagcctcacctcgatgcctatttcctctcttgcaatgtccctagaactgccctgatgccttccgtcatttctggcagcagtgcggcggctcccgcgagattgagcctcgttcggtacttcagtgaaggcctttgtagcttcgtccatcaaggccatggttggctg

SEQ ID NO: 794 - DNA, 571 bp, Gossypium hirsutum
  Clone ID: LIB3825-013-Q1-N6-A2
gatacctaatgaataatttgattagtattccaaaaattttgataatataagagtcgaattatatccaaccaaatttgaaaacaaatgcaaatgagaaaaaagaaagaatgcaagctcaacatataagaaatggttaggtggcgatgatacccgctagaacatcaatttttcctcgtgcataaattgtgtaaactaagcggagagcgtcaagccacccatctagggattcccacgaatcagcaaccaagaaaacttgaccggatgtggtattaatgcagaggccagcacctggaggtaaagttagatcagcagaggctgatacagaaatgatgtctggaatatcaactctgatagcctttttgtccgtatttcctgcatccacgattcttccagagaggcttcgggaaacttgtttctgctcaactttgatgacctgttgaagtgcttcttgattcagaaagaactctgttctcttccaatcactatgaggtggaaatgtgtttccgaatggtggtgcagtcagatacccatctttaagaggggtaaaggtagcattgaatgaacaagcttc

SEQ ID NO: 795 - DNA, 559 bp, Gossypium hirsutum
  Clone ID: LIB3825-013-Q1-N6-A3
gtcatcaattgaagggtaattcaaatcaaataattcgtgagcatatacgagaaattcatggccgcaagtgtggacacctaacaatgattgtgactcattcggatagaaactattggttcgtgttacaacttaagatcattggtaactacagctccaacatcaacttctttctgggcttgagcttgagcttgggctctggctttagtgaactcaccgaagtcatcatatgtgattttctctatctccagtatcaagtctttgaatatcatttagagaagaagtgagactaacaggcagggcagactgtgcatcagcaatccagtggggtgaagcttgccctctcttctgaccatctaaccgcatggcatgttccttactgaaccctttttcctcaccttcaagaactaagctacgtaagtatttggcatttgcaggccctgtacactgaaccattttcgagaatgcgctttctctgttaactagcagttcctttggagttttgtgttagaatggagtcaattctgccttgaagaatcatatagctgaccagcatcaagta

SEQ ID NO: 796 - DNA, 574 bp, Gossypium hirsutum
  unsure (1)..(574): unsure at all n locations; Clone ID: LIB3825-013-Q1-N6-A4
tgagccctaaatctggcctttttagaggactccaactaagcattctccttttcataagtaccaataagactttgagcaggtggaacttgctcaaaagctaacactggcagccaacgtggttcagccggatcttgccaactaatgttggggctccatcaatgttttatcgtaaagcaggcctcggtttttaggtaataataaccaaggtttaaaaagatttgtactctcaaaagcttctggttggactcaatggatcataatcataggcatcaccggctttgacaaaccgtcctttcacgcgcttcctcacatcagcccttgctttgcgagaagcatatctcactcgcttctcaaacattcgtgtcttcttcttttccttgtatcgcatgacagcatcagttctagttgctgacgtgaaggaggtctcagtacatggaggacaccaaggaggttctcccatgagaagcattgacgacgccccgcaatcttggtaatctcctgcactactctctccgggatggggccgcctggcagtaaaatataggattgaatcggntttattgctcatcatgga

SEQ ID NO: 797 - DNA, 481 bp, Gossypium hirsutum
  Clone ID: LIB3825-013-Q1-N6-A5
aaattaaaactggggggccaatctttttattggcacaactatttacccttcattaatacaaacattaaagtcttaagcataatcatatcaaacataacattaccctaatttaaactttttaatttctaataaaaaagctgaggctgttgttgatgatgtgtcacaaggggatcaagcatccaaaggttcactgactcaggctcagcgcttccactcaactcagttgtcatctcatcaggctccaaacccaggaaggactccaaactcgagatttgctccttcagctccatctcgctttccattgcttcactcggcctgtaaactccattctcgtaaccaaaacccataaaaggttgtggggttggtgggctcttggtttcaaaactcgggggagtcaactcaggagccatcatacacctttttttaacaggaggctgagttaggcgtggagtttgagggaagttgagcttggctttgtccc

SEQ ID NO: 798 - DNA, 543 bp, Gossypium hirsutum
  Clone ID: LIB3825-013-Q1-N6-A6
ttttttttttttttttttttttttttttttttttttttttttttttttttttttttttttttttttttttttttgttttttgggttttgggtagggggggggaggggggggggaggggggaaggggggggggggggggggaggggggaaagggggggaaaaaggggggggaggaaagggggggggaaagaagggaaaaaaaggaaacgggggggaaagaaaaaaaaaaaaaaaaaaaaaaaaaaaaaaaaaaagaaagaaaaaaaaaaaaaaagaggggggaaaaaaaaagaaaaaaaaaaaaaaaaaaaggggggggaaaaaaaaaaggaaaaaaaggaaaaaaaaaggggagaaagggggaaaaaaaaaagggaaaaagggggggaaaaaagggaagagaaatggggcaaaagaggggaaaagctttcccccagggggaagggaaaagaaaaagcgggcaaaaccggtgggccctgaaaagaagggaaaaaagggaaaaaagcgggattctccccaaggaaaaaaaaaagtttttttggtg

SEQ ID NO: 799 - DNA, 586 bp, Gossypium hirsutum
  Clone ID: LIB3825-013-Q1-N6-B1
ggtctagaatctataatacttctatatataggaagattcaaaaaaacagatcacaaagaaagagctacttagtgtcaactttcattcaacaaaaacgtaatatttctaatcaacatgcaaataccaatagcaatacaactctaaaagcgttactaccttcatgtgatataactagtaattgaccaaaacacacctaatcaaacaaactgaatcccatatcgtcatcactctcttcctccggttcttccttcttttcctcagcaggaggtggagcagcagcaccggctcctccgccagcagcaacaggtgcagctgcagctactggggcaccaccaccaccagctccaacattggttatgagatcctcaatgttgcacttctcaaaaagcttagcgaacaagcttggccagtaggattcaacagagacatttgcagctttaactagtgtagaaatcttctcagcggtgatggggatgccatcatcataaagaataagagcagcgtaagagcaagcagcttctccgacagtggacatcgtttcactgagagaaaatctgagaatgatgggttcttggggaagctgtgc

SEQ ID NO: 800 - DNA, 610 bp, Gossypium hirsutum
  Clone ID: LIB3825-013-Q1-N6-B2
gtattatacaataaagcattctcatcattatctcaaatctaacaagagatgagaacagtacaaacaggaattacacatatcagaatgcatggccattgtatacctaacactacaagtacagagggataagatgaatcaaatgcatgaagggataaaagtgacggtctcccataccaatcacggtaaacattttggcaacttcccattgaactcaacgcattttgttgtccttgttgcaactacgaacagccaaaccagccatgttaggagttgcagcggcagcggcaacaacaaattgtagatcagacaaggagaaagaccggcatggagggttcaaattcggttgagcagctatcgatgatgaactaatcatagttgattttttaaactgtggatgtagaggtggaagacaactagacggtgatgatgacatcaagttcaagtcagagctactcatagtagttccgaaagccattgcacttccatatgagttgcctaatcgctttgaaccacgagttaataagttcttgcgttttctattataaggattgtccggttttgcaaattctttaacagaggaagcagtgacagcatcaacaagactagtgaa

SEQ ID NO: 801 - DNA, 604 bp, Gossypium hirsutum
  Clone ID: LIB3825-013-Q1-N6-B3
agctgaattgatccttcgtatacccttggcgatggaacctcaaacagactttttggcttggaacagagaacattcgggagatttttcagttcggagtgcctacaaactattacaaagtggtgatcctagagcttacattgtacaaaacgtctatagggatttttacaaaaaaactctggtgcatagatctacctactaagattaaaattacaatctccaaaatcgcttggaactatctgcctactcgggcaaacatgttaattaggagactagcaaataactcaacatgccctcgatgtggtgtggaagcagaaacaatggaccaccaaagtctttgattttctctctcgagatcagtgcagaatcttttttggtgtgctttgggccatttggggagatcgtaacgctcgaatacatgaaaacacaaatagatcaggtcacgagacagcaaaatatattcaaagttttttacatgaacttgatgggactggtaaaaatacccataatgatcctaaggttgatgttaaatggaatcacccacctgggtaggtagtaaaaataaattttaatgggggcttaagacgagaggaaccaccaaccggcg

SEQ ID NO: 802 - DNA, 550 bp, Gossypium hirsutum
  Clone ID: LIB3825-013-Q1-N6-B6
gagaatgatcaatgcccatgaatagatttcaaccaatagttcgtaccaaacagctaaagctaatatttagctttgcttgttgttcgtggcagccccatggggtagtccaggttcccagccaggcatgggtacgcatggactcacaccagggccaatctgcttttgcacgcctctcggcgtatgctgcaatgcagatgtttcgttaacattttccactcctatttcggtttgtggattcacgataggagtaaccaggttgttgcctgtgaaactgttgtctagtctcgggtgatggatgggagcagcaatgttaggaactggttggtgaaataacttattagtgtccggcggcaatggcacggaacctgtggatgattccaatgggctgctaacaaaaggcacggttacactaggtacactgggcctagatagaagaacggggttaatgccagtcacccgcttaaatgtttcttcagccattttgacctttgctcttaatgtctcaatatcagccttcagaattctattgtcaacggcagcttcatcatac

SEQ ID NO: 803 - DNA, 550 bp, Gossypium hirsutum
  Clone ID: LIB3825-013-Q1-N6-C2
aaataattccgcaccttcaacgaaattataacaaagtttcaagccaccttggaaaaccaaggggcacctcttgacaatgacaagatacagttgtaaattaaacaaaaccaggtaacgctagagaccacccatacatatgccaccgtctgtcaagcacccaatactgagcaacagttaccagacaacaatggcaacacactataacatgcaaaaccaagcaaaagaccaactatatcataaatgataaaggctatcaaactattattatgataataaaatactccatctgcggaaacttcgttagatttaaccagcacggctcacttctttttaacaacagacttggtgaccttggcaccggatgggtccttcttctcaacattctttataacaccaactgccacggtctgacgcatgtccctcacagcaaaacggcccaagggtgggtactcagaaaaggtctccacaaccatgggcttggtgggaatcatcttaatcataccagcgtcaccattcttcaagaacttgggttccttctgaagctccttac

SEQ ID NO: 804 - DNA, 529 bp, Gossypium hirsutum
  Clone ID: LIB3825-013-Q1-N6-C3
aaaattataacagtcccttaaatacttaaagtccaattacatagcataagtccaattgcatgactctattactaatactttagtccaattacaaaaaaaaaccagtagccccatagcccaaatataagggcccaataactggaacagacccaaacagcccgaaacccaagctaagcttcggcaaaccctagggcaaaaggggtcctcgcaccgcagccttcacgaacagcaaccacgtcgtgccacgcccgccctccgtacgataccagcgtctcagcagccagcacgccccgtacgccagcgcacacctgtacctgcatttgaggcccttgaatccacgcttgtttcaccatgattgaagctaagtggcgattcggggctacaaacgaagctcatgagcccttcgactcaaggaggccttgattgactctcacatgagtcaaaaggatgggcagaggaacagacctttgaaaggctgttggtcggcggagaattgagagagcgccctaggttctttcctttttttttt

SEQ ID NO: 805 - DNA, 584 bp, Gossypium hirsutum
  Clone ID: LIB3825-013-Q1-N6-C4
agtaaaaaattgcctacttttttttatttctggagaaataagaaagagaacaaattccgagcatagccctatttcagtctgatgtttgccaggccggatggttttgactgtgcattttaacatttcaaataaaagagaacaatttcacatggcccgctaacagccgtaaagattttcaaaaatcaagcacaactatggggcatgcaaatgcatgtcttacccacgacccctccccacatatccataccctcttccataatacccaccacgataacgaccaccacgtccacgtccagttccacgcccacgtccacctcgatgtcttgaaaaatcaccaaaagtctctgtgtctaacttcatttgctcagagaatctcggccttccgttttgcgagtcattatcaagtgcattgcaggagagagtatcaaaaaagtcatccttattgtaaacaggcttcgtttgaatcttaggtatttcagcatcatcttcatcttgagaaccatattcatcaacggcatctgcttctttatccttagtatgagatttgctactgttaccaagatgaccccatacttcatctttct

SEQ ID NO: 806 - DNA, 264 bp, Gossypium hirsutum
  Clone ID: LIB3825-013-Q1-N6-C5
aaaagccgaaaataaaaatggggaattgggtttattaaaaaaaaaaaaggtaggcaaaaaaggaacccccctcttaaaaaaaaaaaaaaaaaagaggggggttttaggggggggcggttatccaatttttaccaaaaaaaaaaacaggatccccaggctgggggcttttaaacaaaaaaaaaacctattttttattaaccaaaaaaaaaaaagttccccaacccccattttttaaatccaaaaattaaaaagccctatcccagg

SEQ ID NO: 807 - DNA, 573 bp, Gossypium hirsutum
  Clone ID: LIB3825-013-Q1-N6-C6
ccaaaaatcagatctttttcattgacttgagaagcatttatgttacaatgaaatatggcagttaactaatgtataactgctcccactaatacatgactaaagcctagatagaattacaaacaaaatgtagctgacatactagctataacatcaaacataaatcaacaactactcctacttactttaagtataaattacattgcaactgaatcaagttacaaatgaacaaaataaacaaaatgctgctgcttatctggttcagcttggatgttggtctgcatgctggtttgttgaaagatgaaatttcagcctgtgagttctccaattgcctctccaattttagctcatttgaccttaatcgaagtgccttctcttccaaaccaatgacttcagaagccaatatattagcacgttcatcagctgtattacattccagtcgtgcatttgcatattccattttaaaagactcgagctctgcctgcaataccaaacaccagacatagcaagaataaaaaaaagtatacgctgaaatagaatgttgttgacattaaaagtatttgtaacaagctccct

SEQ ID NO: 808 - DNA, 88 bp, Gossypium hirsutum
  Clone ID: LIB3825-013-Q1-N6-D1
tctctctctctctctctctctctctctctctctctctctctctctctctctctctctctctctctctctctctctctctctctctctc

SEQ ID NO: 809 - DNA, 462 bp, Gossypium hirsutum
  Clone ID: LIB3825-013-Q1-N6-D3
aaaagtaactttcacaccaatacattttttactgtgagggggcgaaatacaatgctttaattctataacaaaccctacacacagtatccgaactcatacgcgagtaacatgacgcgagtttgcatatgatacacttcaatcacccttccaatcaatcgcacggctatcaagcctagagatcagttcttattcacacttattacctaccctagatccagatgccgaactcatacaccaatagcatgacacgagttcgcatatgatacatacaatcacccttccaatcaatcacacggcaatcaagcctagacatcagttcttattcacacttttgccctaaaatatcataattcatggatagtcctaacaagatattagaattagaaggccttactataacttgtctatttatctgatatgcaacctctgaatatccttatttgcaggccttactttctcagg

SEQ ID NO: 810 - DNA, 565 bp, Gossypium hirsutum
  Clone ID: LIB3825-013-Q1-N6-D4
gccgatggaaaaaaatgactgcatttctcaaaatctaatgttgcttcttcaccagcagacacagcctgtctgcaaaactaaattgaagggggaaactaccaagtcccggtaatgggaaattttcggttatttgatagccttatttttatttgcatctcacattctacatttgatggaaatcttggaaaggcaggctcccaacccatggatttactgcttaatcaagtttctgataacatatggaagtataccaccattattgaagtaggccaattcaacctcagtgtcgaagcggacagtgcaggtgaaagacttcccattgtcagttgtgacagtcacatcttggccgggtcgtatttcatctattttgcgtgggagatcaatggtgtaacgctcgtgacctgttaaacctagtgtgtccgcgtcctcaccagacttgaaacaaagtggaatgattcccattcctaccaaattactgcgatggattctctcaaaactttttgcaattaccgcttttactcccaaatagcattgggcctttggcagcccaatctcgggagctacc

SEQ ID NO: 811 - DNA, 529 bp, Gossypium hirsutum
  Clone ID: LIB3825-013-Q1-N6-D5
caagcgaaacctgcaaaatcgttttgatttatatattgtaattctcaaagaaaaatcacctaacatagccggcgtaatcaaactctatcacgggtttgctcgataggaaagctgaaaaagagtctgaacaattattggaataacaaacttcccgtctcctttcattctcgctaccgagcaaaacctaaaaggctcttttggcaaacaaacgattctactcgagttacagagaaatttttaccattggtatcaatattctgtttcctactgccatggattcttctttttggttccacttcttttaaaactgcttgttgaactagttttcaattttgatttctttgcctttccccgaatcctgttcttaagaggcttcagtttatatatccgaaccatccaatgatgtgttgtgaatacctcctcaaaatgagtgagtttaaaatatttctttccgatctctgtccgcctaactctatcataggctttcccatcggtttcaacaaacctgtaatatgagagtttatacatt

SEQ ID NO: 812 - DNA, 476 bp, Gossypium hirsutum
  Clone ID: LIB3825-013-Q1-N6-D6
ccgctcgcgatctagaacgttctagatcgcgagcgggcggccctttggttttttgttttttgtttgtcgtttttgtgttgtttttttttttagatagaggaagaaaaaaataaaaatggggggtagtagttggtcaaaccaacattataaaaaaaaggcacttttatttaaaacccagggggacaaaacctattggaagactttaaaaatatatgaatggcaaataccttaaaactttatcattttaaacaagggtgttgcttgagggggtttaagggccaactaccttaaaacccttggggttattgggcattggaaatccaagaaataggatgggagcttttcatataggtgaaaaattataagaaaatgaaggggaggggtaactacccgaaaaagaggcttactggtagggtgttttattggaccattccaagggagaaaggtgttttggtaaaaaaaagttttggtgaaat

SEQ ID NO: 813 - DNA, 612 bp, Gossypium hirsutum
  Clone ID: LIB3825-013-Q1-N6-E1
accccccccccccccccccccctctcagcccaagaaatgcaatcttattgatttcactaaaaccaacattactcaacatagtagatttagtagtacacaattataacaaaatataacatggtaatacagttcgagaacgtagatctcgagtataggactcaatttattatttgtaacattaatttaaaaccaaaaccaaacttttacttgtctatatgagcatgattttaattggaaactggtggtgagaggccagcaaagacatggagcaactccccgttgtcgatgtgccttgcaggatcggaaaaggcataaaggaagaactccatgaaatctaagtccttgaaaagccgaggatgttggtcatctataaactctttgggtgtcttgattatagtaccctcatttggaatgacgaaagctgctatagagtatcgatctttgtctccgctcatcatcactctgtgattcactgatttcaatctcccattgctccaagccttgaggggatctccaaccacaaatacaaaggaagaaggagataaattagttagcttgatccattgaccatcattgacctcaatttccagtcctgaaatttgatcctcacaa

SEQ ID NO: 814 - DNA, 575 bp, Gossypium hirsutum
  Clone ID: LIB3825-013-Q1-N6-E4
tttttgtaccgaaccaaatatgtttagtaataatacaaatcagtttcaaattttaaagactgtttaaatgtgttacaaaccaggtcgttccatgtatctgtaactcccggcaagcaccaatgcatgcagtcatcgtgtttctttcctccggctgtggaagggtgagcatcagctctgaactcactcatgcgggtaatatctaagatgtggacgttagaccccttgagggcgttgtatatgtgctgattcacaagccttgtctccacatttgtcccgttgtttttcaacgagaagagattttccacttgttcgggtaacaaaggctgtaaccgctgacaagaaccaccttggtcccaatcaccaccttcaaaatgccttggtgattgcgtgcgaaacaatttaattgcatccggtcgcatggttttctccacaaaccgtatcacgtgatttaaaaccttatccaagccaagatcaggaggtatgggagggattacaggtagacccttttcaaagaaaagcaaggtgacttaactgggtcaaatttcgaaggagcccaccaccagtgtcctgtgtta

SEQ ID NO: 815 - DNA, 511 bp, Gossypium hirsutum
  Clone ID: LIB3825-013-Q1-N6-E5
aaaatctcaaaatattttttgagatattattttcccataagaatcattttaacattattgggctaacatttatacaattactattccaaaaaaaaaacttgaaacaggaaaataaattgcaaaaagccttgtctattttcaaaggtaattaaaaaaacattacaggggacaaattacaattgggaatttaaatataaaaccctaaataaaaataaagggggaaaaaaatgataacaaaggggaagatacctttggaaatttctcagcacaactttatgacagcaaaatttgttcattattgctacaaattgtaaggggctgaaattatgacaattttttggacccactaatttaataataataataataataataattataatgtgactcccccaaaaaatctttaattaattaattaattaatttttcttcccctcttcaccgccttcttccaagtaagccttctttctcctatcaacaccagcaaacaaacaaatcacaaggaaaaacg

SEQ ID NO: 816 - DNA, 575 bp, Gossypium hirsutum
  Clone ID: LIB3825-013-Q1-N6-E6
aatgcattgtaaattcatgttttcaccaagcttgaatgagactcaactaatgtggggtgattaacaacacaacaatttcaagcccaaacacttagatattcaatgagacagactcctcattatttcaatcatactccttaatcggacagtagcaagtttacttggacagggacggaaatttttgtcatctaaatactagtctcataacaacagaatggttgcccccattccatgtgggagaacatatgcatacaataataaaaatacgggtcgatattgttgctcagctttgttgaattccgctcggccatgtctgattcttcactggcttcaggattgcttccacctcagctagagtttcatgatctttcccgaacagtacaagttctgttgcagcggcaacattctcttcaacctagttatttacaaccccggcattactaacagccgaagcagcaagctcgtgaaaaaaaatgcaaacatgttttgacaggtatgaagatttagtaacaaaattctattatcaggcataaaatagatttcataaagttcaaatgatgaaccagaacctgttt

SEQ ID NO: 817 - DNA, 620 bp, Gossypium hirsutum
  Clone ID: LIB3825-013-Q1-N6-F1
tcgccgacctaagacagcaagcctgctcttgccaactactctctaaaaggaaaggcatttactttggacagcctatcaaggtcaattgggcatatgctagtggtcagagagaggatacatcaggacactttaacatttttgttggggatctcagtcctgaggttactgatgcaatgctgtttgcgtgcttttctgtctatcctagttgttcggatgcgagggtaatgtgggatcagaaaactgggcgttcaagaggatttgggtttgtttcatttcgcaaccagcaggatgcacaaagtgcaattaacgacttaactggaaaatggcttggcagtcgacaaattcgttgtaactgggcgacaaagggtgtcagtagcagtgatgacaagcagagctctgatgccaaaagcgtggtagaactaaccaatggctcatcagaggacggtaaagagacgaccaataatgaggctcctgagagtaatcctcaatatactacggtttatgtcggcaatcttgctccagaggtcactcaagtagaactccactatcacttccatgctcttggtgctggggtgattgaggaggtccgtgtccagcgtgataaaagctttggctttgtg

SEQ ID NO: 818 - DNA, 429 bp, Gossypium hirsutum
  Clone ID: LIB3825-013-Q1-N6-F2
aaaaaaaaaataaaatcttttcaaacccgggtttccatggtaatcgggttttcaaaaggggggctgggccaacaacaaactaggcgcattcttttaggcgggcccgaatccccaaggggctgggcccatttatcaatggggggggaacactttttatggtttgggggggggccttaggggaaaccacaaagggcgggcccttgggggggtctttccttcacccttttcattttgggacggaccatattttccttaaaggaaccgggggcatcatggcttttataaacaagggggattcaaacccctttttccatgaatcaatcaacgggggattaaagcccctagcttatttctttaaagccctcggggggagaccgacatactaagcaaagttttccatttcgggggatcggggttacattccatttc

SEQ ID NO: 819 - DNA, 584 bp, Gossypium hirsutum
  Clone ID: LIB3825-013-Q1-N6-F3
cttcatcaaatatccaacaggtctgatatttaataacattaactaaatacctataaaagttcatattaaaaatctaataagaattttgactaaagattaactagagaaaaatcagggaaaaatgaaaaggaacaagatgctctataccaagtgtatccaccaaatatatgcttgttcctggaataagttctttatgttgagatctcaaagctacattttgccctcctttctgcaattcttcagcaatctcttgtccatgttgtggatgccgaggaacaataatggtgacaatgtctgggtgagtttgcacaagaacgttgtgaactcccaaaattactgcagaaaatgtctgttagtgctttgtccaagaaaaggataactcacagcatgtggattttcattccaactggtaaagaattgcaatgatcctgagagtttaagctataaaatgaacccataatcaccagaagaaacattaaccaaatgcaaaatgaccatgattcattaaactatcccagtgaatgcactaaattaactgcagaagccatggtcatcgaacaagtgaccaaagtaaacatgaaaat

SEQ ID NO: 820 - DNA, 616 bp, Gossypium hirsutum
  unsure (1)..(616): unsure at all n locations; Clone ID: LIB3825-013-Q1-N6-F4
ggcccgcccctctttttttcttttttttttttttttttttttctttttttttgaccactccaattctcaatatcaaatagttgacaagtttggacttttgaagtgcacagacccaatcttagactaaagacaaaagtttataaaaacaaagccggttgatttcaaatttcaaagtttatttctcccaattatattcatggtaaaacaaaaacaaagctgtatgtaaaatactaagaatacaagaatcaatatgtaacatgataaaactaaaacaaaacaacaaccaaaaatagcaatctgtcagagcagtaaaatagaacacactactttatacagcatagagacagagcaacaaagaacagtagaataaaagggttcaaatctatgataaaatcgtgaaacacgaaaaacgtgaaatggtaaaagacagcaactttgtaaaacagtaaaaacgcaaacaaaaaagcaaagacaagcttaaaaacgcaaaacagtagaaaaagcgactcaaatctatgaaaaatgtttctttaacagcaaagaagttgaagaaaaagaaaaacagtnaagatatcaccttcgaaaaggaagagatatcggcaccgaaaatgggtag

SEQ ID NO: 821 - DNA, 543 bp, Gossypium hirsutum
  unsure (1)..(543): unsure at all n locations; Clone ID: LIB3825-013-Q1-N6-F5
catatatccaaaacatggaacaaaagatcttacatactgaccaaatactcgtactattagaaagccgcccatcctgatgcagtggtcttcctagatccagatccactagcaggaagattcctctcaagttgagaaaagtttgttaaagggtcagtttgtcttgtgttttcggtgggtgctctttgaccaacaccttgactggtagatgtcatccgagcagctgcagggtcattgggagggggtgggagaaggagatcttatctttcccgaaccagcaggcggcggggcaaggcacaaagtattaggctttagaatcgcccctgacaatgcagcagctgaaagcatgccagttccactagatggcttgggctgaatattaatccgaatggtctcaccttccttcaatcgatgattaacagccggatgaatatcaataagagaatcagtcgcatttttctcactagcctctttctcgttctctctgctaacatacttatcgngatcagacaaggccacgttgaaatcaaacgcctcgttccgctc

SEQ ID NO: 822 - DNA, 570 bp, Gossypium hirsutum
  unsure (1)..(570): unsure at all n locations; Clone ID: LIB3825-013-Q1-N6-F6
ccatgccgcaatgcaattactttgttttccacagaaaaaaggtcaatataaccatgccaaaagacaaataaggtttgaacacatctgctgggataattgttccacacaaaaccctcaatgggagatcgagccattgtagatcagttatccctcttgcttttcttcagaaacatcgacatataattgatatactcatggcctgtccgggtaccactcatcagccactgcaaagcctcagctgcagcatccttttctgcactcttcttgttgttgcaaggctgccctatgatttgcataccattgaactcaacagtagcttggaactgattgttttccaattgacttgtcttgtagattggtgcagcatatcctgccctagtgaccattgtttggagctgacttttagaattatcacccccgggaccactctctgtccttgaaatcaaagaacgttgtggtggaacaacaggcatatttgatggtttaagatctggacggccaaatacaaatcttccatcacactgatcctcanaaaccagcaaccgtattgcagaaatgagctcatgatga

SEQ ID NO: 823 - DNA, 586 bp, Gossypium hirsutum
  Clone ID: LIB3825-013-Q1-N6-G1
aaaatggatattattctataagaaagttaacaaacttatagtaattggatacagttttatcaataatgaatttctattttacaagaatataagtatacaaaaaaattaaatataaaaacaataatcgactctcaagcatcaagactagaaagaataattaatcttccgcttcttttcgattttccaatctgtgcattttatctttagtttctaatcaaaatgagtggcaccgagtcatcagttcttccatcgagtcaacccagatccaccgagttcacgattccaaaactcgcccaaaaaagtcttagccgcatccaaactaggaaaataagcaggctctaagaatacctggctcaacgaatcgaccgagccggagccggccacgactcggttccctttcgcttctaaactccccataaccaccaccaacacctgcttatatccgtaaaagaaccgttttaaagctccttcgatggcttgcaaagcttgtacgaggaagaccttattgccctcctgcttctctgagtacaatctcatcgcagcttcttggatcctgggtccgccctttagatccacctccacaccc

SEQ ID NO: 824 - DNA, 59 bp, Gossypium hirsutum
  Clone ID: LIB3825-013-Q1-N6-G2
ctctctctctctctctctctctctctctctctctctctctctctctctctctctctctc

SEQ ID NO: 825 - DNA, 570 bp, Gossypium hirsutum
  Clone ID: LIB3825-013-Q1-N6-G4
gattgcaaagatcaatattctattttatgggagaaagtacaaaattcttctaaaaaaaacttgccagttatgtaaaatattaacactaatcaaatttacagtgatatccctaatcaaatcagcagagacaatttagacttaaaacttgaaattataaaaaaagagttggttgggtttttatccaactttgaaacaccattgctcaatccttgaaggcacaaatgagagctctttgtacattgtcggccactattcttaaccttccttgagttgcatctgccggtgaagaaccactaacctccaccgttcgagccaccctctgtttgcacttctcccactcgtcaaggcgcagccagcatgcgcgtcctccatggcttccttccattccaagaaatgacacattggggttttcaccgaaggaatatcttaatctcactgagacacagtagggcagccatgcagcaccaccggcagtgtttatatgaggtatgagggcaggatcgagtacaaccgtcagggcaaaatcgacagaattatgaggtcggtcatagtagatattgcttttagttg

SEQ ID NO: 826 - DNA, 571 bp, Gossypium hirsutum
  Clone ID: LIB3825-013-Q1-N6-G6
aattcttatggtaggtcataaaatatgtaaccttagctctcataaaagctaaaattcagttgcatcattaattataagtatagagtaagtaaaattctttcctaataaaagctcctaccacaagcaacaatatatttacatgcaaattatcattacatactaaatcccactctcttatttttataagagtaatacttagcactgcatattatacataccaaaggggtgtaactgttgaagtgattactttatgtagcctctgcaaatccaatttgcatgtttccatagtcgaaaaccgtatggaacttacccataaacacgtcgcccaagatccagagtggtccgcgaggaggcggtacatcgagagcaccgaatccgctaatgcattgagctagctctccgtcaccaacttttagaatgtactgctcaggggtaagctcaagtatctttccaccaattgtgaaggcgacactaggcatagcagataggctgttacaatcaacaactgattctcccattggactaggcaaccggtcacagagctcattgacgtaatcaagtatacgctcct

SEQ ID NO: 827 - DNA, 593 bp, Gossypium hirsutum
  Clone ID: LIB3825-013-Q1-N6-H3
accataagcacctcgagtgccatcagcagctacgtcatatacactcataaattacttcaaattacatttatcaaggacagcatagaaacctaagattacaaatatccaaattcacacaagctaatcatatacagccataaattacaaactagtccaaatccaaataacagccatattttatctgaaacccttccttttgttccttgtaaaccaagccttcttgagactacgtgtcgaagccaaatccttcataacaataatcagtacgtgaccttttcctaggtagatttagggcatcaggttcaaaagacaaattacagccaccagttataggtgttggattttgcccttcaatgctgctactacattgattgtcaaaagcattgggtattccttcatctaaattccaatcatcaatcatttgctcaatcctgtttccttgggcttctggaagtgcttctaaacctgcaaagacctcttcatccgttgatggtctagcagaagttgataaatcctgtatcatagagaaaaacaatcatttatttttacacaaatgcctttgattaccaaatgaatattaccattttaactga

SEQ ID NO: 828 - DNA, 613 bp, Gossypium hirsutum
  Clone ID: LIB3825-013-Q1-N6-H4
ccgccctttcccccccccccccttcttttttttttttttttttttttttttttttttttttttttttttttttttttttttttttttttttaaccgaataaaagggaagagtccaataacaaggggtccaattacaatagggttgtttggcccaatgtcaaaaaaaccaatgccccaaaacgatacagcccaaaaaaacgacccaatacctaaaacccaaataaaccccaagcccaataaaccctaacctgatttgaaaaaccctcctaaaatccctaaggtttttaaaaccttttaaccgccgttttttaagcttttcaaagtgcgccgaaaaaaaaaaacaggccttttaacgcgcgtgccctttaaaaaatgtttttggaaaaaaataaacaagggggaacagcaagcaaaacaagaaaaacagcaaaaaaaaagcattttgtttacaaaaaaatggaaaataacttatttggggggcgggtttctatttttcctttttctggaattccggctttttaaagccaaacacgattttgtaaaacggggggatactgtttttacaaaaaaaaaaaaatcccgaaaagtggaagggggttttcggttttttttt

SEQ ID NO: 829 - DNA, 557 bp, Gossypium hirsutum
  Clone ID: LIB3825-013-Q1-N6-H6
cacagctaaaattttgattgtgggatcaatacattgaaacttattagatattcttaattatgatttcattaagggactcatccattaatccctctcaatcatggcacttcgattttttcacaaacttcacgaaaacttaaaacaaaacaaagtatcacaaaattaattgtgcttgctagaactgtcctaatgacctccaccacttccgccaacaacagggcggttctcgttcagcgcttcggtgaaggcccctgtaccttcgtctatcatgaccatggttgcctgttcaatgttgaaatcattatcaattactgctttaatgaccaggttcaccaagtcttcaaccagttttgcctttgcttttaaatcccaaatcattctcttcagctcttcgagtgaactctccacagatagtagcctcacctcgatgcctatttcctctcttgcaatgtccctagaactgccctgatgccttccgtcatttttggcagcagtgcggcggctcccgcgagattgagcctcgttcggtacttcagtgaacgcctttgtagcttcgt

SEQ ID NO: 830 - DNA, 525 bp, Gossypium hirsutum
  Clone ID: LIB3825-014-Q1-N6-A1
actggggaaaagaggattttatttctggttcacaaaaactcttggggagggggagatatcagtacattacagtactttaggattacatatataacgataataatacaatcccatcatagtatatatttatatcaaccctttttgcgaaaatagttgctctctgtcttgcattatagatgaacaacatatctatacctactatatgatatacgtgccatagaagaagcgctgcaaatcacacgatggaaggaaatttgacaaacttaaaagctttgtgacgtactaactgctaaaatgatattattacgtatggcacatgggataatatagggtcaagggcatgcgaaaatccaagaggtctaaccaacactgggagcacgaaccaaaaatggaggaaggtgatgctccaaagtagctagaagctctccggcttgacttacttcttctaaagacccacctccaagcattcgaacagcttcaacaagctgccccctcagcctttgcgataacagacgaccacccacc

SEQ ID NO: 831 - DNA, 510 bp, Gossypium hirsutum
  Clone ID: LIB3825-014-Q1-N6-A2
atggcgagcatttgaatcccaaccacatagttaatatatattatatttacatgaatccaatgtaagaaattgcgtgcatgtgagaaacatgtgccccgtaggtttcctttgtatcactatttaaatcctttatttgtctagctctattttacaagtggatttgtaattgaagtgacacagctaatatatgggtaattatgagccccaaaaggactgtccagtgtcggatccaataaaacccgaaaatatccttttttaaatatcctcccccatttcccccattatataagctaacccaaatatattgcaccctcacttcaatctcatactcgtcgatcccctcctgacttaatcccacacatctagtccatttatatacatgagtacccgatgcagctagctatctagcaaaccattttttacatatgtgcaaactatacatactatcagcaacgctttttgggaaaaaagatgtggatcgaaggcatggaaaacgtacgattccatccg

SEQ ID NO: 832 - DNA, 605 bp, Gossypium hirsutum
  Clone ID: LIB3825-014-Q1-N6-A3
aatgtcaagcagttttcattggatattttacaaactggctcattaacctgataaggaagaaacaaataatactcaataagacagtaggagaccaataagtgatctatcatcatcttcatcatatgatccaccacatcgaccccaactgaagactttaatatatgataacacaaaagaaaaacaaatgaactaaaccaattacgcggacaagcattagcatacagaagcaaaattgatttaaaagcagtaacgcaactggtcttcatggaatggaagacctctcatggcaccagccaccatggatgggagccaaaacataaaagtggctcacattgacattaatgccagtccattatccggcatacccatcccagcagccaactcagcatcgagttgagtatgtggtgcaggccccgacatttgctttaaacgtttcttgtgacgtttcgtcttgaaatgttcatccctcacagtcgaattcgcaaaatatcggtcgcagtgtaagcagtaatattgtcccattccaggcaaatcctcatcgcgaggcaacggcttcttctcggtatcactcttctgcagctcatcataaacgaggtcgtcacctt

SEQ ID NO: 833 - DNA, 547 bp, Gossypium hirsutum
  Clone ID: LIB3825-014-Q1-N6-A5
gggttaacaacattagagtaactaacattttaatatccgtctaacataatatagcacaaaacaacgcactccataggttcatacaagttattgcactacaaaacaagggtctcctgctttacatagagccaccatttttatttaattacatgcctgcttaaaactataaaaatttcacattaatgccataaacaccatactatggaaccataatcgcctttaactctttatgtcatatgcacgctgcctctgcctagacacgaagtaaaacttttgcgggttgctgctgaatatgttatacaccaacctccatgacaccccaaagccaactacttagctaggctatcccatagacttacatggttgattcttccagcacacgaatatcctatagctatgggctgaactaatgaaccagttgcaaaaacccaacccatgcatcctgaggatctagttttgggatgcaactaatgtaactggaaagaatgctgggactacaaatatgtctacacgctacaaccgggaccttattttcctgtattgaaca

SEQ ID NO: 834 - DNA, 515 bp, Gossypium hirsutum
  Clone ID: LIB3825-014-Q1-N6-A6
agttctcaacgtcaactacataaattttatttggtaaaactgtacgtggtggttggtcacaaaaaaaaaaaaaaacttgaaaaggaactgctattggaaaacccagaatagatgcccatattaatttcacattcaacggaagtaaccatagagctccaggaagcaaatgcataagttccaggggtttgaggcatccgtggttggaccagtgagtaaaaccctgaagaatctaaatggaagcagagcattcggtccagttacaggccatgatgcaaactgacctggcttgcacattgtttggtcattctcgtgcactctcaaatctatccaagtctttccatccatacaaccctgaaatttccaattccttatgtatgccctggagccgtcctgtctcaatgtgtagtagttgcacataagctgatgatctttgccaatgtcaaccatccaccaagcacagatatttccgttttccatacgaggcccagcaaaacatgttccctggtaagttcttg

SEQ ID NO: 835 - DNA, 560 bp, Gossypium hirsutum
  Clone ID: LIB3825-014-Q1-N6-B2
gcatattctgtaacccaaacaatgtattactctattcctcatctattacattccacccaaccaaattgcataatatctctattcaattcccaccgaataccattccattccttctctatttcattagagcgaatttaacaaaaactagaaagactaacttgtagataagtatatcttaatggtaaggttgatcagattcttcttctattgtccactcgtgttttcttgggtgtaggtccggcttgcaaatgttcagtgcttgattgaatcttattgagtttgtccctaaccgttttaaccgtctgattcattgactgggaagggaagtagtccttgtcagatgacactcttgttattcgagcattattactgtgagacctgaactctgcatccccaacatccctcagtcgattattaatctggttaggaatatgatgagatgaagcaggaagtgatggagccttattggaagagagcacgcgatgaactggatgccctttagatctttgagaattcaatcttgcaaggatttctttccttctgccttctaacttatcttt

SEQ ID NO: 836 - DNA, 471 bp, Gossypium hirsutum
  Clone ID: LIB3825-014-Q1-N6-B3
gtagcaatccatttttatattatatcagaagtttaagagttcatgtgggtacattattattatggtgaagcacaacaatatatataggtatcttggctgataagggataataataatagacatgactagatgaattactctcaaaatgaagcagctttaagaatgtccatgtcagctacctctctcacaagatttttggttgaaggtaaaccagctaccacatcatcttcgattccacactcatttgtgccccttctgatcttgaagtaaccatcttcaccccagcctttattccactggtttgcaaggagccagtaatcctccccatcatcagaagttccccacccgataagcttaactgcatgacctcccataacactgcctgtcacatgcttgtaaactccagatttgtagtgagcaaaatcctcataaaccgggaaggcgaactaaacagtccattcttataaactt

SEQ ID NO: 837 - DNA, 553 bp, Gossypium hirsutum
  Clone ID: LIB3825-014-Q1-N6-B5
ccgcccccccccccccccccccccccttcctttctttttttttttttttttttttttttttttttttttttttttttttttttttttttttttttgccccaaaaataactggttaaacaaaaactggaccgaatttacatttaatcctccttaaagcaaagtttctttttaaagaggggggaaaagccgtccaaaaactaattttaacatgaaatacataattggggttttgttaaaattgcagcccaaaaaaatatttggattttagtcctaaaaaaagttaaaacacacttactggtgggatttatcccctccaaacaccccttttgttgggattcaccggttaaaccacatggacttttggtgttaaatttatcctgtacacactggtgccactcctttttttacttgaaaaaaaacttgcacacttcttaaaaaatgcaaaggcctttaatagctcccacaacaaaaatgggcaaaattcctccaagtgccggaacccttttgattgcattacccctcccaaatttgttggaggggcaacaaatttaaa

SEQ ID NO: 838 - DNA, 570 bp, Gossypium hirsutum
  Clone ID: LIB3825-014-Q1-N6-B6
acatcaaatagaagaattagatatcagtatagtggccattgtagaccctgtttgcacatgtataaaccatttcatgctctaaacaccagcagctgtcagaggcttgctttagataatgcttttaaagcttcagaaatctcttctggcgttgctccacctttaatactggcaatcaaggggctgtcagaagggataatgtcatttctcaagtcggttgttcggagcaatgcttcggaaccctttgtcaccacttccttcatgatcaatgtcttatgagctccagctatcaactcctcataatcggtgtctccggtttcgccaacaatgacaaacatgtttgcaacattcagtctccaacgcacaaaaaggtacctgagtgcctgagctcgagatgcaaggagaggaacaacttgcattctagttgagttcctgcaatacattggatgacaacggagacctcgcatcctgagcttctgcctcaaatcatcaactttcttggccttactcagctcctttacaaagtatgcaacacagtgggcgttgctcgatttcacatcttcctcagcacat

SEQ ID NO: 839 - DNA, 582 bp, Gossypium hirsutum
  Clone ID: LIB3825-014-Q1-N6-C2
cctcaacattaggatcacttaactctttcatatatatgacaagacattgtgacaatataacttatacaacatatacatttcacataaacccaaacccactaagagaaaccaactcatcactgcagaaaatgaaacgggctacttttctttcaggacttccatatgggtactactgaaacttcaagaccatttccctgcttggagagttagttaaaatcctggagattttcatgaatgaacagtgatgttagttgctctgctcggtgatttttgtcggagaagtttttgacatctcttttacctgttttgcttgatctttcaccttgtgagtcccattgctgttgctgatctgtccactgacctggatcttgcttttgaccatatttgcagtagtgggtcgttgcacttcgttacctaagctgtggcggttagttcgggagcaagcttttgtcttttcaacttgagttgaggggactaagtcaccgcagctcattctccgggtaagatttggtgactttggccgagtcagtggcagctgaaatgtaatgaaagtaagaatgaaagatgcatgaaacatataaa

SEQ ID NO: 840 - DNA, 433 bp, Gossypium hirsutum
  Clone ID: LIB3825-014-Q1-N6-C4
gggcagcaacaactattcatgagctttaagtaataatacaagggtaattcactcaatcacccactaccgagctatttggcaaataacaactattttatatcatataccaattggcattgcatctttaggaaacaaaatcctgcaccggtactggagttaatttttgcatacactcaaaccaccttttcctttagctcggcaatcggaatataaataaccgattcttcatgtacccgctgccaccttttattcaacttcctcgctttcctactttctaggcctaataatggttgcttcatgttctcaagcctaaccttaaccctacaaagtctttccatttccaactcaaatgcttttaacccaccaccccctccaataattttcaccctttttttctttccccaattttttttcacatttaaaagctttttta

SEQ ID NO: 841 - DNA, 577 bp, Gossypium hirsutum
  Clone ID: LIB3825-014-Q1-N6-C6
catacaaatatagtctaagttttgctcatttattgcagaaaactacatattgttgttggtaatggctgattaatatatcatcccatgatttgtaatgctcatctacattaaaacacactatttcgacttacatatctatctactgtgagcaaattcagtgacaccctggactctaagtcgaaggtttaacttttgcaggctgccttaatctgatgtatcagacagataaacagcaagaaccacaattatatcaaactttgcttcttcttaattaccattcttgcttgatgtctgttccaaatcgatcttttcttgccatgactgcttcatatcagacaattcacactcctgcataggcctgccatcggacaaagaacaagaccggggaacagagaatgacattctgctaatactttgcctcttcgatgctgaagactcagctgtcgagcataagtcttcttctcctctagaagtccctgtttgtttgttgtgattattcgatttatcagcaggcaacctttcttcttccaacattttgctctcttcctatgcaatgaaccattattgccattttgaa

SEQ ID NO: 842 - DNA, 562 bp, Gossypium hirsutum
  unsure (1)..(562): unsure at all n locations; Clone ID: LIB3825-014-Q1-N6-D1
agacaaatgggaaaatttactagacttgcaaaatatataaaattgttgggaaaattctagtacaaggcatataataataaaactgtgagattcaacatgctaattaattaagatataataacaaaacaaagcttaatctaaaccaaaaccatttctttttggtacatgaccaaaaacaattaaacatagctaattggaacctccaacttcattaatcctcatcattaaaagtagtcttccttcctgtgccagcagcagcaaggtttggcttattataaggtgttccacgtccacctctgccaccaccaaaccgaccaccaccgccacgcctaccaccgnggccaccaccatcccttcctccccgaccaccgcgacctccacggccactgccatcccttcctccactccatccaccactcctaccaccacctnttccactgccaaaatcgcctttaggttttgcctcatccacggacaaggattgattattaagttttgatccatcaagttctagagctttgttcaaactaccctcttctttgaaatccaagtaagcaaaacc

SEQ ID NO: 843 - DNA, 533 bp, Gossypium hirsutum
  Clone ID: LIB3825-014-Q1-N6-D2
ccgccctcccccccccccccccccccccccccccccccccccccccctttttttttttttttttcttaaacaggtatttttttatttttatttcaaatctaactacttttggttctttttattttctctccaaacacacatggtaaccttcttcatcatcatcgcccttttctttggtaaaaacatcaactttgtaaaatgggattttttttttactaatcttcatgatccctttctttagccacactttttaaaggccctgctttttttttcacaaacaactgttttccgtgcaacacttttttttgatcagggatgttcccaagagctttaaaatccttttggggcatttcccacccaaacaccttaatgttttctttgatcctaaaagggttgtttgatttggttacaacactggtccccctttgtttagccctttttaccaaaacttgtcctggggttttgttcagcttctttccttttctccccactgtttcaccatggatcagggctttaccacctttttttgaacc

SEQ ID NO: 844 - DNA, 607 bp, Gossypium hirsutum
  Clone ID: LIB3825-014-Q1-N6-D3
agatgaacaagcttttattagactcgaagttgaagctgacattatgatgtacaaaggacgaaacaggaataaaagctagttttaacataaagctacctaaacagaaagttactaccatttctcataaccaaacagttctttttcttcttttcatttcccactctacaagtactttcatatggagactgatccatatgctatgcatttgcagctcctataattccatggatccatagatttagaaggagaaagcaaaggactactctgtggcagcaacaacagctggcccttccaccttgaatttagcaccccatatctcctcttcttcagcaggcactgcagtgatcttgttcttaggattctcatagcttcttaatcctcctactgctgtggagtagaaacagccttgagggaaagaagcaagagatttgccacaggcacctttcagcaattcagcattatcagcaaaggccacatatccgtcggcggtgattccccaatagagaggaaccttaccaaattgatcagaagccacaaacaaagtggaggtggatttatcaaagacaatgaaagcaaagctcccaattagatggccaaccaacatggt

SEQ ID NO: 845 - DNA, 583 bp, Gossypium hirsutum
  Clone ID: LIB3825-014-Q1-N6-D4
aggaatatgtagaagatttcattaaataatacttattatcaaagtgattactcctttgcagtatcttagtccatttcattttgctcatacagttttaaaattgaaagaacattctattataacaatgtccagcttataacataaagagaacaccaaattttgagcatcagagtgtgcctgctgcaactctaccttaacaggcttagctgcttgtagttctgcttccatcttagctgtttattccgtaaggctcctcatttttttgttctctttcagatgttatagctcctatctgagcatgcaagatctgcaactcatgctgtgcaacagcaagttcctgtctcaatgtcccatgggtagcagcaattctctggttttctgtaccaagtctctgcatttccacaagctgtgcaacaagcttttgttccttgatttctggaggtggcaacatatcaaaatgtgcaaaaggacctggatggagaggaattcctagaccaaatgggtcagaatgtaccatgccaggtccagggagaggacgcctcagatgagggggtggaattcgacctttacttcccatttttag

SEQ ID NO: 846 - DNA, 555 bp, Gossypium hirsutum
  Clone ID: LIB3825-014-Q1-N6-D5
agtaaccttgaaaaacccacttatacttttgctttacattaaaacagggaataaaatacattcttttatcagtttctttgtaataccaaaaccccataaaaaggccccaaactaaaatacataataaaaatatcataaaatcaaagccgccgtcaaagccgccatcataatccgccgcatcagacaccatatctccgatcaacatcccaccaatcgctcctccaaccaacccggcacccaatcccaatccaaacttgctattcttcttcggtggctgttgcaccggttggtacccgtaagcccctggtggtggaggaggatacgcataccccggtggtggatgtggatatccatacccaggcggaggcggtccctgtggtggatacccaccacaacccgccactgcatgcggcggcggaggagggtatccatacccagcaccttgtggtggtggtggataagcccccggaccaccatacggaacggcagaactcgatccagccgccacatacgccgctggatacgcagtaacaggctgatgatgaggatgatcgt

SEQ ID NO: 847 - DNA, 584 bp, Gossypium hirsutum
  unsure (1)..(584): unsure at all n locations; Clone ID: LIB3825-014-Q1-N6-D6
caatcaagtcatggattctgggactgtttggcttcaagagatttctcatattcttcaatggatttgaagagctcagaaaagttgcctttcccaaaaccaccacatccacctttttggtattgctttccttcttcatccttcaccaggcacccaattctttgtattatctctatgaagatggttggcctaaaaataaaaggttcccactttagttaaccaaacaagaaataatatacatatatggcgatgagaagttatggaatgacaaggttgaagctttgaaaacttgaagattttaggttagagtgctacaacgaatgtaaatgtatgcgtggtcatctagatttattgttgattggttagtttgttaggttaaattagttattcagttcattacttgtgatcacaaatattgatataattatatttgtacctctaaaaaataaggaaaatatacatttataagggcatatgaactaatttttctccataaaattattgtgtattgaacctttactaaaaacaggnacaaattaatgcaatcaattttttattgctaaataacttctaatgttaatatccct

SEQ ID NO: 848 - DNA, 594 bp, Gossypium hirsutum
  Clone ID: LIB3825-014-Q1-N6-E2
attccgtacattttcttcattttgatattttcttttcttttttttcatgccaaatttcatataacacaccgcatatataataataaacataaaataagtttagagtaacaaacacgaagacgagcaaatatataagcttaatacaaatatacgacagtaattgaaatgtccatttatgtcctaacagcaccaccaccctcatgagccttgttctccatgttctgtcccacatccttagtcttctgtcccacataccctaccatgtcccacatccccctctttgcctgcccttttccaactccggcgccggcgttagcccttatcatgcgcttcaacccatagttgagcgaagacagccccgtcaacccgaatgctcccgacgacaagaaaccagccaccgccatggaaatggcgatggtggcagggacaataactgggctgaagataatgaagaggggtatggcgatgctaagcccgatgagggtgccggtgagtgtaagcgctgccaaagcaagcaatgagccaccgacagggaggagagtgaggacagctacaatctgggtgcttgatggtcctgtttgacggtagtggggt

SEQ ID NO: 849 - DNA, 588 bp, Gossypium hirsutum
  Clone ID: LIB3825-014-Q1-N6-E3
cctctctttttttttgtttttttttttttttttttttttttttttttttttttttttttttttttttttttttttaagaattaggggggttaaaaaaaaaaaaaaaaaaaaaaaaaaaaaaaaaaacgggcccaaaaaaaaaaccaagggaaaaaaaaaaggggaaaaaaaaaaaaaaagggaaaaaaaaaaaccccaaaaagggggggaaaaaaaaaaaccggggggcaaaaaaatccaaaagggaaaaaaaaaagggcagggggggggccaggggaaaaaaggggcccgggggaaacgggggacaaaatacaaccccaaaaaaaaaagaaaaaaggcggggaaaaaaaaaaaaaaaggggacccaagggggaaaaaaagggacaacaaaacggcaaaaaaaaaggaaacccggaaagcaagaaaaaaaaaggggggggccccagaggggggagagccaacaagcgggggggggcggccggcgggcctttttcaaaaggggaaaaccgggccccccgggttaaaaaaaaaaacccgccccccggagagagggggcccccgaaaaagggcagaaaagggttttttttt

SEQ ID NO: 850 - DNA, 564 bp, Gossypium hirsutum
  Clone ID: LIB3825-014-Q1-N6-E4
ccaaataacaatcatttacaaccatttaaggtaagccaaaacaaaatctttgttgctgtacagggataagataatactactaaggcagcctaaaaaactcgtatactaaattaaccatatgttagaacccaatgccaaatgcaattatctattaccttatttcatcattttgcaatatgcctaggtcgaatcctaaggacggatcaatccgtcttatgctatgtgcaggctcgtgttacgatcctaaactgcacagttaagggacatgtgaacttctgtaaactcactcttaagttgactccatctcggagaaggtaatgttgaaatttaaaacgccacaggaaaatgtgtgaaggtcttaccatggctcagagttattgccaagataatttctgacataccatggccgggtccaacctccctccattgcaatgagattgagacgaacaatcaatttcttcacagtatcttcttctaggttgctaactggatctgttgacggattttgtgcggaagaactcttcatgtcttgatacaatttgagaaatttcagagcctgctcgt

SEQ ID NO: 851 - DNA, 593 bp, Gossypium hirsutum
  Clone ID: LIB3825-014-Q1-N6-E5
cccccccccccctttccctcttgatatcttcttctataacaaaccttctcgaacaccttctttggtagtatttggtttcatttcttggtcattctcaaccagctctttttcttcggatctttttgaatccacaaacggtacatcttctcgagctcttttcatgatcaccacttgagcttcagtgaaaacttgaagcagttctgaaggagtagccgctggatcaagtttcaaacagcccttacaagactttagaccttcttgacaggaactgcaggttgtccaaaatgtatcagttcttgttgagcaaggaggagcagaattggaataagtagcaccgtgctgatcaccgatgtttgagtttttaacactgtaggaattatggaaaccattagagcttgttgttgccattgatgatttcccatgtagaacattcgtaaagctaccccttaagttcagcttctggtcataagaaaatcttcttgctttatcagacaacaaactccaagcttctaatagaagtttgaaagctcctgcacctgcgaatttgttttcgtccggatgaagaataaaagccagcttcatgtaatgtttcc

SEQ ID NO: 852 - DNA, 327 bp, Gossypium hirsutum
  unsure (1)..(327): unsure at all n locations; Clone ID: LIB3825-014-Q1-N6-E6
tcttcnngtcttcttaactnnncgactaccgntgtgccnncgtctcttcaagcaaagctttctttccggnatgaaagaaaaaccccnnatctcatcgcggccccttgattctttnaagccacccgacaacanngctttgccaggacgtngaacgaatcttcgtctattgaagtttaccattgggngatggcatnngtaatttgggaatccaaacccaccatcctctgtcacagtagcatggtgacctcccatgctgaagaggcggaggagatgctgcatatcttcattctcgagcatttcatgacttctgaggcgaatctcctcctc

SEQ ID NO: 853 - DNA, 219 bp, Gossypium hirsutum
  Clone ID: LIB3825-014-Q1-N6-F1
aaacaacaaaactggcatgaacattggtacatatatgtaacaaagtgcacaaaaacgacaaaaccttaaaacaaggtacgaaaaatataggatttgcaagaaaagcaatagcctcatcaaagatactaataacacacccttaaagataatcatgatgggatatgctacaaaaccggcactaaccaggagttaaaggaatgaagcttgaaaccaccttat

SEQ ID NO: 854 - DNA, 580 bp, Gossypium hirsutum
  Clone ID: LIB3825-014-Q1-N6-F2
aaataatagtgtcattaaatgttgaaacaagaaaaaataaaagctcgttatacccaaatgacacaattaagtctatccacgaagttaaataagcaaaaataaaatgatatttgaaatccaatcacaaatcacatgaaattctattaagaatgaagtcactaaattacttgcaagataaatactatggtaaatatggaatgcataaagaatcaaaatctctcgaggaaaataaaaagaatggggaagaataaacctttgtaaatgtatcacaagcagttacgctgtcgattttgcttctggttctgcttcggcaccagattggtccttagtagccgtagtagcatcgtgttcgggggcagaaccgtttgccgtgtcatctttttcaggcgccattttctcggcagatgcagttccatttgaagcagcttcttttccgtttttagggtcgtttttgccatcctttccttctttaccttcctttgctggaggaggtggaagcatgtgaggcgggggagtatgcttcagcttcacgagaatgtgccgcattcttgaaagacagtcggttttccgggttttggtc

SEQ ID NO: 855 - DNA, 198 bp, Gossypium hirsutum
  Clone ID: LIB3825-014-Q1-N6-F4
gttgcaaaggcttattgagaggattcatacgctatgcgttaaacgtgacaaatttggaaaacattctgacgagacgtaaaactaatgcttaagaaggcgggctttggcgattgccggaacatatagcctaatctgcaggatctgaaggtaggaggtcataaagctttttgatctgatcggctactatcccaagggcct

SEQ ID NO: 856 - DNA, 428 bp, Gossypium hirsutum
  Clone ID: LIB3825-014-Q1-N6-F6
ggttacaaattggatttatccattctttaatggatgatgaaaacaacacgggtttagtctaaattcaaaggtaaaaacaaaaaatacgtgcattggcaagaccccgcagggaagaaaaagaaaacaaggcaaacagccgccaagaatgtgaggagaagggagcaaaggcaaccacagaaaaagcaagggaaaaaaagagtgcggaaggtactaagaaaaaggaacgccttgggggaggggccagggaacaccgcatttgaatacggcagcagcagggaacgcagacaaaaaaagggcaggagcgggcaacctaccaagaaagaacaaaacacggcttttcatgggaaggtgagaccaattataaaaaaggggacccccaaggccggtgggccccaaaaaacaacaatggaaaccccgagaccggaaac

SEQ ID NO: 857 - DNA, 435 bp, Gossypium hirsutum
  Clone ID: LIB3825-014-Q1-N6-G2
tgagagcggaattccatcaacaacaggattaaagacacttaactagcatgaactactgttgattaagccgcgaagtaaagatatctgcttatcactgactagatctatgaattaaaaaccctttctcaagaggttacaagattaccaaagcatacacaatctgtgaaataagtgtgacaactaagacatcgaagcattttcgcataaccactgacaatcgcttaacataatattagccgactcattaacatatatgacccgataaccttgcactcagtgatactgtaaaactttgataagatttcagataaattatagacgtagtcacacaaaacgtttgaaaacaaattggtgcaaaactattcaacaacctcatcaaactacatcaagtgaagccgcaaatcacgctcatccttatgccacaatactaatgac

SEQ ID NO: 858 - DNA, 597 bp, Gossypium hirsutum
  Clone ID: LIB3825-014-Q1-N6-G3
gtgaaatactcttctttttctttcaaaagtttagaacaaaatgttaccttaattttacaaaactcagatttgacctttctaatattaattaattattaagaccagtatgagccaaccaaacaaattgaatataaagatatatctccataacatgatatgaaacaggatgtggcataaaatgcaaaataattactaaaataacatttccaagatgataaggcactacctcattaccgtcagcacaatagcccctaagaaatccttcgcaagtggaggcatttggattcacatgcacgtgtctataaggacaattttcgtttgtgcacaaaccttgcaggaaatatgaacaatcaggcattcgttctggaatgaccttatgagtcaatttgcagttgggatttgaacatagacccttgagaaattttgtgcatacagatattttggagggatcgtgaatatagggacactttccatcatctttgttgcatttcccaaaccttgtgaaaaattgacagtacttgcgctttttaaccaaccgtaaccttgcagtgtgcaaactccaacgaactttctcacttgccaaaacacgagtacgct

SEQ ID NO: 859 - DNA, 558 bp, Gossypium hirsutum
  Clone ID: LIB3825-014-Q1-N6-G4
gatcccaaataaagctttaaaaaaaccacataaatgtcagacaaacagaaccatcggacacgcccttctatgtgtatccacaacaacatgctggagagatttgtgaaacattaacaggaatgaccacggaccctgggtcattgccagctattttgggccacgcccacccgcccgaggacaacatactccactaatgaaccgcgaaaaggctctaacactaacaaactaacaaccaaaggctgcaagaaagcggggatccttggactaactctcccaataataattcggtaatacttgagaaataaacctacgtcccctaatgggggggctaaataaatttatttggccctgccggattgccggtaaaacactgcactgaaggcgtgagccaacacaggaaccggctgttagcattgccaacaaactaccaccatggactctaccttcacgagctgaaacagataaccctccttgggagacagagcaacaagcattcggaaccccatatggcctcaaactagaacaactagtgctcgcagaagcttctacctcactcca

SEQ ID NO: 860 - DNA, 573 bp, Gossypium hirsutum
  Clone ID: LIB3825-014-Q1-N6-G5
gaaagacacaagcttaaaaaagcatcaagaaaaagttgaagtacaaaattcaaacaaaagcttcaaaattttctcaagaataaataaagataacctccttgtactctgcagttgaattcaatcaaaacaaaaaccaagttctcaataaagcagaactacaactatgtctcaagagaaaaatcccatcattcattcctcttcagcgattcttcccttctcactaacatagataccatcaaggaactttctaatatccttgttcttcacatggcatttctgatttattaaagctgctgatcgtgacacaagttcaatatcattaccatccaaaacaatctcatccttcaccttctcagatcgaactatggaaaccccttccaacatatccaccttacgcaccttcttctcgccaaggaaattacggatctcgatggacttgttggcattagtgatggaggcgttgatgggaaagtgagcatagacgaacctcattttgtaacggtatcccttggtgacgccggtgatgaggttctcgacgtggctgaaagcggtgcggatggcggcgctagtctt

SEQ ID NO: 861 - DNA, 453 bp, Gossypium hirsutum
  Clone ID: LIB3825-014-Q1-N6-G6
gggggaaacccaaaaccccaaaaagggaaaaaaaaaaaaaaaaaccgggaaaaaccaaccccccttaaaaaaaaccaaaaaaaaacacccccccaaaagggaaaaaaaaaacccccagggggggggggccaaaaaaaaaaaaaggggaaaccaaaacctcccccgaaaaaaaaaaaaaggggaatttaaaaccccccccggaaaaaaaaaaaaaaaccggggggggggggggaaaaaatttaaagggggccccccccccccaaaaaaccagggcaaggcccctgggggggccctttggggaaaaaaaccccccccttgggttaaaccccggccgggagggaaaaaatctccaccccccggggggggaaaccccaaacccccccggaagggggggaaaggccaaaaaaaaaaaaaaaaccccccccgaaaaaaccgggccccaacccggggggg

SEQ ID NO: 862 - DNA, 584 bp, Gossypium hirsutum
  Clone ID: LIB3825-014-Q1-N6-H3
ggaagcaaagagaaaataaattaaaatatcctctctaggttttgctcggatgtttcctatagcaaatttaactgttacagaactattataacatcgtctaaaccttctaaaaataaaaatacatcctgcattattcatagctaggtcttttttaaatgtaaagctaaggaaaaacgggagatcagtcatccgcttagtcaatagcaattctcgtatttaacgtacaatgcactatttatgcctcttctcttttcaagtcccctcttcagagctcatcttttaatgcctcttgatgagcagttttttccctgttcttctcaatgaagtcaatgatgtcttcctttgtcctctcaccttcgtatgcacttatgtttccgtccgctgatctaaagtaaacagttgggtagcctctaacatcaaagtttggatccacgatatcatttgcagttgcatcaagttttgcaatcaaaacactagcatctttttcatagtggatagcaacttcctccaagattggtgctaatttctggcaatgtccgcaccagggggcataaaactcaagcagaacattttttcctgatttg

SEQ ID NO: 863 - DNA, 579 bp, Gossypium hirsutum
  Clone ID: LIB3825-014-Q1-N6-H4
aatgttccaagcgaataatcataaaattaacatagttttaacaccaaggttcaacaggtttagtttaataatccatgcaaccccaaacatactagatattgttcgaaattccaagaagcaaagcccaacaaaacagatgttcaaaatacaagcactcccttaacagtagaacataacacgcttgacattttccttgagggcaggcagaggtctgacggcagcactagcaccaggtcctcttgtgctacgcccaccagcagctgcagctccacctccacgccctgcagctgtggcacttgtcattgatccactgtctgatgtttctggttccatataaaaccgagctcggaatgcagcaagatgtgcgtagtacgcagggggaacaatagacactgatcgtgtgcaccttgcatatgtatagcaaaggttatttgtgagagattgtaatgcatcagctgtaaacttgttctcatcccatagcacatggtaatgagctggacggcttgtaccctgaatcccagcatggctgcataggtagaagtcaaactccgttgggtgacaaattttggagtccaccac

SEQ ID NO: 864 - DNA, 519 bp, Gossypium hirsutum
  Clone ID: LIB3825-014-Q1-N6-H5
aatactcaattttaagctggggctcaaataattaaacataaaaaaaaacaaaaacaaaaaaaaaaacccaggccttttttacaaataacctaaacccaaatgatccaatccctagcccactaacctaaagcctagcctaactacaggggggccctcagcaaaaacacaacacagcagaaaccctaagcagtagcagcaaactggggccgcagtaaccgccccaacgtcgccccacatgttgggcacgtggccccgcacccaccatgcacgtttttcctgcaaacaaaccacggatagcactagaaggaccgaaaatatagcaaaaattgtaaaaagagattatttttcttcttcttttttcttctttcggctataaaaactgaggaatacatttggaaaccaaaaaaagggatttcaaaaaaacaatttaaaagaatcagagagcagcttgaagggttttttttccttttcttttcacttacagtttttcttcttttggttttttcccacgcctccggg

SEQ ID NO: 865 - DNA, 544 bp, Gossypium hirsutum
  unsure (1)..(544): unsure at all n locations; Clone ID: LIB3825-014-Q1-N6-H6
nntttttntatttttttantattttttattatttatatatatttttgtatttgtttgtgtatcatttatcatttgtataacttatatttattatttttctggagaggaaagagtaaacattcaagaggtacttctatcctattaatcacacaaacaaggaatgggcactaaggaatcttttcacaaacttcaaaaaacgtaaaacaaaacagggatcccaaaaccaaaagtgctggctggaacggtcctcatgaccttcaccactccggccaacaacagggcagcatcttgtccagagctgaggtgaaggcccctgtgccttcatcaatgatgaccatggttgccgggtcaaagtggaaaccattatcaattacagctaaaatgaccaggggaaccaaaaattgaacaagctggggcttcgctttaaaaacccaaatcattctctttagcttttggagagaaccctccacacataggagacaaaccgtcgagcctatgtcctatttagacaagcccctagaactgaccggatgccttccgtaat

SEQ ID NO: 866 - DNA, 605 bp, Gossypium hirsutum
  Clone ID: LIB3825-015-Q1-K6-A1
aaaaacagtgaaataaaagcagcgtaatgggtgaagaagtgaaggtttttggatactgggcaagcccttacagctacagggcagagcttgctttgaagttgaaaggtgtttcttatgagtacataaatgaggatatctttggcaacaagagcgatttgcttttgaaatacaatccggttcataagaaagtcccggttcttcttcacaacgggaaaccaattgtagagtctcttgttatacttgaatacattgaggaaacttggaagcataatccctatttgccacaagatccttatgacaaagctaccgctcgattctggatcaagttcatcgacgaaaagtgctttcctaccctttggctagctgcatggagcgccgagaatgagcgagaaaaagtgacgaatgaagcttgcgagtatctgaaaacgcttgaaagtgcgcttggaaagaaattctttggtggagaaaccattggaatggtagatattgttgctagctctgttgggtatttcattagggtcactcaagaaattatggggcaaaatctgctgtcagctgacaaatttccccaattattccaatggtctgaagatttcgcaaattgc

SEQ ID NO: 867 - DNA, 579 bp, Gossypium hirsutum
  unsure (1)..(579): unsure at all n locations; Clone ID: LIB3825-015-Q1-K6-A11
ggatttttgtgaatctgttggagnagttactgaggttcggattatgaaaggtaaagatacaagtgaaaacaagggctttgcttttgtgacctttagaagtgtagaattggcgtctaaagccattgatgagctaaataatgctgaatttaagggtagaaaaattagatgttctacatcccaatcaaaacatcggttgtttattggtaatattccgagaaactggggggaggaagacttgaggaaggttgtgtcagaggttggtcttggagttacaggtttggaattagtgaaggatatgaagaactcaagtagtaacaggggttttgcctttgttgagtattataacaatgcatgtgccgagtattcaaggcagaagatgatgagcccggaattcaggcttggtgataatgctccaagtgtgagctgggctgatcctaagaatgctgattctcctgctgcttctcaggtaaagtccgtgtatgtgaagaatttgccaaaggacgtaacacaagatcagctaaagaagctatttgaacatcatggaaagataactaaagtggttctgcctcccgcaaaacc

SEQ ID NO: 868 - DNA, 489 bp, Gossypium hirsutum
  unsure (1)..(489): unsure at all n locations; Clone ID: LIB3825-015-Q1-K6-A12
ctcttttcgtgtaccanaatactgtgagaaatatgtcaagcctgaagagttgtaggagcagaagaagtgaagtcaagtgacaaaaaactaagtgaagatgaatatgctgcctcggaggatgaggaaaccgctgngaaaaatagatctttaggcacatattatgccctgcatactcgctacaaaaattgtcttgtgttgtacatgattttcagctctaagaaaattcgaacacgacagaaccggggacatgagggtaaagtaggcaatctttcctcatgttctcattacttgtcgtggatgtttgtgagaagtgctccattgggggcaccccactgaacgatttatgcgcgcgcctgcagctgcatacccgcgccgactgtgcgtttgtccagcgggccagccttcccccgcggcggaacagacttcttggcttcgtcgtcagcaccttgacgttggtggctgagcccctgtagcctcagcggctggcct

SEQ ID NO: 869 - DNA, 522 bp, Gossypium hirsutum
  unsure (1)..(522): unsure at all n locations; Clone ID: LIB3825-015-Q1-K6-A5
ggnaagctgttnganaacccattcaggtggtggnacagnngcaaannaagcgttcaagnaaaatgaaggacagtttgagtattccatttttagtattgttttaagattttttttgtgcgtcataggcagttaaaatatattttgttcaatgaatttatatgtgttgaacggcagggtggagaatgtcatctgattatagaagaagttggttttgattttgcacgatttctctaacagtatgtatgcaagaccacgacattgagaatacgatattataaaacacacttcaattccaatataaaaaaaaaaaaaaaaaaaaaaaaaaaaaaaaaaaaaaaaaaaaaaaaaaaaaaaaaaaaaaaaaaaaaaaaaaaaaaaaaaaaaaaaaaaaaaaaaaaaaaaaaaaaaaaaaaaaaaaaaaaaaaaaaaaaaaaaaaanngggggggggnggntaaaaaaaaaaaaaaataanggggggggggggggaaaaaaaaagtttttttttggggaaataaaattaa

SEQ ID NO: 870 - DNA, 538 bp, Gossypium hirsutum
  unsure (1)..(538): unsure at all n locations; Clone ID: LIB3825-015-Q1-K6-A6
caggnatgatgcaaatccaanaacggtggaattggtgagacaacagattgggggatctgttttggttgtaaacaagtgccccaattcttcattaagtgtcagcagaagcagcggtgaaatggaagaaagacccagattttcattaggaaatctcttgtggtctcagcttgagcgacttacatccagtttcggtcattaaggaaccaaactaccctttcatgctgtaactaaactaccctttcatgctgtaactatgtcattgtctgtacataaatttcttcatctcttggaataaatcagcaattgcttacattgaaaaaaaaaaaaaaaaaaaaaaaaaaaaaaaaaaaaaaaaaaaaaaaaaaaaaaaaaaaaaaaaaaaaaaaaaaaaaaaaaaaaaaaaaaaaaaaaaaaaaaaaaaaaaaaaaaaaaaaaaaaaaaaaaaaaagggggcggccccttttaaaaaaaccaaattttactttccccggctttgcaaaattttaaattttttttttggggccccccaaaattaaat

SEQ ID NO: 871 - DNA, 177 bp, Gossypium hirsutum
  unsure (1)..(177): unsure at all n locations; Clone ID: LIB3825-015-Q1-K6-A7
gggatttgcanagtgtgaatatataaggaatgaggactttggcaatgggttatcatcatatgacatcttcattttcgtggcttgaatgtatggtttatgaatggggtgtaattagtcatttgtggtagaactgtgttggagatttggctttcaattgaaatggtctttaacttcatc

SEQ ID NO: 872 - DNA, 589 bp, Gossypium hirsutum
  Clone ID: LIB3825-015-Q1-K6-A8
actataaacttgtacggccaaagatccttcccacgaaaaatcgaaagaaagaaaaaacacggggatgccgcctgccacgtgcgcctccgcctcttcctcctccatcgtcaactcttctccgatcggtggcggtggcggtggcggaggaggtggagagatcatgctttttggagtcagagtggtggttgattccatgaggaaaagtgtgagtatgaacaacctttctcaatacgaacaacctcatgaatcgaacaagaataacaacaagaacgacaaagatcaaggcgatgataatctcaccgccggttacgcgtccgccgacgataccgttcctcactctaccggaaatcgagagcgcaaaagaggggtgccgtggacggaggaggagcacaagctgtttctggtaggactgcaaaaagtagggaaaggagattggagagggatttctagaaacttcgtgaagactcgaactccgacacaagtagcaagccatgctcagaaatactttctccgacgaagcaatctcaaccgtcgccgtcgcagatctagcctctttgatatcaccaccgatacggtgcaggcaattcca

SEQ ID NO: 873 - DNA, 574 bp, Gossypium hirsutum
  unsure (1)..(574): unsure at all n locations; Clone ID: LIB3825-015-Q1-K6-A9
gtgaccttggaatggagattcccnattgaaaanattttctagcacagaaggtgatgatttacaagtgtaacatccaaggaaaacctgttgtcactgcaacacagatgttggaatccatgataaagtctccccggccaaccagggctgaggccactgatgttgccaatgcagttcttgatggcacagactgtgtgatgttaagtggtgaaaccgcagctggagcttacccggaacttgctgttcagaccatggccaaaatatgtgtagaagcagaaagcactcttgattatggagatgtcttcaaaaggattatggaacactcgccagtgccaatgagtccgttagaaagcctggcttcttcagctgttagaacagcaaattcagcaaaagcatctcttatattggtcttaaccaggggaggaagtactgcaaagctggtggctaagtctaggcctggaatgcccattttatccatggttgtccccgaaatccagactgattcgttcgattggtcgtgcagtgatgaagcttccacaaggcacagcttaatgtatcggggttttgatcccagttt

SEQ ID NO: 874 - DNA, 592 bp, Gossypium hirsutum
  unsure (1)..(592): unsure at all n locations; Clone ID: LIB3825-015-Q1-K6-B10
attgcccttcttccccagtctctcaaaatgccgttcaagaggtacgtggagattggaagagtagctctggttaactacggaaaggactacggcaagcttgttgtcattgtcgatgtcgttgatcaaaacagggctcttgttgatgcacctgatacggtaagaagccaaatgaactttaaaagactgactctcactgatatcaagattgatattaatagggttcctaagaagaagaccttgattgatgctatggaaaaagctgatgtgaagagcaagtgggagaacagttcatggggcaggaagctgatcgtccagaaaagacgggcatcgcttaatgattttgataggttcaagctcatgttggcaaagattaagaaggctggaatcgttaggcaggagctagctaaacttaaaaaggagacggcagcctaaacttttttctatttaagccttgccttgttatacatttcagtttgagatattgtaaacttctaccgactttttttctcataattgttgcttatgactcctgctatcaaacctctatctgaaattatggttgactntttaatctgaccctcatttccttttg

SEQ ID NO: 875 - DNA, 601 bp, Gossypium hirsutum
  unsure (1)..(601): unsure at all n locations; Clone ID: LIB3825-015-Q1-K6-B11
gnaagnaactagtgttagtaactggtgacccgactcctacattctgctaagatgggacaaggccaagaacacaagaccagagatgtcccccaacttgagattcaggaaagaggggaaatattcttcttctataggcctaaagtaaacaaggaggaagttcatagtgttgatgatgtgcagcgcttgtacattgtattgcgtccagagtccggtgagagaggtgttgaagagaagcaagatccccactctggcaaggaaggtgccaaatcaagatcaggtgatcaacctcaaactggctcctccatgaataaaactgaaggtggacaggggagccaggaagtaaatatcgaggaggagccattgttaaggttcatagttatgggcagaaagagacttccagatccaggcaagaagtcccaaactttctggggttttgttgaattagtgaccacaaaggtagaagatgtaaaagatgctttaaaaggagaggaatatgatacatcatcaagaggtcaccgatatcaacctcctgcaagagcagtgggagaaggtgtttaccgtattgtgaggcacaattcaagtaagaacaagatgcacactc

SEQ ID NO: 876 - DNA, 578 bp, Gossypium hirsutum
  Clone ID: LIB3825-015-Q1-K6-B12
gttttcatggctgatctgatgggaacgaaagatatgaaaagggttgaattttttggaggaattaaccgaaaatggtcatcgaattcaagaacaagtattagaggagatactgctgagaaatgctggaactgaatatctaactcgattcctccatggccaaactgataaacaactcttcaaaaacaatgtacccattgttacttacgaagatataaagccttacatcgatcgaattgccaatggggagacttcaaatatccttttagctgaccccatctccgagttcatccaaagctctggtacttcaggagggcagccgaagttgatacctatgacagctgaaaattttgagaaaaagacgttagaactcaccttggttgatccagtcgtaaaaaaatattttgatggcttggaaaaaggcaaaacaatgagccttttttttgtcaaaaaagggagtgaaactccatcaggtttaacagtgagaacgctcacatcgtgctacttcatgagcgatagcttcaagaaaagtgcgcccaaaatctgcacaagtcctattgagacgattctctgcttggacc

SEQ ID NO: 877 - DNA, 604 bp, Gossypium hirsutum
  unsure (1)..(604): unsure at all n locations; Clone ID: LIB3825-015-Q1-K6-B2
tnaggggattaacgccagnaagaatttcaaaatgggttgagaaaaaccaaggggaagaaaggaagaggtggtgaccagagaatacaccatcaaccttcacaagagactccatggctgcacattcaagaagaaggctcccaaggctataaaggagatcaggaaatttgnccgaaaaagccatggggacaaaggatgtacgagtcgacgtgaagctgaacaagcacatatggagccgagggatccgaagtgtcccaagaaggattagggttcgtattgctcggaggagaaacgatgacgaagatgcaaaggaagagctctactctttggtaactgttgctgaaatcccagctgaaggactgaaaggcttgggcaccaaagtcattgacgatgatgatgagtaatttattggttttcttttagtttatgaaaacttttaaaattttgtttgagaccgacaactttatcattagaattttttgggttaagttttgtagtaatttcttgtgagacattaaagttttcctcgtatatttgggttcattgttgttagtcttttaagctttaattgtagtggaaattacatatacaaatagtgatgggccgg

SEQ ID NO: 878 - DNA, 579 bp, Gossypium hirsutum
  unsure (1)..(579): unsure at all n locations; Clone ID: LIB3825-015-Q1-K6-B3
ctttcactactttttctaaaggcattatatttgttgatatgtactttgagaatttttgaaatggatgatgtgtttaggtgngaccaaatgaanacaagnanaccctttaatgagaaagagatggcgagggaaaggaaagaagagagacaagaagatgcagagctgaggaaacaagaggcccgccatcataacgccacagctggccatgctggtggtggtggtattggtggcactggctacaccacagctgggtacaacataggcgacactggtggctatggcggtaccggtggacatgacaaccgtgggtaccccaccgcaggtagtgggtatgatacaggcaggcaagatgacctcagcagtatggggtttggcggagatacagagggtgcttacggtacaacggggaaccaagacttcccaaatgcggcgtctaacaatgctgggactagaaggaacacccgcggaggtacccaggatgatccttattatcgatcctattaaatgaaaggagcgagtttttgtgctctgctactgccttgagtctgtgtttgttgtttgtttgcttctacttttttc

SEQ ID NO: 879 - DNA, 594 bp, Gossypium hirsutum
  Clone ID: LIB3825-015-Q1-K6-B5
tgttaaagaggtatttttaacttaataccttgcaagaatatgaaattcaatgttgaatttaccataaataagttaattaattagcggatcgtttttttggatatcctggacttaatgttgcctgttctagctaggatgctctcttacaagctcaccttgtctggttgggatttatgatgtattaataccttataacgaagtttgtcacttggtagcatttcttccctatactgtgttggggtttagagtttaggggttatcccttttacagtttaatccacaacctccattcattttgttcttaaaggaaaggtcagaatttgggttgaaaacaattcaactcttagcatcttatgatctgcattgtttcctctaccattgcagattccatttgccacttcaaatcttgtgctcttagttgagatgactgacttcattagttggcttttgatataggttattacctttctctttcctagatgtgagccgctctgcggtgatgtagagtatgttatcaattagatcgtcacatatcagaagctacttatcagaaactaagaatgaatatgttaaaagttcataagacaatcattc

SEQ ID NO: 880 - DNA, 533 bp, Gossypium hirsutum
  Clone ID: LIB3825-015-Q1-K6-B6
gttacgatggcggctactaccttctctccttccttctccactccctcggtcaattcttcctccagagcccacaaaactttaaccaaccctaatctaggctttttggcctcagtttcgagatccttgaggtctctcaaagcaaccaggctgactactgataatgcttgtggctcagctatggcctctcgtatggtctccgttcctgccgtccagacacacatatctctcgattttgagacctttgtcttcaagaaggagaaagtctccctcgctggtcaggacgagtacattgtgagaggaggaagagatttgtttaagttgctgcctgacgctttcaaagggattaagcagattggtgttattggttggggttcgcagggacccgctcaagctcaaaatttaagggattctcttgctgatgcaaaatctgatatcattgtcaagggtggactcaggaagggttctcgttcttttgatgaagcttgtgctgctgggttctctgaagagaatggcactttgggtgatattttggg

SEQ ID NO: 881 - DNA, 580 bp, Gossypium hirsutum
  Clone ID: LIB3825-015-Q1-K6-B8
ccctctgaaaccctaaaccgccgccgccgccgccgcccgtcaaacgccgacgaaaatggctttcgagggattagttctccgcggcaccatgcgagcccacactgacatggtcacagccatcgccactcccatcgacaactccgatatgatcgtcacttcctctcgcgacaagtccatcatcctttggcacttgaccaaagacgaaaagacctacggtgtcgctcgccgccgtctcaccggccattcgcactttgttcaagacgttgttctctcttctgactcccagttcgctctctccggttcctgggacggtgagcttcgtctttgggatttgaacgccggaacatccgctcgtcgtttcgtcggccacaccaaagacgtgctctccgttgctttttcaattgataaccgtcagatcgtttcggcttctcgtgatcgaagcattaagctctggaacacccttggagagtgcaaatacacgatccaagatggtgatgctcataccgattgggtcagctgtgttcgtttcagcccaaatactctccagcctaccatcgtttcagctttttgggataagacc

SEQ ID NO: 882 - DNA, 579 bp, Gossypium hirsutum
  unsure (1)..(579): unsure at all n locations; Clone ID: LIB3825-015-Q1-K6-B9
agnaacacttgagaagtagttaagctacttgcctatattagcgataaagatctctttgcagaattctacaggaagaagctcgctcgccgactgctttttgaccgtagtgctaatgatgatcatgaaaggagtattctgactaaactaaagcagcaatgtggtggacagttcacctcaaagatggaaggcatggtcacagatctgacattggcaaggggaaaaccaagctagctttgaggactatcttaggaacaattctgctgcacatccggggattgatttaacagttacagttcttactacaggattttggccgagttataaatctttcgatctcaatctccctgctgagatggtcaagtgtgtggaagtcttcaaaggattttatgaaacaaaaacaaagcacagaaagcttacatggatatactcgctgggaacttgccacattaatggcaagtttgaacacaaaactattgaacttattgtttctacttatcaggctgctgtcctactgctcttcaatgcttctgatcggctgagctattcagagattatggctcagttgaacttgacccatga

SEQ ID NO: 883 - DNA, 463 bp, Gossypium hirsutum
  Clone ID: LIB3825-015-Q1-K6-C1
cagaaaatggcattatgtttgaattttaatgagaagagcaatgaacttgaaagttttatcttgaatagaagttcatttgcacagactgtggagaatttattttctctttcattcttagttaaagatggaagagtcgaaatagtggtgcatggatctggttctcatattgtctcacctaaaaatgcccctgctgcctcgtccatagcaagtggtgaggctgcttacagccattttgtgttcagattcgactttaaggactggaaggatttgcttcgaaattgaggaaatataagataaaatgtctagaagaaaatacgaatatgatgaagatgtttcagcaatcgcaacattcgccgtcatagtgtattgtataaatatttttatcattttaacttttaacatttttgtaaaaataatatgaattatattttatttattgataataatattattttattcattt

SEQ ID NO: 884 - DNA, 616 bp, Gossypium hirsutum
  unsure (1)..(616): unsure at all n locations; Clone ID: LIB3825-015-Q1-K6-C10
antcatcgacatggctagtaaagcctcatttgccgaccaacagaagcaagtgcagngaaaatattcataatcaaattaaaagcctctgcactgtaatggatgcaatccttctcgatgtcaacgagccgcaagaatctcagtccaaagctactccttcccgaagtggtctcagttttgctattgggaggaacggcccaactaataaccatcctgatgttcctaagacaaggccattaaaacgcaccgaactctcacagaggttgaaggattccattgggtacactcttgatgtcaaacagtcgcataccccacagcgaagctggacaaggtgtatttttgaatggtgaagctactgttggatctgtaattgccatataccctggtgttatatattccccggcttattaccgatacattcctggatacccaagagtcgatgcacaaaacacgtatctgataacgagatacgatgggactgtcatcaatgcccaatcttggggttttggaggtgaaacacgtgaattatgggatggatcgaaaatgctagatgcaaagctcaacagggttgcaacagagaaaggctcggatcggctttggaaaatgcttagcaagcctt

SEQ ID NO: 885 - DNA, 602 bp, Gossypium hirsutum
  Clone ID: LIB3825-015-Q1-K6-C11
cttcatttcttctcttctcctccactcttctctagctgagatgatttgtgaagatttgccgaaagattgtgcgcgttttcgatagcctcttcggggaaaagagtgtgttggaaacggcggtgaagaaagaggcgacgtccagtatcaatgccggacgtcggaggttgtggtggagaggatggcggagtatatcgagactgacgaatgtgttgctgcatgtggcgccgatagaaactccgtcggcatttcatcagattctcttctcgatcaacaattcaccgccaagctttgtacccctgcttgttaccagaagtgtcccaatattgttgacctttacttcaacttggccgccggagaaggtgtatttttgcctgatctttgcaacgctcagcgatcgaacccacggcggagcatggtggagcttatattgagctccggtgttgcccctggccctgtttctagccaagcaacagccgttgaagcccctgcccctgcccccatgtggtgatctaaattgctttcttttatttttttttttacttcaataatatgatttcatcacaattcacaattacttcatttccatatgtgaattggttttg

SEQ ID NO: 886 - DNA, 579 bp, Gossypium hirsutum
  unsure (1)..(579): unsure at all n locations; Clone ID: LIB3825-015-Q1-K6-C12
gaaacccanaaatatatataatttttgtagnaaaagnaagcaaaaatttcatatatttctagtttgtgagttgtaatttttttaataaaaatattcaaaaaagttccaaaacacctttgggtcatttttcaaatggattccgatttctggacgtctcgtctcgccgccgctaaacgccagtataatttgcagcaccgccatcaaacctctcatctggatcgtttgaccatcgatgattttgaggttgacgacgaggtccgacccgatttcccatgcccgtattgttacgaggatttcgatatcgcgtccctgtgttcccatctcgaagatgatcatccctgtgaatccaaagttacgatttgtccggtttgctatgtcaaagtttcgagagacatgctaagtcatatcacgctgcaacacggaaatttattcaagttgcagagacgttgcaggttacgtagagttgcaattccgaacagtcaggcactctctctcctcggccgggatctccgagaagcacatctgcaagtacttctgggtggtggtgcgtatagatcaagcggtgttaacgtgtccaat

SEQ ID NO: 887 - DNA, 602 bp, Gossypium hirsutum
  Clone ID: LIB3825-015-Q1-K6-C2
cggccgcgtgggttcgagggttataggattggctaccgcagaaccaatttgatcaatcgaagtttcatctctctttcttctatcctgcaaaccctatagaaatttcctcaagtgattttacgagaatgtctcgggtctatgttgggaatttggatcctcgggtcactgagagggatctcgaagacgagtttaggatttttggcgttctccgcagtgtatgggtagctcgaaggcctcctgggtatgcgtttattgagtttgatgatcgcagggatgctattgatgcaattcgtgaactggatggaaaaaatggttggcgtgtggaactttctcataattcaaaaggtggtggaggccgtggtgggcgccgtggtgggggtgaggatttaaagtgttatgagtgtggtgaacctggtcactttgctcgcgaatgccgctcgcgttatggatcacgaggcctgggaagtggccggcgtcgaagccccagtcctcgtcgccgtaggagtccaagttatgggcatgggcgcaggagctatagtccaggaagatctcctcggcgccgcagcatatcacctcgtcgtggtcggagttacagcaggtcg

SEQ ID NO: 888 - DNA, 575 bp, Gossypium hirsutum
  unsure (1)..(575): unsure at all n locations; Clone ID: LIB3825-015-Q1-K6-C3
ctaaccctagccctctatcaggattcaaactgaaagaggtaaatccaagtcggatgccaagagcgccaagctctccgtgaataagaaatcaatcacgaaagctggaaagaaatcggggaaggcagctaaggatccaaacaagccaaagaggcctgctagcgccttcttcgttttcatgtaatcattcatgaatctctcctgtatttgtcggttttctttaaattttttggtttgttccgtttgcttcgtggaaaactctggcgtttatattcttcgtaaaaaccacaatcgaagagggaggagttccgcgagcaatacaagaaggagcaccctaaaaacaagtccgttgctgctgtaagttggcaaagctggtggagataaatggaagagcctttctgaagctgaaaagcgaccttatgttgataaggcagagaaacgaaaggtcgagtatgaaaagaacatgaaagcctacaataagagacaggctgagggtccccaagaagatgaggaggaatctgagaagtctgtatctgaggtgaatgatgaagaagaagatgatgatgnaagcagtggag

SEQ ID NO: 889 - DNA, 616 bp, Gossypium hirsutum
  Clone ID: LIB3825-015-Q1-K6-C4
ggcaaaacttgccggctgacgtcatccaagtaatcgatcagctagagcgccattgcttatctcccgatggatctcttatctccaaatccgcctactacgatctccagctcgcgagagaggaaatgtcgagagaaagattacgctacttagaagcaatggcaatttactgtgaagcaatggctatggtggaagagtatcagcaagcagtttccgtggcgaatcttggagggattcgagatattcaaggtttttatccgcagcttggattgaagaattctcctcaggtttatgagactctagagcatcgattagttgttgcagaagcggctcaaagattgagacttccactaatatctaaagatggggaaattcatgaggaagaaattgagaaatggagtattatttcacggagttcacttgatagtactagtaccagtctcactatcagctcgagttcaaactcattgaattatgcaaatagtgcggcaaccagtggtacagctgcaaataatactggtgattcaggagaacctggtgttggtggtgtgcctaatcgttttcttggaatcacacctgcttatttgtggcaaactcagcttcaacgagtaccattgtc

SEQ ID NO: 890 - DNA, 602 bp, Gossypium hirsutum
  unsure (1)..(602): unsure at all n locations; Clone ID: LIB3825-015-Q1-K6-C6
ggtccggnaattcccgggggcgtacccacgccgtccgnaaaaaaaaaaaaaaaaaaagggaaaaaaaaaaaaaccaaattaaaaaaaaaaaaaaaaaaaaaaaaaaaaaaaaaaaattaaaaaaaaaaaaaaaaaaaaaaaaaaaaaaaaaaaaaaaaaaaaaaaaaaaaaaaaaaaaaaaaaaaaaaaaaaaaaaaaagttaaaaaaaaaaaaaaaaaaaaaaaaaaaaaaaaaaaaaaaaaaaaccccaaaaaaagtggttaaaaaaaaaaaaaaaaaaaaaagggggggggcccctttgggggccccccctttcccccgggggggggggcgaattagatttttttttggggggccccaaaaaaaaacccggggggggggtttaaaacccggggggggggggaaaccccgggggccccccaatttggggggggggggaaaaacccctttttggggggggggggtaaaagaggggggggccccccgggggccctttcaaaaaaggggccccccttggggggggggggggcccccccctgtgggggcctttaagggggggggggggggggggtccccccccggggcccccttctttttgggg

SEQ ID NO: 891 - DNA, 617 bp, Gossypium hirsutum
  Clone ID: LIB3825-015-Q1-K6-C7
attttcataaataatctagactcaatatcattttcataattgattatttttttaaaatttattaaaattatacaaatataactaatatttataatttttttttaaatcattaaaaattgtaaggattacttcaaaattataaaaatatttacattgttattaaaaacataaattagaagatgccaaaaataggaagaaattgaaaaattattatgccaagataacctacttgttcccgagtggagacatgaactttcaaggggagagttctcaagagagaaccccttgatgtcaaatgcaagcatagatgagaactacttgttcctgagtggagacttgaatagtttgcatatattcaaacaagaaatccatgcatggtttcataggaaaagagacggggtggctttccgtactaccacaggtctgtaagttcattaatttagttaaactgtgttccaaccttgccacatgctgcataactaaaaactgaagccacaacaaggacacacatacatacaacaatttaaaagaaaagcagaaaaatattgtcgccaggttagttaactttgattagttcagttacattgtcaccaggttaagtataaatctcttttttt

SEQ ID NO: 892 - DNA, 605 bp, Gossypium hirsutum
  unsure (1)..(605): unsure at all n locations; Clone ID: LIB3825-015-Q1-K6-C8
gngnatagcaanagagatcgagggtgaggacaaccaanaccttcatttagctgaggagagaggcgttgatcttcatgatgattttgatattgatgaggagatgagatattcgtcggtctacaggggtagaggggttgatgatagtggttatgaagaagatgaggacattttgttggattcccacaatattgagacatttggagattcatatgattctcttagtagaagcgctgatggagttcgaatgccatcaagctcttccttagtggatgatgcaccatcttcccaggcagccattagtgaagatttgaattgctctcgacctaatgatcaggcgagacagttagcatctgaactcccttctaaaagtttctctgtatctgccagtgaaagcaggatccgagacaagttgcttggtgaacatggtggaagcagtgatggtaatgagtttccagaaaagcagtctccatctgaggacttgcaattgtcaaaatctgttgattctgggtcattattgaatgacaaaattgatgggtctgataaagctagacgatctgcaaatcctactaatgctccatctaatgctntgtcaaaggttagtgaaa

SEQ ID NO: 893 - DNA, 600 bp, Gossypium hirsutum
  unsure (1)..(600): unsure at all n locations; Clone ID: LIB3825-015-Q1-K6-D1
naaaaagnaaagaaaaggaaaaggatttttcatttttttctctttgaaagttaaagaaaaaagtccagagctaccgtcgagcttgatttcttcggcatggagaaagccaattcctgcaaatctcagttccagaaattcctcgatcgccgccggagcttccgaggtattcaaggtgccatttcgaagatgaatccggaacttatcaaatctgtgattgcttccggttcgacgaaccggaatccggttgattggagaaaatccttttcggttccgtcgagtcctaaagaagatcggagtacttcgcttccttctttacctctactcaatcctgctttgaggtctactccttctgaggatagtcctgaaacagcaccgttgacgattttttacaacggaacggtttccgtaatcaatgtacctcgagacaaggcggaaagcatcttcaaacttgccgttgaaggaagctcaaaaaacattgaatctgtagactcatcaaaagctgcaaatccttcaagtgatcaacaaaacctcctcgaagctcgtaatggagatttgccaattgctagaagaaagtcgctgcaaagatttctggaaaagcgc

SEQ ID NO: 894 - DNA, 606 bp, Gossypium hirsutum
  unsure (1)..(606): unsure at all n locations; Clone ID: LIB3825-015-Q1-K6-D10
atctgattcgcttaaagatatctcaanatgttgtgcggtcaaactctagaaaggatcagcaagttgagttggtctttgatatcaataaagaagatagcttgaacaacagatttaaagaaattaaggatttgaagacggatgcggttttctcaattgatgatgatgttattttcccttgcacttctgtagaatttgctttcactgtttggcaaagtgcctcagatacaatggtgggatatgttcctcgtatgcattgggtagatcaaaagaaaggagagaataaatacaaatatggcggatggtggtcggtttggtggactggtacatacagcatggtactctcaaaggctgccttcttccacaagaagtatctcaaactttacactgatgagatgcctgcatcacttaaagaatacataaccaagaacaggaattgtgaagatattgcgatgtcatttcttgttgcaaatgccacagatgctcctcccatttgggtgaaagggaaaatatttgagatcggttcaactggcattagcagcctgggaggtcatagtgaaagaagaacagaatgtgtcaacaagtttgtggatgagtttggacgaatgc

SEQ ID NO: 895 - DNA, 566 bp, Gossypium hirsutum
  unsure (1)..(566): unsure at all n locations; Clone ID: LIB3825-015-Q1-K6-D3
gccactctctgctcactcgccatgggggcttataagtacgtgtcgngactatggaggaagaagcagtcggatgtgatgaggtttttacagagggtgaggtgctgggaataccgccagcatccgtcaattgttagggtcaaccatcctactcgccctgacaaggcacgccgcttgggttataaggccaaacaaggttatgtggtttaccgtgtccgtgttaggaggggtggtcgcaagaggcctgttcctaagggtatcgtgtatggtaagcccacaaaccagggtgtcacccaattgaagttccatcgcagcaagcggtctgttgctgaggagcgtgctggccgaaagttgggaggtctcagagttgtcaactcgtactggatcaatgaggactctacttacaagtactttgaggttatcctggtggatgttgcacacaatgctatccgcaatgacccaagaattaactggatctgcaatccggttcacaagcacagggcaacttcgaggacttacatctgctggtaagaaaaacaggggtctccatggaaaggctcattttgcac

SEQ ID NO: 896 - DNA, 599 bp, Gossypium hirsutum
  Clone ID: LIB3825-015-Q1-K6-D4
ggactggtgagcagagcttggtgaaagcttgtacccccttgtggaacggcttgagcgtgatgcagctgccaaggttacaggcatgcttctggagatggaccaaacagaggttttgcatctcctggaatcaccagaagctttgaaggccaaagtagctgaagccatggaggtgttgaggagtgttgctgctcagcaacaggccaacaatcaagccgaccaattggcttcattgtccctgaatgataacctcgtttcctgagtgactaaattcgggtccagtttcttggcagagaagttgctaaatcctttatcaaaactgggctatctttgtttattaggctttaagtttggaacctttatatatttgctttgtttttgtcggttaatagggtttttaatacttgctagacattgtttggtttggtttgccttcgtttttctttaatttactggcttgttatggacaaccgtaagtttgttttatgttaaaacctacttttagaacaatcttgcggttttcaatttagactagtattgccagaacccgattagagtagacggtcccaaacttgtttgatcgggaattggttggtacatta

SEQ ID NO: 897 - DNA, 585 bp, Gossypium hirsutum
  Clone ID: LIB3825-015-Q1-K6-D5
aaaacagtagctctagttaacaaagcaaatcagttcctttaaacccatcacccaaaatacctttcttttgccacaggctttcaggatctgagattcttcacataagatatcggattggttttctctgacttaaggtttacatttcgttgtattggtttgtgctatttcttgccataaattttctgcttgttggttttctgatagaagagggttatggcgaatctaaatgcatcaacgtccttagttccttcagaatcctcagaacaaaggggaactgttgtggtggattcaaatgtgaatgtgcttccacctcctatgaaccagcaaaagcgaacctcctcagacggttccgtggctatcctttgggatatagagaactgccctgtcccaagcgatgtccgtcctgaagatgtagcggggaatataagaatggctttgcgagtgcatcctgttattaaaggagctgttatgatgttctctgcgtatggagattttaatgccttcccaaggagactgagagagggctgtcagagaactggtgtgaaactcatagatgtaccgaatggaaggaaagatgctgctgac

SEQ ID NO: 898 - DNA, 609 bp, Gossypium hirsutum
  Clone ID: LIB3825-015-Q1-K6-D7
cttccttccttttctttctttttgctatggcaggaactggggtggtcgctgtttatgggaacggcgcaatagctgaaacccacaaatcccctttctccgtcaaggttggcctagcccaaatgctccgtggtggggtgattatggatgtcgtcacccctgaacaagctcgcatcgctgaagaagctggagcctgcgccgtcatggctcttgaacgagtccccgccgacatccgagcccaaggtggcgtggcgcggatgagtgacccacaactcatcaaagaaattaagcaagctgtcaccattcccgtcatggccaaggctcgtattggccatttcgttgaggcccagatccttgaagccattggcatcgactatgttgacgagagcgaagtccttaccctcgccgacgaagaaaaccacattaacaaacataattttcggattcctttcgtctgtgggtgccggaatttgggggaagcgctccggagaatccgagaaggagccgcgatgatccgaaccaaaggagaagcggggaccgggaatgttatcgaagctgttaggcatgtcagatccgtgatgggggatattagggtcccttagaacatggatg

SEQ ID NO: 899 - DNA, 603 bp, Gossypium hirsutum
  unsure (1)..(603): unsure at all n locations; Clone ID: LIB3825-015-Q1-K6-D8
ngagagcttaacagtttaactttcttcagtcaacgtcagcagtttaaaccaagnaaaaagaagaagaaaccatggctttcccanacaggaaagagatgagcttgatcgtagggcaagggaaggaaagaccgtcgtccctggtggaaccggtggcaaaagcgttgaagctcaagaaaaccttgctggagggaggagccggggagggcaggcgaggagggaccagataggaagggaagggtatcaagaaatgggtcgtaaaggtgggttgagcaccgtcgagaagtcgggcggagaacgtgcggcagaagaggggattccaatcaatgaggacaagttcgcgacgaagcagaggggctaaataagtaaaaaagaaggaagaaataaaaatccaacgttgtgggaggaaagcagcggatgtttatgggtagctaaaactaaattttaaggaggtattcgagtcatgtcacgtgtgtcatcagtcatgtagtcgttagtagtaagtagcatgtaaaatggaagtgtttcagtgtttttctttaaaatagctaggtggaaaatggagatgtttgatgtcagtttatgcttctctgcagttaaaagcta

SEQ ID NO: 900 - DNA, 564 bp, Gossypium hirsutum
  Clone ID: LIB3825-015-Q1-K6-D9
tcaagtgggaaacatccccactcataaattacgcaaacaaaaggaaagaaagggtgtacgattcatttccttttttcttctcatctctgacaggtaatcggaaaagcaaacagttcgaataaatagaaaatggcgttgaatttggcgcatcagattggttctctagccgggacacaaattgcagctgaagtcaccaccggagaacaatcatcctcagcgacggctaatgtgtcgggagttcggaaagttccattggcgaatctccgatgcaacgccccaggagaagctctgtcccctccaatattaactccaccgttgacgccgcgaagcgcggaaaacaggccggctatgatgagtccgtctctgtccgccgcttgccaggctttcgggacgttatcaccgctggagacggctgaggagtcatcggcgtctgtggcgtggaaggagggagggaagaaagaggagaagaaaggggttccggtttacgtgatgatgccgttggacagcgtgacgaacgggaatacggggaattgaaagaaggcgatgaatgccattctccccgcg

SEQ ID NO: 901 - DNA, 609 bp, Gossypium hirsutum
  Clone ID: LIB3825-015-Q1-K6-E1
cttctctttctctgtttcgacctctgtggagtaaatttggaatcgatggcggccttgcagtacctaagatctcttcgaaatgagcatccagagctaggcgactggtataattctcttgcagatctgtatcaaaagaagctctggcaccagctcactctcaagcttgagcagttcgttgctctcaccgttttccaggctggagatgcgttgataaagttgtatcataactttatcactgactttgagatgaagattaatcctctcaagcttgcacatttcgctgttatagtttctcagcagtactcagagaaagaggctgctattagtttccttgaaggggtgattgaaaagcttcaggctactaaagagcagcgcatagaagagccaattctttatattaagatgcagatttccaaattcaagcttgagcaaggtgatcaaaaggagtgcaagaaacttcttgaagatgggaagagtacccttgacagtatgaccgacatagatccatctgtatatgctacctattactgggtttcatctcaataccataaatttcgccaagaatttgctgagttctacagaagtgctctcctttatcttgcgtacaca

SEQ ID NO: 902 - DNA, 607 bp, Gossypium hirsutum
  Clone ID: LIB3825-015-Q1-K6-E10
gattgctggtcgaaccattaaggtttcttctgttactgatcatgttgttacccaagatactgcagcaaaatctgccgacttcgatgatgatgagggtggtggcttggccttgaatgctcagtcaagggcattgcttatgcggaagctggaccgctctggtatcgcgacaagcattacgggctcccttggagtacccctccttaatgggtcagctccgagtccacaggctgttactttacctgttaatggccaagcggcatatccaacaccaattctacctccaatcatgtctactacggcccttgattctgttggccagcccagtgaatgtttgctgctgaagaatatgtttgatcctgcaactgagacggaaccagattttgatttggatattaaagaggatgtcgaagaagaatgcagcaaatatggcagggtgaagcatatatatgtagacaagaacagtgccggatgcgtctatctgcgatttgactccgcagaagcggcaggtaaagctcaacgtgcaatgcacatgaggtggtttgcaggccgatcaatatcagccttatttatgcaaccccaggagtacgaagcgaggtttaaatgctga

SEQ ID NO: 903 - DNA, 603 bp, Gossypium hirsutum
  unsure (1)..(603): unsure at all n locations; Clone ID: LIB3825-015-Q1-K6-E11
tctctttcttggactcctgtaatttanaagttgaaaaagcaacgatgcatccgataaatgcggttttggcggcgaggatgctatttaacacggcggcctcggtcagtgaatccgtcggagaagggattccgttcggatctccatggtggtttatctacgccgggatttcttgttttttagtacttttcgcagggatgatgtcgggtctcaccctcggactgatgtcgcttggtctcgtcgaactcgaaattcttcaacggagcggcacttccaccgagaaaaaacaagcggctgctattttgccggtagttcaaaaacagcatcagcttttggtgactttgcttctttgcaatgctgctgctatggaggttctggattgggtactggggcataatgaagcgctatttaggcgggctcaactaaaagcccttgtctccatccatagccaggaggctggaaaaggaggtgagctcacacatgatgaaacaacaattattagtggagcactagatttgactgaaaagactgctgaggaggctatgacacctatagaatcaactttctttttagatgtcaattcaaagttggactgggaagcaatgg

SEQ ID NO: 904 - DNA, 591 bp, Gossypium hirsutum
  unsure (1)..(591): unsure at all n locations; Clone ID: LIB3825-015-Q1-K6-E3
ggctcttggacgtgtgttcagggccacccttgatctccttgttgcatacaagnatcaagttgcagaagctgcaaaggaggaagaggctgaagatgatgatggtatggatggttttgagtctgatgatgacgacgacgacgatgctgatggttctgacaaggaaatgggagttgatgcagaggagggcgatgaagcggatagcatcaggcttcaaaaattagctgcacaggctaaggctttccatgaaaatgatgatgatgacgatgatgactactccgatgatgattttagtgatgatgaggagttacagtctccaattgatgaagtggacccttttgttttctttgtggatacagtcaaagttttgcaagtatcggatcctatgaggttccagaaccttacacagacactggattttcattatcaagctcttgcgaacggtgttgctcagcatgctgaacagaggagagcagagattggaaaggagaaaatggagaaggcatctgctgccactgttgcatcatgagttgagttttggattaaaatttgagtttcattcatttagaagtggtttgatgaaagtctcatttc

SEQ ID NO: 905 - DNA, 597 bp, Gossypium hirsutum
  Clone ID: LIB3825-015-Q1-K6-E4
ctcttttctttttcaagcagttgtcattgttcttgtcttaggttttatattcaaacttgaaaagaaaaaatcatggcacactttcagaatcaatattctgctcccgaagttacgcaaactgacgcatatggcaacccaactcgccggacagacgagtacggcaacccaatcccgactcaggagactggccgtggaattctagggatcggtggacatcatcacggaggccatcatggactccatcgtactggaagttcctctagctcgagctcatcttcggaagacgaaggaacggggaagaagaagaagggactgaaacagaggctaaaggagaagataccaggtaacaaagagcatcaatctcaggccacctcaactacaaccccagggcagggggctacgtatcaccagcagcaccacgagaagaaaggagtgatggataagatcaaggagaagctccctggtcaccacaacccttgattagctgcctttggtcggctatttcctactagttatataagcgttaattaaataacttgcagcaatgaagactcttgtatctcttaagactatacttaaaaggagaatttgacttcc

SEQ ID NO: 906 - DNA, 601 bp, Gossypium hirsutum
  unsure (1)..(601): unsure at all n locations; Clone ID: LIB3825-015-Q1-K6-E5
cggccgcgtgggtgagcaggctgaacgcttgaggaatggtggagttcatggnagaaagttgcaaaaactgttgatgttgaggagctgactgttgaggaacggaaccttctctccgtggcttacaaaaatgtgattggggcaaggagggcgtcttggaggatcatctcttccattgagcagaaggaagagagcagaggaaatgaggatcatgttgcacaactaaaggagtataggggtaagattgaagctgagctcagcaagatctgtgatgggattttgagccttcttgaatctcacctcattcctttggcctcatctgctgagtcgaaggtgttctaccttaagatgaagggtgattatcacaggtatcttgctgagtttaagactggtgctgagaggaaggaagctgccgagagcactttgttggcttacaagtctgctcaggatattgctcttgctgagcttgctcctactcacccaattaggctgggacttgctcttaacttctctgttttctactatgaaatcctcaactcacctgatcgtgcctgcaatcttgcaaaacaggcttttgatgaggctatttctgagttggatactt

SEQ ID NO: 907 - DNA, 587 bp, Gossypium hirsutum
  Clone ID: LIB3825-015-Q1-K6-E6
cacattaaaacaggaagaaaacacgtatgggtgaagaagtgaaggtttttggatactgggcaagcccttacagctacagggcagagcttgctttgaagttgaaaggtgtttcttatgagtacataaatgaggatatctttggcaacaagagcgatttgcttttgaaatacaatccggttcataagaaagtcccggttcttcttcacaacgggaaaccaattgtagagtctcttgttatacttgaatacattgaggaaacttggaagcataatccctatttgccacaagatccttatgacaaagctaccgctcgattctggatcaagttcatcgacgaaaagtgctttcctaccctttggctagctgcatggagcgccgagaatgagcgagaaaaagtgacgaatgaagcttgcgagtatctgaaaacgcttgaaagtgcgcttaatggaaagaaattctttggtggagaaaccattggaatggtagatattgttgctagctctgttgggtatttcattagggtcactcaagaaattatggggcaaaatctgctgtcagctgacaaatttccccaattattccaatgg

SEQ ID NO: 908 - DNA, 443 bp, Gossypium hirsutum
  Clone ID: LIB3825-015-Q1-K6-E8
cggccgcgtgggtgtagctgtcactctgttggcaccagttctccgaacatacaagtcgaattcgatccaaaattcgtttacagaaatggaatgatggttcctatagattctagtcaagaagtttcttttcactgtaaattcgaaacgttgtgcctttgccctcttatagagtctatatcaatgacaaagcaacctgctgattgatttcgggtttttacagcgtatcatatcttcttccaagaggcatacttgactcgaagggtcgttacttagtttcctactcaaatagcttccccaaattttgtttcttctgggaagaagctataacccatatatcatgtaaatatcatccaaggtttcttctgcagttctgggtagtactgtaagtatgtttctcttatggccatcacatgataatatatatattcatatggaggtttgcc

SEQ ID NO: 909 - DNA, 590 bp, Gossypium hirsutum
  unsure (1)..(590): unsure at all n locations; Clone ID: LIB3825-015-Q1-K6-E9
gntggtaaagaaacatccccagcttcttcattacagcattgatgatggattactacccagaataaatttcctaaggagcattgggatgcgaaattctgatatcttgaaagtcttgactagtcttacacaggtgttatctctgtctctggaggacaatctaaagcctaagtacctgtacttgatcaatgaactgaataatgaggtgcattctttgacgaaatatcctatgtacttgagcctgtcactagatcagagaattcgaccccgccatcggttcttggtttccctaaagaaagctccaaaggggccatttccactcggttcattggtcccatctgatgaatgcttttgtcagcagtgggctggaactagtttagataaatatttggcatttcgtcaaaggttactactcaaagagttcgcaaagaaatatgagaagtagtgataagcttcaaaagattccttcctaatactagaatccgtgtagcagattggtatcctgtccacttcaagctatctagtattgtagctctctaacactactccgaggttttggaatgatacctgaaactacaatttaccatagcctt

SEQ ID NO: 910 - DNA, 594 bp, Gossypium hirsutum
  unsure (1)..(594): unsure at all n locations; Clone ID: LIB3825-015-Q1-K6-F1
gnaatctgttgagatccactctagagtatggagttggctacttgcatgagggtttaagcagtttggatcaagaagttgtttcacagctgtttgaagctggatggattcaagtttgtgttatgagcagtgcattatgttggggagttccattatcagcacacttggtggttgtaatgggcactcaatattatgatgggagggaaaatgctcacacagattacccggttacagatttgttacagatgatgggccatgcgagtcgtcctctacttgataattctggcaaatgtgtcatcctctgtcacgcccctcgtaaagagtattacaagaagttcttgtatgaagcattccccgttgagagccatttgcaccattttctacatgataacttcaatgctgaaattgttgctacagttattgagaacaagcaagatgctgtggattatcttacttggactttcatgtataggaggctcacccaaaatccaaattactacaatctccagggtgtaagtcacaggcatctctctgatcacctttctgagctcgttgagaacacattaaatgatctggaagcaagtaaaagtatcacta

SEQ ID NO: 911 - DNA, 587 bp, Gossypium hirsutum
  Clone ID: LIB3825-015-Q1-K6-F11
ctcgcccaaaaaaaggaaaggaacgaaagaaaaatcagaatagaaaaaattggagaggaatcttaagatggaaatttaatgaaaagataatcagtttattaagttaaaacggagagggaatttttttatatgacgaatggaataatgcaagagcaaaatctagaggagcagattaggaaacaaatgggttgcatggctggtttccttcagatctttgatcgtcaccagattcttaccggcaaacgcttgtactccaccaagcgtctacctccttcgccggcgagtgaaacgacatcagaggaagagaaggcagttgagtcacctgtatcatcgagagaattagagaagcggccacaaggtcggttagcactgtcaccggaacgttcaaagcgatctccagttatatcagagctccggtctccggcgcctgaaccgtccaccccgacgggaagccagaacaagatatctcttccgcttcccattttcgaatccaaagaaggcagcgggaggtcaccgtggaaattatccaaagatgctccaaggctctcactcgacagcagagccgtcgttgatgctacaggaagcct

SEQ ID NO: 912 - DNA, 574 bp, Gossypium hirsutum
  unsure (1)..(574): unsure at all n locations; Clone ID: LIB3825-015-Q1-K6-F12
ttacaagttattagtttccagnaaacaaggggnaaataaaaaaatccatttagttttaggattttggtcttcttttatcttttgagtcatggagctaggtgattgttgtttaacatcaagtccagcaagcggagagaagcgaaagctgcataggacacagcaaaaggagaaaccattcagagggataaggatgaggaagtggggaaagtgggtcgctgaaatcagagaacccaacaagcggtccaggatttggctcggttcttacaccacccctgtagccgccgctcgtgcctatgacactgccgttttctacttgcgtggtccttccgccaggctcaacttccctgacctcatattccaagaagacgagcttagggatatctcagccgcttccatacgcaagaaagcaaccgaggtgggggctaaagtcgacgctttacagacctcactccatcatgcttctgcttcatcatcggaatcatcgaaccctactcgagttttccgtaaacctgatttgaacaagtaccctgacagttctgatgaagattgaaaacaatataatagtttaccataa

SEQ ID NO: 913 - DNA, 584 bp, Gossypium hirsutum
  Clone ID: LIB3825-015-Q1-K6-F2
acagctcggtctccgatgaagcttttgagtcggtttgacgatcatcctgaaatcgggacgctgcatgaaaactttgtacatgctgtggagacatttagagattacaagtacttgggaacgcggattcgggtggatggaacagttggggagtataagtggatgacatttggagaagcggctacagctcgggaggctataggttctggtcttaggtattatgggttagaacaaggagcttgtgttggactttattttataaaccgacccgagtggctggtggttgatcatgcttgttcagcatattcgtatatttcagttcctttatacgatactctaggtcctgatgcagttaagtttgttgtaaaccattccggcattaaagctattttttgtgtcccagaaactttaaatacgctgttgagtttcatatcttctattccatctgtacgtctcatagtggtggtgggaggagctgatgaacacttaccttcactcccctcaacacctggtgtgaagttcgtatcgtatttaaaattacttggtcagggccgcagaaacctgcagccattttgccctcctaagcc

SEQ ID NO: 914 - DNA, 569 bp, Gossypium hirsutum
  unsure (1)..(569): unsure at all n locations; Clone ID: LIB3825-015-Q1-K6-F3
aaacaactggnagatggccgcacccttgctgactacaacatccagaaagatctaccctccaccttgtccttcgtcttaggggtggcatgcagatctttgtaaaaaccgctcactggaaaaaccatcactttagaggtggagagttctgatacaattgataacgttaaggccaagattcaggacaaggagggcatcccacctgaccagcagaggttaatttttgctgggaaacagcttgaagatggcagaacccttgcagactataacattcaaaaggagtctaccctccatttggtgttgcgtcttcgtggtggtatgcaaatttttgtgaagaccctcacaggaaagactattaccttggaagttgagagttctgatacgattgacaatgtaaaagcaaagattcaggacaaggagggaattcccccggatcagcagaggttgatctttgctgggaagcagttggaggacggtcgaactctagctgactacaatatccagaaggagtctactctgcatcttgtccttcgcctccgtggtggtttctgatttgggtccagttaaccatt

SEQ ID NO: 915 - DNA, 585 bp, Gossypium hirsutum
  unsure (1)..(585): unsure at all n locations; Clone ID: LIB3825-015-Q1-K6-F5
gttgatacgtcctatccacatagnaagcttaccctcttccacacttaccggtggatgctacagccgctatcactttggctgcaggaggggaatggttaagtgaaactctcgacgtcttgtttggtaaacgggatgtttacccaggcgccgtagtcttgcctaaccgttcggccggagatgcctttgtatggtatagcaagctgtttagctacttgtatcgatttgccacagtgtggttagatacaatgcgctggcagcctcagcttggcaggatgggaatgaaggtcgaggaagcagggaagaaaaggttattcgctattggctcacccttgtatcaggccttggtacggcctatacatgattgagtcatgacggttttgacaaagttaagaatggatggtacctataaccagacccaaccgttgcagtacttgagaggaaagaaaaaatgattttcttttgatctcaaggctgctatcgattccttacctgttatcctgacgtcctgtatgattgcagggtttttcggaaatccctttccctttgcaacttcctgggcgttcatacttacttctgtagtctttc

SEQ ID NO: 916 - DNA, 555 bp, Gossypium hirsutum
  Clone ID: LIB3825-015-Q1-K6-F6
atatacaaaaccaaagttctatccatggctgcatctttctcagtgccttcaatgataatggaggaagaagggaggtacgaagctgaagtaacagaggtgcaagcatggtggaactcagagaggttcaagctaacccgacgaccgtattcagctcgagatgtcgtggctttacggggcaacctcaaacagagctatggctcaaatgagatggcaaagaagctatggagaaccctcaaggcacatcaagcaaatggcactgcttcaaggacttttggtgcacttgatccagtccaagtaaccatgatggccaagcatttagattcaatttatgtctctggttggcaatgttcctcaactcacaccaccaccaacgagccaggtccggaccttgccgactatccttacgacaccgtccccaacaaagttgaacaccttttctttgcacaacaataccatgaccgaaaacaaagagaggcaagaatgagcatgagccgcgaggagagggctcgatctccttatgttgattatctgaagccaattatagcagcaggtgat

SEQ ID NO: 917 - DNA, 554 bp, Gossypium hirsutum
  Clone ID: LIB3825-015-Q1-K6-F7
ctattccaaaaaagaacaaaatttatttgagcagagggatgattatttgaaaatagataattatcataattaggtacataagccacgacttatggatgattatgaagagcccttcctcctggatttcagcaaggctttaacatggtcttttacttgcttttggacaaaagaatagggcagcttatcaataacctcagccccgaatgaaaagacaagagcctctctagcagtttccaaatcaatccctcgtgcttgaaagtagaagagttggctgtcttctaggtcacttattgcagctccatgcgagcactttacatcatcagcaataatttggagattgggtttaacatttacagttgctcgaggttcaagaagaaggctcctagttagctgccctgcatccgtttgttgtgcatatctgttcaccttcacattcccatcaaaaactgcctgcccagatgaatgagccacgatacatttgtgaacttgctgagaataacctcgtggatggtccaaaactattctactgtgtaggtcttgagtttgatcaccaa

SEQ ID NO: 918 - DNA, 586 bp, Gossypium hirsutum
  unsure (1)..(586): unsure at all n locations; Clone ID: LIB3825-015-Q1-K6-F8
gntcaaatcccccttctattcttggagaagttacctggtctcaggttatccagattggtgaacaagtttccaagcaagctactattgctggaatgctttggaatggggaatcacctcaagctaaagaattgcggagaacgtgaattcatatttcaatgtgttgcagggcttccttttgctttcccatggaagtactgttggtgctggcccaactctctcctcaagtatccatgaatccgtgaagcacgttgttgattgcagttttaggttaatgaaggaagatgtctcgttatatggatctcacaataaggagaaaaaactatcgatgcctcagattgttggagcagtatgggaggcatgttctgctcttaagaaggtccctcccacaaatgtaacagcgatcgggcgagcaatgacgcaagtagcagtttccatgaaggatgtacttcgtgagataaatgagctcaagcctgcttcctccaaccctggggatgaaacctgtgataacactcctagcaaaacagaaagcaagcctgaaaatgatgacatgagtgatgatgatctaggcagcgacttgtcacctgaa

SEQ ID NO: 919 - DNA, 569 bp, Gossypium hirsutum
  unsure (1)..(569): unsure at all n locations; Clone ID: LIB3825-015-Q1-K6-F9
cttttccctttctccaaaccctttactgttagnaaacaacatattttcaaaaacgaaaatatgatgaacaccgtcttcaaacgcacaacttccttagcctccaggcggatcctcgccgcctctgctcaaactctccttcatcacttccactctacagcaacagttgcaacagccgccagagatgctgagactttctttattaacagattcaaacccttccctggctttccggcgtctgcagcgaaggggtttcacgccaaatcagggccgttgtatttcagggcatcgacgggcgtacaggcagagtatgccgtcgaggattatgtcgatgagaagggaagtgaagcgcttgagatctctaatctggggattgctcccgaaattgtttctgctttgaagaataggggtatcaccaaattatttccaatccagagggcggtgttggaaccagcaatgcaaggaagggacatgattggaagggcaaagacagggacaggcaaaacgcttgccttcgggattcctatcatggacaaaatcattcgatacaatgctaaacatggcccgtggta

SEQ ID NO: 920 - DNA, 608 bp, Gossypium hirsutum
  Clone ID: LIB3825-015-Q1-K6-G1
cttgaaatcgtgtgtctaatggaacaagtgttgtggatctcgatatttccttttagacttggtgggtttgcttcaacgacaatacagcttcttggaattgttggtgtgatgacaaaagttacttggcaagttctgcttcttgttgttccaatggctatagcttgcttgtggatgcagaaatactacatggcgtcttcgagagaactggtccgcattgttagcatccagaaatctccagttattcatctgtttggtgaatcaatttccggagcagccacaataagaggttttgggcaagagaaaaggttcatgaagagaaacctttatcttcttgattgtttcgcccgtccattcttttgcagtcttgcagctatcgagtggctctgcctacggatggaattactttcaacctttgtatttgctttttgcatgattttgctcgtgagttttccacatggaagtattgatccaagtatggcaggccttgctgtgacatatggccttaacttaaacgcaaggttatcacggtggatacttagcttttgcaagctcgagaataaaattatttccatcgagaggatttatcagtacagccaaattccaagtga

SEQ ID NO: 921 - DNA, 596 bp, Gossypium hirsutum
  Clone ID: LIB3825-015-Q1-K6-G10
aactttgctttcagttttacttttccctttctttttggcatttttgaaagctttctgtctctgatcccaaaatcacaaggaactgtgctgaagtagctgaaagatctaagaagggtttttttggtttaaactggactgatccgggatggcagagcggggtgtctgccgacaagttaaattcctgaactctcaaggagatagcactgccaaaccgttgcctggcaaaattgaggaagaatatgatgaagatgataaaaagcatgtgaaaactatgttgatttcatgcccagaagtacggaagagaaaatgcctttcctccaaccaactgagaaaagaaaaagctgcaagatgtgggaaacaaagcttaagtaatggtcctaacaagggcaagcaaaacaaacataaaaatactgtagagagatggtctgctgaaaggtataatctagctgaagaaagcatgttagagatcatgaaggctgaaggggctgtgtttgagaatccaatatctcggcctgctttgagaatggcagcccgtaaacttattggtgatactgggctattggaccatctgctgaagcacattgatggaaaggtgg

SEQ ID NO: 922 - DNA, 595 bp, Gossypium hirsutum
  unsure (1)..(595): unsure at all n locations; Clone ID: LIB3825-015-Q1-K6-G11
caaaagcgcggcaagaagaagacacaatgagttcctcctccaagctcttcgagacctacagcgcgaccttgagaacaaagccaatgatcttagcaagcttcaaaaagaatagctaagagccatcaagtccggaagaagtacactattcagttaggagaaaacgagttagtcctcaaggagttggatttattaaacgaggatgcgaatgtgtacaagttgattggtccagtgcttgtgaaacaagatttagcggaggccaatgcgaatgttcgcaagagaattgagtacatctctgcagaattgaagcggcttgattcatctcttcaagatttggaagagaaacaacacagcaagagagaagcgatattgaaggtgcagcagaggattcaatctcttcaagctggaaaagccaaggcttagcactttcttcaagtggaatgttatttaatattgcattccatggtcgtttgtcttagtcggaacttgaatttggtgttattgaaacagggttttgtagctagtgtactagcttctttaaccatgatagttaatggtatgacagaatgggaagctattcaaaccagaacattntctc

SEQ ID NO: 923 - DNA, 587 bp, Gossypium hirsutum
  Clone ID: LIB3825-015-Q1-K6-G12
tgttgattcaatgatttggctcgggataagggacatgataaatgatcttagaaagaaaaagctgaagctgcgaccagtcacatatttgagtggttcccaaggctctgattctgatgttccatatggatatatatggagtcctcaccttgttcctaagcctaaagattggggacctaagattgacgtggtaggcttttgctttcttgatcttgcaacaaattatgaacctcctgaatcactcgtaaagtggcttgaagctggtccaaagcctatttatattggatttggtagccttcctgttcaagaaccagaaaaaatgacccaaattattgtcgatgcattggaacaaactgggcagaggggtataattaataaaggctggggtggccttggtagcttggcagaatccaaggactctgtttacttattggacaacgtccctcatgattggctattcttgcaatgcatggctgtggttcaccatggtggtgccggaacaacagctgccggtcttaaagctgcgtgcccaacgaccattgtgccattttttggtgatcaacctttctggggagatcgagtgcatgcta

SEQ ID NO: 924 - DNA, 600 bp, Gossypium hirsutum
  unsure (1)..(600): unsure at all n locations; Clone ID: LIB3825-015-Q1-K6-G2
ngaagcacgtcagtcctaccaaataatgctgcaatggagttgatcaatagtgtcactggtactgatgaggaaggcaggtctcgtcaacggattcttgtatatgctgccaggaggtatgctactgcactggagagaaacccagaagattatgatgctctctacaattgggcattggttcttcaggaaagtgcagataatgttagtccagattctacttcaccttctaaagatgccttgctagaggaggcttgtaaaaagtatgacgaggctactcgtctttgcccaacacttcatgatgctttctacaactgggctatagcaatctctgatcgagcaaaaatgcgtggtcggaccaaagaggctgaagaactatgggagcaggcaacaaaaaactatgaaaaagctgtccagctcaactggaatagcccccaggctctaaacaattggggacttgctcttcaggaactcagtgctattgttccagctcgggagaagcaaaaaattgtcaggactgcaattagtaagtttcgtgctgcaatacagttgcaatttgatttccatcgagcaatatacaaccttggaactgttctgtatggacta

SEQ ID NO: 925 - DNA, 585 bp, Gossypium hirsutum
  unsure (1)..(585): unsure at all n locations; Clone ID: LIB3825-015-Q1-K6-G4
ctcagcgacgccaaaagccctcgaaattgctgcgcacgccaatccgctaacgtcttcgtcgcgctcaccggcagcgagaagcaacaacaggtcaggcacatacagcatccgaaaacagaacatgtcggcactcatatcccaagataggacgaaaaacatatgaacaagccataccgccaaagagatgaaaaggtctgctggctaccgccaagccaactgaacacaaccgccaggcataaggcaaggcgtgacccatgaccaaagacgctggcaatcaatgacctcagacggaacaggagagggagaagaagaagaccaataacatccagcataacgaaaacatgccacatgaacacctcgtagacaccactaaattaacgacgcccatggccatggctaaagatttgagaagcacagtgaaggacattctgaccacctgtggatacgctgggaggaccggggaacgtaaagaccctaaacatcagcagcaccagattgatgaacgagatcttaatactcctctgcactagtaaaccactctatcactcttaagatcatatattgnttgatgttggagaccgacct

SEQ ID NO: 926 - DNA, 599 bp, Gossypium hirsutum
  unsure (1)..(599): unsure at all n locations; Clone ID: LIB3825-015-Q1-K6-G5
tgagaacaaagctcaggccttccanaagaagcgggaggtttgttcctagtaaaaagatcaggaattgagaaacaaattgattcagttcatgngaagttcacatttatcccttggaaaatgaattcaacaaacttgcaaggtctgatttacgttggacagtgcatccagaggaggagaggttaaaagagcttgcaaagaaagaaggattgtggaacttatggattccttttgatagtgctgctagggcaaaagaacttatttttaatgggagtgctcactgcacgcatgatcgtttacttggtgcgggcctctcaaaccttgaatatggatacctttgtgagattatgggtcgctccctttgggctccgcagatctttaattgtggtgcaccagacactgggaatatggaggtattgttgcgatatgggactaaagaacagctaaacgaatggcttgttccactgcttgaggggaaaatacgctctgcatttgcaatgacagaaccacaagttgcttcctcagatgcaaccaatatcgagtgttctatcaaaagacaaggagactcgtatatcatcaatgggaccaagtggtggacgagt

SEQ ID NO: 927 - DNA, 573 bp, Gossypium hirsutum
  Clone ID: LIB3825-015-Q1-K6-G6
catggaaacctctggtcttaacttctcaactcacccccaaaaagatttattttctcaacacatactattacctgtttcctttttcttacaaactgtaatactgatgtgtgtacacagattttatacctttatttgcttacgacgcttgtttctccgtgtaaactatactttgttcataaaattcccaacgcatattcagatttcaggggttattttgcagttgtttttgtcagatttcaaatgacaaattctgttctatatttctctgcgcatctctattttttcccactggtatttggtttcacttgacttcaactgcaggttctatatattcattgtttgactagactcctctgttcagatttattattattttggaatcatttctgtgtctttgggaaaacccagattccgaatcaaaatctgggttttgggggctaaaaggtacttaatgggtgccaacatatctggagctatggtcgacagagatgaaggcggttctccattgaagccgagacttggtgacataccagagagctgggcggccttgggtctggccctgttagacccacc

SEQ ID NO: 928 - DNA, 607 bp, Gossypium hirsutum
  Clone ID: LIB3825-015-Q1-K6-G7
ttccacttatcattggagcatttttcacgtctgtgccatttcatttcctattagcttgtcaactgtcagaagtttgttgaaaactaatgcattaaaatgccttaattgattttagtgctacagcccagacggtccagactatgataattggccgctttctggctggtattggtattggcatatcgtctgctatagttcctctttacatatctgagatctcgccaactgaaatccgtggtgcacttggatctataaatcaactttttatatgtattgggattcttgcagcattagtggctggattacctttagcaggaaacccactgtggtggagaacaatgtttggcgttgctattgtccctgctattttattggctgtaggaatggctttttccccagaaagtcctcggtggctgtttcagcaagggaaaattcctgaagctgaaaaagctataagaacattatatgggaaggaaagagttgctgaagttatgtatgagttaagaactgcaggtcagggctctacagaacaagaagcaggatggtttgatctatttagcagccgttactggaaaagtatacctgaattttgaaagttgtgagtgtt

SEQ ID NO: 929 - DNA, 586 bp, Gossypium hirsutum
  unsure (1)..(586): unsure at all n locations; Clone ID: LIB3825-015-Q1-K6-G8
gnnattctttgaanagctacaagggcgagnagcatgggaatgagtacctcatcaatcttattgattcccctgggcacgttgacttttcatcggaggtcacagctgctcttcgaattactgatggtgcccttgtggttgttgattgtattgaaggtgtctgtgtgcaaacagagactgtcctccgtcaggcgcttggtgaaaggatcaggcctgtcttgactgttaacaagatggacaggtgcttccttgagctccaggttgatggagaggaggcttaccagacatttcagagagtgatcgaaaatgctaatgtcatcatggccacatacgaagatcctcttcttggtgatgttcaagtctaccctgagaaggggacagttgccttctctgcaggtttgcatggttgggcttttaccttgaccaactttgcaaaaatgtatgcctcaaagtttggagttgatgagtcaaaaatgatggaaagactttggggtgagaacttctttgatccagctaccaagaagtggaccaccaagaacactggttctgccacctgcaagcgtggatttgttcagttctgctacgaacc

SEQ ID NO: 930 - DNA, 597 bp, Gossypium hirsutum
  Clone ID: LIB3825-015-Q1-K6-G9
ctgcttactagtgctggggtgatgagaaaaaccggaatgggaacaatccaaggagctgtgtgggtattgtacaacttttaagtaacgacagatgatcgctgtctagtggcttgtggtagttctcttgaatgcgaatagaaatttgtatgactaaggtagtggtcttgttggtgaaagcgcaaaagaaactgaaaggagcttgatctgaaacttcgatttgagcagtcaatgaaagaggcagcagataagttctaaggagcaaacttgtatgttaagaatttggatgacagcataagtgatgaaaaacttaaagagctattctctcaatatggtatcataacgtcatgcaaggttatgcgagatactagtgggataagcaaaggatcagggtttgttgcattttcaactccagaagaagcatcaagagctgtaagttgataatgctgtccctactcgtgatcttattatcagctaataagctctgctttgctctttttgacagcttgcaaacatgaatggcaaaatggttgtcagcaaacctctctatggtgcactagctcaaaggaaggaacataggagagccaggttacaggctca

SEQ ID NO: 931 - DNA, 168 bp, Gossypium hirsutum
  Clone ID: LIB3825-015-Q1-K6-H10
cggccgcgtgggcggacgcgtgggctggatactggtacagggaacatacgagactagctcttgcctcttttccctcttggtacgactttcttctcacatttgtacttgcactgaacactcattccattggattctttattttgtgcatcaaaaagttcatttctgctt

SEQ ID NO: 932 - DNA, 586 bp, Gossypium hirsutum
  unsure (1)..(586): unsure at all n locations; Clone ID: LIB3825-015-Q1-K6-H11
ggtctcgattcagggagatccgccccananaatgcagcctactggtcgaaggccttgcagctcgcatggcagcatccggaaaatgtctttacaaagctttaagatgcaaagagcccccttcttctgataggcttgcagcaatgcaaatcctctttgaagtgtgcccttgtttcaagtttggatttatggcagcaaatggtgcaattattgaggcatttaaaggtgagaaaagagtacatataatagattttgatataagtcaaggtagtcaatatattacactgattcaaacaatagctaagctgccgggtaagccacctcatttgaggttaaccggagttgatgaccctgattcagtccaacgtcttaatggaggcctcgaaattgtcggactaagacttgagaagctagcagaaatactcggtgtacctttcgagtttcgagcagttccctcaaggacttcacttgttgctccatctatgctggattgcaagccgggcgaagcacttatagtgaactttgcatttctactccaccacatgcctgatgagagtgtttcaacgatcaatcagcgggatcagcttct

SEQ ID NO: 933 - DNA, 515 bp, Gossypium hirsutum
  Clone ID: LIB3825-015-Q1-K6-H12
gcaatttgcaaatctgccaaaaaaaaaacaaaacgagagggtgcgaattaggtttacaaatatggagcaaaagaagaatcaaccatgaaaacaacaacaacaaagcagctataagagatgaagatggatataaaggcgtcccaattcatagccaagtgatgaagataaagcgagagtttgagaagatcaagcacccgtcattgcaacaagctgatatgagacgagtgcttcgggagatcaccaggcaacgctcccgttcccctctcggattagctgagagacctatagctgttggccattcctagaaccttccatcaccttgtagaagcaaaagtaagaggaaatagttactttcatgcccaccaacagctttttaggattagattggatttttcttttcttttttaattacgcccctgtttatggatctatctgttgtagatatgtttatggagaaaacacttcctctgtttcttccctatattaattaataacttaaaaggtcttgttgtttg

SEQ ID NO: 934 - DNA, 583 bp, Gossypium hirsutum
  Clone ID: LIB3825-015-Q1-K6-H2
gccattttccaatagctcttttaatctcactctcatttaaacacttaatcaatcaattaggaaaggaaattatggattcggacgaggaggattacgtgttcttcggtacaccgatagagcgggaagaggagatcaccagccgtcggaagaaagccgccgccgaagcttctggtaacctccgctccctccctccctggaagcaagaggttagagatgaagaaggacgcagaagattccatggtgcatttacaggtggattttctgctggttacttcaatacggtgggcactaaagagggttgggccccacaatcatttacatcatcaaggaagagcagagctgaagtcaaacagcagagcattttcaactttttagatgaagatgagaaagcagaattggaaggtactttgggaacatcttcacagtttgacacatttggatttacagctgctgagtttgctcgcaaacaagccgataaggagcaaaagcaaaggccatctgcaattcctggacctgttcctgatgaacttgtcctgccagcatctgagtctataggtgtgaaattgctgctgaagatgggatg

SEQ ID NO: 935 - DNA, 587 bp, Gossypium hirsutum
  unsure (1)..(587): unsure at all n locations; Clone ID: LIB3825-015-Q1-K6-H3
attcgcctcttttggcggaacatcttattgtttcgaggggttgttgttcagtttcaaggtttcttgcttttttgtttttactagtttcaatctgcagccatggngaaaagcaaaaaagacccccaaatttgctggcatgaagaaaatagtcactcaaaaagctattaaacattacaaggaccaagttttgaaccctaacaagaaggacctcagcaaggacaaactccccagaaacgtgccgaacgtttcttcagctcttttctttacacacaacacctccttgggaccgccttatcgtgttttggttgataccaacttcatcaatttctccatccagaacaaattggatctggagaagggaatgatggactgcttatatgcaaaatgcactccttgcatcacagattgtgtgatggctgagcttgaaaaattgggccaaaagtaccgtgtagctttgaggattgctaaggatcctcgttttgaaagattgccatgtgtccatcaaggaacctatgctgatgactgtattgttgagagagttacacagcacaaatgcttcattgttgctacatgtgatcgggacttga

SEQ ID NO: 936 - DNA, 526 bp, Gossypium hirsutum
  unsure (1)..(526): unsure at all n locations; Clone ID: LIB3825-015-Q1-K6-H5
gcgttttgtgngnattcttcactttccagcaggcggaatatattttctacttacctttcccttctttttcccagatatttttatacttctgagcggttccatttaactcattatctttcaaatgatataaatggttatttttatgtttttcctctttttcacaggaggtataaagacaaaagggggggtgcggcggagcctgaggttgatccagaaagggatcagagaactgtatttgcttatcagatatccttgaaggctagtgaaagagacgtttatgaattcttctctagggctggcaaggtacgagatgttcgcctcataatggatcgaaactcaagacgttctaaaggggttgggtatattgagttctatgatgttatgtctgtccctatggcaatagcactctcaggacagcctcttcttggtcaaccagtgctggtgaaaccatctgaagctgngaagaatctagttcaatcaacttcatctgcatccgctggaccgactggtccatatgctgctggcg

SEQ ID NO: 937 - DNA, 66 bp, Gossypium hirsutum
  Clone ID: LIB3825-015-Q1-K6-H6
tttgattatgcgagcggcaccgtccggtggtaccgaacctaccttcaccgtccctgccatgcgatg

SEQ ID NO: 938 - DNA, 610 bp, Gossypium hirsutum
  Clone ID: LIB3825-015-Q1-K6-H7
catggaacaggacttgcatggtgagcgctataaagaattttgagtgaggttgcaataatgaaacgactacggcatccaaatattgttctttttatgggagctgttactcatccccccaacttgtccatagttacagaatacttatctagaggtagcttgtataggcttttgcgtaagcctggtgtaagagaggtgttggatgagaggcgtcgcttgagtatggcttatgatgtggcaaagggaatgaattatcttcatagacgcaatccccctattgttcacagagatttaaaatctccaaatcttttggttgacaaaaaatacacagtgaaggtttgcgattttggtctttctcgtttgaaggcaaacacatttctttcatccaaatcagcagctggaactgtatgctaatctagtttttaataatatttttgctatttctatttgatttaccataggtcactgtttatgctgtaaagtattaacaaatacatctatttttatattagcccgagtggatggctccagaagttcttcgtgatgaaccatcaaatgagaagtccgatgtatacagttttggtgtaatattgtggggagcttgcaacattgc

SEQ ID NO: 939 - DNA, 577 bp, Gossypium hirsutum
  Clone ID: LIB3825-015-Q1-K6-H8
ctgacgctcaaagaattgaaaactgctgatgcaactgttaatcaagaagttcatgtctcttctacagagaatgtctggtctgcatatatcatgccacaatcttaccttgattcaactgagggccatgactacacatcttgtagtggattgccacttgctcatcaagccaatgcagaccggcagaaccatatgattgatctggaatcaggcttgcatgcaagaaagtacagggaaggttttgttacatggacattctgaagacggttcctttagttcttacacaaatcaagaccaaagtgagctgcttccatctttcttcaaggatcaggtagttttgccctaccatagtgagcagaaacaggatgggctagatttccaggccccgaagaatgtgttgatggaagatggtgattttaatgggcaatttcaagggcagttgcgaccatcgctgcctctagaagagggccaaaagaggcaggatgaggtttttgtgcaacaaaacatgtccggaaacatttactctgatggatctcggggtagatacttgcccccaaggcaggaacacttgccttctggg

SEQ ID NO: 940 - DNA, 576 bp, Gossypium hirsutum
  Clone ID: LIB3825-016-Q1-K6-A1
ctttgccctattttccctcacccaaagtggttttatcctgatgtgttaaaccctgattctccccatccccactaatatctccttgatggctttgagggcggcggcgacgatatcgatgttcgctggggcggctccccagggattcaggcgcatgtgttcaacagctacggctaattcctttatgccgcctccaattacggcgatgggcaacggcgagggaacccctggtcgagaacaagcgcctccaagtaccaacctctttgtctctgggcttaacaagcgcactaattcggagaaacttcgagaagccttttctcagttcggacgtgtaattgatgccagagtagtgactgatcgtgtatcaggatattctaaagggtttggtttcgtaagatatgccactatagaggaagctgagaaaggaagagtgggaatggatggcaagttcctcgaaggttgggttatatttgcagagtatgcaagacctcggccagaacgaactccgcctccgagcaacatggctaattcaaatggctataattcctatgggccgtgaataactttagatctgaaaca

SEQ ID NO: 941 - DNA, 387 bp, Gossypium hirsutum
  unsure (1)..(387): unsure at all n locations; Clone ID: LIB3825-016-Q1-K6-A12
tgnataaaccaaaccgacttgccgctcagcctctttgaataaaacagcggtgtttccggaattgggggaaatggggttatattcgaaacgttcaagcaaaagctagaggtaaagatgtggatatggaggactttgacgattcagaagatgaggaattattggttaatggcgaagtagaagaagaagctgaaggagaagaagatgatgaagaagaagagattggtgatgatgatgatgatgatgatgatgatgaattanagaataatgatgatgacggtgatggagtagatgaagatgatgatgaagaagaagaggaggaggataatgatggtgagaatggaagagctcgaaaaagagtcaaggatcttgacaatcaggaacaggatt

SEQ ID NO: 942 - DNA, 585 bp, Gossypium hirsutum
  Clone ID: LIB3825-016-Q1-K6-A3
atctgaaggaaaaataaattaccaaccattttcttttctcattcgtttccagaaaaggttgatttagattggaaagcgaagatggtctcttccgatatcccaaacaaatccccaaaactttctaataagcttcaggtttcgattcctacgccgtttcgcttctccaatatttcatctccactttcgacttcagcttcggcttcctccacttacgattattatctccggctaccggagttgaggaagttatgggagacaaaggagtttccagcttggcaaaacgagcgcgttttgaagcccgctttgcatgctctcgagatcacattcaggtttatttcgattgttttgtctgatcctagatcgtattcgaaccgtcgcgaatggaagcgtcgactcgagtcactcaccacgagtcagatcgaactcatcgccatgctttgcgaggaggaaaacgaggacaaaacggcagctggcacggcgccaatcgtcgatctaacttcttcgaacggagtactagctcgtgagagcagctctgccgaagtctggaagcttcatggagaaacaacggtggtcagccgaaccagc

SEQ ID NO: 943 - DNA, 608 bp, Gossypium hirsutum
  unsure (1)..(608): unsure at all n locations; Clone ID: LIB3825-016-Q1-K6-A4
gaaaattttagattcttctttcttacactttactttctgtttcgcattgattttctctggaaatatacaaatcttattcctccattctttttttccagatccaaattccaatatcaatttcgtagtttttaagatattgngaaaaagatggaggcatcgtcgacgagtcaacctgagtttgactatttgtttaagttgttactaataggggattcgggtgtggggaagagtactctgctcttgagttttacttccgatacctttgaggaactcaatcctaccattggtgtggattttaaggtaaagcacgttaccattggagggaaaaagttgaagcttgccatctgggacactgctggacaggaaagatttagaacgctaacaagctcatactacagaggagcacaagggataattatggtttatgatgtaactcggcgagacacatttacagatttatctgacgtatgggctaaagaaatcgatctgtactcaacaaatcaggactgcatcaagatgcttgttggcaataaagttgataaggaaagtgaaagagtggtcagcaaaaaagaggcatcgactntgctcgggaatacggatgccttttc

SEQ ID NO: 944 - DNA, 313 bp, Gossypium hirsutum
  Clone ID: LIB3825-016-Q1-K6-A6
ctgacattgtgccaacagttgctgagggaagtccaaaagagatttttatttggtcttaataaatggatttggcgaagttgttgtgaactatggacaaagcaagcggtagtgttacaaaagcgtttttatcttaacttgcaagcctgtttttcagttgtactttctagtttgtggttttttttttttttggtttttaccaaaggaacctgaagtgttaatttgaacactgtatctatgtagaaaaaacaaacattggtaagaagacaattatcttcgttgccatgtcgtttctatgcttagcaacatattgcag

SEQ ID NO: 945 - DNA, 602 bp, Gossypium hirsutum
  unsure (1)..(602): unsure at all n locations; Clone ID: LIB3825-016-Q1-K6-A7
tgcaggtatattttaaaaccaagccactagnagtgaacaaacctccacctcctcctgcagtcaatggtactgcggccccaggtgctcctccaagcctttgcctccaccacctcatgctccagcaccgcctcctcctcctccacctcagggctgccaaaccctcctaggggccctccacctccagctcctggttcattaccgccgcctccgcctcctatgggaaatggtcctaggcctatgcctcctggtggcaaccctatagccccaccaccacctcctgggggtagcgggacaatgggaaatttcactcctaggcctccaactaaccctcctccacaaggtttccctggtcatcagatgcagggacagggtatgcacccgccgcctccacctcctaacatgggacagtagttcacctggcttccagtgtcctgatatgccatatttgaatcatttttggtcagattaaactggtaattggatttattattacctgagcaaaaaaacctacttaagatgtatgtatgtttgagtttgtggtacttggttttaaatgttagcaacagcattataatttgcttaaacaaaggctttaatggttg

SEQ ID NO: 946 - DNA, 602 bp, Gossypium hirsutum
  unsure (1)..(602): unsure at all n locations; Clone ID: LIB3825-016-Q1-K6-A9
ctactattaacctgnaaattgtgaaaaactagcaagnaacgaacataacttttcgcttgaaacccggcaatggtttctttgtcgacttggtgtcgatacttggttcacaagatcgagtactccttcactctcggctggaagagttataagagagggcaaatcagtgaccggggaattacaagatgcagtttggaaaaatgtgtttcagggaaaattgacttacttacactggagtaaaggagaggcaatggccccaactattggagaacaagggggtactcttctcgtacggaagattccatctgcagacccaggtcgagtttttgttggggatgtcattgtcatgaaggaccctgacgattctgataactatctggtcagaagattggctgccactgaaggatatgaaatggtgtctaaggatgaaaaagatgagccatttgttcttgaaaaggaccagtgctgggtattggctgacaatgaaaaattgaagcccaaagtattaaatgaagccaaggatagtcggttattttggtccagttcccatgactggcatagttggccgagttatatattgtctgcgaacagctggttgatcatgg

SEQ ID NO: 947 - DNA, 582 bp, Gossypium hirsutum
  unsure (1)..(582): unsure at all n locations; Clone ID: LIB3825-016-Q1-K6-B11
cttgcccttatgaaggttgtgagnaaagcttacatacatgaatacaaactaaaactccatttaaggagagagcatcctggacatatgtcagatgagaatgctgagaacgccacagccaatgctgacaatgagatggatgaagccagtgatcaagatgcttatgctggaaagcgagttaatgggaaaaagtcagaaacaacaaagtagggccaagccaaatgtgaagatgcctccggcaaaggttgctcgacagaaaggctcgagtccatctcctgcgactttgcctatacccaagaaacagtggccaatcaaagaacaagtatttgaggaagaggatagcgaagaaactgaagaagaccgtgacaatgtagatgatggatggaggtaccgggaaaacaatgaagatgatgacgaagagacagaatatgaagactagagcaagacatacatactactcaacaaatgtggtacaaatgtggtgttgggtatttggcatccctttccctcactggtcttttcctattacaggagactatgtatttttctgcatgatgttagggaaagggaatttattcgcgcacc

SEQ ID NO: 948 - DNA, 532 bp, Gossypium hirsutum
  unsure (1)..(532): unsure at all n locations; Clone ID: LIB3825-016-Q1-K6-B12
cttttccaaaagaagagattcccctctccatctaaaaaaaggaatatcgatcgagatctatccacaaatccacctccatcatgatctccgccatcctcttcctctttctgatccacacctctcattgcttctaccttcctggtgtcgcccccgaggacttccaaaagggagatcctttgaaagtgaaagtgaacaaattgacctctataaagacacaacttccttattcatattattccctccctttctgtccaccaaaaaagatngttgacagtgcagaaaatctcggggaagtgcttcgtggtgaccgtattgaaaactctccttatgtgtttaaaatgcgtgagccacaaatgtgttctgttctttgccggattacacttgatgccaaagctgcaaagcagtttcaggagaagattgatgatgaatatcgagtcaatatgatcctggataaccctgccccttgttgttcccattaaaagaattattatcatggtttctactactggttattcagccttggtttccatgt

SEQ ID NO: 949 - DNA, 575 bp, Gossypium hirsutum
  Clone ID: LIB3825-016-Q1-K6-B2
ctgctctagtggcattgattgcattcatgcctaccagcccaacggtgccttaggttctctagattatactaaggaagagcggcgtacccttgctgtcaaatctcgtgaatcaccacctaaatacgggaatccagaacgtcagaaacttatcgatgagatacatgaatatatgttaagcaagactcccagtgttcctcaacatagtccttcaaaatcctcagaagaacaccctaccgaagccaaaactgaagccgaggcagaggccaatcagcaagattccgttactgtgggtgccgggaatcccggaatccctaatccaacattaaatgaaagggttgtcgaagaaccacctgtggctcccgccaatgcttatccatatcctgttgccatgaggctagtgagagagatccctggtgagggaccaagtaaccaaccactacgaaggccggagataagggttcaacgatccgttgttgatgaccgcttatttacgtgggctgccgtcggacttaccattgctattttggttcttttgttcaagaaatacatcaaatctagtggacatggtgctgttt

SEQ ID NO: 950 - DNA, 131 bp, Gossypium hirsutum
  unsure (1)..(131): unsure at all n locations; Clone ID: LIB3825-016-Q1-K6-B3
tttgacttaagtaatattagaatcatgggtgttttcacttatgactatgaatctacctctccagtcgcccctgtcaggcttttcaaggcctttactattgaagccgccaaggtttggcccacagctncccc

SEQ ID NO: 951 - DNA, 327 bp, Gossypium hirsutum
  Clone ID: LIB3825-016-Q1-K6-B4
ggttataatttttgcaaaagacttggataaaggtgaaggtaggagatgaaatctatgttggattcccgcacccccttggttaatgaagggctttagtgtgagatacgtgaagagggttgcatatttaagtttcaaattgtaaatatattgaatggcgacttagtggaattcctagattaaactttgggttcaatttggatccctaatatatatctagattcctaattccgactttatatgcatttgatgaggaacttattcccatgttaaaggtctcatcagataaggttcccattacctgaaatagaacccacaatttttttagcc

SEQ ID NO: 952 - DNA, 578 bp, Gossypium hirsutum
  Clone ID: LIB3825-016-Q1-K6-B5
cttatcttcacttttttttttttcatagtgaaattgttcttggcttaactaaattgttttgattgaaactgcattattgaatgttgttatgtatcagaggcaggaaaggtggctatggggacaggcgcagggataattacagaggtggaggatctgggccagatagacatcactatggtggaaaccgttcacgcccatactgagggatattcagcttcaactattttatgtactaaggattaggaactgagggatgtagttgtgttccattcactgggttattcttgaacaggagaccgagaggtaggttgttcacttatttgggcaatacccttttgtccttcctcctttatcttctattagcttgggggggggggtatgctaagcgttggattgattagatatgtgaatctttttatagacgcaagtggatcaacttcaaattgcttgctaccaaggtaggttgataatttcaggtgggtgctgctctttcaaatcacaaacttatactcttttatttgggaacaaccccttggcgggggacttaattttgttgctcatcgtttaatgtggtggaa

SEQ ID NO: 953 - DNA, 522 bp, Gossypium hirsutum
  unsure (1)..(522): unsure at all n locations; Clone ID: LIB3825-016-Q1-K6-B6
ggtagcttctctattcaagtataataatttttgtactcttctgctgtatttctttggtttatttttcataagatataattcctattatttgaggtgtaagatctaagtcctatgactatctactaatctccattatattcagttcatttgtttctgcagaaatgttttcttcattttgctagatatgaagttcctcttccttatggcaaaggcttaaatctgtatggccaatggatatcgctatgtgtctaacacgaatagagttaatcttttaaaaagttttcatgtatttaggtctttggagagtcacaccaatgttccaatatgttccagacacaaatattttaagaaaaatgaagagtgggaacaatataagatcattatgatcacaaaccaatatctaacgttcatccgagnttggaataacataggacatctctaccctggatgaccagcagaagtatacttgtaattcacattggnttttcaggtgagggctcaagataaaaagccgttggtttt

SEQ ID NO: 954 - DNA, 586 bp, Gossypium hirsutum
  Clone ID: LIB3825-016-Q1-K6-B7
ggtggttttaacaatggagattctggagaagggaacgccctcgcaggcagtatgatcgccacagtgggactggacgtgggaatgaattcaagcgtgatggttctggacgtggaaattggggtagttctactgatgagattgcaccggagactgaagaaatgtcactgagaatgagaagaagagcactgagaagcagtttggagaggaagatgctgcggatgccaacaaggagaatgctgcaaatgaaactgaggagaaggagcctgaaaacaaggagatgacattggaagaatatgagaagattctcgaggagaagaggaaagctttggctgccctcaagactgaaggaaggaaagttgatgtcaaagagtttgagtccatgcaacaactttcgaacaagaagagcaatgatgatatctttatcaaactgggatctgaaaaggacaagcgcaaggatgctgataaagaagaaaaagtcaaaaagtctgtgagcatcaatgagttcctgaagccagctgaaggggagaggtactatggacctgggcgtggacgaggccgtggccgtggtcccagaggtgggtatgga

SEQ ID NO: 955 - DNA, 531 bp, Gossypium hirsutum
  Clone ID: LIB3825-016-Q1-K6-B8
ctgcatataagcccgatttgcaaagctctgaaaacatacatggttcaccttccggctccgtttattggtggtaggttgtctgggggattggacttaagtcatggctactcatatcaccggcgacttgatttcggtgctgaaagaaccggtcccttgaggctccgactttgactttaactcatcctgaatatgtctccctcctataatagcttactttctctaattaacccaataggcaatgtccccttctttcatgaatatagaagtcactataggtctttcggtaacataacttacccaaacccaaatgtaacattggtacatggaatatcataaatcataaatggacccttctctgaattttattacatatgcattctcaaattaattgaaatggcactacctgttttttatatgatcactgttgataaaatatatccaccatttcttcattaaatagaccattgctgggtattggctgacaatgaaaaattggagcccacggtattaaatgaacccactgatattcgc

SEQ ID NO: 956 - DNA, 171 bp, Gossypium hirsutum
  unsure (1)..(171): unsure at all n locations; Clone ID: LIB3825-016-Q1-K6-B9
cggccgcgtgggtgagtaagaagttgatgcccacccatacgtgccatgaagttttctgtctcacctgttgtccgtgttgctgttcagtgcaaggttgcatcagatcttcccaaacttgttnaagggttnaagcgtttggccaagtctgatcctatggttgtctntaccatt

SEQ ID NO: 957 - DNA, 603 bp, Gossypium hirsutum
  Clone ID: LIB3825-016-Q1-K6-C1
caagttgcctggttttcttctagctcttggtatgcaatttactgttgagagcccccgctggttatgcagagtaggggacatgaaagatgcgcagacaattatccgtaatctttggggagactcagaagttgacaaagctattgaggaattccagtcaatcatcagcaatgatgggactgatgtgaacagcagatggatgcagcttctggaagagccacattctcgaggttgtatcaagttgctttcattggaggagtcctttttgttcttcaacagtttgctggaataaacggagttctttatttttcatcattgatatttcaagacgttggaattgctagtggtgctttggcaagtttatttgttggacttacaaattttgcaggtgcactctgcgcatcgtatcttatggatacacaaggaaggagaaggcttctcattggaagttatctgggaatggcagtttcaatgtttcttattgtttttgctatcaattacccattggaggaagatttcagtcacaacttatccattctagggacgctcatgtacatattcacctttgcaattggagcagggccagtaactggtctcataattcca

SEQ ID NO: 958 - DNA, 601 bp, Gossypium hirsutum
  Clone ID: LIB3825-016-Q1-K6-C10
tgccctgtaagggttcctgtgctgcagccacttgcaaatgcttcaggaggtgtgttggttcttcatgatgactttggtgaagcctttggtgtaaacttacaaagggcatctgccagagctgccagttcccatggtttgttggagatacgttgttctgatgatattcttgttactcaggttgtgggtcctggtgaagaggcaaatatagacacccatgaaacctttaaaaatgatatggctgtctctattcaaatgctgagtgttgaagaaacacagtgcttctcaatatcgatgcagaataaacatgacatcaagagtgattacgtatttttccagtttgctattcaatactcaaatgtttatcaagctgatatagctagagtgattactatcagattgccaactgtggatagtgtttcggcctatcttcagagtgttcaagatgaggtggctgcagtcataattgccaagaggactctgctgcaagcaaaaagttattctgatgcaattgatatgcagacaacaatagatgagagagttaaagatattgcttcaaaatttgggtctcaagtgccaaagtcaaagctttatcggttcccaa

SEQ ID NO: 959 - DNA, 524 bp, Gossypium hirsutum
  Clone ID: LIB3825-016-Q1-K6-C12
atctgtatgctccgtatcattgaagtttcctttcctcgatctctatttagccaaacaagagcagtatcttcgactaagactctaaccggcaagacgatcactctcgaggtcgagagctccgatacgatcgacaacgtgaaggccaaaatccaagataaggagaggcctccctccagaccagcagcgtctgatcttcgccggaaaacagctcgaagacggccggaccttggccgattacaacatccaaaaggagtcaactctccacctcgtcctccgtctgcgcggtgggatgcaaatcttcgtgaaaaccttgactggcaagacaatcactctcgaggtcgagagctccgactcgatcgacaacgttaaagcgaagatccaagacaaggaaggcatccccccataccagcaacgtctaatctttgccggaaaacaactcgaggacggccgtaccttggccgactacaacatccagaaggagtcaactctccaccttgtccttcgtttgcgcggggggagcaaat

SEQ ID NO: 960 - DNA, 585 bp, Gossypium hirsutum
  Clone ID: LIB3825-016-Q1-K6-C3
gccagcgttctctaaaatcctcttgagctgccgcagctgacatccgacactccacagcgcagcaatgggtgaggaagtaaaggctttggttcctgagtcactgttgaagaagaacaagaggcaatgaagaatgggagcttgccaaaaagcagagctcgaagccgccaagaataagaaagtcgagaaccggaagttgattttcaacagggctaagcaatatgcaaaggagtacgcaggctcaggcaaaaagagttgattcaattgaagcgggaggcgaagttgaaaggaggattctatgttgatccagaagctaagcttttgttcattgttagaatccgcggtatcaatgccatgcacccaaggaccagaaagatcttgcagctcctacgtttgagacagattttcaatggtgtttttcttaaagtgaacaaggcaacaatgaacatgcttcaccttgttgaaccttatgtgacttatggatacccgaatctcaagagtgttagggaactcatttacaaaaagagttttggaaagttgaacaagcagcgagttgccttgtccgccaacgcaattcgttgagccagg

SEQ ID NO: 961 - DNA, 601 bp, Gossypium hirsutum
  Clone ID: LIB3825-016-Q1-K6-C4
gctagtgacaaatgtttatgacatgcttcatgatcctgttaaattgccatggttggaaaatatgttgggcttaaagattcttacctttctgttttaaaggcacttttgcatgcatctgttggctgccgcaagaagctagttgtcgagtgggttgaagcaagtcatcttgaagatattactgctaaagtggatcctgacacttacaaagcagcatggaatcgtttgaagggtgctgatggtatcttggttcctggaggttttggtgataggggagtgcaagggaaaattcttgctgcgaagtatgctcgtgaaagcaaagttcctttcctgggcatctgccttgggatgcaaatagctgtagtagagtatgcacgttcggttcttggcctgtatgatgcaaatactgaagagtttgatcctcaaacctcaaatccttgtgtcatatttatgccagagggttctaaaactcatatgggaggaacaatgcgtctgggatcaaggaggacttactttaaggttcctgactgcaaatctgccaagttgtacggtgatgcaacctttgttgatgaacggcatcggcatagatatgaggtcaatcctg

SEQ ID NO: 962 - DNA, 341 bp, Gossypium hirsutum
  Clone ID: LIB3825-016-Q1-K6-C6
atgacatcgtgatcctgagttatatcccaatctttatatcttccattcaccaacataaaaaaaaaaagataatgaatgcacattagactggaaagcaaaaggaacaaagatacaaaagaaacgacagagaaaaaaaaaccataaaaataaaaaaagaaacataaaaagaaaaaacctgtcaggggggagacagctgaaaagactgggaaaaacccaggggatgcccatcgtaagatattcgccttacatcagccggccaaaaggtggagaggccgcgaaggggccccctcggaaaggcgggaacaaccggggtgcagcctgaaaggcgaccgggacgggcc

SEQ ID NO: 963 - DNA, 604 bp, Gossypium hirsutum
  Clone ID: LIB3825-016-Q1-K6-C7
cccgtcttgacatagatcttggagtagcatcaccgttatctgagtttttgtctcctggggatgcaatagcgtcattggatggtgcagccatccatagcatgcaagattggatagagatgactgctctactagataaaaagatacttcacaattcaagtgattcccattactttaaaggttttggtgctgtagatagcagaaaggggtactgcgtgcctaatgccttgttggaagatggcaagaatgttcaattggccaaaaaccaatctgtttgccctgaagatttcacggcatttgtgaaaatttactgctttgatccaagtaagtcagtagatatggatggtgaagatgttgatcttggaagaaaggaaaatgcactctgtttgaatacaaaggatattgtcaatctcgaaaaatgtaatggacggggaaaagtaaagaaaaatggaagcagttgtatgtgttccgaggatgagtcttgcttaagtccggttcagtttccagatttgatgtggatagagattacatattcacgtctttattcaagagaatgcttacaacttagaagttcccttttagattccaacacttcttcggatgctgt

SEQ ID NO: 964 - DNA, 583 bp, Gossypium hirsutum
  unsure (1)..(583): unsure at all n locations; Clone ID: LIB3825-016-Q1-K6-C9
tgccatcaatttgctttgcagtacatgttggctattcttcacaaggcatttgctcaatccaccagaggagctgaatagtccagcttctcataaatctactaagaagcctaaacagcctgaagaaaccctaaatgatttcctatctcatcaccctcacaacactttctccatgagctttggcaacgctgctgttttggcttatgtccgccatgaacgtgctgcttcagttcatcagaggttgttttgtgggtttgatgacatatactgccttttcttagggagcttgaacaatctatttatgctgaatagacagtatggtctttccaaagggagcaatgaggcgatgtttgtgattgaagcatataggacactaagggataggggtccataccctgctgatcaggttgttaaggatcttgaaggaagctttgcctttgtgatctatgacagcaagactggaaccgtgtttgctgcactggggtctgatggtggagtgaagctgtattgggggattgcagntgatggctctgtggtcatatctgatgatttagatgtcattaaagaagggggtgccaaaatcttt

SEQ ID NO: 965 - DNA, 599 bp, Gossypium hirsutum
  Clone ID: LIB3825-016-Q1-K6-D1
ctttttctttgctgttttaagaaaacattgcgaatagggagaggggtgagagagataaaaggggaacaaaagaactgcaaaaaaattgaacttttttttttctaaaaaccctcaattagaagagcgattatcgcttcatcttccccgaaacaacttcgtcagatttttatcaggttgcttttgttgccatggctgctgctgcgactgcctctggtggtccacgatatgctccgcctgaccctactcttcctgaaccatggaaaggcctggttgatggaaaaactggttatctctacttttggaatccggtaacaaatgttacgcaatatgagaggcctagagggatagattctgtcccaaaatcttcttcagtgcctatgggttcttcagttctggttcaacaatcttctgaagggcgttataggtatagctctgagaaggaaaatgaccggcatggaagaggctgcaatgctgtatcaaaacttgagtcaatattagggggtaatcagaattcaagaggcggaccatttcattcccttattgcacctaatgggacttccagctatgtgattggaggatcttttagaggacaaggatca

SEQ ID NO: 966 - DNA, 606 bp, Gossypium hirsutum
  unsure (1)..(606): unsure at all n locations; Clone ID: LIB3825-016-Q1-K6-D10
ggnacccaatccaactattatnntgcaaaattggnnatgaggaaactccaatgaatcctaaaaccttggatgaggaaactaaaacgagttccacaaactcagctgaggaaacttcgactactcccacaacctcaggtgtggaaactcctaccattcctggaatgttgggtagggaaactctgaccattcctactattgtgtgtgaggaaacaaccattcctgcaaccttaggtcaagaaactcctacccttcctgcaaccttgggtgaaggaactcatagtattccctcaacctcgagtgaagaaagtcatatcattcccactaacctggatgaagaaactcctactgatccagtgaccttggcagaggaaaggccaagtattcctgaaaccttgggtgaagaaaccccaaccgttcctctgacattcagtgaagaaactcaagttattcctccatcattcagcgaaggagctactattcctccttccttcaatgagggaagtcctactgttcctgtaacattgggtccagaaactcagaccattcctacaaccacgggtgaggaaactgcacacattcctgcaacctcaggtgaggaaactacaa

SEQ ID NO: 967 - DNA, 568 bp, Gossypium hirsutum
  Clone ID: LIB3825-016-Q1-K6-D11
cttgttgatattgataagaattggagaatttcaactgatttgctaattgcaaagtttttgtcgatttgggtttcatgattatatacggtggagattgtcatgattcgtgtatgcatatatattttctttttcatactgctgggtgcttgcattagtcagtaagtgttgggtatattttctttaaaatacttgggattgtttgtgttatgttgggtatggtttgcaaatggattttgatcggaagttttaggtagacccatggtatctctgtatatcagttgaatgggaagttttgtgtgattattgatatatccatgtggtgaaagtactctgattttggttaaagatagaattatattcatctgtgttacctagccttacgtgaagggaaattgagttgtaatcttttaagtaaataggttctatgagactgattaacagaattttgatttgcttattggttgatggtttatgagactgataaaaagatgtgttggatatattctctaatgatgtcataaccaatttcttgttcatttattgtcttagttaatttgatgcatgctgg

SEQ ID NO: 968 - DNA, 63 bp, Gossypium hirsutum
  unsure (1)..(63): unsure at all n locations; Clone ID: LIB3825-016-Q1-K6-D2
naaaaaaaaaaaaaaaaaaaaaaaaaaaaaaaaaaaaaaaaaaaaaaaaaaaaaaaaaaaaaa

SEQ ID NO: 969 - DNA, 598 bp, Gossypium hirsutum
  Clone ID: LIB3825-016-Q1-K6-D4
ccccgcgtccgatggtttaaatcagctattaagcagtcggaggagtgttctgactggaattacaaacggcattcatattgctgaatgggatccatcttcagatgagcatattgctttccattattctgctgcttctctatctggaaaggttcaatgcaagactgctctccaacaggaacttggttttccaattaagcctgattgtcccttgattggatttatcgggagactggactaccagaaaggcattgacctgatccactgggcaattccagaacttatggaagatgatctacaatttgtaatgcttggctctggggacccactttacgaagactggatgagatcagcagagaatacttacagagacaaatttcgtggttgggttggatttagtgttccaatctctcataggatcactgcaggctgtgacatactattgatgccttcaagattcgagccctgtggactaaatcagttatatgcgatgagatatggaactgtccctgtagttcatgccacaggaggacttagagacacagtagagaatttcaatccgtacgccggagaaggtagaggtgaaggcaccgggtggacc

SEQ ID NO: 970 - DNA, 566 bp, Gossypium hirsutum
  Clone ID: LIB3825-016-Q1-K6-D5
attttcattttcttgttccttccttcgccgtctattgcttttagttgcctcgatttcaagtgaatcagaatgggtaagggaaaagactcacattaacattgtggtcatcggccacgtcgattctgggaaatcaaccaccactggccacctgatttacaagcttggtggtattgacaagcgtgtgattgaaaggttcgagaaagaagctgctgagatgaacaagaggtcattcaagtatgcttgggtgcttgacaagctcaaggctgagcgtgagcgtggtatcaccattgatattgccttgtggaaatttgagaccaccaaatactactgcactgtgattgatgcacctggacaccgtgactttatcaagaatatgattactggtacgtcacaggctgactgtgctgttttgattattgattccaccactggtggttttgaggctggtatctcaaaggatggtcagactcgtgagcacgcattgcttgcttttacccttggtgtcaagcaaatgatttgctgttgcaacaagatggatgccactacccctaaatactcgaaggcta

SEQ ID NO: 971 - DNA, 598 bp, Gossypium hirsutum
  unsure (1)..(598): unsure at all n locations; Clone ID: LIB3825-016-Q1-K6-D7
aaacacttgaggatggccgcacgctagccgactacaacattcagnaagnaatccacccttcacttggttcttcgacttcgtggcggcatgcaaatctttgtcaagactctcnactggaaagacaattaccttggaggttgaaagctctgacacaatagataatgtaaaggcaaagatccaagacaaggaagggatcccaccagatcagcagaggcttatctttgctggaaagcagcttgaagatggtcgcaccttagctgattacaatatccaaaaagagtccaccctccacctagtacttcgtcttcgaggtggcatgcaaatctttgtcaaaactctcactggaaagacaattaccttggaggtggagagttcggataccattgataatgtgaaagccaagattcaggacaaagaaggaatcccaccagaccaacaaagattgatttttgctggaaaacaacttgaagatggaaggactcttgccgattataatatccagaaggagtctactctccatttggttctccgccttcgtggtggtatgcagatctttgtaaagactcttaccggaaagaccatcactttggaggttgaa

SEQ ID NO: 972 - DNA, 566 bp, Gossypium hirsutum
  Clone ID: LIB3825-016-Q1-K6-D8
ggctccccttgtttcaggtcttgccaatgaattggtaaaggtcggaattccaactttcggcccttcagctgaggctgctgctttggaaggttctaagaaccttcatgaaaagcatatgtgacaaatatggaattcctactgctaagtatcaaacattttcagatgcatcagctgcaaagcaatatattaaagaacaaggagcacctattgttatcaaagcagatggcctggctgctggaaaaggagttattgttgccatgacactagaggaggcatatgaggctgttgattcgatgcttgttgagggtatttttggttctgctggttgccgtgtcattgttgaggaatttcttgaaggagaagaagcatcattctttgccttggtggatggagagaatgccataccactggaatctgctcaggaccataaacgggtcggagatggtgatacaggtcctaatactggtgggatgggagcatattctcctgcaccagtcttaaccgaagaacttcaatctttggtcatggaatccattattctcccaacaatgaagggtatgtcagca

SEQ ID NO: 973 - DNA, 605 bp, Gossypium hirsutum
  unsure (1)..(605): unsure at all n locations; Clone ID: LIB3825-016-Q1-K6-E1
cacaaaaaatttcacactactcttctcaaacaaccatggaaacagcatctttttgcaacgcaacaacacacaattttattacttcactctctacccattaagaggatagtcaaacagcttccaaaaccatgtcaaactcaaactcatcattgctgtcactcggggatgccattaggttttagtggtttgcaggggtcatggtttaaatattaagccaaagcagcgttatggtgatgcagtagcagcaaggtgtgctacttgggattcagggcttttggctgagttagaaagagaactggaggctaaagacgaagaagaatgggtgaaagtgggaaggctgagagagaaatgcaaggaaaggaagggaatggtggagttngttggagtgtttggaaagggaagcaatacaaggggaagaccatggaagagaagctagtgattacaatagaagagcccagatctttgataagagttccaaggttttccaggctctcaaagcacgcacccaacctactcactctcaaaactcttgattccctntgttcttttttaatgtaatttgtagtgactctaatctacaaagtgaaaataatgtcaccccacat

SEQ ID NO: 974 - DNA, 596 bp, Gossypium hirsutum
  unsure (1)..(596): unsure at all n locations; Clone ID: LIB3825-016-Q1-K6-E10
ctcggtcaagtgganatccccacatccggatcgagtcgctgccgccactggtgctgcagctgttgcacccatttcagtaggttcaaacgcaaagccgtccagcttcgtcagataccgagagtgtctcaagaaccatgccgccagcatcggcgggaatgtgtacgatggctgcggcgagttcatgcctagtggtgaagaaggaacactcgaggccttgaaatgtgctgcctgtgactgtcatcgcaactttcatcgcaaggaggttgatggggagacccaaatcggggctaatcccagtagaacttcgatacttaacccacttcagttgcctcctccgttgccatccccaaccatgctgcaccctcatcataagtattcaattcatacaagtccgtccagtgcaatagttgcatcgatgaataacatggcgttcggaagcggcggtggcggtgggaacgagtcttcaagcgaggatcttaacgtgttccaatctaacgccgacggagtgccgccgcctccgccttatgtgttgtcaaagaagaggttccgcacaaaatttacgcaggagcagaaggataagatgttggagttagccg

SEQ ID NO: 975 - DNA, 592 bp, Gossypium hirsutum
  unsure (1)..(592): unsure at all n locations; Clone ID: LIB3825-016-Q1-K6-E11
gnaacctanaaagcttataacttgttatttcttgttaatcatgaaaatgcttaacatttgggtggaggaagcaagaaccacacatttattcataactgctagtgtcatgcttgtaaagctttttacttcatgtacttctcgacagtacaattagtttaaatttttataatgaagtatattttgcagttgactgtcatatgtaaatgttgaaaaaaagaaaaaaaagaaggcaaagttgtgactattgtttttaattgagatgaattctaatgacattgtagtatttttcagtgatgaaggaaaggttaggaaggtgttgaaggtagagccactcccggatgggtctggtcacttttttaatcttggtgttcaaaacaaacttctaaacgtggacgaaaatgtttatatccccattacacggggagagttcactgtcctcaaatctgcattcagcttcattttgccatatcttttaggttggcacgcctttgccaattcaaccaaaccggacgatacaagtcgtgcaaataatgccaatcctagatatggaggagactacgaatggagtaggtagttcaaaattttgtcatag

SEQ ID NO: 976 - DNA, 285 bp, Gossypium hirsutum
  unsure (1)..(285): unsure at all n locations; Clone ID: LIB3825-016-Q1-K6-E12
gcgtgcgctcaactttaataggtaggacggcgcggctgctgtaatagtccgcgccacaggtaatcaatagctccaagttgtcactcntttagatgaatgactaactggcggatgcggttagtgaacccaagagcacgtggttacnggatgcccaactcgacgctctnctctaggagcccactgcagtgtgttcatcccgtttatggacataatgtacggacggcacatgtgtatgtcgaaactacgattaggtagtgtgtatgcaacagcacctgttgctatcaa

SEQ ID NO: 977 - DNA, 583 bp, Gossypium hirsutum
  Clone ID: LIB3825-016-Q1-K6-E2
gcagccgtaagctcgaactctgtcgcctgggtcgtatgcatagccgaggtaagggtatttccgcatctgctcttccgtacaaaagaactccacctagttggctcaagatctcctctcaagatgtggaggagaacatttgcaagtttgtgaagaagggtttgaccccatctcaaattggtgtcattctccgtgattcacatgggattgctcaggtgaagagtgttacgggcagcaagattttgcggatactgaaagcccatggtctcgctcctgaaattcccgaagatttgtaccacctgattaagaaagctgttgccatcagaaagcatcttgagaggaaccgcaaagacaaggattccaagttccggttgatcctggttgagagcagaatccatcgccttgcccgctattataagaagacaaagaagcttccacccgtctggaaatacgagtcgactactgccagcacacttgtggcctaagggaagacactgttggaaccagcttcttgcgctttgattgatggacccctggatatgggttggagtagtaaagttttaattacatgctatatttatgcttc

SEQ ID NO: 978 - DNA, 523 bp, Gossypium hirsutum
  Clone ID: LIB3825-016-Q1-K6-E3
tcatacagcaagtgattttctaactccttggatcctaattcaagattatgatatggttgattctgggtcggtttctgaaagtggaactgatcgtccggtgaatttttccgatgaatatgtgatgttagcttcgagttatccaaagagcgagctgggaggaagaagttccgggagactcgacacccggtgtaccgtggagttcgccggaggaatcccgggaagtgggtttctgaagtgagggagcctaataagaagtcgaggatttggcttggaactttcccgacggcggatatggcggcgcgtgctcacgacgtggcagctatcgcactgagagggaagtcagcttgtttgaacttcgctgactcagcttggaatcttccgatcccggcttcttcccacccaaaggatattcaaaagacggcggcggaggtggcggagactttcagaacggctgagtggttcggcgggaattctagaaactatttaagaagaagggaaaacacggcagaggagaaagggtttt

SEQ ID NO: 979 - DNA, 594 bp, Gossypium hirsutum
  Clone ID: LIB3825-016-Q1-K6-E4
attttaatcctaaaatctaaagttaagacatttaacccacttatttgatttttcttatgaaatagtccatgcctctaatcagtaatagaaaatggcaggcataatagttttgaagtgaattgtgaatatttagaaggcaggcaagcagtttggttaaagattgaaacttgattttttatttttatttttattttgaagcattacagcagttttgtttataaataaaaaaaccattctcttcttcttggaagttgtaatggaatactcacaaacttttggtctttggaggagaatggcataagccatcacttccaattcaggatatattgccccttaatttcttaaatttctttggaagttgtaatttcacgttgcacaagctttcactttgctttctcttcttctttggcttcattttttatatttttataaaaaaatattttaattttaattttttaattttttaattaaaaaaagactgttttttaattataattgaattaattgaatatgtaaatataaaagtactaaaaaattaaggattagtgagtaaatggaagtgaattagggttgggtcgggcatatgcatgtagt

SEQ ID NO: 980 - DNA, 581 bp, Gossypium hirsutum
  unsure (1)..(581): unsure at all n locations; Clone ID: LIB3825-016-Q1-K6-E5
cggncgcgtgggtttgaaacttccctctaacttttcatttcttttcttcttcaatccggctctctctccaagtcatttttcctctggttttcggcataaacgggcacgctttcaaccaggtaagttcattcctgccttcttagagattctttagctaatatgtgggctaaactattcgctgatctaggggtatattcaaacttaagattgcccgatctggattttaactgatggatatcatgtataaaggcccctatcttcgatttatcttcccctttagcattacatcttttaataatggataaagaatcacctccaatgatgatttccttcccttgcatgtcgaaacctatcctggttgctgtcctgcaagctaacgctttggcagcgaaggcagagggcactccaaaatgaagctttgtgcatgacaggagaacaaatccttcactgtttctggctactatcactgtttttggctactatcccagaggccgattgttgattacactagtcaaacgcttcatcgaaatttatttttattaactgcccangtgggggtttccactttttaacttccttaa

SEQ ID NO: 981 - DNA, 594 bp, Gossypium hirsutum
  Clone ID: LIB3825-016-Q1-K6-E7
cttgacgctctcacgaggaagaccaaggcgagttgagttttcagcattggagcaaattgagaacccagatcttctaattggttcattccaggttatgaatttgtattgcagactaagagaggtgatggcttctcttaattgtccgatgcaatttaaccttagggatttgatcaaacctgatccgcgtcggaccgagcatttcctcagcggaatcctcaatttttgtctttataaagaaacaaaaatgaatcttctaagacctattgtagaggaactggcccttctagatgatcagcggaaggagtgggaggctaagatttctcagttgaatgcagagattgcaggttacagtgaagcaagagaaagggagttaccactagttcaagaggtagaatcaaaagttaaagaattgcgtgagatgattgctggcctcaacagtaaccagatgtcactgagaacttcttttcggaatttgaaggagaagactgggcaaatggatgagaagatttcgaaggctgagtttgacctggttcaaagtgtccaagaaaatgcaaatctgcgttcaaaaatagttcagtcaccagataaactaca

SEQ ID NO: 982 - DNA, 541 bp, Gossypium hirsutum
  Clone ID: LIB3825-016-Q1-K6-E9
tatcaacaccatctcccggtctcatgcagggtcatgccaagccagattatgctacctgtgtcaaaatctctaactgatgcctctatcaagagatgatccctcctggtgcccctgttatgcttactcccctcattgatggaactttctttggtgtcaagactctttctggtgtccttgctggggctcttgtttccggtgttcagattgcaatttctgcatccaatactggtggggcatggtacaatgccaagaagcacattgaggccggtgtgtccgaacatacaaggaccctaggtccaaagggatccgatcctcacaaggcagctgtcatcgctgacactgttgtacaccctctcaagatacctccggtccatcacttaacattcttatcaagcttatggcagtcgagacacttgtgtttgcttccttctttgccacacacggtgcgcctactcttcaacatcttttagggaatggatggctggaaaatgcacggtggcaaggctggtttagcatccctgtttaaatagtgacctttcca

SEQ ID NO: 983 - DNA, 360 bp, Gossypium hirsutum
  Clone ID: LIB3825-016-Q1-K6-F1
ctgagtttggaagcagtgactggtccttcacgtatggagcttgcagaagggatctacatgcaccatggtttgaggatagaggctggggaaatgaagaactttcagctggtcttatagcagcacaggctgtttcagcgctgcaaatcacagaggacgcagaagtagtagacaccatcgtgcttgacagaatgttgagaggctagcctagcattttgctgttgtatttgccactttccatgttgcttgctgtctttttatcttttattcataaatctgaataatggatctgtatatatatgtgatgactttgtcacgcatctggttcttgttgcttctttaaatattaaactttgttgcacc

SEQ ID NO: 984 - DNA, 603 bp, Gossypium hirsutum
  Clone ID: LIB3825-016-Q1-K6-F10
ggttggaaatgcggaggatgagaatgggtatgtgcctgtcatttgtggactctctaggtgtaatgagaacgatattaaggccgcttgggaggcggttaagtacgccaaacggcccaggattcatacgtttatcgctaccagtggtatccatttggagtataagttaaggaagagtaaagaggaggttttggatatcgctagaagtatggttcggtttgcaaggagtttgggttgtaatgatgtcgagtttagccccgaagacgccggcagatctgacagagagtttttatatgagattttgggtgaagtgatcaaggctggagcgacaactctcaacatacctgatactgttggcataactatgcctagcgagtttggccaattaattgctgatataaaggccaatacccctggaattgagaatgttattatttcaacacactgccaaaacgatcttgggctttctactgccaacacgctagcgggagcttgtgcaggtgcaaggcaggtggaagtaacaatcaatggcattggagagagagctggaaatgcttcattggaggaggttgtgatggcaataaaatgtcgtggtgagcatgtatt

SEQ ID NO: 985 - DNA, 578 bp, Gossypium hirsutum
  unsure (1)..(578): unsure at all n locations; Clone ID: LIB3825-016-Q1-K6-F11
ctctgttggcctttcatttaaccatcatcgacgagcgaaccgggnaaaaagtaccaggtccctgtctccagcgaaggcactatcagagctaccgatttaaaaaagataacaacagggnaaaggtgataaggggcttaaagtttatgatccgggttacttgaatacagctccggttcggtcgtcgatttcttatatagacggtgatgaagggattcttagatacagggggtatccaattgaagaactggctgagagttccactttcttggaagtggcctacctcttaatgtatgggaatttgccttctgaaagtcagttagcagactgggaatttgctgttagccagcattcagctgtgccgcaagggattctggacattatacaatcaatgcctcatgatgctcatccaatgggtgtacttgtcagtgcaatgagtgctctttctgtttttcaccctgatgccaatcctgctcttagaggccaagaaatttataagtcgaaacaagtgagagacaagcaaatagctcgcattattggaaaggcaccaaccattgctgctgcagcttatttgaggatgg

SEQ ID NO: 986 - DNA, 563 bp, Gossypium hirsutum
  unsure (1)..(563): unsure at all n locations; Clone ID: LIB3825-016-Q1-K6-F2
acaaaatccgnaaggnaatcccaatttcttcgcttttcatcttctctcgcttccatttctccgtttttccccctccggcaatggctatcgattctgattctttcaaacaatcacttctccctagcttcctttactcttctgctcccaactcattctctctggatcgactcctcaacgccaacagccctgctttctctgcttcacgctccactatacccggtgcccccgcggcctcttcctcgccgtcgatcaaggcgagaactttcatgatcccctcccccaatgagcccgggaagaagattgagatgtattcgcctcagttctacgctgcttgtacctttggcggtatccttagctgtggtctcactcacatggccgttactcctcttgacctcgtcaagtgtaatatgcagattgaccctgcaaagtacaaaagtatctcatctggtttcggagttctactaaaggagcaaggagtgaggggcttcttccgtggttgggttcctacccttcttggttacagcgcacagggtgcttgcaagtttggattctatgagttcttc

SEQ ID NO: 987 - DNA, 555 bp, Gossypium hirsutum
  Clone ID: LIB3825-016-Q1-K6-F4
ggattcaagcaggtttagagggggagaagaaatcatttacctcggagatggcagtggggattattgcccaagcctaacgcttggagagggtgactatgtgatgccaaggaagaattttccagtatgggaattaatatgcaggaaccctatgctcatcaaggctgacattcatgaatggagtgatggcgaagacctggagcgggttcttctggatatcatcaacatggtatctgttgaacataactctgctccattgttctctgttgactgtaaactgcagaccatttcaacatccaaccatgccctgcctcatgccctgcctgttccacagtagatgtgtgattgctgctcaagttgttcaatgggttttggtttgattgttgggatttacggatttaatcttcccttaccaaaatacattgaaaataagggtctcttaagtttctcatgattccaaagcaatttgattctttggaacatgattgatgaggatgtatttattaaaaaatttacttcacaatatttgaaatatatattaaagaaaatttacttcac

SEQ ID NO: 988 - DNA, 595 bp, Gossypium hirsutum
  unsure (1)..(595): unsure at all n locations; Clone ID: LIB3825-016-Q1-K6-F5
caggnattccctctacacgccaattgagagaaagccatgtaatttcatatccccttgtgatccccaaggcgttacaagctgatcttgcatttgaaatggaagcccaagaatataccgacacgcaaaaaacggatcactctcgttgcaagtatagaaaggagtctgtgtagtcactggatgccatgatgtaacgggaaagtctcactgctctgtgttgcaacagccttgcagtgcgattatgaaatgacaagatgaagaagcgaaagcacaaggaggagcaaaaacggcaagaagtagacgccagagagcaagggatgaacaggtgttacagaaagcgtcgtaaaagaagaaagacaagagagataccgggagcaggacaaactaaagaaaaagattcgcagacatgtggaagcgtgatggtcattatgcacgtgtgcatgcatgtatgttcaatgaaacttttggcaaaggaagtcaatattatcaactcacgaactcgattggatcttaaaaaaaataacttactgacccactggagactcaagttggtttgcttaaggtgttgtggttggatgaatcatcaatcgatccatgc

SEQ ID NO: 989 - DNA, 609 bp, Gossypium hirsutum
  unsure (1)..(609): unsure at all n locations; Clone ID: LIB3825-016-Q1-K6-F7
cggccgcgtgggcagaagcaaaanaaggagaagacaaanaagtctaagcaaagggaagcctcaaagcagatacatgctcttgaaaacattgaaggggcaatttcagagtcaaactctcagtcatcagtgacatctgaaatgaaattggagaagaaatttggtcagtctcctgtttttgtggcttcgactcttctggaggatggaggagttcctcaaaatgctagccctgcttcattactgagagaagcaatccaagtcataagttgtggttacgaagataaaacagaatggggaaaggaagttggctggatatatggctctgtgactgaggatatattaacaggattcaagatgcactgtcatggctggcgatctgtgtactgcatacctaaaagacctgcttttaagggttcagctcctattaacctctcagatcgtctgcaccaagttctacgttgggctcttggatctgttgaaattttcttgagcaggcattgtcccatttggtacggttacgggggtggattgaaatggttggaacggttttcctacataaactcagtcgtatatccatggacctccattcccttgcttgtttactgtaccctt

SEQ ID NO: 990 - DNA, 419 bp, Gossypium hirsutum
  unsure (1)..(419): unsure at all n locations; Clone ID: LIB3825-016-Q1-K6-F8
gcttaagatacaagnnccggtcaacnntgtcagctatgnaatggnaaaccatttcaatggcggactacctcagattttctcccaccaaccgtccccacatcactttggtggtcagcaaaccccgcaacagcagcagcaccagcagatgcccgagtcatccaccaatatcggacatccgcaacctcagtttatggattttaaccagggagcctagttttgaggctggaaaaggatccttagaaaacataagaaaatgcattcaacataatatcttgtacatagtaaatatatgtatacataaatgtatatgtattacaggttagggttgtgaaagagtgttggtgggatcagaagtttcacatatggctttattatctccataattaggctaagatgaatggaaatgtgttgctttggag

SEQ ID NO: 991 - DNA, 597 bp, Gossypium hirsutum
  unsure (1)..(597): unsure at all n locations; Clone ID: LIB3825-016-Q1-K6-G1
gngatttttaagtgttgttaatggcgcctacgttgctcctcctgcagatcaaacagcagagctgttgcagaaattgactatagattcgcaggcaaagcccttcgatattcctgagcctactaagaagtcttctgtttatcagtatggttctgttgattcaggcaacactgggaatacccaaattccgacgtttgacagatccacaacacctttgttacaggattttatggatccgactatgtgctatattcctagtggttatccatctgcgtattactatggaggctttgatggcaccggtaacgagtgggatgaatattcacaatatttaaatccagatggagttgacatgacttcaggggtttacggggacaatggatctcttatgtatcatcatggttacagctatgcaccatatggaccgtattcacctgcagcttccccagttccgactctggggaatgatggtcaattgtatggtccacaacactaccagtatcctcccttcttccagccgatgactctaaacagtggtccattcacgccaaaccctgcggctccatcccatggtgagcttctgacctctgctgctgctga

SEQ ID NO: 992 - DNA, 598 bp, Gossypium hirsutum
  unsure (1)..(598): unsure at all n locations; Clone ID: LIB3825-016-Q1-K6-G10
gtagaataccaaagagtttgtagaaaaaaacaccgagagcgagtgtngaaaaagctcaaaaactagtttattaccttcaaggtgaaaagttcaaaaatgacagcatcggagttacagctgccacctggattccgattccatccaaccgacgaagagcttgtgatgcactatctttgccggaaatgtgcatcgcagtccatcgctgtgccgattatcgctgaaatcgatctttacaaatacgatccttgggaccttccagatttggcgttgtacggagagaaagaatggtattttttctccccgagggataggaaatatccgaacggttcacggcctaaccgggcagctggttctgggtactggaaggcaaccggagctgacaaaccgattgggcagccgaagccggtcgggattaagaaggctttggtgttttacgctgggaaggcacctaaaggagagaaaaccaattggattatgcacgagtatcggttagctgacgtggaccgatcggctcgcaagaagaacagtttaaggttggacgattgggtgctttgccggatttataacaagaaaggcgccatcgagaaacagtcaccgc

SEQ ID NO: 993 - DNA, 472 bp, Gossypium hirsutum
  Clone ID: LIB3825-016-Q1-K6-G12
ctgtttcagggtggggttattgatggagttaatgccatttgaaacatgaacctgcatcaatatttccaaggcgtaagaagttccgtgcaatggagtgagagaaatgtcgtcaacctggagcatttgattggtaacagatgcggtatgctagaaaaacgtcaagaaccgaaccagttaaagctccggttggtagaataggccaaaggaaatgtttctttgattcagccggatttattcccgagccaaagcgaaccgtttgcatctacggtgagattgagaaacggcttatgtttagaggaatcgattagccggggaaagatctcgagactcttaagatgttcctagaagcttcgcaactcaaagggcctgttacacagctaaaaacctcaaaccaaacgaataagagaactttgtttatgaacatgaacgttctccgcttcccattatcaaaccgggggagatcaccagcttt

SEQ ID NO: 994 - DNA, 585 bp, Gossypium hirsutum
  Clone ID: LIB3825-016-Q1-K6-G3
caacgagatagcgaggtcattgtacttccaatttggcatcaagccccaacaatgccatggcacacacagattgcttattcttttttcagaggaacaagaaggacggacgagattgcctgatgacaacatatcatttgtcggcctccttgcagatccacgctattgcggaatatcttaccaggagaaggaagaagttcgtctcctccttaggcaggatcccaagttttggaaatacagaccattatctgagctcatggtccgtgcagctgcagatgatgtccgctttcttctatacatctaccacatgatgatgaagaaactgaatgaacgatccttgtggcaccttgcagttcgtggagctctgtattgccgatgtttctgcatcaacgataataactatgctgattggccatctattcctcctattccagataacgtgatggtggagggggatgctcctgaagaagaaatactttcaattctggatgttccgcaagggaagatgggacgtgtcattggaagaaaagggtttccatcttgtcaattaaggagtcttgcaatgcggaaattcattttgggggtgcc

SEQ ID NO: 995 - DNA, 584 bp, Gossypium hirsutum
  unsure (1)..(584): unsure at all n locations; Clone ID: LIB3825-016-Q1-K6-G4
canatctgccatgggggcttacaagtacgtgtcagagctatggaggaagaagcaatccgatgtgatgaggttcttgcagagggtgaggtgctgggagtaccgtcagcacccttccatcgtgcgagttaaccacccaactcgccccgacaaggctcgtcgattggggtacaaagccaagcagggttatgtcgtctatcgtgtccgtgtaaggcgtggtgggaggaagagaccagttcctaagggtattgtatatggaaagcccacaaaccagggtgttacccagctgaaattccaacgtagcaaacgattagttgcagaggaacgagctggccggaagcttggtggtcttagggtcgtgaactcttattggatcaatgaggattcaacttacaaatactttgaagtcatcttagtcgatcctgcccacaacgctatccgcaatgacccaagaatcaactggatctgcaatccggttcacaagcacagggaactccgaggactgacctctgctggcaagaaatacaggggtcttcgtggcaaggggcacttgcaccacaaggctcgaccttcaaggagggcaacct

SEQ ID NO: 996 - DNA, 214 bp, Gossypium hirsutum
  Clone ID: LIB3825-016-Q1-K6-G6
gttttatgggcacggtctttgtatccgaacactaaccggacatcctggcagacaactcaacgagcatgagcatcccattaatacatgtgacacgagaatctcaatgtcacgtaggcacgaaacgctcttacatacagatcgtgacatgggccaagaccctggagtatctcaactagacatgcgtcttgactcacataccgatacagacacatgt

SEQ ID NO: 997 - DNA, 364 bp, Gossypium hirsutum
  Clone ID: LIB3825-016-Q1-K6-G7
cccactccctaccttcccttctctccactgaaaggggaatctctcttttcctcaaagggtctcaagattgggtgtccccgaaacttcctggaggcccaagtgcccttactatcagcccccaccactgattctggccaagggagtggatgaagcacaatgggtcgatgcgcaaaagcgagagtatgttaggaagaggctgagaaggaaacgcctagaaagccatgtccaccctttaattccgattttgattcccgatttattattgttctccctgctctggttcaatccatttcatcttaatgattcctgacaattttccttgtctcagaattgtgtaataataagtacataactcttatgtctt

SEQ ID NO: 998 - DNA, 150 bp, Gossypium hirsutum
  Clone ID: LIB3825-016-Q1-K6-G9
caagaaaccctagctgtcaataaaaaagtacgcaagcatcataaaccactccattgctgctacctttgactgttcattagtgtcaccatagacctactctactgggcgaagctatacaacttctccactgggataccccaggccaggcag

SEQ ID NO: 999 - DNA, 559 bp, Gossypium hirsutum
  Clone ID: LIB3825-016-Q1-K6-H1
cccctttttcgatctcaaaggccctagccgccatttgaccaccccgaacggcgatcgacgaagggagattcgttcactcactaacccggcttgggtcctagccctaaagacctccgatttcaggcttcaatccctgtctcaacttcgattaaagcgaaggagatgaattccggcggttcgtttgtataggtaaacccctttgcttcccttcaccctttttatgctcgaaataacagtatgtggcatcgaaaaataagaaaagaaaaggaaaacagacaggaaaggagagccaatgccgaataatcacctttctttgctttttctttgtattcaatatgtgaatcgtatatctgtgttgtctattgcgcataaaaaattacaatgaataaagactctggctttatagccgaaacagaatcagaaagatcccaaaataaaaataaaaaacgaatacaaattcttcttttcctatttgctgttgtgtggttttgtattcatttgcaggtacggagtgcgtggcacgtgatgggggtcgtgtgctggcgcgggcgtggctgct

SEQ ID NO: 1000 - DNA, 604 bp, Gossypium hirsutum
  unsure (1)..(604): unsure at all n locations; Clone ID: LIB3825-016-Q1-K6-H10
naaaacaacanaaatggnaaccaggagggcaaagcttagctctaaccaccaccaccatagccattcaaatcttaaccttcagcctaatcttttcgttcagcttcgctctcctcgaaaccccacaagaaccaaccatacaccaagtcactggaaaattcagatatcccaactatgaagaccaaattcacgagaaaccacgtccacaaacagttccgagttttcatggtaacgtacgggaaaaaactactcaaccagggaggagtacatgcaccgcctcaggatctttgcgaagaacttggtgagggctgctgagcaccagctgcttgatcctacggctgtgcatggtgtaactcagttttctgatctatctgaggaggagtttgagagtctttacactggtttcaagggccccactgtggcggcaccattattgagggatggtgttggtggtgaagcagaggtgttggaggttgatgggttgcctgagagctttgattggagagagaaaggagctgtaacagaggttaagatgcagggtacttgtggatcatgttgggcatttagcaccacaggagctattgaaggagccaactttattgcaaca

SEQ ID NO: 1001 - DNA, 121 bp, Gossypium hirsutum
  unsure (1)..(121): unsure at all n locations; Clone ID: LIB3825-016-Q1-K6-H3
ggggggggggggctttttttttttttnnnaaatttttttttttttttttttttttttctttnnnnttttnnnnnngttttttgaggggggggggggggggggggggggcccgccccccccc

SEQ ID NO: 1002 - DNA, 576 bp, Gossypium hirsutum
  Clone ID: LIB3825-016-Q1-K6-H4
tttcacctcgcactcgccgctctctcattttcctccgggaccgtcagtctccccaaacaccttctttccgagaaaaagaaaagctcaagagagaagacatggccgatcaacttacggacgatcagatctctgagttcaaggaggctttcagcctttttgacaaggatggcgatggttgcattactaccaaggagctggggactgtgatgcgatcacttggtcagaaccctactgaggcagaactccaagatatgatcaatgaagttgatgctgatggaaatgggaccattgattttcctgaattccttaacctaatggcaaggaagatgaaggatactgattccgaggaagaacttaaagaggctttcagggtgtttgacaaggaccagaatggtttcatatctgctgctgagcttcgccatgtcatgacaaatctcggtgagaagcttacagatgaggaagttgatgagatgatccgtgaagctgatgttgatggtgatgggcagataaactatgaggagttcgtcaaagtcatgatggccaggttaggataaaaaatgggttaaaaggggaaca

SEQ ID NO: 1003 - DNA, 578 bp, Gossypium hirsutum
  Clone ID: LIB3825-016-Q1-K6-H7
gtgaagtggtgaaggtttgtacgttactagaagcttctctcagttttcagcgattccacgatttccaccccttattctataagtttgatttaactgctaaacacaccacactcatttctcacttctgttttccttgttctcttctacattcagcgaaggggtgctctgagatcacataccaaaatggtgaaggccgttgccgtccttggcagcaatgaaggtgttagcggaactgttttcttctcccaagaaggagatggtccaactaccgtgactgggaacctttctggtcttaagccgggactccatggcttccatgttcatgcccttggggacacaactaacgggtgcatgtcaactggaccccattttaatcctgctggcaaagagcatggtgctccagaagatgagaaccgccatgctggtgatctagggaatgtcactgttggtgatgatggctgtgcaagcttctccatcaccgacaaacagattcctctcacaggcccaaactccattatcggaagagctgtagttgtccatgcagatcccgatgaccttggcaagggcggccatgagct

SEQ ID NO: 1004 - DNA, 619 bp, Gossypium hirsutum
  unsure (1)..(619): unsure at all n locations; Clone ID: LIB3825-017-Q1-K6-A1
gggatacaataaaatggatagtgtgtttgattagtgcagtataagatggcaggcatagnagaatgtaagcataagagcaacagttctaaatcgaaacactaccagcagtcttccaaatgggatgaaaatcctttatgagctcagggatcactctgttggtctcaactgcggccgatgggattatattttcagctacgttaagaccttccaaggtcacccggaccggttgttgccggatcggggtcaagttggtatgacccaacacttcatgaggagttactccgatctcctcatccgaacctgtcatcgacgcggcgtccatgccatgggcggtatggcagcacaaattcccattagagatgatccaacagcaaatgaagcagcctttgaacttgtaagaaaagataaacaaagagaagttaaagcagggcatgatggaacatgggcagctcatccaggtctcatcaaaacatgcatnggaagttttcaccaacaccatggggaaactctccgaaccaaatcgaaactgtcaagcgcgaagacgcttccaacttaactgaagacgatttattacaaaggcctcgaggtgttcgtacgatggaaggccttcgtttgaaca

SEQ ID NO: 1005 - DNA, 610 bp, Gossypium hirsutum
  Clone ID: LIB3825-017-Q1-K6-A10
cctcatctccctcccttccttccttccaattcttaattttctttttccttccaattcttcttcttttttttttcttttgggaataattcgaaaattgattccatttttccatgatttcaaggtattgttgaggctgcatatttgaatagcacttaggaaaaatattaagccgaacatgagcacaatagaagtgagggggccttctcttagagggtatcgacgaaggaaggcactcctggatctcaatgttcctcccactgaaatcagggaacaggagggtacttcgcagcaggctggatctgagcaactgactgctcaacccgtacagcctccaccacctgcaactattgatgttgaagctattgatgatgatgtaattgaatcttctgctatagcattcgcagcggctaaaaacaattctaggagaagccgtggaaggactgttgttgacgtagattcagggcggcttgctcggtcaactaataataacctgaacaggtgccggagacttcctccgtccccagtagttatcaattgtgatcggtatatcaatttggagagttcaccgcagtctatggtcaaggaaattacaaagccccagccacttccc

SEQ ID NO: 1006 - DNA, 481 bp, Gossypium hirsutum
  Clone ID: LIB3825-017-Q1-K6-A11
ctttccgtcaagttgtgggaataaggcaagcatcggtggtgtcattcgcgattgtggcggggattgggttgtaggcttcacgatggatgtcagtgccactcccatcttccaagtagaggccaaagccttgtacgaggggatgcggttcgcatgggacgaagggtttgaggtggaaagcgataatggtttgcttgttgagcttattcgagattgttatggcgagaggaatgagcagtgaataatgcggtggacgggaatggagtgtccgcctgagacataatggtcgacagcataatgaggttgcagactacatatgtccaggattggttcaggtcaactaaatagactagtgatttcggacactccaccggttgcggttgtgagtttgccaggaccagatagtagtctactgtgttagagttttcttttctcttgtgtgcttcaatcggataaggtgaatcacacatctctattttaccta

SEQ ID NO: 1007 - DNA, 507 bp, Gossypium hirsutum
  Clone ID: LIB3825-017-Q1-K6-A12
ctctgtcgtacgtctccttctaaaaccctacttatacacctcctcgcaaaacccttagccccttacttttttctttcgaatggatcatgcatggagtactggggtatctgaacataaatctggacagcctattaaagcatatcctggtgctaactacatgatccatgtttcccaggcttaacttggagagtccaagaacaaagcaaaatccgacccactctatgtgaatgtagacgggaagaaacttatcctgggaaccctgtcccaccacgatggacctcaattatatctttgatcataatactttgacgagacagtgctgagctacttccacatctggaaaaaccgaagcgtgtatatcctcagggacaaaacttgcatacacagaagaaggtgatgattatggaatgtatctcgaagaacaaagccaagaggaggaacatgaggagctgcctgatgctgctgctgctgctgcagtagatggaaaaactatgcccgatggaaaaa

SEQ ID NO: 1008 - DNA, 516 bp, Gossypium hirsutum
  Clone ID: LIB3825-017-Q1-K6-A3
cttcgacaactgcggtgccaatatttcaatcctgttcaggttgccgagcgacaaggaaagttctggcaaagctattgaataaaatctgtaaagaggtggaggacatgccaacggtgctaaggacatgaacttgggggatccgtttgagtacaagcatcttggaagcatggcaactgtgggcagatttaaggctcttgttgatctaagacagagcaaggaggcaaaagggatatctctagcaggctttgtcagctggtttatatggcgctcggcatatctaacacgagtcgtcagcaggaggaacagattctatgtggctattaactggctcacaacttttgtgttcggtcgcgacataagcagaatataaactcgtagataggtatctttttttccgttttaagaggcaaatgctcgttgtccattttcatccagagtatagagttttaatcggcatcaatgcatttgtgtttgttagtcagaggttagcagcagcttggggattgggagggagga

SEQ ID NO: 1009 - DNA, 613 bp, Gossypium hirsutum
  Clone ID: LIB3825-017-Q1-K6-A4
gttaattttcttttcagaataagctaaaaattgtgggtttttttgttctttaggggttttgttagatctaacatccaatcgatccaagatgtttctcaccaggactgagtatgaccgtggggtgaacacattttctccggaggggaagattgttccaggtagaatatgctattgaggccatcaagctgggttcaactgcaattgggttaaagacgaaagaaggtgttgtgttggctgtcgagaagcgtattacttcgccattgttggagcccagcagtgttgagaagattatggaaattgatgaacatataggatgtgctatgagtggcttgattgctgatgcccgtacacttgttgaacatgcacgagttgagactcagaaccacagattctcatatggcgagccaatgactgtagagtccacaacacaagctctttgtgacctggcccttcgatttggtgaaggagatgaagaatccatgtcccgtccatttggggtgtctcttctcattgctggtcatgatgagaatgggcctagcttatactatactgatccctctggcacattttggcaatgcaatggaaaagctataggctcaggttccgaaagtgc

SEQ ID NO: 1010 - DNA, 579 bp, Gossypium hirsutum
  Clone ID: LIB3825-017-Q1-K6-A5
cttcccttccttgtatctttattttctcgcctttgacgaggagccgacgctaccatggttcacgtcagtttctaccgcaactatgggaagacctttaagaagccacgacgtccgtatgagaaggaacgattggatgctgagttgaggcttgtaggagagtatgggctccgatgcaagagggagctgtggagggttcagtatgctttgagccgcatccgtaatgctgctagggaccttctcactcttgatgagaagaaccctcgtcgtatttttgaaggtgaagcccttcttcgtaggatgaacaggtatggacttttggatgagagccagaacaagcttgattatgtcttggctttgactgttgaaaacttccttgagcgtcgtttgcaaactctcgtgttcaagactggtatggccaagtcaattcaccatgcacgtgtgttgatcaggcaacgacacataagggtcgggaggcaggttgtgaacatcccgtccttcatggtgagggtcgactcccaaaagcatattgatttctctcttactagtccgtttggaggtggccgccctggaagagtgaag

SEQ ID NO: 1011 - DNA, 573 bp, Gossypium hirsutum
  Clone ID: LIB3825-017-Q1-K6-A6
ctttgacattgctggagaaaaaatcaaggaatggaatatctcaagagtgtgcattaatgatttagaacctcctgcttttgaagtcttaccatctcttaaacggctaaagcaacgggtaactgcagctggccgtgggcagtacgatgctgtgtttatgtctgggagtggaagcaccattgtcggagtcggttccccagatcctccccaatttgtatatgatgatgatgattatcgtgaagtatttttatcagatgcaaacttcatttaccgggaagaaaatgagtggtataaagaacttgtttcaacgactgtttgtgaccccctggaaacagcacgaaccttcgagtgattcatccattcctggttgaagaagaaggatggaactggttttgcttgtatgatttagttattatatctggatgacatcagtttgtgtttgtaaatgccatcagtatatgcaaagctttggggattgcaaaatgtgaggaaaagctttatattacccaatattttcctaaaaaaataagctccccctttatttgttccccagttacctaaggtttttttcttgtc

SEQ ID NO: 1012 - DNA, 615 bp, Gossypium hirsutum
  Clone ID: LIB3825-017-Q1-K6-A7
ctcatttggggcgaaatcatcagtgaagttgattttacttgatgaggctgatgctatgacaaaggatgcccaatttgctttgcgtagagttatcgagaaatatacaaagaatacgagatttgcactgatctgtaatcacgtcaacaagatcattccagcattacagtccagatgtactcggttccgatttgcacctcttgatcctattcatgtcactgagcgacttaaacatgttatacaggctgaaaggcttgatgtacctgattgtggcttggcagcactagtacggcttagcaatggtgacatgagaaaggctttgaacattttgcagtcaacacacatggcttctcagaagattacagaagaagccgtgtatctctgtactggaaatccgttgcctaaagacatcgagcaaatatcttactggcttctgaatgaatcatttgcagagagtttcaaacgagtatctgaaacaaagaccaggaaaggattagccctgatcgatattgtaagggaagtgacaatgtttgtttttaagattaaaatgccctcagatgttcgagttcagttaattaatgacttggcagacatagagtatcgattgagttttgggtg

SEQ ID NO: 1013 - DNA, 477 bp, Gossypium hirsutum
  Clone ID: LIB3825-017-Q1-K6-A8
ggaactattgctctgtccattttaaagcaagtaatggaaagagaaggtgtactcccaacaatgcttgatattgccaaagtagcaccaacataccatctatacaccccttcagaggtggaagctgtcattactcgcctatgagaatgcgctgccatcatacgatcttaccatgcaacaacctgctttactgtcataatgatgcatgacttgagggggagaagctagtatttgtttcttgggattcaagctgctgaaacgttatttttggtgtggcactaaactcatctactctttcagttggataatttaattacaccagatcagaaaaaagaacctttcttaattggatattatgttctcgtgactgaacgcctctaaagtaagaatccgggctaagaagcgacgcacgcgcccgtcgcccgattgccgacccgcagtaggggcctctggcccccaagggcacgtgtcgtaggtgca

SEQ ID NO: 1014 - DNA, 565 bp, Gossypium hirsutum
  unsure (1)..(565): unsure at all n locations; Clone ID: LIB3825-017-Q1-K6-A9
attaaaccaaagaaaaaaaganaaagaattcgaccaaaacatatccatcgcgagggttttcgagttaaccttggtcgtcttttctatcaaattaacaagtaaattccaaatgggaagcaccgccgtcgagaagacagcagaagagcttcagcgagagattgatgagcttcatcgccagcaacgcgagattacagagaggctgagagatcctcgaggactccgaagaggaggactgtcaggcatcggtcctcgtaacttcgccgccaatggttctcgtcagcgtggctttcttcgacctgcggataggattgatggagaagatcaacctccggctaagaggcgattgtcatcagctgttgtcaaggttgaagatggagagattgttgatgatgaagtagcaaaggctgcccctccatttttgtatagctttcttgtatgttgtaccttagtctttctttccattgttttgtttttgcattcttttctctccagtgttgatgtatatacatgaatcagtgcatcagagttcgcttaggaggaattggtagctgaattctttgtttct

SEQ ID NO: 1015 - DNA, 605 bp, Gossypium hirsutum
  Clone ID: LIB3825-017-Q1-K6-B1
actttccatttactagcaatttcttcaagttcttttctttgtttttttagtcaatggctgaccaccacctccaaaacactcaaccaatgactcaccaaatggtgaaagccgctactgccgcaacagccggtggttccctcctcattctctccggtttaatcctagctggcaccgttattgcactcactatagccactccactcttcgttattttcagtccagttcttgtccctgctctcattgcaacagctctcctagcaacgggtttcgtcgcctccggcggtttcggtgttgcagccgccacggttctgtcctggatttacaggtatgtgacggggaggcacccaccggcggcggatcagttggatagtgcggggatgaaattggctagcaaggcacgggagatgaaagatagggcggcacagctcaccggtgcggcggcttcttaaattagttctctactgcatgcttttgtaatggagctgtgcaaaagttcaggatcaagtggccattaaaccgatccttaatgatgttgttgttatgttgttgatgatgaaaagatgtttttttctaaatttaaaagcagcattagaaacttcgggggg

SEQ ID NO: 1016 - DNA, 603 bp, Gossypium hirsutum
  Clone ID: LIB3825-017-Q1-K6-B10
attataagcacctccccataagcaaaccacaaaggaagcttggagagagacccaaaaacaatgtctaaggaagtgagtgaagaaggacagggtcgtaaggactatgtggaccctccaccggcacctctgattgatatggctgaactcaagtcatggtctttttacagagccctcatagctgagttcatagccactctcctcttcctctatgtcactgttgctaccgtaattggtcacaagaaacaacaagatgcatgtgatggtgttggtctcttgggtattgcatgggctttcggtggcatgatctttatccttgtttactgcactgccggtatctcaggtggacacattaaccctgcggtgacttttgggttgtttttggcccgtaaagtatctctcatcagggctgtggcttacatggtgtcacagtgcttgggtgctatatgtggagttgggttggttaaagctttcatgaagcatccatacaactcccttggcggtggtgcaaacacggtggcttctggctacaacaacggaactgctttgggagctgagattattggaactttcgtacttgtctacactgttttctcagccaccgac

SEQ ID NO: 1017 - DNA, 595 bp, Gossypium hirsutum
  Clone ID: LIB3825-017-Q1-K6-B11
acctttacacttgaccctcattgcttttccgttctgactatcaattgaataaccagttagtctctggccactggaaacttatttcctttagtgcatgttagtgtgtattgccaggtcattccagcattgaggatgcgctgatggcatccacaatatttacatgccgtctttgtttaatattcagggaatgtgcttttcctgcctcaaaaagataccaaaaaataaaagaatctttatttaaaattttcagttataaaaaatgttaattatcattcatattgtttcttacattgtcaactaaataagaacatgctttttatgtggtataaggtcagttaatcatagacaatttttccttgtaatattgataggatcatgtactacagaaagagaggggatagctgttgcgtgctttgcccggaaaagtagactgtccctattcagaaaaaaactttatcaaaacttaccatgatttattgcagtgataatgttcaaagattctgagaaattggaggaaataatttgctttacccggaaagatttttcattagagtacactaataagggttaaactccatagtaccgaaatacaaat

SEQ ID NO: 1018 - DNA, 495 bp, Gossypium hirsutum
  Clone ID: LIB3825-017-Q1-K6-B12
acgttcggctgttacaggagagaggcccgcccggtccagcgaacaaattgtcattgcccctcgagactatccagaaatcaccttcatcagatctccgccatacctgcttccactttctgatccacacctctcattgcttctaccttcccggtgtcgcccccgaggacttccaaagggagatcctttgaaagtgaaagtgaacaacattgacctctataaagacacaacttccttattcatattattccctccctttctgtccaccaaaaaagatagttgacagtgcagaaaatctcggggaagtgcttcgtggtgaccgtattgaaaactctccttatgtgtttaaaatgcgtgagccacaaatgtgttctgttctttgccggattacacttgatgccaaggttgcaaagcagtttcaggagaagattgatgatgaatatcgagtcaatatgaatcctggataacctgcccccttgtgttcccattagaagataa

SEQ ID NO: 1019 - DNA, 598 bp, Gossypium hirsutum
  unsure (1)..(598): unsure at all n locations; Clone ID: LIB3825-017-Q1-K6-B2
ggagctgaagaaaganaaatattcacttcagctggctatccaggatgcctcttttcttcgaaagcagttagnggaagaagcatactgaatttgttgaaatgaacaatgttctgcaaaataaagaagtagacctggtggaggctaaactcgaaatccagcatctgaaatctgagagagcttctcttcagcttatattggaggagaaagaccaggaactctctgatgccaaaaagaatttagagcaattaaaccaagagattgcagagctgaagatgcttatgagcagtaaagaaaatcagctcattcaagctactgctttattaaaggagaaagatgaatatgctcntgaaagtacaagatgagttgaatgatacaaagatgaagttctctgaagctgaaactgtcatagaacgaattgcagaactcacaaaccgactagttatctcagttaaggatgaagacaataatgtgttgaggcctgttgatgatgtgagcagcgaattaatgcatcagctggtagataggccttctagtgattttggattgcagaaaaagcaacttgaaactgaactcagattcactaaagagagcttaaaaa

SEQ ID NO: 1020 - DNA, 580 bp, Gossypium hirsutum
  Clone ID: LIB3825-017-Q1-K6-B3
aacgagaaagtgaggcattgtacttccaatttggcatcaagttaaacaatgtcatggacacacagattgcttattctcttttagagaacaagaagacggacgagattgcctgatgacaacatatcatttgtcggcctccttgcagatccacgctattgcggaatatcttaccaggagaaggaagaagttcgtctcctccttaggcaggatcccaagttttggaaatacagaccattatctgagctcatggtccgtgcagctgcagatgatgtccgctttcttctatacatctaccacatgatgatgaagaaactgaatgaacgatccttgtggcaccttgcagttcgtggagctctgtattgccgatgtttctagcatcaacgataataactatgctgattggccatctattcctcctattccagataacgtgatggatgagggggatgctgctgaagaaaaaatactttcaattctggcatgttccgtaagggaagatggctacgtctcattgtaagaaaaggggtttccatcttgccaattaaggagtcttgcaatgcggaaattcattttggggggt

SEQ ID NO: 1021 - DNA, 614 bp, Gossypium hirsutum
  unsure (1)..(614): unsure at all n locations; Clone ID: LIB3825-017-Q1-K6-B4
cggccgcgtgggtgaaaaatttgatgcaaagttgtttctatcccgaatacaccaaggaacacctgcagcagacttggaagccggagctcttggtctaaaaacagatctccaaggacggactcaacagaggaaacagttggttaaagacaattttgactgctttgtctcatgcaaaaccacaattgatgatattgagtcaaaactgaagcgaattgaggaagatcctgaaggttcggggacaactcacttgtttaaatgcatgcaaggagtatgttcactggcagatcgtgcctttgagcctctatttgagagacaggctcaagcagagaagatcaggtctgttcaaggaatgcttcaaaggttcaggacgctttttaatttgccaagtacaattcgtgggagcattagtaagggcgaatatgacttggccgttagggaatacaagaaggcaaaatcaattgctctcccctcccatgtaaaaatactaaaacgagtccttgaagaggttgaaaaagtgatgcaagaattcaaaggcacgctttacaagtctatggnaagatccacaaatagacctaaccagccttgagaatacagtaagggttgttgttgggagc

SEQ ID NO: 1022 - DNA, 151 bp, Gossypium hirsutum
  unsure (1)..(151): unsure at all n locations; Clone ID: LIB3825-017-Q1-K6-B5
ngactagtatttccaaaactcgctaaatcttttttgtatagtagtattttcaacattaattttttttgctttactaaaaaatagttgacatgacttcctttgttcgccgtttaacggtcggttcaacgataccccacgttncnncggttca

SEQ ID NO: 1023 - DNA, 588 bp, Gossypium hirsutum
  Clone ID: LIB3825-017-Q1-K6-B8
cttccatccttctatctttattttctcgcctgtgacgagaagccgacgctaccatggttcacgtcagtttctaccgcactatgggaagacctttaagaagccacgacgtccgtatgagaaggaacgattggatgctgagttgaggcttgtaggagagtatgggctccgatgtaagagggagctgtggagggttcagtatgctttgagccgcatccgtaatgctgctagggaccttctcactcttgatgagaagaaccctcgtcgtatttttgaaggtgaagcccttcttcgtaggatgaacagatatggacttttggatgagagccagaacaagctcgattatgtgttggctttgactgttgaaaacttccttgaacgtcgtttgcaaacgctcgtgttcaagactggtatggccaagtcaattcaccatgcacgtgtgttgatcaggcaacgacacataagggtcgggagacaggttgtgaacatcccgtccttcatggtgagggtcgactcccaaaagcatattgatttctctcttactagtccgtttggaggtggccgccccggaagagtgaagagaaagaacca

SEQ ID NO: 1024 - DNA, 597 bp, Gossypium hirsutum
  Clone ID: LIB3825-017-Q1-K6-C1
caaatttgccctccttcatcttctccttcatctgcgtcaaactctctacacaatttctgccctcaaactctcttgccatatttcagatattctccttcatcttctcccacagatctgtaactttctctccttctgttcccatatttcaggtaatttttaattcagattcagatttcttgcccgtcaaataaaaatccacccaaatcacttttattttttccctattaaacaaaaagctcaaatcaaaccccaaaatccagaatcctacatcctctaaatccccaaaacgggaaaaaagaataaagaagacataaggacacaggagaggccgatccatgcggtgtcgatgtgggtgagacgacagccgccgaaggtgaagacttttttggcggtggtatcggggatggcagcattggttcttctccgagtcattgtaaatgaccacgacaacctctttgtcgccgccgaggctgtccattctatcggaatctctgtcctcatctataagctcaccaaagagaagacttgtgctggttgtcccttgtgcagtactagctctgtgtattcatccaacaactttccataatctattgaacc

SEQ ID NO: 1025 - DNA, 596 bp, Gossypium hirsutum
  Clone ID: LIB3825-017-Q1-K6-C11
atcgaagagagacactgaatgggggatgagaacctaacagatagggaagaatctgataaagaagtgggttcagtttcccaggagaggtgttcagaggatacaaagggaagcccaaaccatagtgaggaggcacatgaagtaaaatctgatgctgatagctatctttctgaagaggcagatagcatttcgaaaaatgctgaaaaggaggatgaagaagagaaagcagctaatgaattagcaagtgaagtctcaagagaaagagatcctactgctagtaaagcaactgaacgtgaagtcaaagagactgaagaaagtgaccaaattgagaccaaatctcgagtttcaaagaaatcctcgaaaggattgatgtcatcttcagtagatgtggattccgggatttctgatgatgagcccctttgtaagtggaagcttaaagttgggaaatcaggttctaagaagccagtgcagtaggcaaatgcaaagtgcagagaagaaaggtaacagtgggcatctatctgactctatgtaaacaaacacatatatatggaaataaatgtatgactaactctagagtctaaactagagaatgttactgt

SEQ ID NO: 1026 - DNA, 577 bp, Gossypium hirsutum
  Clone ID: LIB3825-017-Q1-K6-C2
gtgagagtggtgaacttcgggatgtggatgatggacttcatcaagtagattctcaacgtaataatgctgaggctaaagaggtgaagtgaaagctgagatcctgcagctgaatgaaggagatattagaaatcctcagaacaatttaattgtggaagcaaaggtagacaacactcttgctggtgattcatctgacatggaaataagtgatgaaataactgaagctcttagagttgaaaagaaactggatgaggttagctctggagctcattctgaatcatttaaggttgaagagaaattggatggctcttcaatgtctaccaaaaagcggtgtcttgatctcgaaaatggaagtcccatccagaaccacacaatggatgctgttgttaagagacctcggatgacatttgatgaccggcaaccttctattcgtattgtgtataatttcttaacaagagctagtaaacagaagcttgaggagcttttgcagaagtggtcagagtggcaagctgaacagggttcttcattgcaagaaaatgaacttacagaatcaggagaaaagacctactttcctgctcta

SEQ ID NO: 1027 - DNA, 515 bp, Gossypium hirsutum
  Clone ID: LIB3825-017-Q1-K6-C4
actaaatattaaacttatctaaggacataaacttctggggttcagtatacagaagttattttgcacagcaacacctaaagaagagcaaagggaagataatagtgatatcataatgtgctggatgggtatttgcacccagaactgccttctacaaagacaagcaaagctgcactgataagcttttacgagacattgaggattgaatttgggactcaaatcggagtaacaatcgtgacgcccggatttattgataccgagatgaccgaaggcaaattcctatcaaaggaaggcagattggaagttgatcgagaaatgagagatgtccacgtgagtttgatgccagtagagtcggtagagcaaatgtgcaaaggcaatagttgaaagcgccaggcgtggggacagatacttgacggtgccgtcgtggatggagaccaccatactttggaaggtcttttgccctgagattatggatgggtggaaccggttcatgatattagggcctggatcttcttaca

SEQ ID NO: 1028 - DNA, 568 bp, Gossypium hirsutum
  unsure (1)..(568): unsure at all n locations; Clone ID: LIB3825-017-Q1-K6-C5
caggccttcccacatgggtgcaagtggtgctggggctggcactcttgattttttacggaacagtccacagtttcaagctttgcgagcaatggtgcaagccaacccacaaatattgcagcctatgctacaagagttggggaaacaaaatcctaatttaatgagacttattcaagagcatcagggtgactttcttcgcttgatcaatgaacctgccgaaggtggagagggaaacattttggggcaattagctgaggcgatgccacaagctgtgcaagtcacacctgaggaacgtgaagccatagaacggcttgaagcaatggggtttgaccgtgcaactgtgctccaagtgttctttgcgtgcaacaagaatgaggaacttgcagccaactaccttttagatcatatgcatgattttcaggattgagttggtaaaagaaatggcttggggaagtacaatatcattttctctgtcgttctttgggtccattgtcattcttgccccccncccctctccccccaaaactctaccgaatttattcttaatcaagtgatgtaagtgttttggtgt

SEQ ID NO: 1029 - DNA, 576 bp, Gossypium hirsutum
  Clone ID: LIB3825-017-Q1-K6-C6
ctggaccccctgcggacaccggccgcggatattcccgggtgcaacccagcgtcccagcggcttaccacaaaggcgacccaatccctttcacgctatcttgctctcccaaaccaataatccctatacctacttccttttccctggatgccggccttacctgtatcttatcccccgccaggccgtcggtatacccgtgaaaacccaaaaacccttatcagccaatccccttgcgtctagagcctccgtcgcctccgtggccccactatgatactcgctcctatctgtcgggactcacttttcccaactgtatagtggtactgcactcgagcagccaggtcctgtctcaatgacccgaggcctaattacttgtaatgcgtcccccgaaggagacaatgttgctcgtcggctgagattttggagcattgagctcgggacgcaggagccccctaacgaggatgctaccagggatgaaataattggtagttgtagcaaaaccctatctcatttaggtgggcgatggaagacgaaactagaatgaaaatctatacaatcttctactcggcattaaaatgccct

SEQ ID NO: 1030 - DNA, 605 bp, Gossypium hirsutum
  unsure (1)..(605): unsure at all n locations; Clone ID: LIB3825-017-Q1-K6-C7
caagtttcaagcaagtcctacagtgaagctaanagtaagagaaattgaaatccttgaggcggcggtccaatggcggagaaacctcaaccggtcgtcgttcaatactgtcaagtctgcggtttgcccgccgaatactgcgagttcggatccgaattcgataaatgcaagccctggttgatccaaaacgcgcccgacctgtacccggatctcctcaaagaagcgaatgctaaagaagctgataaagttgctgatcaattacaatccactggcatctcttctgctgattcaggtagtagttcagaagctaagcaagaggaagttaaacgtcttcctggtgggaaaattaaaaagaaagagaagaaagaagttgtaattgaaaaggttgtgcggaacaaacgcaaatgtataactactgtaaaaggcctggaactttttggtgtaaaattaagcgatgcttcaaagaaacttggaaagaagtttgccacaggagcctctgttgtaaaggggccaactgacaaggaacagattgatgttcaaggagacatatcttacgacattgtggaattcatcaccgaaacctgngctgatgtcccggaaactgcaat

SEQ ID NO: 1031 - DNA, 577 bp, Gossypium hirsutum
  Clone ID: LIB3825-017-Q1-K6-C9
gtttttgccttcccaccggcttaacaccgcctttcattttcatttcctctaaaaaggattaaaatggcgaagaatatgatgcgagccgttcaatacagtaaatataacggaggcgccgctgatctcaagcatgttgaagttccggttcccagtccaaaaaagatgaagttagtgatcaaagtagaggcagctagtattaacccaatcgactggaaaatacaggagggggtagcgcgcccatttttacctcgcaaattcccccacattcctggtaccgatgtagcaggagaaatcgtacaagttggatcaggtgtccagagtttcaaagtcggggatacagttgttgccgtacttggtaatggaggtgcactagctgaatatgctgtggctaaggaaggttccacagttccaaggcctccagaggtatcagcccctgaagctgcagctttgccaattgctggccttgcagctcaccagtcactcacccagcttgctggtctcaaacttgatggaaccggcccacaagtaaatgttctggttaccgctgcttcaggtggagtaggtcaatatgcagtgc

SEQ ID NO: 1032 - DNA, 603 bp, Gossypium hirsutum
  Clone ID: LIB3825-017-Q1-K6-D1
cttggctcaggttctgaacctgattgttttagtcctgtaggaggactgagccctgcacctgatccaggaaaagtgacgctttaagctcaacaaacgatctacaaatgccatctctagcagctttgaccaacgagctattcgggatctctacttctgaagttctcgatgctcaaaagagttccggcggtcattcttccacaagtgccgaaatggatgaagatacgaggcctagcgatgtctcggttaaccaatttgaagctcgttcagacatgcaacctcctgcacaaccagtaacaacttggggcatgaccactgtaggttccccttggagaccaggaccggaaaccacgggtaccaactggggagccgttcatggaaatacaagttttcattgggatgatttaggtcaagaaactacaaaccttagttggggaacaggtcacggaacaatccaggaaaatcgtagtagcatccattcaggcacttctgcaacaaatccagcatatttcggaaaccaacagaggtacgtcgatacaagggatcaacaaaggtatgtcgatccaagagaccaacagaggtacgtcgatccgagggaccaacaaa

SEQ ID NO: 1033 - DNA, 599 bp, Gossypium hirsutum
  unsure (1)..(599): unsure at all n locations; Clone ID: LIB3825-017-Q1-K6-D10
cggttttacaaaattctgtgctgccatcaccgatgcctgataatcggcaagttcagaacaatgctgtgtcgaatgaaaccgctgataaaattgaagaagcaattatgcggttaaaaattaatgataacaatcaagaggtgggtgtttctagatcagcctcgtaccctgatcgtccgggtgaaccggattgttcttattttttaaggactggatcatgtggttatggaagtaattgtcgtttcaatcatccggtttatgatgctcagaatgggcaatacagagaagaactccctgaaagaattggacagccagactgtgggtactttctaaagactggaacttgcaaatatggatccacatgtaaatatcatcatccaaaggacaggaatggggccggacctgttacatttaacattcttggtctccctatgcgtcaggaagaaaaatcatgtccttattacatgcggactggatcatgcaagtttggagttgcgtgcaagttccatcatccccagcctgcatcacctgnggctggcttacctgcaaatgctgtgggatcatcgattttgccaccatcaggtgtgccatatgttggtgga

SEQ ID NO: 1034 - DNA, 605 bp, Gossypium hirsutum
  Clone ID: LIB3825-017-Q1-K6-D4
atgctattgagcaagaagtgcaccagtagcttctgctaaacaaaatagaggattagcagatgaggatcactgcgtgaacaggaacatattgcctaatcataaatatggttacgtagattgctctgagtctctggctggtattgcaagtgatttgggcagtgaatcagttgatcagggagttggtataaacggcgagactgctggagaaggaatatttggttctgagatggatgttgacccacccaccagtatttgtcaacctgaattaccatcccttagtgaggaaattgtagctggtaatgcctttccagggcatggagacagtgcttttattaacaaggtccctaatatggatggttattcacttcccaaagatgatgctttaagagataacgaatgtgaagaaatatttaacataaattgtcacgaaagtgcaatggctgttgagccacaaccagatgaggttccccaaacagaacagctttcaaagccatgcacagtgacaaatcaagatcatttgggcagcaagtgtactgaaccttcagtgccatccccatccttgtgctgtactttgaagccgcaagtgcttgatactgctgaaccct

SEQ ID NO: 1035 - DNA, 249 bp, Gossypium hirsutum
  Clone ID: LIB3825-017-Q1-K6-D7
caaatatgtcgacatccctagaacacacgaactcccctggacttgtcggactactgtgttgcaataacatatgcgactaaatgttgaagcttaaaaacaaaaccaaaaaaaaaaaccaaaaaaaagagaccgaggaaggcaggaggaagaggatcaagggcaaaaggacacgggggtgagagggcagaggaaggggcgagaggaggacgcaaaagtcaattcacggggccgcagtggcacaacagcccc

SEQ ID NO: 1036 - DNA, 604 bp, Gossypium hirsutum
  Clone ID: LIB3825-017-Q1-K6-E10
aaaaagcccaagattagaagcccctagtaacaatttcgttttgttacgacggctgctctcattccacgcaccacctctgccctttttaaaagaaagaatctgaaaaagaagatccgatggtggatattagctgaggtttcgaagcgactgagttgttttagttttggtaattttaatgaaagaggaacatcagcttatgctaagaagaagatgggtggagtcacgtcgtctatcgcctcgaaattcgcttttttcccgccaaatcccccctcctacacagtagtagaggacgacgcgtgtgacggtcggctgtatatacccgaggggccgaggagggatgacgtcgacgtcttgaagctacgcacccgccgtggtaacgatatcgtggctgtccatataaagcaccccaaggcttccgctactctcttgtattctcatggaaatgccgctgatttgggacaaatgtttgagcttttcgtcgagttgtgtaatcgccttcgagttaatattatggggtatgattactctggctatggacaatcaactggaaagccaactgagtgtaatacatatgcagacatagatgcagcatatacatgcctta

SEQ ID NO: 1037 - DNA, 515 bp, Gossypium hirsutum
  Clone ID: LIB3825-017-Q1-K6-E11
ctcgtttcaaaagagttttggaaagttgaacaagcagcgagttgccttgaccgacaacgcaattgttgagcaggcactaggcaagttcggcatcatttgtgttgaagatctcatccacgagataatgactgtgggacctcatttcaaggaagccaacaacttcctttggccatttaagctcaaggcaccattgggtggtctgaagaagaagaggaaccattacgtcgaaggtggagatgccggcaaccgtgagaattacatcaacgagttaattaggagaatgaattaaaaaactaaactcgggttttgttttaaaaaactagtggttgatgtcttttttggtttattttgtaagggattctgatgttaatttctgttggaagttagaatcacttttttgttatcaaagacacggatatttttgctttgtgttgccagtgttatactttgtgactgagagctttctcaaagttcttctggtttagaatttattactaatatgttatttattggtc

SEQ ID NO: 1038 - DNA, 578 bp, Gossypium hirsutum
  unsure (1)..(578): unsure at all n locations; Clone ID: LIB3825-017-Q1-K6-E12
atttgtttgctttgtatattggagtttcctttctcgattttctatttagccaaacaaaatgcagatcttcgttaagactctaaccggcaagacgatcactctcgaggtcgagagctccgatacgatcgacaacgtgaaggccaaaatccaagataaggaaggcatccctccagaccagcagcgtctgcatcttcgccggaaaacagctcgaagacggccggaccttggccgattacaacatccaaaaggagtcaactctccacctcgtcctccgtctgcgcggtgggatgcaaatcttcgtgaaaaccttgactggcaagacaatcactctcgaggtcgagagctccgacacgatcgacaacgtgaaagcgaagatccaagacaaggaaggcatccccccagaccagcaacgtctgatgtttgccggaaaacaactcgaagacggccgtaccttggccgactacaacatgcagaaggaggcaactgtgcaccttgtgcttcgtttgagcggcgggatgcaaatcttcgttaagacgcttaccggnagagacgatcactctggaggtggagagctgtgg

SEQ ID NO: 1039 - DNA, 523 bp, Gossypium hirsutum
  Clone ID: LIB3825-017-Q1-K6-E3
cccacgccgtccgcttaaaatcctcttgagctgccgcagctgagatccgacactccacagcgcagcaatgggtgaggaagtaaaggctttggttcctgagtcactgttgaagaagaacaaggagaatgaagaatgggagcttgcctaaaagcagagctcgaagccgcgaagaataagaaagtcgagaaccggaagttgattttcaacagggctaagcaatatgcaaaggagtacgaggctcaggaaaaagagttgattcaattgaaacgggaggcgaagttgaaaggaggattctatgttgatccagaagctaagcttttgttcattgttagaatccgcggtatcaatgccatgcacccaaggaccagaaagatcttgcagctcctacatttgatacagattctcaatggagtttttcttaaagtgaacaaagcctcactgaacatgctacaccttgaggaaccttatgtgacttatggatacaccaatctcaagagtgttagggaactcatttacaaaaata

SEQ ID NO: 1040 - DNA, 466 bp, Gossypium hirsutum
  Clone ID: LIB3825-017-Q1-K6-E6
atgaattgtgatcctgtatgatttttcaatcttttttttttccattcaaaaaaaaaaaaaaaaaaaaaaaaaaaaaaaaaagggcgggcgccaaaaaaagatccaaacataaatgacacgaaacaaagcaacaaaaatagagatactataagtgcaacctaaagaaccataaactggcacgcggggttgacagcgtaaaacactggcgaaaaccctggcgaaacccatcgcaatccattcgcctttcatccccctttctactgccggcgaggcccccacgaggccccctccgaaccccctgcccaaccggggtgcaccctggttggcgccttggacccgccctttatttggcgcattatgcgcgggggaagaggaggctcaccgctacgcttccccaccacttggcagcgccttattgcccggtctttccgctttttttcctcactttatcccgctgtggcggggg

SEQ ID NO: 1041 - DNA, 581 bp, Gossypium hirsutum
  unsure (1)..(581): unsure at all n locations; Clone ID: LIB3825-017-Q1-K6-E9
tgccatcaatttgctttgaagacatgttggctatttttcacaaggcatttgctaatccaccagaggagctgaatagtccagcttctcataaatctactaanagcctaaacagcctgaagaaaccctaaatgatttcctatctcatcaccctcacaacactttctccatgagctttggcaacgctgctgttttggcttatgtccgccatgaacgtgctgcttcagttcatcagaggttgttttgtgggtttgatgacatatactgccttttcttagggagcttgaacaatctatttatgctgaatagacagtatggtctttccaaagggagcaatgaggcgatgtttgtgattgaagcatataggacactaagggataggggtccataccctgctgatcaggttgttaaggatcttgaaggaagctttgcctttgtgatctatgacagcaagactggaaccgtgtttgctgcactggggtctgatggtggagtgaagctgtattgggggattgcaactgatggctctggggtcatatctgatgatttagatgtcattaaagaagggtgtgccaaatcctttg

SEQ ID NO: 1042 - DNA, 615 bp, Gossypium hirsutum
  Clone ID: LIB3825-017-Q1-K6-F1
gtgctatagcaagccagctggttaatgtttggcttgaagtcttccgtaaggcaaaagtttcttcaaagagaaaatcccttaaagatccagcttcaggaaagccacctctgcactcacagcatggtgcttttgagagtaaagaaagcttgcaggatccattttctgctggaaagcagtatcctttaaacataaaggagaatggcaaatcacttgatattgaggtggaagctgtcgaccaaggaatgtcagaggaagagcaggctgcctttgctgctgaagcagctgcccgagctgcagcaaaagcagctgcagaggcacttgcatccacagaagccaattgcaacaaattactgcagcttcctaagattccttcttttcacaaatttgccagaagggagcaatacgcacaaatggatgaagggaaatggcctggtagtgtttttggaagacaagattgtatatcagaaattgactctaggaactgcagagtcagggactggtctgttgatttctctgctgcttgtgttaaccttgacaattccggaatgtcagtagataacctgtctcagaggagccacttgaagctcagagaacattctggagaaagtttggctg

SEQ ID NO: 1043 - DNA, 599 bp, Gossypium hirsutum
  unsure (1)..(599): unsure at all n locations; Clone ID: LIB3825-017-Q1-K6-F10
gtttttcttgcaatcttcatcccttttctctcgccgcctaactctaaggttttgattgttaagtgtaatttgaagacaagtcaagatggtgaagtttacagctgaggagcttcgtgctatcatggaccggaagcacaacatccgtaatatgtctgttattgcccatgtggatcatgggaaatctactcttactgattcacttgtggctgctgctggtatcattgcacaagaagttgctggtgatgttcgtatgacagatacccgtgccgatgaggctgagcgtgggatcacaattaagtctactggtatctctctgtattatgaaatgagtgatgattctttgaagagctacaaaggagagaggcaagggaatgagtacctcatcaatcttattgattcccctgggcacgttgacttttcatctgaggtcacagctgcacttcgtattactgatggtgcccttgtggtcgttgactgtattgaaggtgtctgtgtccaaacagagactgtcctccgtcaggctcttggagaaaggatcaggcctgtcttgactgttaacaagatggacaggtgcttncttgagcttcaggttgatggag

SEQ ID NO: 1044 - DNA, 573 bp, Gossypium hirsutum
  unsure (1)..(573): unsure at all n locations; Clone ID: LIB3825-017-Q1-K6-F2
taagattctaattcctagaattgcggcaaggaagtttcctgccatggatgttatatattctaatggtangaaaatcaaagctgtcgattatttttgatgcaagtggcgttgatgttagcaagttggctgtccctgaagcatctttagtctgtctatcatttagagcaaactctcaggtatcttttatagactcttggctcttatgcttgaatcccattaaatgactgcttcttcgatttatgaggaaatctagtgatggagcgaataatgctcttcagaggcatattgttttttcatttggtgatcattattacttcagaaaggaacttaagattctgaaccttctaactgggtaatcaaaagtttcttttatcctaattaataacaaaactaatattcaagggatactagtgtcaaatgaaaataataatgtgctttgaggaaaatggtcctgtttgctgttttcttttagatttctgcaaccaagcaaagccttaggttttccattttgggtgagcgagtggaaaagtaaagaagtatccttatgctagtgtcagttttatttcaacttca

SEQ ID NO: 1045 - DNA, 67 bp, Gossypium hirsutum
  Clone ID: LIB3825-017-Q1-K6-F4
actagttctagaatcgcgcacacaacctttttatgtatttttagctttctgagaaaatttagtttcc

SEQ ID NO: 1046 - DNA, 574 bp, Gossypium hirsutum
  unsure (1)..(574): unsure at all n locations; Clone ID: LIB3825-017-Q1-K6-F5
ctttgcagttcaatatcgccaacctcagtatgggatgccggaagagctagaaatcgtcgatgaccagnaaactatcaacacaatacctcataatcatagcaaggggcttgcaaatgtggaacctcttttcaacagcttggccttgcagcaatacattcttttatgctcacaggtgtgatgtgaacctcttgttggcgacattatgtactcgtaccattcaaacctgtgaaggaagtatagttaaagctcttgattgtaatgctgttgtggctagtcgggatgcattgacaaagacagtttatgctcgattgtttgattgtactacaattatatattattacagatgggggttggagaatacgatcaaagggaaaacatcagatatggtgattcccagccaaccagtggcttcttagacacccaacattttgcacaaccaaacatgaccagaacttctaaacctacatgttgaggattcacactcaaggagcaagaaccatctcagcaacttattgggatcgagcagtcaaaattcagaatcaagtgacacacaagagctagatttggagcttac

SEQ ID NO: 1047 - DNA, 261 bp, Gossypium hirsutum
  unsure (1)..(261): unsure at all n locations; Clone ID: LIB3825-017-Q1-K6-F8
gtagaaaaaatagnaaggaaaaaaagggtaagagaaactattttgtagtgaatagggtttgggtttcagagtgtgtattctaaagatatttacatgttgtaggaatatggagaacgaacatatatatttatatataccctgaaatcctaaaatataattgtatggtatggttgtagtattagaaaggcattattcgaagtctcaggtttgaattccatgaacgaattttctctcgatttattgaggtagtgtgtttttttt

SEQ ID NO: 1048 - DNA, 581 bp, Gossypium hirsutum
  unsure (1)..(581): unsure at all n locations; Clone ID: LIB3825-017-Q1-K6-G11
ctttccctccctccctctcanatcaaagcctcaaaatgggcatttgtcaagggctcagnaaaaccaaagcttactttaagcggtttcaggttccatacaagagaaggagagagggaaagactgactaccgggctaggattcgcctaatcaatcaagacaagaataagtacaacactcctaagtaccgattcgttgtccgatttagcaacaaagatgtcaccgcacaaatagtttctgctaatattgctggtgatatggttcttgcttctgcttactcacatgagcttccacgatatgggcttgaagtgggtcttacaaactatgctgcagcttattgcactggtttgctgttggggcgccgtgtgcttaagatgctcgaaatggatgatgagtatcagggcaatgtagaggctactggagaggatttctcagttgagccaactgagacaaggagacctttccgtgctctccttgatgtagggctgatcaggacaaccactggcaatcgtgtttttggtgctctaaagggagccttggatgctggtttggatattcctcatagcgacaagaggtttgctggg

SEQ ID NO: 1049 - DNA, 551 bp, Gossypium hirsutum
  Clone ID: LIB3825-017-Q1-K6-G12
ctgtttcagtatcgttttattgatggagttaattcccatttaaaacagaacctgcaacaaaattttccaaaacgaataaattccgtgcaatgtagtgagagaaatgtagccaaacaagagcatttgattggtaacagatcggaaagcttgagaaacgcaagaaccgaaccaattaaagctccggttggaggaataggccaaaggaaatgtttctttgattcagccgacttttttcccgagccaaagcaaaccgtttccatctacggtgagattgagaaacggcttaagcttagaggaatcgataagccggcgaaagatctcgagactcttaagaagttccttgaagcttcgcaactcaaaggcctgttacacagcaaaaaacctccaaaccaaacgaataagagaaactttgtttatgaacatgaacaatctccgcttcccattatcaaaccgggaaagatcaccagcttcccctgctcagaaggatttggaaccgattcgccctccttcaagtaattaagctcaaggactctgggtcctcatcaggaact

SEQ ID NO: 1050 - DNA, 597 bp, Gossypium hirsutum
  unsure (1)..(597): unsure at all n locations; Clone ID: LIB3825-017-Q1-K6-G4
ggttcaaatggtgtgcatcagnanagtgatcaacctgcctcagtacggcttctgacctattcaactccaactgggcagtatgaacttttgttgtctcctgttgaaccaaatagctcttctccatttaccagaagaaacaggagccaatcctttaccgactgagatggaaactgatgtttccaattctgcaatggagcccatggagacgatggaggtccagtctgtggaaagaactactcagtttttcccttttggtgatcctacctcatgggagctacctttcttgcaaggatggttaattggtcagacccaagctggtcagcgcaatatgcgtttggctactggtggtggtcatgagaattcactcccagctggtgaaacaggaacttctgcttcagtagcttcttcaggtatggccacgagtgttagccaaacaagagtttctggaagaccaagttcacggcatcgttcttcgcgttctcgcatgatctcctcaagtggaactggtgaatctggttatagcaacatcatacatgagagtagcgatcctcaacctgctgttggcagaattccatctgaacttgccacattacttgc

SEQ ID NO: 1051 - DNA, 569 bp, Gossypium hirsutum
  Clone ID: LIB3825-017-Q1-K6-G5
catgttacgcctgcccgccttatattaccttattgcccacatctccttctcccttcaaaattagagtccatctgtctttctctcgcaaaaaacttgctcaaattttgggttttgaaaataaggtaagaaggttttccctgagacaattatgccatcattcgatatttgttgtttggagacagaaccggggttgaacagtaatgtcgtgtcgattaatgtcggcggtcggattttccaaacgaccaagcagaccctaacccaagcggatcccaaatcccttctttatcgacttgcggaaacgggttcggatcgtttcgtggaccgggacccgggtcagttctcgctcctcctctccctcctccgcagcgggacccttccttcgaaagtcaaagactttgacctccgggacctcatcgaagagtccagattctacggcgttgagtcgcttttgactagctctttaagcgacccttcccactttgacgcttttgccctccggaagtcgtctgaattacccttaaacggccgcgacaccccttctgcgattgcctcgacgccgtttgggtccc

SEQ ID NO: 1052 - DNA, 392 bp, Gossypium hirsutum
  unsure (1)..(392): unsure at all n locations; Clone ID: LIB3825-017-Q1-K6-G6
cacacaatctatgcatgggtggtcgcagtgtgaaaacgctgcccggatactctgcacaaatgaacccatgtctcggcaaatctactatagataagggatcacacggctcgcataatatctccgacataatatccccccatgtctgcggtgcgtgtcatcatccactggtaaggagaactcgggcgcagcaccaatgacaaggaaaaagaatgncataagagagtgtacatgtggttatctttttggtctttttttctatttcattttttttaaaggggggcatttctgtacaataccactgtcttagtgtcattcaattctctcgactgcttgataatacatatatttgctattatggggtatatgtcacataccattcattgttgagtaag

SEQ ID NO: 1053 - DNA, 573 bp, Gossypium hirsutum
  Clone ID: LIB3825-017-Q1-K6-G8
ttttctttttcaagcagttgtcattgttcttgtcttaggttttatattcaaacttgaaaagaaaaaacatggcacactttcagaatcaatattctgctcccgaagttacgcaaactgacgcatatggcaacccaactcgccggacagacgagtacggcaacccaatcccgactcaggagactggccgtggaattctagggatcggtggacatcatcacggaggccatcatggactccatcgtactggaagttcctctagctcgagctcatcttcggaagacgaaggaacggggaagaagaagaagggactgaaacagaggctaaaggagaagataccaggtaacaaagagcatcaatctcaggccacctcaactacaaccccagggcagggggctacgtatcaccagcagcaccacgagaagaaaggagtgatggataagatcaaggagaagctccctggtcaccacaacccttgattagctgcctttggtcggctatttcctactagttatataagcgttaattaaataacttgcagcaatgaagactcttgtatctcttaagactatactt

SEQ ID NO: 1054 - DNA, 612 bp, Gossypium hirsutum
  unsure (1)..(612): unsure at all n locations; Clone ID: LIB3825-017-Q1-K6-G9
cccgtccgagtacaccctaaactaattaagaaaaaggaatccgcatagcagctncaaacaccaccatccctctcaccatgtaactgtcacatccaggtccaagaatgatgcctactcctaggtaggaacacagctactgctcccctctcctctaccccatacaagcacgtacaggaggcctgtctctacatccttgccaaggtcaaggnaatctgtttaagggagtgttaaacaatcctgggaacaatttgcatgtgccacgtgcttgtcacaatcggcatcatccaagatgagagctgtgacaagcttttttgcactgagggcaaggcggatgatgtccatcttgccgttgatccgtggacaacagaatccctaggctctggattaccctcaacttacactatagaagaagctgaacgctccattaaatatcctaaccacgctgcccttgaaccacgtgtcattacagtgaagaagcgcgatataaaggataaggatgcgtgcgacaacgtttgtctgcggcacgcctaatgactaatgcctacaacatttgatccaatgcatggaggtctttaatggcacggagaaatgacatcaccccctaacacttgg

SEQ ID NO: 1055 - DNA, 601 bp, Gossypium hirsutum
  unsure (1)..(601): unsure at all n locations; Clone ID: LIB3825-017-Q1-K6-H1
gntttattcttcggagaagctggagtaatcaaaagcgagaacgaagagccactacagaagttttcagatggaagtgcaaaattctgaacaagggcagaaattgaaatacgtggagatgtgccagctgcagagacaagcctaggtggaagtacgatttgtggaggcgcagcatgtgggttttctgatgctcaaaccatttctaaagatgcaaacgaacgtgcagcctctatgcggaaattgttaacagcagtagtgctgtgcattgtctttatgagtgttgaagtagccggaggaattaaagccaacagtcttgcaatcttaactgatgcagctcatctcttgtcagatgttgcagcatttgcaatttccttgttttctctctgggcatcagggtgggaggcaactcctcgtcaaacatatggattcttcaggattgaaattcttggtgcccttgtttccatccagatgatatggcttctagctggcatccttgtttatgaagccatagctagacttatccatgatacaggnggaagttcaaggctttctcatgttcgtggtttctgcatttggtttagtggttaatatagctatggctatc

SEQ ID NO: 1056 - DNA, 600 bp, Gossypium hirsutum
  Clone ID: LIB3825-017-Q1-K6-H10
ggagcggagcacagctagattgcagcttgtgcgagagctgctcatgcgaaatggtccgggatttatgcaatgagctttacgaggtcgatacacatttggaacatctcagagaaacagtcgtccaaaagtgcaggaaaatgtcaaccgaagagaagagaaatcttgggacagccatagcccgattgtctatggaggatcttaataaagcattggagattattgctcaaagtaatcccgcgtttcaagcaatggctgaagaagtggagattgacattgatgctcagagtgaatctaccctatggaggttaaaattttttgtgaaggatgctttggagcttcagagtaagagtgcaatgagcacaggtggcaacaacaacaacaactataacaacaaacggaagaaagagatatgcgatgcgattgcgaaaacggccaagaaaaagagtaaaaggacttcctcttgatccatatgatgtagcataagagaagattttgcaattgcttgcattccatttcatatttgtacagtgagactatctcggtttcagatgctttagcacatctctttattataatgagctattgatgtttgatttcaaa

SEQ ID NO: 1057 - DNA, 582 bp, Gossypium hirsutum
  unsure (1)..(582): unsure at all n locations; Clone ID: LIB3825-017-Q1-K6-H11
cggncgcgtgggcggacgcgtgggcggacgcgtgggcttgctgggtgggcggaaaaacaaacactacgctgataagataaccttctctttgtacacccaaacttccaccaaccgccaccataataacctctacaatttcttcagttgcacttctcaagctaggccgttttctgtgatgggtactcctttgcctcgtgaatggctcggccttcaacaattccccgctgctacacaaacgaaattgttcgagttgttgggaaaattgaagcaagagaatgtcaacactttgactatcgttgttatgggcaaaggcggtgtagggaagtcttccactatcaattctctcattggagagcaagttgttcgagttactgctttccagtccgaggggctgagacccgtgatggtttcacgctcatgggctgggtttacattgaatgtaattgatacgcctggactcgtggaggctggatatgtcaatcaccaagctcttgagttgatcaaagggtttcttttgaataagaccatagatgttctactttatgttgaccgcctagatgtatatagagtggacaacttgga

SEQ ID NO: 1058 - DNA, 583 bp, Gossypium hirsutum
  unsure (1)..(583): unsure at all n locations; Clone ID: LIB3825-017-Q1-K6-H2
cggccgcgtggggccggngctttttttctcgggcgccaacaaaactaagaaaatccttcttttttttcttaacaaatttctntgaaaactattgtttaattaaaagttttgttaagaaatctcgaatttctatcagttttccagtttcaagatccgatttttctccattttcgaataaattaagggaaaaaattcagggtttgaattttgaaagaaaaaaagttattttttttccagaaaaggtttttatttttttaatcttaaggctctgtttggcggcgcatagccgaattttgtaacaaatggtagtaaaagtagcagcaaatttgcatttacagttatcagagccaaaccttacccaatcgtcggcggtaatcccttcaccttcatttctaaaacggtgccgtaccgacgccgtccttgtttcaaagaccgttaatcggtctactcttttcggttcacgttccgccattatcaaccggtctaaatcctctgagattttcaaaccgaaacataaagcttcttcaccaattgcttgtataccctacttatcagacgatgaatttcccaagagaattaacga

SEQ ID NO: 1059 - DNA, 582 bp, Gossypium hirsutum
  unsure (1)..(582): unsure at all n locations; Clone ID: LIB3825-017-Q1-K6-H5
gcagtctggacttgctttgcccaaaaaatgaagaaggtgacaagttaaccaaagcaatactggcttttgccttgccctgcttgctgctgctgattcaaccagtacaaggggcttccaaaaccccaactttacagtatggcacaattgggaggaggaataatgctccttggacacaccctccacctgttaatgacccgacaaggggttgcaatgccgaaaacggttgtcgccagtttactctgagtcttgaaaaccgcagaggaaccctagttgaagctgttggcaatgttacaatggcggaaggaactttgaaccacagagagccaggtaccgaggccatagctgctgggattgccacttggttcttgaacaagactgagtccaatagcaatacatatgggcgattaaggatttcacaggacccaatttccagtgccgcagtgtcatcacaaatgttgcagctacaggctgtttctcgagggattgctcgtatgggactgcaagtgtatacatcaatgtctactgaagataactccaacacacctncggcagatggaaaaattgaaataaaagttaattcaa

SEQ ID NO: 1060 - DNA, 602 bp, Gossypium hirsutum
  Clone ID: LIB3825-017-Q1-K6-H7
ctttcttggtatccaaacaaaacccagttattagaaacctttttccgaggaaccagagaaaacaccagttagattgttagatatcagaatggcttctgatgggcagcaacagcaggtacctcctcagaaacaggatgcacaacctggaaaagaacatgtcatgaatcctatccctgagtactacagctccaactaccagccttccaacaagcttcaagggaaggtggcattagttactggaggtgattcggggattggccgagcagtttgccacagctttgccctcgagggagcaacggtggcctttacgtacgtgaagtctcaagaggagaaggacgcacaagacagtctggagatactgaggaaggctaagacctcagacgccaaggacccgctggctgtatctgctgatttggggtacgataagaactgcaaacaagtcgttgatgaggtcgtaaaagcatttggtcggatcgatattctggttaacaatgcggctgaacagtacaaggctagcagtgtggaggagattgatgaggagaggcttgatagggtgtttaggaccaacatctattcccaattcttcctgtccaggcatgctc

SEQ ID NO: 1061 - DNA, 594 bp, Gossypium hirsutum
  Clone ID: LIB3825-017-Q1-K6-H8
gttcttctttaggtgttatgaatggacacaagttatggcaagctcacaaagcagaggttccaaacttctggagttaaataagattctgaggaagatatatgcaagcaccgggatcatgttgctaaaatgcgcaggcttcttttccgccatgaaatgaagcagaagcgcataaaaaagacaagtccaaaacctatcatcggttaaagaataaagataaactgaaagtggaatctgcagaaatgctgatggatccagaggctgccaaagagcaggctaggaagcaagagttcaaacgggctgaggagcgattgactttgaagcacaaaaataagtcaaagagggcaatgcgtatcttagaacgaggattgaatgcccaggatgaaggcactcgagcggctttggctgaacagcttcaccaacatgctgttttgacaagaaaaattaacactgttaaggacagtagtagtagcagtgatagtagtagtgacgatgatgatgagggttcaaacgaggatagggcatctgagttgctagaaaaagcaaaagataaaacgctgaaagtattagaagacgatgaagaattgcctaattctg

SEQ ID NO: 1062 - DNA, 603 bp, Gossypium hirsutum
  Clone ID: LIB3825-018-Q1-K6-A1
cccagcgtccgcccacgcgtccgcgatttcgaaacttgctaccagattgccttggccatcaaggatgaagtggaggatcttgagaaggctggtatcaatggttatccaaatcgatgaggctgctttgagagaagggttgcctcttaggaagtccgagcatgccttctaccaaagtgggctgtccactccttcagaatcaccaactgtggtgtccaagacattacccagatccacacccacatgtgctactccaacttcaatgatatcatccactcgatcatcgacatggatgccgatgtcataaccattgagaactcacgttcagatgagaagctcctgtcagtcttccgtgaaggagtgaagtatggtgctggaattggacccggtgtctatgacatccactctcccagaataccatcaaccgaagagattgctgacagaattaacaagatgcttgccgtgctcgagaccaacatcttgtgggttaaccctgactgtgggctcaagactcgcaagtacgctgaggtgaaaccagccctgagcaacatggttgctgctgccaagctgctccgcacccaactcgccagcgccaagtgataggct

SEQ ID NO: 1063 - DNA, 599 bp, Gossypium hirsutum
  unsure (1)..(599): unsure at all n locations; Clone ID: LIB3825-018-Q1-K6-A10
gnaagagagagagagattttgatgggtcgttacggcgtcgacgaggcggtgataccgtacaatctgaacggcgaatccaattggtggcacgacattaacgattcaccgctctggcaggatcgcatttttcacattctcaccgccctttatggcctcgtcgccgtcattgctctcgttcaattggtacggatacaattcagagttcctgaattcggttggaccacgcagaaggtcttccattttctaaattttcttgtgaatggggttcgcgggctagtttttattttcaggcggaatgtgcaggacttacatccagagattgttcgacacatcttgctggacatgccaagtctagtgttcttcacgacatatgcacttttggttttgttttgggctgagatctactaccaggcacgtgccgagtcaactgatggactgaggccaattttctttacaataaatgtggcggtttattccattcagattgcaatgtggctggtattatggtggaagtatatcccagttttggtcatcatatcgaagatgttctttgcaggtgtctcattgtttgcagcccttgngtttttactatatggtgg

SEQ ID NO: 1064 - DNA, 428 bp, Gossypium hirsutum
  unsure (1)..(428): unsure at all n locations; Clone ID: LIB3825-018-Q1-K6-A12
cactatataatcctcactttctatcgactcttcccctcacaaaaccctaaacctccaaactccaaaaatatcctctttgaagtagggtttttgtaacttcttttgctgatattcagccgctgtttcttatatctctcttttaatcccataaaaatcataagtcagttttgaaaatctccttaagtcttcttaaactatggngaaaatcaagcaagaaatcaaaccccaaagttgaagcagctcctgctgtagctgctcctaaatctggaaagaaggtaagagagatgctgaagaaactcctgaaaaacaagtggctgcaaagaagcagaagaaaaacgatggagtggcacaggctattgtgaagaaagaggttgaagctaagactcagaagaagaagaggaaactagtagttcttccgatgactcttc

SEQ ID NO: 1065 - DNA, 197 bp, Gossypium hirsutum
  unsure (1)..(197): unsure at all n locations; Clone ID: LIB3825-018-Q1-K6-A2
tgnaacatggaggatgatgaggaaagctacttgtagtttaagggaagttgataattatacccttaagaagggcctcattattgaaggaatcgatattcggcctaaagatagcagatagaaaagaattacatactatgtatgataaacattattgcttgtgacattatacaacatatttagtgggaatatttgctagc

SEQ ID NO: 1066 - DNA, 196 bp, Gossypium hirsutum
  unsure (1)..(196): unsure at all n locations; Clone ID: LIB3825-018-Q1-K6-A3
gacacaanaggtggaaacaagatgtgggttgaagtttcctattgtagcagtcggctgatatgctagaaagtaatctatcaattttgttgctctgttctgcttctatgcttatgtccttgtgctgctctatgtggttgtatattgtaacttgtaagcagctctctgtattcaaataaattcctggtcattttctttt

SEQ ID NO: 1067 - DNA, 606 bp, Gossypium hirsutum
  Clone ID: LIB3825-018-Q1-K6-A4
caaaggttgccatggctattgctccatcccgtattagctctggcttgggaccaaaaagcctccctggttctcctgaggctcttactttggtgtgttggatttgccgaagctacaggattcataccggtggagaactcctacgagccgattcacagtccggtgatgctttgctgaagcaactgtggaaccattcagatgcgataatgtgctgttcattgaaaacaaatgcttctccagttttcacctttgcaaaccaggctgggcttgatatgctagaaactacattggtagcccttcaagacataatgctggacaagattctcgacgaagccggccgaaagagcctatgctccgagttctcaaagatcatgcaacaggggtttgcacatctaccagcagggatatgtgtatcgagtatgggaaggccagtgtcctatgagcaggtgattgtgtggaaggttgtcgatgacgacaacgatgatgctgccaatcactgcctcgccttgatgtttgtaaactggtcttttgtgtgagatctttactgatcgacgtatcgaaaaattaactcttaggtatctatctatctatccatctatatatattaag

SEQ ID NO: 1068 - DNA, 604 bp, Gossypium hirsutum
  Clone ID: LIB3825-018-Q1-K6-A5
ttctttggtttacttttcagggtttctctcttcaaaaaaccctcgagaatctatgcgcttaacgcttactttttgattcattcgaggggttcttttccttctcttcttcttgttgttttagagatgggtttggtgtctgttttttgggagattttaaagaaacccacaattggagatgtggtgagggagttactggtttttatagctcctttatgggttgctgtaattgttggggttttagttggttgggcatggaagccgaagtgggcaactataggcagggagatgttcatggattgttctggttctaaggattcggctcctgcagaatcttctgagtcttctttcagtggttttggttcccttccgagcttgaatttgatcaagtttcagttgcctagtgttatctcttggatttcagatgacggggctcaaaaagattctttctttttgtcacctactcttcattccaattgcagttcatcacagaacgagaagcaaaaactgggttttctgacagatgatgatttagagcatttatataaattagttgaagaaaaagatggaggtcctgcttggattcacatgatggataagtccaccc

SEQ ID NO: 1069 - DNA, 392 bp, Gossypium hirsutum
  unsure (1)..(392): unsure at all n locations; Clone ID: LIB3825-018-Q1-K6-A6
gnaaatcagtttctgcattcctacaaggtaatatgctccttccatcagcagaaacctgtgcagacgagtatgagtgaaatgagaggaacagctgctttggaggactttagaggtgcctcctattttgtgccttgggagacgttgtgaatgaggctttttagggccttcaattatgcataaggcttcaggagacattttctatgggaagatattcagatccggttgccatggataattccatgaatgttccaaagtagatgtcagatggagcagagagcgggttatgatcacaactgagtaacagataatccgaatatgcagagttatcaaggtaactgctacgagccttgtagcattattttgagtatgaaatttgtagactgggtggacct

SEQ ID NO: 1070 - DNA, 198 bp, Gossypium hirsutum
  Clone ID: LIB3825-018-Q1-K6-A7
cccgtcagccgaagcgttgatctcccagcacacttctcactctacatattataaaaaatatataaatataaaactggttcgactctttaactttataaattagctttggccaagtgtagtcctagtacgtacgtttgagaagtgtatgtctctttgttgggtttatatttgatgctaagttatcgaacttttatgccg

SEQ ID NO: 1071 - DNA, 612 bp, Gossypium hirsutum
  unsure (1)..(612): unsure at all n locations; Clone ID: LIB3825-018-Q1-K6-A8
ctgttttcccttttcttgctcttcaatccaaaccccgagtcggtngaaaacaaatggcagcctctgcaattgtggcggaacccaaacccacggcggagccgccttttcccgccacaagatccgaccttggacagtacccgatggtggacccaacgaaagccgaggaggacgatctgtattgcaggttgaaatcctttcaaaggcagttggagttcatagacatccaagaagagtatgtgaaagacgaacagaagaatctcaagagagagctgttgagggctcaggaggaagtcaagcggatccagtcggtgcccttggtcattggccagttcatggaaatggtcgatcaaaacaatggaatcgttggctccactacgggatccaattattatgtaaggatattgagcaccatcaacagagagcttctaaagccgtcggcttcggtggctcttcaccgtcactccaacgctctagtcgacgttttgcctcccgaggccgattccagtatctctctgcttagccagtcggagaagcctgatgttacgtacaacgatattggaggatgtgacatccaaaagcaagaaattcgtgaggcagtggagctaccattga

SEQ ID NO: 1072 - DNA, 461 bp, Gossypium hirsutum
  unsure (1)..(461): unsure at all n locations; Clone ID: LIB3825-018-Q1-K6-A9
ccgtccggttttgnagctggnaaattaagtagatcggtgagtgataagtggttgccgtgttgtttacagatgaaatgagggaaaaactggaaacatgaatgcaggatgttgaattgtagtacaagttaaggttataaaatgagaacggagaggaaaccgcatttgataaagaagcctgctgatgcgaaacgtcaaagtgttgatgaatcccttggccctggcttgaaagatgaagcaactgaggttgagcatttactcgtggaacctaaaagtgaacgtgtctcggtagacagagtcttttgtttcgggaaggagaatatagaaaaacacttgaaaatggaggacttctcttgtgcttttgattatggctggaaaattggttctggacatgaaagcttatgagtcaccggcagagtagcattccaagatttggtgcttatttgctgttagacatatgtttc

SEQ ID NO: 1073 - DNA, 52 bp, Gossypium hirsutum
  Clone ID: LIB3825-018-Q1-K6-B1
tttttttcaaaatagcaacacgctatagtgatataaaatcatcatcaccgtc

SEQ ID NO: 1074 - DNA, 604 bp, Gossypium hirsutum
  Clone ID: LIB3825-018-Q1-K6-B10
ccccgcgtccgcggacgcgtgggatttcagactctcttttccctatcccccgtttcgattgccaaaaaattgaaattagcttcttctcttttaaatgtatagttttttttattttaaacggtgacttgggagaagggtggaagcaggttagggtttttgggattgttgagaaggagattagcagcggggtttccaggtgatgggcgatgagaaatcgatgatcgtgatggcgagtagggatagagagagtagagatcgggagcttctgatcccggtcgctgacgccgtccacgatgattcctccaaaccttctccttcctcttcttccagtcacgccggccgcgagaccttttacaaagttttccggagctgggcttcaaagaagttcatgacgggatggtcttggatttgtaacttctataacattcatcttcttggttggggtattcatgtcatcatggttgggagcatctgtcctaggccttggtgagtggtttatcaagcggatgccatttgttcgtcatatctacaatgcctccaagcagatcagttccgctatatcaccagatcagaacacacaggcattcaaggaagtagccatcat

SEQ ID NO: 1075 - DNA, 605 bp, Gossypium hirsutum
  Clone ID: LIB3825-018-Q1-K6-B11
cttttccttactccccccagttccctgttggaacaatgtcaacatcaatgacgggtggtggctttggagaaagaaaacagcgaggaagccagcacaagcaagctcgagaaagggtgcatgagaggaaaggtggtccagaaaacgctctctgcacttacaaaggtgtgaggcagagaacttggggtaaatgggttgctgaaattcgtgaaccgaatcgtggtgctcgtctttggcttggaactttcgacacttctcatgaagcagcaatggcttacgatgctgccgcacgtaaactctatggctcggatgccaagctcaatttgcctgaattatgtgccaacaaccctcagtctcaaccttcttcagcagctaatcctcagatggctccgatggtgaattaccaaccccaaaacgtgagcaattcaggtatgagtatgatcagttcatcatcaaataacccaactattagggtcaatgacatgacaccaataccagtgtacaacaatgactcctcagtaatgccttctttccccaacgagagcattgatcttcaagggaacatggatgcaaagtttggacagattactgaagatggaattgagggg

SEQ ID NO: 1076 - DNA, 579 bp, Gossypium hirsutum
  Clone ID: LIB3825-018-Q1-K6-B2
ctcccttcttacccttattatgtatataaaccgcctatgccttacttctacatttactttcttcttatgcttaccctattgactctgaatatttaggtttaggataaggtttcaacaataggagcgtcttgcattacgtgttaggtgttcttggaaatgccactgctttgcacctcttcttgtctacgacgattacatttaataggatcattagaagtaagtccacagacaattatgtgcaattccctatggcatgaccttgcttaactgtcttctctctgcctggtatgggctagcatatgtatctaaaaacaacattttggtataaaaaatcacatgcaactggtgcactaatcgaatccatttatgtatagatcttcatcatctatgccccaaagaaagagaaggctaaaatatatgggctgttcacttatgttatcactgtgctcacgggcgcgggacttatttgcctgttttccatccatggaaatggcagaaagctctaatgcggcctatctaccaccatttactccatgatgatggatacttctgcactttcaatcatgatgctggtgatca

SEQ ID NO: 1077 - DNA, 610 bp, Gossypium hirsutum
  Clone ID: LIB3825-018-Q1-K6-B4
cggctcaaaaacgggcccagctgaggaccggaagcgtaaaggaagagaaccggacgacgccgagtgtcacagcgaggatgctgagttcgaatcccctgaaacaaagaaacaatctcgtggatcctcatctacgaaaaggtcccgtgctgcagaggttcataacctctcggagaggagacgcagagataggataaatgaaaagatgagggctttgcaagaacttattcctcgttgtaacaagtcagacaaagcttcaatgttggatgaagcaatcgagtacctaaagtcacttcagttacaagttcagatgatgtccatgggttgtggcatgctcccaatgatgtttcctcagcattacatgccaacaatggggatgggaattgggatgggcatggtcatggatatgggattaagtcggccaatgatgccatttcacaatgttatggctggatcaggtttaccaacaccagctgcttcagctcatttggatccaaggtttcccatgccagcatttcatatgtcaccacaagttccagttcctgatccatcaagaatccaaccgaacaatcagtcagatgctatgttgaacccacttggcatgcaaaaccca

SEQ ID NO: 1078 - DNA, 572 bp, Gossypium hirsutum
  unsure (1)..(572): unsure at all n locations; Clone ID: LIB3825-018-Q1-K6-B6
ggctgctctgatattcaagggagagttggagtatgcagcttatctttctganagggaaagatacagactaaattggcacgggaagcagatgaaagggcaagccagaatatatttaaagctaggaacaaagcctttgaaaatgtgataacaattgatttgcatgggcaacatgtcaaacaagcaatgaaacttttaaaactacaccttctatttggaatacatgttccttcggttcaaactctgagggttattactggctgtggaacacatggtatggggaagtcaaaactgaaacagtcggtcactaagcttcttgaaaaggaaggtattcagtggcaggaagaaaaccgtggaactgtactaatcaagcttgacggatacagagagttaagctttttagaatccaatagtgacacggagtaaattaattatctaataccaggtttgcatcatttaccatctgtttgtacaagacaaggatgtaatgtaacaaggtttaatgtagtggttcaaaaacagggatcagatgtttatatgtacattactagaaatccttgtactctttcctcctt

SEQ ID NO: 1079 - DNA, 617 bp, Gossypium hirsutum
  unsure (1)..(617): unsure at all n locations; Clone ID: LIB3825-018-Q1-K6-B7
cggacgcgtgggtcccngatataagtgaanagnagtgggagtagnaaaatccatggnaagaggttaatcataaagctggcagttgtgtagagaagacagatggggatgacatggagagtgcaaagcccaagttaaagccgttgcactgggacaaagtacgagcgacctcggagagagctacagtgtgggaccagttaaaatcaagctcttttcaattgaatgaggacatgatggagaccctttttggctgcaattccacaaactcagtgcccagagaacctattagaagatcagttttgcctcctgttgaacgggaaaacagagtgttgaatccaaagaagtcacaaaatattgccatactgttgagagcactgagtgtaactcgagatgaggtgtcagaagctcttttagatggtaacccagaaagcttaggtgctgagcttttggagactttagtaaagatggctccatcaaaggaggaagaaataaaacttctagagtacagcggggacatctcgaaactaggctctgcagaaagatttcttaagacaatacttgatatcccttttgccttcaaaagaattgaagccatgctctacagagctaactttgataca

SEQ ID NO: 1080 - DNA, 579 bp, Gossypium hirsutum
  unsure (1)..(579): unsure at all n locations; Clone ID: LIB3825-018-Q1-K6-B9
atctacacatagatttcggaactgntttgaacctttgaaccgggaaagttccctgaaaggttcctttccgcttgactagaatgcttgtgaaagctatggaggtcagtggtattgagggaaatttccgttcaacatgtngaaaatgtgatgcaagttctccgcacaaataaggatagtgttatggctatgatggaggcatttgttcatgatcctctcattaattggcgtcttttcaatttcaatgaagtccctcaaatctcaatgtttgccagtaatcatgcccctgctgttataaacacagaagaaactgctcaaagcaaagagcttggtcaacctcagcggggggcacgtgaaagggaacttcttcaggctgtcaatcaacttggtgatgctaatgaggtattgaatgagcgggctgtggtggttatggctcgcatgagtaacaaactgaccggacgtgatttttcatcttcatgctcatcaatacctgcatgttccatgcaaaacgtagttgatcacagcacattaacttctggagataaccgagaagtggaacatggttttgtccgtaaaattgca

SEQ ID NO: 1081 - DNA, 550 bp, Gossypium hirsutum
  unsure (1)..(550): unsure at all n locations; Clone ID: LIB3825-018-Q1-K6-C1
cggnagcgtgggcggacgcgtgggtttcgagcttgttaagcccggatctctctcagttagatcgactcgattttgagatatgttactcttttcaacagtggctatttctttactgttgggatttgcaaactgaaggtcagagcttcgtaaaatgccactgacccaagaggcttgagggttaatgtttccagtgttttttcactgcaattcatggtgaatagggaaaaaatccatggttttttttctagttattttgttgcagaggaattcaatgaagactccgagcttaaatgattagaagattagaaaaccctcattgttagaatgttcaatttggtttggagaaaggtggtgtttgataaccaggagaatccctagaagaatagttgagaaggttgagaatttttttatttaatatttttactttaaaagaaccttttaatatttttaatatttttttaaattattgatgtgacattactagattaacaattaatacatgtggcatccatgtcagtacgctgacggcaccataatttaaaacantnna

SEQ ID NO: 1082 - DNA, 607 bp, Gossypium hirsutum
  unsure (1)..(607): unsure at all n locations; Clone ID: LIB3825-018-Q1-K6-C11
ggagctggttcagtaggcgtgaagccggaatcaaaatccggcnnagcaaaaatcctgaaagaaagagtgaaacaacccttccggcaacgaaggccgagggtgaaaatcctgctccagcctcaaagttctggaagttcctccagacaatgaatttgaaaagcgaataaggcctgaggtcataccggcgaaagagatcgacgttacatttgcagacattggtgcgttagaagagaccaaagaatcactgcaggagttggtgatgcttcctctccgaaggccagaccttttcaaaggtggtctcctaaagccttgcaggggaatattgttgtttggtcctccgggcactggaaagacaatgttagcaaaggccattgctaaagaagctggtgcaagcttcattaatgtatccatgtctactattacttctaaatggttcggggaagatgagaagaatgtccgagctttgtttacattggcagccaaagtctcaccaactattatattcgttgatgaggtagatagcatgctagggcagaggactagagtcggagaacatgaagccatgcgaaaaataaaaaatgagtttatggctcactgggatggcctc

SEQ ID NO: 1083 - DNA, 570 bp, Gossypium hirsutum
  Clone ID: LIB3825-018-Q1-K6-C12
tggtttttagggcttttctaacttttctgattattttttgataatccagagttcaatcatctaaaagaagccctaaaatctttgaatcaggtctgagcttgtggtttgttaggcctctttgatcaaactaagtttcatgtctgatcttgacgttcaaattcctactgccttcgatccctttgctgatgcaaatgctgaggactcaggtgcgggtgcaaaggagtatgtgcatattcgtattcagcagaggaatggtcgcaaaagcctgacaactgtccaggggttgaagaaagaattcagctataacaagatacttaaagacctgaagaaggagttttgctgcaatgggaccgtggtccaggaccctgaattaggacaggtgattcaacttcaaggtgaccagcgtaagaatgtatcaaccttccttgttcaggctggcatagtgaagaaggaaaacatcaaaatccacggtttctaagcctgtgctgtggaagcaggaaatactatctatctgattaggacatatctaagttggttggatgacaaagtatgcatgttgtgttacatgtg

SEQ ID NO: 1084 - DNA, 606 bp, Gossypium hirsutum
  unsure (1)..(606): unsure at all n locations; Clone ID: LIB3825-018-Q1-K6-C2
catcattctttgagtcatatgaagcagcacattccatgcatgatttatctagtttgattgcccaaaaactcggtgtcaaagcacctccggttagaattgacagccaggcaaaatatggtgctctgtccagaggagatggagccatatatctgcgttttcctcacaaagggtatcgagagaaaatatgggatcatgctgctgggtgtattgttgtgactgaagctgggggtgtggtcacagatgctgcagggcagcccttggatttttccaagggaaagcatcttgatgtggacacaggcatcattgtcactaaccagaagttaatgccattactgttgaatgcagttaaagaatccctgaaagagaaagctccatcctcatgatctgttttagaggcaggcttcatcctttcctcttaattattttgcccgtaagtgctttctccctgcgtgtacaagcatttacatttacatttagcatgcatgaacgttaatgggatcaataaatcttgtctccacaattatgatgatgtaaccgtagactagaacttgaaagcatggttttaggcctagatcctttgctttgtatccncgtgtcctatttaaa

SEQ ID NO: 1085 - DNA, 565 bp, Gossypium hirsutum
  unsure (1)..(565): unsure at all n locations; Clone ID: LIB3825-018-Q1-K6-C3
aaatcctaaaaatttgtaaaagaaaccctaatnatgggtcagggaacaccgggtggtctgaaccgacaaggctttccaggggnnatcggaaacaggatggtgccgataagaaggagaagaaatttgagccggcggcaccaccggctagggtgggccgtaagcaacgaaaacaaaaggaccggaagcggcggcccggcttcctactgtgacgccgcatactaagtgtaagctccggctgttgaagctggagcgggtcaaggactatttactaatggaagaagaattcgttgctaatcaggaacggctcaagccgcaggaagagaaagccgaggaagatcgatctaaagtcgatgatttgagagggtcgccaatgagtgtgggtaatttggaggagttgatcgatgagaatcatgctattgtttcgtcgtcggttgggccggagtattacgttgggattttatcgtttgtggataaggatcagttggagcctggatgcgctattttgatgcacaacaaggttctttctgttgttggccttctgcaagatgaagttgatcccatggta

SEQ ID NO: 1086 - DNA, 303 bp, Gossypium hirsutum
  unsure (1)..(303): unsure at all n locations; Clone ID: LIB3825-018-Q1-K6-C4
ngatacanccaccaaagggnagcaaggtttcaaccttgaaataaccatggatgcaaagtctgcagcaaaaaatgaggttttggatgaatggactctctccaacaactcaaacgattgaaaatttgtatcaatggttttgctatctgtgattgtagcaagtaattttccaagatatatagtttggaaataaaacaggttgtttttcacctgaatactgctgtttcagctacttactgcagtattattgtagcaggttgctacacctgtttgtcttggagaaataaaaatcataattttttccag

SEQ ID NO: 1087 - DNA, 608 bp, Gossypium hirsutum
  unsure (1)..(608): unsure at all n locations; Clone ID: LIB3825-018-Q1-K6-C5
cccaactttggctagagtgagtgaactctatgtattatacattttttcttagtagtttagtattgaaatccctccatatgtatctcagcaaaccttgtgagattttgatgctcccacgatataatgatctaagagacccgtcaatcttgagaaattatgcagatccatcacatatttgtctagtttgctagataaggatgaccgatctgttcgcattgctgctggggaagcactggaagtaatttttgagatgggaagcttagagaagtttgccactgaagctgaaggttcaaataatggttcagtttctgaagggaataaatctaaagaaggattattacatatacaaggattgagggcaaaaattctaaatcaagtcagagacctctctgtggaagctggtggtaaaggttctgcgaagaaagatcttaattaccaaaggagtttgtttaaggatgttttggagttccttcaggatggttattgtcccgagacatcaatgaagatcggtggggagtcacttcagacatcaacatggtctcagttgattcagtcgaactttntgaggcgctttcttggtggaggtttcgctaaacacatgcaggaaa

SEQ ID NO: 1088 - DNA, 595 bp, Gossypium hirsutum
  unsure (1)..(595): unsure at all n locations; Clone ID: LIB3825-018-Q1-K6-C7
gcaaagccattgctaaagaagctggtgcaagcttcattaatgtatccatgtctactattacttcaaaatggttcggggaagatgagaagaatgtccgagctttgttcacattggcagccaaagtctcaccaactattatattcgttgatgaggtagatagcatgctagggcagaggactagagtcggagaacatgaagccatgcngaaaaataaaaaatgagtttatggctcactgggatggcctcttgacgaggcaaaatgaacgtatcctagttcttgctgcaaccaatcggccatttgacctcgatgaagccataattaggcgttttgagagaagaatcatggtgggacttccgggtgcagagaaccgggaaaagatttttcgaactcttttgggaaaagaaaaagtagaagatggtctagacttcgctgagctggcattaatgacagaaggatataccggaagtgaccttaagaatttatgcacaaccgcggcttatcggccagttagagagttaatacagcaagagagattgaaagatctggagagaaaacaaagagttgttgaagtacaaaacaaagaagatggtgcag

SEQ ID NO: 1089 - DNA, 603 bp, Gossypium hirsutum
  Clone ID: LIB3825-018-Q1-K6-C8
atatcagcaacagtacaatggaggtgcttcgggctgatgaatttgctcatgatgaggcaagtagagatcttgtggaaggttttccgtggacctgaccattgggccaatgaatttggtgctgaaagattgcaacaagagtctgtcgatgatcaatgggtcaatgaattctcaaagttgcatgttgatgactgggcagaagaatttgatagtcaagttggtgagggggctttgggagatagttcatctgataactgggaaaattcatacgatgagtaagtgtggtagccttgaagaagttcactttgtaacctctcttaattctacatgattgttttggttgtgagaacttgtaggttcctcagcgattggacgcttcaagggttttctatgtattttctgatatgaatccatatgttggtcatcaaaatcctttaaaagaaggtcaagagctattgagcaaaggacttttgagtgaagcagtgcttgccctagaggctgaaattatgaaaaatcctgagaatgctgaaggttggagattgctaggaataacccatgctgaaaatgatgatgaccagcaggtaatccactttgctctagtttgtc

SEQ ID NO: 1090 - DNA, 565 bp, Gossypium hirsutum
  Clone ID: LIB3825-018-Q1-K6-C9
gctgcccttgtttatcttggaactgctttggtaaagtttctgagaatgacggcttcgatccgtaccaggaacttttgaaggcagtgattggttttatagatgttgctggcctttattttgccttaacacagttgactcataggaacatctctcaaaatcataaatttcaagctgttggacttggatgggcatttgctgattcggttctacatagattggcacccctttgggtgggagctagaggactagaattcacttgggatttcattctacaaggcttggaagcaaatgctaatttggtgttaagtatatctcttgctgcattgggatctttaatgtggcttcgcaaaaacaagcccaagactttgattcccataatatacgcatgtgccggaattgttgctaccatgccatccattacaagctatctaaggcgaggattgggatggcacttcccgaaggtggtaggcttcgaactgttcacgtctttgagtatggctttcattagttggcaattgttttctgcatgccaaaggccctcttcgtgaggagcaaagtttatacc

SEQ ID NO: 1091 - DNA, 571 bp, Gossypium hirsutum
  unsure (1)..(571): unsure at all n locations; Clone ID: LIB3825-018-Q1-K6-D10
gtgattttagctttgtgttagttcctttaagcaatccgccaanatgcagaacgaagagggtcaaaacatggatctttacatccccaggaagtggtatttttatttgcttcgtcatgtttatgttcttacgatatttgtttatgtaggaagctttatatgtagttcgttgttattgttgttgcagttccgccactaacaggctcatcacctctaaggatcatgcttccgtccaaatcaacgtgggacacttggatgagcttggcagatacactggcacattctccacttttgctctttgtggatttgtccgtgcccagggtgatgctgacagtgctcttgacaggctttggcagaagaagaaagctgaagtccgacagcagtagttggatacctttttaccctagtctatctccgagcttgggaaagaaaaatctcatggcagcgactattatgttctaggttttttcaggttaaactatgtcaaatttatatttttgttgaatggatgacatttcagacttggttttcttatatttgaacctaatatatgccttcggtcatgttaatcgac

SEQ ID NO: 1092 - DNA, 561 bp, Gossypium hirsutum
  Clone ID: LIB3825-018-Q1-K6-D11
aaagctgtgatttactgcagggtttcaaacccttttccttgccgctctcggcctacggccgatccaaatctcagccctccaactcctcattcgaaacgaagcaggcttggatcgttgacggcgagtccccgcagatttgaaatcggccttttatagccggaatggagaagaaaagaaaagaagaaaaaatccaaagaaatctattctgttatttgttggcctattgctgcccgatttttgctattctgttctgctttctcttctttgtcgtattgtttgttgtcgcaggtataacgtggcatgaagcggcgcatgttggggagggtcgtggtgcgagattcgcggcggcgagcgaggacgagcggtgccagcttgctgcggcgctaagcagaagctagggtttctgctagtctgtttttttgtgggctaggtttaggattattgggttgaaaaggtctgggccaattgggccttattacaaatatattttatttgattttagtttaattataaactcgattgcgataattattcctaaatatttgcaaacattctttgttc

SEQ ID NO: 1093 - DNA, 542 bp, Gossypium hirsutum
  unsure (1)..(542): unsure at all n locations; Clone ID: LIB3825-018-Q1-K6-D12
cggncgcgtgggcanaggtaggaagaagggaagtttgattgatgatgtagttgggagtgcttcttctagggtaacaccggctcttgatggcaccgccggaggactaaggggaaatagaagcgaaagagattcaagaaatacaagttcggtatccggggctggtcggacatcattagacggtgccaagggtgaccggagaacaaaagcaaagcccaaacagaagtcagggcatggattcaacggcaggctctcggatcctttgctaccacctttggctaattctaacaagatgactgaaagagaagctaggtcattatctccaaccccgagtaatgttcgtccgaaagaatcggacgaaccagatgatttcgcaaacttgcaactaaatgatttagatcctatggaagaattgggtgtttcaaatgacattggtggtccccaagatttgagttcatggctaaactttgatgaagatggcttgcaagaccatgattcaataggtttagaaataccaatggatgacctctcagagttgaaatttg

SEQ ID NO: 1094 - DNA, 599 bp, Gossypium hirsutum
  unsure (1)..(599): unsure at all n locations; Clone ID: LIB3825-018-Q1-K6-D2
cggccgcgtggggttccgccattttcccanaaaccctagttcttccctaagaagccaatttttcgaatcttcgttctctccatggccaagaagcgaaagcaacgatcttctgcggtcgaacccactaaggaaaccgcggatcctcaatcaatcaaagaggaagagcaacaacaacatcaggaatacatacccgaagatccgaaaccgaaagtagaagaggaacagaaactacaggaagtggaagaggaagtagaagaggaggttgaagaagaagaggaagtggaactggaagaggaagaggaggaagaggagaacgaagaagacgacgacgatgaagaagccgaaaaccaaaccctagtcggttcttccaacgccgccgttcaaaatggagctccaaaaggaacgagtcaagacgaggaattggacgacgagccgttcgagaagcttctagaaccttttgggcaagatcaattgattacccttattaagaaagcggtcgagaagcacccggaattcatctcgtcggttcgggagcttgcggatgtggacccggctcaacggaagatcttcgtacatggtcttagctgggatacgactgc

SEQ ID NO: 1095 - DNA, 534 bp, Gossypium hirsutum
  Clone ID: LIB3825-018-Q1-K6-D4
tggttcaagagcagagaatacaaatccgaagagaagacataaaaagaggtcgaggcaaagaatgcacttggaaaactatgcatacaatatgaggaacacagttaaggacgaaaagattggtgccaaactcccagcaactgataaaaagaagatcgaagatgctattgaacaagccattcaatggctagacagcaaccaactcgccgaatccgatgaatttgaagacaagatgaaggagttggagagtatttgcaaccccatcattgctaagatgtaccagggtgccggcggtgacatgggtggtggcatggatgaggatgttccggctggtggaagtggtgctggtcctaagattgaggaagttgactaaaacattgattttcttcatctggtttctctattgtgttctcgtatgttttttgggatttaaaccgtttggttccttttttgggatactctatcagtagcacctgtgattgttgtgttttggaaacaggtcccttttgaatgtttatgaaatgctctttacttttt

SEQ ID NO: 1096 - DNA, 595 bp, Gossypium hirsutum
  Clone ID: LIB3825-018-Q1-K6-D5
acgtggagaggcttaatctgttgaaactggcacctggtggtcaccttggaaggttcattatttggaccaaatcggcttacgagaagctggatacgatttacgggtcatttgataagccttctgagaagaagaagggtacgtactgcctcgatctaagatggtgaatgctgatctgggtaggattatcaactctgatgaggtgcagtcggttgtgaagcccattaagaaggagatcaagagggcacctttgaagaagaacccactcaagaacttgaatgctatgctgaagttgaacccatatgcgaagactgctaggaggatgtctcttttagccgaggcacaacgtgttaaggctaagaaggagaagcttgacaagaagaggaagcccatttctaaggaggaggcaacagcaatcaagtcagcaggcaaagcatggtatcagactatgatctccgacagtgattacacagaatttgagaacttctctaagtggttgggtgtgtctcagtaattttagtttttgatttagatatttgttgcagacaatgttttcagctttgttatggtgttgtccttttagttattttggtgtttt

SEQ ID NO: 1097 - DNA, 575 bp, Gossypium hirsutum
  Clone ID: LIB3825-018-Q1-K6-E1
tttgcttactctactttgcatgcctgtttctctttcttgggttttagttaaaattttcgtttaatttttttataatttaaattctggttcattcatttcgggtaatggtggggattgggtcgttttcttagggtttactttctcttctgtttttcttttttttggggtttttgttcttatctgtttagaattatttaattagttggtgacattaaagattttgttttttttgttaaagctaccaggtttcattaaattcgggtctaaacaaaaatccagtttccttattttttttttaaatgcaaatcataaaatttgggttataagttcacttttgaatacagggttctaataggatttggggttggtgaaactgggtttttttatccgatcatatgtatatttggttcatatttaatgctcttgtcctgaattggggaatcttgcaacttattttttaatttgagtttaaattccattgttattatcagttttgcagtttaagggtctttaattgtgtttttttatttggtgattttgttatattcttttaactatggatttcaaaactggtg

SEQ ID NO: 1098 - DNA, 579 bp, Gossypium hirsutum
  unsure (1)..(579): unsure at all n locations; Clone ID: LIB3825-018-Q1-K6-E10
naaaaaaaaaaaaaaaaaaaaaaaaaaaaaaaaaaaaaaaaaaaaaaaaaaaaaaaaaaaaaaaaaaaaaaaaaaaaaaaaaaaaaaaaaaaaaaaaaaaaaaaaaaaaaaaaaaaaaaaaaaaaaaagagggggcggcccgttttaaagagaacccaactttacttccccggccttgcaacgtattactttttttttggggcccccaaattcaatttcacgggccggggtttaacaacgtggggacgggaaaacccctggggttcccaaattaaatccctttgcaaaaaatccccttttccccagtgggggaaataccaaaaaggccccccccaatcccctttccaaaaatttgcccaccctaattggcaaagggacccccccttttaccggccctttaaccccggggggggggggggttccccccaggggaaccgttacatttgccagccccttagcccccgttcttttggttttttccctttcctttttccccactttcgccggttttccccgtaaagctttaaatggggggctccttttagggttccaattaagggtttaacggccctttgcccc

SEQ ID NO: 1099 - DNA, 607 bp, Gossypium hirsutum
  unsure (1)..(607): unsure at all n locations; Clone ID: LIB3825-018-Q1-K6-E11
ngagnaagcagctaccaagctcagagagcaagttgccaagcaacagcaagcagtacttaggcatcttgggcattttagcaatgaagacattactgttgatgaagctgatcttcaatgtcatcaaaagcttcaagacctgtacagttctacaaaggcagctaagcatttgcagcggaacatcgtccgtggcatagaaggttttattgcaacaagctcaaagctgatagaaatatctaggaagttggctgatgattgttgcaagtatggagttgaaaatcaaaatactggttcttctcttgcaaaagccgctcttcactttggcaattcacataaatcaatagaagatgaaagagagaccttgcttgggatccttggtgagcaggtttctgagccactacgggcattaattacaggagctcctctagaagatgctcggcacttgacccaccgatatgatagattctgccaagaggttgaagctcaggcagcagatgttttgaggcgtagatcaaaaaccagggaagctgatatatctgcagaaagctacatgaagcttaaacaagcagaagcaagattggctgaccttaaatcctcaatgatggttcta

SEQ ID NO: 1100 - DNA, 574 bp, Gossypium hirsutum
  unsure (1)..(574): unsure at all n locations; Clone ID: LIB3825-018-Q1-K6-E12
ccattttagaagcaaaccccacactttcgttctcccacaccattgtgacgcggagaaaattacgttgtcactaacggaagaggaacaattacgttcgtgacacatngaaaacaaagagtcatacaatgtagctcctggagttgtagtaagaattccagcaggaagcactgtgtacttggccaaccaagacaacaggngaaaagctaaccatagcagtgctccaccgccctgtcaataaccctggacaattccagaaattcttcccttctggacaggaaaatcctcagtcatatttacgaatcttcagccgtgaaattcttgaggctgtcttcaatacacgaagtgagcagctagacgagctgtttggtgggaggcaaagccatcgaaggcagcagggacagggaatgttccgtaaagccagccaagaacaaataagggcattgagccaagaagctacttcaccaaggggaaaaggtagcgagggatacgccttcaacttattgagccaaacccctcgctactccaaccaaaacggccgcttttatgaggcttgccctcgttatttccagcagca

SEQ ID NO: 1101 - DNA, 551 bp, Gossypium hirsutum
  unsure (1)..(551): unsure at all n locations; Clone ID: LIB3825-018-Q1-K6-E2
atttttcccaataagaacgagtttgacgatggtgatattgatgatgagattgatccgacattgaaggaaaaaatgatagggaggtggaagattttgcccgtagattgaattcagattggccggaaagaatgcaagaaattctctctttaggccaagaaaagaaaccagtgcatttgtcacttaatggcaagggttcataaggagatatgcagatccggagcagaggtgattcacaatgaaggtatgcctgaaaatttttgatgagatgctttgcaggtggatgaaagatggcttctagaagggcattgtggatcctttgtgagtttttaatttcctttttaaagtttatttttctttgttgtgcttagtcaggctgcaattttgattctgagtgcaacttctttttactgtattttattcatatcatctttgtgtatattctcgtgttataatattacttaaggtattatatattttattatagttttgagacattaataattggtattatatagattttgataaanaaaaaaaaaannaaannnnnnnng

SEQ ID NO: 1102 - DNA, 571 bp, Gossypium hirsutum
  unsure (1)..(571): unsure at all n locations; Clone ID: LIB3825-018-Q1-K6-E3
gnttgttttgtctgatcctagatcgtattcgaaccgtcgcgaatggaagcgtcgactcgagtcactcaccacgagtcagatcgaactcatcgccatgctttgcgaggacgaaaacgaggacaaaacggccgctggcacggcgccaatcttcgatctaacttcttcgaacggagtactagctcgcgagagcagctccgccgaggtctgngaagcttcatggagaaacaacggtggtcagccgaaccagcaaagacagcttgttgcctcgactcgccacgtggcagaaatctgaagatgccgcgcagaaaatcctttacaccattgagtgcgagatgaggcgttgtccgtacactctaggtttaggagagccgaacttgtccggcaaaccgagcctcgactacgactccgtttgcaagccaaacgacctccacgcgctgaaaaggagcccgtacgaccactgcatcgagaaccacgagaacgcaacgcttttcacgacgcatcagatcctggaatcgtggatccaaacggcgaaacaagtactgaaacgcatcgctttcaaggattgacgctg

SEQ ID NO: 1103 - DNA, 481 bp, Gossypium hirsutum
  unsure (1)..(481): unsure at all n locations; Clone ID: LIB3825-018-Q1-K6-E4
cttgtgttgatagcagctcgaaattaccataaaagctacttacaaagaaatacagtccgttttaagtttgagccatctgcaggatgcttccaagtatatgaagaagttgcaaaaaggttcaaagttcaaaacgggacattccaactgaactatttagatgatgaaggggaatgggtaatgttggttagcgactcggatttacacgagtgtctggaaataatggagtatgtcggaactcgaagcgttaagtttcaagttcgagatgtaccttgtactatgggcagttctagcagtagcaattgtttcttatcccgtaactcatagcagatatgctgatgctcctcggctatcaatcatcagtctttcatagtagttttttgaactcgatcaggcttctgcattcacgcattgcttcatttgatttcccatcacacatgaaaggataagaagatgtgagcatagattatatntattaagttgt

SEQ ID NO: 1104 - DNA, 594 bp, Gossypium hirsutum
  unsure (1)..(594): unsure at all n locations; Clone ID: LIB3825-018-Q1-K6-E5
aacacactgtaaaagaaaaaagctctcacaggnaaacagcgccaatggctacttgtaccaccaccacaccgccgatcaacttcaacaatacataaatctggttcacgcctgaacccaccaacactagcccacgcgagacaatcataaaacagataaaatgcggttgaagaacgtggattttgcagtgatcgattgtaagttcgacgatgagtacttgaaattaatgtttaaaacaatggtggaggaggaggatggtattaaaacagggtcgactgtgatagttcataatgttcatcataaaaaagatgggtcgatatttggtcaacttttgaggaaaaagagagtggaagctgtgactttgcctattggtgaaggaactgagatgactcgaattttgggatgtaggtttaagagacgaaataggtttctcgtcaccttccataattgattttatgtaaatatatcagttttttttctgcattggaaggtggtctacgtaaaaaatcacttctttctgtgtttgtattatatgttagtattttcgaactgtaattgtattccaaatttttaattttaggatttataatttttttt

SEQ ID NO: 1105 - DNA, 608 bp, Gossypium hirsutum
  unsure (1)..(608): unsure at all n locations; Clone ID: LIB3825-018-Q1-K6-E7
aaanataagctttatgataaattggtgttgcttatttatggtgacattgtaacaggtggagaagcaagagggataaccccacttttgcattcaatggataaaatgagtatctatgaggaagacaagggtagaaaggacaatttacctcctccaactcatcctgttgcatcagaattataccctactggaagccataaccagttctctcccggaccaagtcctccattagacaccggaactccggcagaaaccatggacacaaagcctgaagaacacccacgtaatgttgctgcggatgagccggtaaaccagagcagttacactgagaaaatatcgtcggcgacctctgttattgcagataaagcagtgtcagctaagaacattgtagcttcaaagctcggatatggagaaaaggacgagagtaggactaccacgaatggatcaaatccgactacgcaaggatcagctatagattatggaaagaaaatggctgcaactatggcggataaactaagtcctgtttacgagaaagttgcaggagcgggaagcaccatggtgtcgaagctacacggtcccggctctgggacggcaatcgaagtgtatcctga

SEQ ID NO: 1106 - DNA, 596 bp, Gossypium hirsutum
  unsure (1)..(596): unsure at all n locations; Clone ID: LIB3825-018-Q1-K6-E8
gttgagtgtagctaaacttcccagcactccattgtttctatgtcttgttcttcccctgtttacccttatgatttggcttaagttacaaacanaatggccgaaaaagacttaagttgccgccatcaccccccaaactcccattcatcggcaacattcatcaactcggcaagcttccccaccgctccctccgagatctctccaggaaatatggctcactcttgctacttcaattgggccataaccagacgctggtggtttcatcagccgacatggttaaagaaattgtcaaaaatcatgatgttgctttctcagatagaccaagtaccactgccgctaacatcttgttttacggttgcaccgatgtggctttcgcaccgtatggcgagtactggagacaagctaggaaggtgtgtgtcactgagcttttgactcttcgaagagttaactcgtttcagttcttgagagatgatgaagttgaagtcaccattgataaactccgccgagcttctttcaagggagaggctgttaacctgacggagttgctgatggttgcttcgaataaccagatttcgagaagtgctctgggtcgaaaattc

SEQ ID NO: 1107 - DNA, 535 bp, Gossypium hirsutum
  Clone ID: LIB3825-018-Q1-K6-E9
ttgggaatgcagccctaatcgggcggtaaattccgtccaaggctaaatacgggcgagagaccgatagcgaacaagtaccgcgagggaaagagaaaggactttgaaaagagagtcaaagagtgcttgaaattgtcgggagggaagcggatggggccaccagccgggtattattatactccatattgatttttccacatataaaatagataacttttctttgcttaccttctgtattatctttttctagttttctttccctttttatcgtttcctttgagatgatatgatgttctgaaatatgttcacgaaggacttgctcattctgtggatttttttttttgtgctgggaggttcatgatctggttgtgatgtctctttgtgcttttgtaatattagaattttatttacattcttattttcattgtgtgaccctctcgttaacatccattgaattggctctgcagtgattaaatcgtgattgattatcccaaaaatttacatttatcataatttgtagattttcttgtcaactttt

SEQ ID NO: 1108 - DNA, 578 bp, Gossypium hirsutum
  unsure (1)..(578): unsure at all n locations; Clone ID: LIB3825-018-Q1-K6-F10
gaagatgtaagaatgttgtcagcccagagggcncagagatatatcctcagagatagaaagggaatttctccgggaagttgagcatgctgaggaacttgccaaggttattgagcctggaagtgcagagatgcctgatgcaatagagacaatatttcaagccgcccttgccttgggaagacatggaggagttgatgagctcatgggtgatatggaaagtgcagctttattgtattcaaaggctgagcgtttattagtcttccttctagtggaagcaccatctctcattctgaatcctccattttcccttacaaactcagatcggtatagactccgaacttacattgattttcttcgaaataggcaaggttactcgagatcacagatgatggctcttctcaagtgcaaggatcagccatagagtttaaccatatttattactctatttttaactcctgttgctgatgatttccattttcattgtgtaaaaaaatatttatttgtacagttaattcttttgagtaacagggaattagggtgttaacatgggtcaactcaattgtatcctgtttgaatgttgt

SEQ ID NO: 1109 - DNA, 602 bp, Gossypium hirsutum
  unsure (1)..(602): unsure at all n locations; Clone ID: LIB3825-018-Q1-K6-F11
cggnaaatccgactcaaatggactctctgcaagtctccctccactatcgactctgtccacctcagtttcctctgccctcaacgctaaactcggcaccaaccatgatctaacccaagcaccaagcatcgtcgccgagtttctgactcagtgcgatgatctggagcgaaatctagtccaccacaaccgtaccctcgagtcaaacctcgcatcttacgcttccttttctaatcgcatcggccacctcttcggcattgtaaattcgaaattgaccgatctaggatcctccgtttgccttcggtcctccgtttcagacggagaagggttgggagaggagttgccgtcgttggccaaggaggtggccagagtggaagcggtctgagcatatgcagcgagagaaagttgaacagttgctacttgaatcaactacaagttatcccatcatttatgacaacctcaaaaagatatatcctgcaagggatggaaatcctgcgaaaattgctgtgagaggattgtctcttgctttgcttagaggggagagttttggcatgtttggacccaatggtgctggcaagacttctttaattaatatgatgattgggctc

SEQ ID NO: 1110 - DNA, 397 bp, Gossypium hirsutum
  unsure (1)..(397): unsure at all n locations; Clone ID: LIB3825-018-Q1-K6-F12
ggtgttgggacacnacttaaatgggaaagcttttttattcaggttttgatcctgccaccgtaaaccttcctccaaagagctgagccccaacacccccatgggaagcatttaatcagagagatgcagatattctctttttatggcatatgtacaaaaattctgaagatggatcaaagaaactgaaatactcaaacagataactgagacaaaaaggcatagaatccacttggatggcagcattgatttgattggaacacttttatatggaccagcaaaaggctctgccattctcaaatctgtaagggaaactggtttgccccttgttgatgactggcaatgcttgaaatacgaggtctgtttgtttcgaaacacactgtggggtcattgtcacaatacg

SEQ ID NO: 1111 - DNA, 65 bp, Gossypium hirsutum
  Clone ID: LIB3825-018-Q1-K6-F2
aaaaaaaaaaaaaaaaaaataaaaaaaaaaaaaaaaaaaaaataaaaaaaaaaaaaaaaaaaaaa

SEQ ID NO: 1112 - DNA, 573 bp, Gossypium hirsutum
  unsure (1)..(573): unsure at all n locations; Clone ID: LIB3825-018-Q1-K6-F3
cttgtctttacagttttttgtctgaaaaganaaatggctactgtaggaagaacgcggcagctcctttgttgttccttaacttgatcatgtatttcattgtgttgggatttgctagttggtgtattaataggtttatcaatggccaaactgctcatccaagtatgggtgggaatggagcaacaggtttctttttaaccttttcaatcttggctgctgtggtgggtatagtatcaaaatttgcaggtggtcatcatattaggtcatggagaagtgatagtttggctgcagctggttcttctgcacttattgcttgggctctaactgcattagcctttgggtttgcttgtaagcatataaatataggaggatggagaggatggaggttgaggatacttgaagcattcataataatccttacattcactcaacttttgtatgtgttgttgatccatgccggtgtgttcagcagtcggtacggaccagggtatcgagattccgactatgggatgcatgcaccgggggatgaaccagggcacaagaccagcaccgctgtaactggatctagggtctgaa

SEQ ID NO: 1113 - DNA, 610 bp, Gossypium hirsutum
  Clone ID: LIB3825-018-Q1-K6-F4
gtagccgtaaagggggacgacacaaatgtattggctaccattacatttgatttaaaattttcctatgttctagctggttgggaaggtagtgcacatgattcttgtattttaagtgatgcactttcacgcccaagaggattaagaattccggaaggtaaatattatcttgctgatgctggatatggcatccgtaatggatttattatcccatatcgtggtgttcgatatcacttaaaagagtttagtgctaggggcttgaaaatgcaaatgaactctttaatcttcgtcatacatcattacgaatcactattgaacgtgttttcgggattttgaagaaacggtttcgtgtattagatgctgaaccattttgaaattttcaaactcaagtagatatagttttggcttgttgcatcattcataatcatatcatgggagttgatcctagtgatttacttaatcaaggattatacgaggagcctgagtctgatttgataatatcaacttttacggagcgagaagaaagagaagaagcaagagaatggtctgctaagagagatgaaattgcacaaactatgtggactgattatatggctagaaatattaagtaggt

SEQ ID NO: 1114 - DNA, 437 bp, Gossypium hirsutum
  Clone ID: LIB3825-018-Q1-K6-F6
ccctaactcgctttccctttgattttttgctgacactgactcattgagtccaaaattccaccagctccttccttcatcagccatgagccgtttcagggtaactgacatcttcgacccttactctccctctctctgtgttaaagaaacctccattctcgctcacaagcccttagcttttccctcatttttcgaagcagaacatgaacttagctccgccctcgacctactgagtcctttcccttgctttagccccttcgatatctacgacaacgtcactgatctggtccaaatcgagagaacgccgtcgtttcgttcgtacaagagggtacaacgccgagtcgaacccgagttttctattcaaaccttgtgcgaccgagttacggcgctggagtctaaattcgaccgtctcgttaacggtaggaactccggaggggaca

SEQ ID NO: 1115 - DNA, 612 bp, Gossypium hirsutum
  unsure (1)..(612): unsure at all n locations; Clone ID: LIB3825-018-Q1-K6-F7
ctagnatgcatatgattgccattttggtcacaacattttgatgttttgatagcaaaatcagatgctgatgatgatgatgatggaacttatgcaattattatggtccaccaattcaatgcacaacaccatcctcagctcatggtgatgtttaaccttttataatgctattgcgtttctttgatcaagtaatctatttgtattcctatcattgttttcatatttgacttgtacaggatcttacatcatgctgccaagctccccagcttattcatctacagaagcaggtcatcaattctataaagcccagtatctgctgataaacgtagcttattgcgtcagtcattggcaattgtcatcttgataccgttgagcatgttctcctccttaaaatttgatgtaagaaaaattggcgataagggagtgtggaaggtgaggatttatttgcttgaagtgataccagaaaaatgcaccaatgccgagattttgataaattgctttgttatgtatttgcctcgggtgttctaaatgagctagagtctagaaatgccagttctcaaattcctctcatatatatgttggtgacttcagtttatgttaaaaaacattaattga

SEQ ID NO: 1116 - DNA, 588 bp, Gossypium hirsutum
  Clone ID: LIB3825-018-Q1-K6-F8
gggttgactgttgccgacgccacaagttttgcctcaccaaatgggttccactagctggcagatgcaaaggatgtaatggatgcaatccaaaatattcaggagcccgatttccagtgctaactccgaaccttaaaggtttcgaagctgctgtttcagctggagccaatgaagtggccatctttgcctcagcttctgagtctttttccaagtcaaacataaattgcagcatcgaagatagtcttgctcgttttagagatgttgtttctgctgctagagagatctcacttccagttcgaggatatgtatcatgtgtcgttggctgcccagtggaaggaatagtgcctccatcaaaagtagcatatgtggctaaacagctctttgatatgggttgctcagaaatttcccttggtgacacaattggtgttggtacacctggtaccgtcattccaatgctcgaaaatgttatgaattttgtcccaatcgataatcttgctgtccactttcatgacacttatgggcaagctctgtctaatatcttaacatcactccaaatggggatcagtaacgtggattcatcagtttcgggtc

SEQ ID NO: 1117 - DNA, 429 bp, Gossypium hirsutum
  Clone ID: LIB3825-018-Q1-K6-F9
atgactttgagaaaggaggtaattcatcaacttatataacaatctcaccggatataagctatctttccaaagtcttatctccacaaccaacatggatccacctcctccacgtccaactccaccaccgacgacaccgctgctagctccgtcacctccagaaggagggttatgggaatcatgtttgtggtttctgtgttgctgtggaatattcagaagctgctgccctccactgtttgaaccagggccacctcctccgtagatctgcattcttttttctcttttggaatgtatgagtattttacaaggatttaatcatttggaacatgatgattggttcttgtggtttgtcattcttcttcttattatctgctaatctatgtagcaactgagattagagttgcaaaatttatgaatttatagctttcttgt

SEQ ID NO: 1118 - DNA, 605 bp, Gossypium hirsutum
  unsure (1)..(605): unsure at all n locations; Clone ID: LIB3825-018-Q1-K6-G1
caagcatggnacatcataccagctccaaggcatacagatttggataaggcagcagaagattccattagctatgataagggtggcagtggtccgtggctcctgtttgtctctgagaatggctatggaaatcgatttccgttgagtagcttcaaaaagtcgcctttgaacagagttggtttaataggatacaagttctcttcagaggatcgcttggcagctgtctttgtcgttggcttttcattgacagaagatggtgaaagtgacgagcaagtggtgcttgtcagccaaagtggtactgttaatagaattaaagttcgggatatctcaatacagtctcgttatgcaaggggggttattctaatgagactagagcatgccggaaagattcaatcagcatcactaatctcagcctcagcagaagaagcagcagagttgctacccggtatgcagtcagaagaagcaacaactaatgcaggaacagctgagggcatatctatgtcatcataaagaccacagtttggccgattgctcaaaattgtctcgtgtaagtgtaaccatgttcaaattctatgtagtatagaagggctctntcagttagcagaaac

SEQ ID NO: 1119 - DNA, 501 bp, Gossypium hirsutum
  Clone ID: LIB3825-018-Q1-K6-G10
tcttatactctcacaaccaagatgtgctgcacctcctgcacgtacaactacatcacactgacgacacctgttagcttgcgtccgcacaccttccaaaaagtgagggccttgtggaatcatgttcggggctgctgcggtgatggggagtgttcagaatctgctgcaccgcctactgtccgtaccaggggcgcctacttcgctgatctggattctttactgtgtctcggaatgggtgagtatgggactaggctatgatctttggaaacatgataactggtccttgtggtgggggattgttcttcttatcatctgatagtatatataacagatgtgatggctgaagggagcttaatgaatcaataggtacctggtctaacacctgaaaatcagacccagcgtgctataggatactacgttatcaactattgcatgctacgtatatggaagtttgtggagtatcccaagatgatatacttggatggagacatacaagtgtttgac

SEQ ID NO: 1120 - DNA, 604 bp, Gossypium hirsutum
  Clone ID: LIB3825-018-Q1-K6-G11
aaatccctttacccgctcgttactccctcttcctcttatctccgtcgtgcgccctaaatcccccaataactctcaaaatttgcccccaaaattcccatttccagcaacaccaagtcaatacatctattgtatttgttcggctgagaaaaaaagggaaagaaggaggtcgggaaccggcgaagttcgtcggatttcacccattcgtcatcggagcttccaaaaaaaactctttatctgagttttgatcgcggatatagaaaagaatcagcaaaatcaagggatctggacctcttgttacgaccatgctcgttgcatctacggtggtctcacttcgtcttcatccgccgaagtccaacatgtttctttttctccaacctcctccaaccaggttgacatggttatagtaccagccacaactggacagatgggtgttcttccaggacatgtagcaacaattgcagaattgaagcgtggtgtgctgtcagtgcatgaaggaagtgaaactacaaagtactttgtcagcagcagttttgtttttatccatgccaactcatttgcagatataattgctattgaggcagtgccactcgatcggatcgacgta

SEQ ID NO: 1121 - DNA, 578 bp, Gossypium hirsutum
  Clone ID: LIB3825-018-Q1-K6-G12
ctttttctttccatctcaaaccgtgcatgggtgctatctgaatcagttgcctcagtaaatcaatccatgaattcactgtcgaagaatagcaaaggccaggacgtggaccttagcatgtacaaaggaaaggttctccttgtggttaatgttgcttctaaatgtgggtttacggattcaaattacacccagttgactcgatctttacaacaaatacaaggacaaagggttggagatcttggcatttccttgcaatcagtttttgaagcaagaaccaggtaccagccaagaggcagaagagtttgcttgcacaagatacaaggctgaatatcctattttcaaaaaggttcgttgcaacgggccgaatacagaacccgtcttcaagttcttaaaagcaaagaaatctggtttcttgggatctaggataaagtggaacttcactaagtttttagttgataaggatggtaacgtcctctctcgctatagcccaaccaccacaccactggccatagagggtgacatcaagaaagcattgggagtggatacatgaaaatataggaggtggagggaaaatggaaact

SEQ ID NO: 1122 - DNA, 605 bp, Gossypium hirsutum
  unsure (1)..(605): unsure at all n locations; Clone ID: LIB3825-018-Q1-K6-G2
gnagaactgataatactgagagtggtgagagttcacaggatatatcacttggcacagttggatgccctcctagttcaagtggagaacctttggtgaagttggaagatccatcaggaagtgctcctagatccagtgaggaaaatgccaaacctgtaccacttggattggggttggggggtttggaacgcaagagacgagtcaaaccaacaaaatcttcaattgccggtgttaatggaacagctagttcttcacttgatcacaatctgagtgctagaacggctggtcaacagattttgcagtcacttgcttctcagagctcttctctgagtagggtagattcttcctcaggtaatcaaggtgttctgggtagtagattatcaggagggcagggttcagatgatcaattagctgctgctaatgctgtctcacaagttcttcaaagtcctgcgttgaatggcctattggcggggatttctcagcaaactggtgctggttctccagatgattttaggaatatgttgcagcaactgactcaaagtccgcaaatcatgaacactgttagtcaactagctcagcaggttgatagccaggatattggaaacatg

SEQ ID NO: 1123 - DNA, 378 bp, Gossypium hirsutum
  unsure (1)..(378): unsure at all n locations; Clone ID: LIB3825-018-Q1-K6-G3
ctcgtcggaggggngagaaagggngaaaggatgatttaccgaaatggagtttgctgacaggaccagtctccatccttggcggaatcgttggagccactgttgttgcccacctaattttccttgacttgaatagttgcaggatcgatgtcttaaaaccaagaagaagactgccgacagagtagacagaagttgacagttgctttgttggttttggcaaatgcataggtttgttgaataataccaaatctggttgttgtataatattatttgcttagcttagtaaaagcttgaatgaaagcaaaggaacaatttgatttagctacaagacaggaaattgaatgtctcctataaatgctggggatttgtttgttcctcctg

SEQ ID NO: 1124 - DNA, 581 bp, Gossypium hirsutum
  unsure (1)..(581): unsure at all n locations; Clone ID: LIB3825-018-Q1-K6-G4
catgagtaaacgctgcatttggaaaacgcagcgcaaacagtgatcgcattaggttatcggttttttttttgtttgcaatnttccttgcaactcgaaagggggaaaagtaccctaattttgtctctggattggtctcccaagtgaggaaagggagaaaaagaaagaaactttgaagaaaaaaaatggtgttttacttcaaagcccgaccagaggttggtgattacacaattttcatgggtctcgacaagtacgagaacgaggaactcattaaatacggctttcccgaagacatttggttccatgttgataaaatgtcttctgctcatgtttatgtaagacttcataaaggtcaaaccattgacgatataagcgaaggtttgcttgaagattgtgctcagcttgttaaagctaattccatccaagggaacaaagtgaacaatgttgatgttgtttacactccatggtccaatttgaagaaaactccttccatggacgttggcctagttggctttcacaattccaagatggttcggacagtgagagtggagaagcgtataaacgagatagttaacaggttgaac

SEQ ID NO: 1125 - DNA, 600 bp, Gossypium hirsutum
  unsure (1)..(600): unsure at all n locations; Clone ID: LIB3825-018-Q1-K6-G5
aaaaaatctgtaggagagtttgctgctggaattgaaaagatgattgtaaaatcatcactgagcaatcaatatttgaccatatacgangaaaaagccaagaactttcctctcttgactccaaacaatgcctattctccatcatctgaccaagagaaaagcaaaattcgtcaacatatattgcttggtcctttaccagaatccaaagggcttgaacagattgctgatgatcacaataactatctaactggaaagcatcatattactgctgggagctcagttacaattaatctcacggatgaatcaggttatcttccatctgaacctgaagcgttctcgttcaaaagtctgactgaagaagcaatatttgatcacatacgaaaaaagtccaagcattttccggtaatcaacatgccaaagcccattgataccgactgttgcatttgtaccgaggaacacaactctgttaatcagccaggatctggcaatgctacgttaggaacatcaaaagatgcaatggtcatttcagaacctgaacctggcgaagtcaacagagacgcctgtggcaccaaggccggcacaaagacgaaaaacaatgtactc

SEQ ID NO: 1126 - DNA, 565 bp, Gossypium hirsutum
  unsure (1)..(565): unsure at all n locations; Clone ID: LIB3825-018-Q1-K6-G6
cggccgcgtgggtttctcgaacaananagaggaatctgtgaaatttttataggttttgggtaagatatggcgatgatgttgcagagaaaatgttgaggagaacctttggagaaggcaaagcaatactcaacttcaattctaaccctatactttctccctgcacttccttctctaccgttacttccgctgccgctacacaatcccacgatgcgccacgtcagcttccaccgttcgattaccagccgaaaccgtacaacggaccgtcggccgatcaaatccttgagaagcggaagaagttcttgggcccctctctcttctactactaccaaaagcctttgaatattgttgaaggaaaaatgcaatatttgtatgatgaaaacgggaggagatatttggatgcatttgctggaatcgtaacggtttcgtgtggtcattgccatccggaggttttgaatgcaataacagagcaaaataagctactccagcacgctaccactatttatctccatcatgcaatttctgattttcctgaagctttagcttccaaaatgcctgngaaatctca

SEQ ID NO: 1127 - DNA, 167 bp, Gossypium hirsutum
  unsure (1)..(167): unsure at all n locations; Clone ID: LIB3825-018-Q1-K6-G7
aaatacacctctgttcatgggattataagttgctcttatcttttccatgatcacaaaatcatgttgggtgtgctttttttggcattttatccatgatatgccatgtaatatattaccaatgtaatttgtagtggttgcaanataatttgnngcaccttactgactcc

SEQ ID NO: 1128 - DNA, 606 bp, Gossypium hirsutum
  unsure (1)..(606): unsure at all n locations; Clone ID: LIB3825-018-Q1-K6-G8
gnaaaaatataaccaaccaactttctcgcctccaaacaccaaaaaggaaaatgtctcatatagtattccaaacctctcaacttcccaagacgttgttattaaaaccgagtctaccacctccggttcattctttagcaggtaaacctagaaagaatcttacggtggtgaaatgttcgtcttcttctttaatcgacggtggagattcctccgtcgctgctctcgagcgatgtttctcggcaccaccggctccagtggagaccagttcttcaggttcaggtgatgttggaccggttatgaaaggaggaaaatacggtgcgtttggtgcggttactttggagaaagggaagcttgatatgtctcagaaacagtcgacttctagccctgagcttgcaactgggggaggtggtggagatattggaaagaaaattaaccatggaggtggagatggaggtgatgatgatggagatgatgatgattattttgatgactttgatgatgatggggagggagatgaggatggactctttagaaggcggatgtttctggaagagctttttgatcgaaaatttgtagatgctgtattgaatgagtggcacaagacaatga

SEQ ID NO: 1129 - DNA, 540 bp, Gossypium hirsutum
  unsure (1)..(540): unsure at all n locations; Clone ID: LIB3825-018-Q1-K6-G9
aaacatggctaaagnaatatacacaagcatctgataatatactaagaaaaaggtaaagtcaataataaccttcacctttcaatcggtgctaaggaccattacaattcatcacaaaatcatcctaataagtgaattgaggaaggctgtaactcaatcacctcgaaaaataatctctacaagcaagtcatctatgtgcctgccaacccacgcgtccgaatggcgaagatcatggatatggaaaccaagattgggaggagatttgaaggcaaagttgcaatcgtcaccgcatccacccaaggcatcggcttcgccatcgctgagcgtctcggcttggaaggagcatctgttgtcatctcttctcgcaagcagaaaaatgtggatgaagcagttgaaaagcttaaaanacaaaggacttgaagtgtttgngaagtggtttgtcattgtctcaaatgcacaacacaggnaaagatcttattcaaaagactgttgataaatatggaaaaatagatgtgattgtatcaaatgctgctgtaaatccat

SEQ ID NO: 1130 - DNA, 542 bp, Gossypium hirsutum
  unsure (1)..(542): unsure at all n locations; Clone ID: LIB3825-018-Q1-K6-H1
ncgattagttgcaactgtcatcgttttgaaagcctaggtgctattctgtttgtatttggccatggatttggagccttactcctgtttgtctacttgttggttagcacaccacttctctatgacttctacaactatcgtcccaatgaaccccaatactctgttctgcttggtgatttcttgcagtgtgttgcgcaatgtggtgcattaattttctttgtggggatgaagaactcgatgccaaagaggcaactaaggaggaagtccccgaagcaaaaagctacttagatgtaatcaaagaagtaaaattttggcaatctccagtaaaactttgcaggtctatctgattggatcctttctcgatttctagtttttatctgttctttattaactgaagcatttgtactatcgaatcggttgccccttctctattttccatgacaatttgattgtgttcaaaaaaaaattgaggggtttaaatcaaaaaaaaaaaaaaaaaaaaannnnnnaaaaaaaaaaaaanaaaaaaaaaaaaanaaaaaaaa

SEQ ID NO: 1131 - DNA, 579 bp, Gossypium hirsutum
  unsure (1)..(579): unsure at all n locations; Clone ID: LIB3825-018-Q1-K6-H10
cggnacgcgtgggtttgaaatgcccttcaagaagtaaacagggaggatatgttcagtgtgagaaaagatgcaaagagaaaaagagattgtaaatatgtcatttttatccaaagtctatttcgtttcatctcaaacgttgcttatcaacattcttgtttgtggtgttcttaattgttaatttaaacattaaatcagttgaaatttatctatttatgctttcttgctcccggaatcattgtgtccttaattttgcattgcttgctgatttaaaatttttgttttgcacttcaattcttttttatttttaaaatttattttatcttcataattgcaggcgcttgatactttcaacactgctgttgtttctcccatatactatgttatgtttacatcactgaccattttggctagtgtaatcatgtttaaggattgggatggacagagtcctactcagattctgacagagatgtgtgggttcgtgactatcctttctggaacttttcttcttcacaaaaccaaggatatggctgatggtccaggtttgtcaacatctttgtcaatgagatcattgaagcatga

SEQ ID NO: 1132 - DNA, 519 bp, Gossypium hirsutum
  unsure (1)..(519): unsure at all n locations; Clone ID: LIB3825-018-Q1-K6-H11
cataataaaagacgcgcgtnacttgtacgttccgtattttcatttattgcgaaaaagcgcgctaacccattcccaaaaaaatattgttaatttaattgtgatatatttgaatgaagaaaaaaaaagaaaaaaaaaaaacgagaaaacaaagaaaaaaaaaaaaaaaagaaaaagcaagaaagagaaaaaaaagaaagaaagaaaaaaaaggagcgaacggagaaataaaagggggggggggactaaagggtgcagcacttgcatccgtggaatggcaaggataacattttttagtggggcacctaaaacgagtttgtggggccgagctttaaaaacattgggacggggaaacccgtggggggccaaaggtaaaggcgtttgagaaacaacccttttgacccggggggactaaaacacagagagggcgctacccgagtcgctctttaaaacttttcggcaaaaccggaaagggaaaggggggcgccccttaacaggagattaaaagcggggagggtgggg

SEQ ID NO: 1133 - DNA, 580 bp, Gossypium hirsutum
  Clone ID: LIB3825-018-Q1-K6-H12
tttcctcctagcccaaaaaaaaaaaaccctctttcctttctctcgttctttttcccgttcaatcatgtcttgcttcattagcaaatatgccgatgagttggctaaaaacgctgcttacattggaacccctggaagggtatccttgctgctgatgaatccactggcaccatcggcaagcgtctttcaagcattaatgtagagaatgttgaagataacaggcgtgctctccgtgagctcctattcacaactccaggagctcttcagtacctcagtggtgttattctccttgaggaaaccctttatcaaaaaaccgcttcgggcaagcccttcgttgatgttttgaaggaaggtggtgtcctccctggcatcaaggtcgacaagggtaccgttgagcttaacggaaccaatggcgaaactttcacccagggtctagatggccttgcacagcgatgccagaagtactatgaagctggtgcccgctttgctaaatggcgtgctgtccttaagattagtgctaatgagccaaccgagcttgcaatccaaaaaaatgcccaacgggctaactatgtatgctgccatc

SEQ ID NO: 1134 - DNA, 606 bp, Gossypium hirsutum
  Clone ID: LIB3825-018-Q1-K6-H2
gcagaactccttcattccaactcagtgctcatggatgcgcaagaaggaactcagcagtcacagcagctaatccttgctcacaaagtcttccttcttaagcaccgggatgtccctgacatcgagaaggtccgcctcaaggatgaggtcctaaacactgtcaaatccaatgatatgactccatattatgaaaacctagtcgccgacaaggtgctggacctggaccacagcgctttggactcaatgcgtgcaaagaatgaggaagagattaaaaagctcgatgaaaagattgctgatgctgaagaaaacttaggtgaaagtgaagttcgagaagcacatttagctaaattcttgtatttcattcagattggtgaaaaggagaaagcattggagcaactgaaggtgtcagaaaacaagacagttgctgttgggcaaaagatggacttggtcttctgctcgttgcagataggctttttctatatggattttgatcttatttctaacagtattgataaagcaaaaatcttgttcgagaaaggaggtgactggaagagaaaaaaccgtttgaaggtgtatgaaggcttgtattgcatgtccactcgaaaattt

SEQ ID NO: 1135 - DNA, 578 bp, Gossypium hirsutum
  Clone ID: LIB3825-018-Q1-K6-H3
tgtggtgctgcagtccaagctgctatattgagtggtgaaggtaatgagaaagtgcaagatctcttgctcttggatgtcactccattgtcttccggtttggaaaccgctggtggtgttatgaccgttttgattccaaggaacaccaccattccaaccaaaaaagaacaagtcttctcaacctactccgacaaccaacctggtgtgttgatccaagtttacgaaggtgaaagaacaaggaccagagacaacaacttgctcggtaaatttgagctctctggcatccctcctgctcctagaggtgtcccacagatcactgtctgctttgatatcgatgctaatggtatcttaaacgtatctgccgaagacaaaaccactggacaaaagaacaaaatcaccatcacaaacgacaagggccgactctccaaagaagaaattgaaaagatggttcaagaagcagagagatacaaatccgaagatgaagaacataaaaagaaggtcgaggcaaagaatgcattggaaaactatgcatacaatatgaggaacacagtgaaggacgagaagattggtgctaaactccc

SEQ ID NO: 1136 - DNA, 596 bp, Gossypium hirsutum
  Clone ID: LIB3825-018-Q1-K6-H4
ctcgtagtgaggggtagaaaaggggcaaaggatgatgtaccgaaaatggagttcgctgacaggaccattctccatccttggcggaatcaatggagccactgttggtgcccacctaattttccttgcttgaaagttgctggatcgatgtctgaaaaccaagaagaagactgccgacagatgcacagaagttgccagatgctttgatggttttggcaatatgcataggtttgtatgacataataccaaatctggtggttgtgtaatattattggcttatcttactaaaagctaggatgaaagcaaatgatcaattcaatactaactacaatacacgaaattcattgtataatataaagctggtgattcgttagatactcctgcaccaaagattagttgatttggaaagacctaaagagaagacggctgctggaccatcctctccaagaagcccttccaaaaatctactacctgctcagtttaggtcagaggaaacgagtgctggcagtgtagattctatgtcagttaggaagacattatcaaatggcttgcaacagagtgatcaacctgcatcttctagtacatcagtccaaataact

SEQ ID NO: 1137 - DNA, 572 bp, Gossypium hirsutum
  Clone ID: LIB3825-018-Q1-K6-H5
cggccgcgtgggcggacgcgtgggcggtgatcaaatccatggtggagaactaagtttgggtgcaatggaacaaatgccgttgatgaaatcggtggtgtacgaagctttccgtattgaaccaccggtgccggcgcaatatgcaaaagcaaaggaggatttgttgattgaaagtcacgacgccgttttcgaagtgaaaaaggggagatgttattcgggtaccaaccgtttgcgaccaaagatccgataatatttgaaagagctgaagagtttgtaccggagaggtttatgggtgttgaaggggagaaattgttgaaacatgtgttttggtcgaacggaccggaaacggagcatccgacggtggagaataaacagtgtgccggtaaggaatttgtggtgttgatttctaggttgtttgtggtggaacttttccgacgttacgatacgtttgagattgaagttgggacatcgacgttgggggccgccattaccataaagtcgttaaataaaacaagcttttaagtacactgtaattttcgtcaatgcaagggctttgtcaaatgtgtcatggtttt

SEQ ID NO: 1138 - DNA, 580 bp, Gossypium hirsutum
  Clone ID: LIB3825-018-Q1-K6-H6
ctcatgctcacattttctcgcattttatttaattttctggtctgccctcaagcccaaaaccctaacaatggcagccgccgccgcccgtcctctggtttcggtgcaaaccatagagtccgatatggctaccgacgctacgcctactgttcctctcgctgatgtcatgaaagcctcgatccgaccagacatcgtcaccttcgtccacgataacatttccaagaacagccgccagccttacgctgtctccaagcgtgctggtcaccagacctcagctgaatcgtggggaactggccgtgccgtctcccgtatcccgcgtgttcctggtggtggtactcaccgtgctggccaaggtgcttttgggaacatgtgtcgtggaggccgtatgtttgctcctaccaagatctggcgccgttggcaccggaagatcaatgttaaccagaagaggtacgccgttgcctccgcaatcgccgcttctgctgttccttcactcgtgatggcacgtggtcaccgtatcgagtctgttccggagatgcctctggtcatatcggacgctgtggagagtgtggaaaagacctcggct

SEQ ID NO: 1139 - DNA, 601 bp, Gossypium hirsutum
  Clone ID: LIB3825-018-Q1-K6-H8
cttgagactgctgcaatgaaggagtattacttcaaggcagataatccaaccaagtctgcatcttcaaacttgaagtatcgaaacccaaagtatctatcaatgctgaaccacttgcggttctatctgccacaagtataccccaagttagataagatcctctttcttgacgatgacattgttgtccagaatgacttgaccagattatggtctgtggatctacatgggaaggtaaatggtgcggtagaaacttgtggtgaaagctttcaccgctttgataagtatctaaacttctcaaatcctcatatttcacgaaactttgatcctaatgcttgcgggtgggcatatggaatgaatatgtttgatctcaaggagtggaaaaagagggatatcactggcatataccacaagtggcaaaatatgaatgaagatagagcattgtggaagcttgggacactccctcctgggttgattacattttacggtctcacacatccgcttgagaaatcatggcatgtacttggtcttggctacaatccaagtgtagacaaaaaagaaattgaacatgccgcagttatccactacaatggcaacatgaaaccct

SEQ ID NO: 1140 - DNA, 648 bp, Gossypium hirsutum
  unsure (1)..(648): unsure at all n locations; Clone ID: LIB3825-019-Q1-K6-A1
acgcgnntccgcccaagtgnaacaatngggaagtcaatttacctgctngagaggtccctccagaactaccagagcctgccttgggtattaactttgcaagagatggcatgcaagaaaaggattggctatctttagttgctgtccacagcgacgcatggctactttctgttgccttctattttggtgcaagatttggatttgataaagctgacaggaaacggcttttcaacatgattaatgatcttccaacaatatttgaagttgtaaccggtggtgttgccaagaaacaaacaaaagagaagtcattggtttcaaatcatagtagcaacaaatcaaaatccaactcaaaagcgcgggaatctcaggcgaagcattcaaaagcatcacagccgaaagacgaagagcaagggttggacgaggaagacgaagacgagcatggagagaccttgtgtggggcttgtggtgagaactatgcctcagatgagttctggatttgttgtgatgcatgtgagaagtggttccatgggaagtgtgtgaagatcactccagctagagccgagcacattaagcagtacaaatgcccgtcgtgcagcaacaagagagctcgcccttgatgatgtcgtaaaaatgtactctctctctctctct

SEQ ID NO: 1141 - DNA, 627 bp, Gossypium hirsutum
  Clone ID: LIB3825-019-Q1-K6-A11
ctttactctcaccaccttttcagaaccctttaccttatctaattccatcaagcttcagattctttctccattataccttgagagaaaaaagaaatgggaggcaaagaagaggatgttaggctgggagcaaacaagttctcagaaaggcaacctatagggacaacagcacagacagacaaggactacaatgagccaccaccagctccacttttcgaacatggtgagctctactcatggtctttttggagagctgggattgctgagtttgtggcaactttcttgttcctttgcatcaccgtcttgaccgtcatgggtgttaatagggcaccttctaagtgtgccagtgttggtatccaaggcattgcttgggccttcggtggcatgatctttgcccttgtttactgcaccgctggtatctcaggtggacacataaacccagctgtgacatttggtctgttattggcaaggaagctttctctgaccagagccatcttttacatggtaatgcaatgcctgggcgcaatatgtggtgctggggtggtgaaaggattccagccatcaagatatgaggtgttgggtggtggagccaatgttatgaaccatggatacaccaaaggggacggcctt

SEQ ID NO: 1142 - DNA, 644 bp, Gossypium hirsutum
  unsure (1)..(644): unsure at all n locations; Clone ID: LIB3825-019-Q1-K6-A12
cggccgcgtgggcggacgcgtgggcgagccagctatttattgaagctacaggcactggtacggtccctgctattgctgtttccgttaatggaactctcaagataccaacttcttcagggaaacaagaaggcgagttgccaaaaaaacgtagagaagaccctccaacagtgagttcattgacattaatgagcatcaaagttcggtgtcttcaggattggcacccattgctcccatgacttgtaacagtttcaatttgaattcacaagggttggttcctatatggcctatgggtacttttagcgtactccctgctgcacctggttcaaaccaggcacagttgtgggcgattccagcaactgcaacgccgtttttttaacgtcacaggtcgaccaatatctagctttgtgtctgctatgcaaccagaggtgcaggattccagcgttgggtcgatgggctcaagtgttttgcccacttctagttcaggtgctactagtgttagtaacggtaataatagttcaaaccatagtactacgcagatgcttagggaattttctttggagattctcgataagagagagcttcaattcttgggttgtcccgcanaccagcaagccccatgttcgaaaccttgatcacaaacacta

SEQ ID NO: 1143 - DNA, 621 bp, Gossypium hirsutum
  Clone ID: LIB3825-019-Q1-K6-A3
agtggtcctaacaaattgggaagaatggaatattttcagcatctgggcaattccaaattttgcctcgcaccacgtggagagtcatcttggaccctccgtttttatgagtcgttttttgtggaatgtgttccagtcatcttatcagatcaagtagaattaccttttcaaaatgtaattgactacacagagatatcaatcaaatggccatccacatcaatagggcctgagcttctggattacctggcttcgataccagatgaggtcatagagcagataataggtcgtggcaggcaagtaagatgtttgtgggtttatgctccagactcggagccatgttctacaatgcgagcgttaatgtgggagcttcagaggaaagtgaggcaatttcaccaatcagctgaaacattttggctgcataatggatccgtagtgaataggaatcttgttgaatttgcgaagtggaaacctcctatgcctctgccttgaaaactggctgcctcgttctggttggcacagtgctccgttttgcttcaaatttaacacttgctgtcacaatcctgaatggctgttgggattcactgtttcttctataggttgtagagcaattcttttttcacctta

SEQ ID NO: 1144 - DNA, 657 bp, Gossypium hirsutum
  unsure (1)..(657): unsure at all n locations; Clone ID: LIB3825-019-Q1-K6-A4
ctttngaacaacatatcaaatcaaaacaaaacaaanagagggtatcagactcgtttttctggggttttctcttgtttttctttctttggagttttcttcttcttctcaggcatgtttcctgctgcaactatgtccagttctacttctttgtctgaggaagctaatgtttcttctggtactagagttcaagactttggtggcttaaatcctattgttactcaccagcagctgccacagaaaattaagaagaaaagaagcctccctggaaaccctgacccagatgctgaagtgattgctttatctccaaagacgctattggctaccaacagatttatatgtgagatctgtaacaaaggtttccagagagatcagaaccttcagcttcatagaagaggacataaccttccatggaagctgaagcaaagaaacagcaaagaggtcaaaaagaaagcctatgtttgccctgagcctacatgtgtccaccaccatccttcaagggctttaggtgatcttactggcatcaagaaacactattgcagaaaacatggagagaaaaaatggaagtgtgagaaatgctccaagatctatgctgttcaatcagattggaaggctcattctaagacctgtggaacaagagaatacagatgtgattgcgga

SEQ ID NO: 1145 - DNA, 613 bp, Gossypium hirsutum
  Clone ID: LIB3825-019-Q1-K6-A5
taaaaacatcatacatgcttctctgtttgtaacttggagtgatactatgtgaaccaacctagttgattaacaatggcattttaagactcgaccttcatgcccccttctgtcatgtcttgtatgaactggcattttgttgttataaagttatgaatcttgacctaacgtagttcgtttgtcttgaaatgcattgcagaagcaacccctaagactattatgagaacaatgggagtaaaaggccttaccctctatcacttgaaatcacatcttcagaaataccgactagggaaacaatctgccaaggaatcaactgataactctaaggatgcttcctcaattgcagaaagacaggacactggctcatctaccacagcatcttcgagaatgattgcgcaagacgtgaatgatggttaccaggttactgaagctcttcgagtgcagatggaagttcaacgaaaactacatgaacagttggaggtacaacgtcgtcttcaactccggattgaagcacaaggcaaatacctacagtcaatactcgagaaagcttgtacagcactgaatgatgaggctgctgcttctactggtctagaagcagccagagaagaactttccg

SEQ ID NO: 1146 - DNA, 630 bp, Gossypium hirsutum
  unsure (1)..(630): unsure at all n locations; Clone ID: LIB3825-019-Q1-K6-A6
ngagtgcaagggatcacttccagaggatttttnagtgaccatgaaaaactgaagtcacagttagaatcccataagaaagacctagagttgcgtggagttgaacttgaaaagcgtgaggcactgaatgaaagtgaaaggaaaagttggctgaggagcttgaagaggtgctgtgcttcattcttgattttcacttttgcttgttgatcccttcagttttatattcaagtgtgtttggcactactttcatctcatagtcaggtcgtatgaccactctggaatggctgccatcagaactcatagtattggtacagagtttttggttttgcaacaatccttgtgaagcatcagaatgctgttcaaaatagtgcactacatttggctgctttggagcaaaaaagggctgatgaaaatgtaatgaaattggctgaagatcagaagaggcagaaggaggaacttcacaacaggataattcagcttgagaaaaaattagatcaaaaacaggcattggaactggaaattgagcaactgcgaggatcactgaatgtaattaggcacatgggagatgaagatgatatagaagttcttgagaaagtggatgcaagtcttaaagagttgagagaaaaagagcag

SEQ ID NO: 1147 - DNA, 535 bp, Gossypium hirsutum
  unsure (1)..(535): unsure at all n locations; Clone ID: LIB3825-019-Q1-K6-A7
ccgtccggccgaaccatcaggnaaactcagtctctgcaatcaatcttgtgagattggcctccatggtttctggcagtaaatccgaccattacaggcagaacggagagcatcttcttgctgttttcgagtcgagattaaaggaaatggcaatggcagtgccacttatgtgttgtgcagccgatatgctgtcgattccttccaggaagcaagttgtgctggttggccataagccttcagaagagttcgaaaacatgcttgcggctgctcatgcctcatatgatccgaacaaaacagtaattcatatagatccaacaaacacagcagagatggaattttgggaaacgaataatgacaaagtggctctcatggcaagaaacaattttgcagctgacaaagtggttgctcttgtatgccaaaatttcagttgcaggcctccagtaagtagccctaaatctctacaacatatgctctcaaacaagtctgcctcgtcctctgttgtatgaatctgtcattgctttacttggtagtgtatgat

SEQ ID NO: 1148 - DNA, 605 bp, Gossypium hirsutum
  unsure (1)..(605): unsure at all n locations; Clone ID: LIB3825-019-Q1-K6-A8
caaagctccnattgnacaagtgaaaggaagatttggcaagggcatttgctaatccagatgtggaacatccacatggaacaccaggacgtgacaactatggaatgagtgctcttcagcaacacgcttccttttttgatcaagataaagatggaattgtttatccttgggagacctacagaggtatgagaaatattggtttcaatccaatttcgagccttgttattgcaattaccatcaatgtggcattgagttattggactctccctggatggctaccaaatctatattttcccatatgcatagatagaatacataaatgcaagcatggaagtgactcttcaacatatgacactgaaggaaggtatatgccaatgaactttgagagtatttttagcaagtacgctcgaactgtgccggacaagttaacactgggggaactatggcacatgactgaggctaatcgaaactcatatgatttcattggctggtatttcaatcacccttttctttgaattccgtgtactttctattcatttaaaaaaaaaggaatttggtttgcaggataatatcaaagggagaatgggtaccttttgtatataattgcc

SEQ ID NO: 1149 - DNA, 632 bp, Gossypium hirsutum
  unsure (1)..(632): unsure at all n locations; Clone ID: LIB3825-019-Q1-K6-A9
cgagnacacattcaggtttatttcgattgttttgtctgatcctagatcgtattcgaaccgtcgcgaatggaagcgtcgactcgagtcactcaccacgagtcagatcgaactcatcgccatgctttgcgaggaggaaaacgaggacaaaacggcagctggcacggcgccaatcgtcgatctaacttcttcgaacggagtactagctcgtgagagcagctctgccgaggtctggaagcttcatggagaaacaacggtggtcagccgaaccagcaaagacagcttgttgcctcgacttgccacgtggcagaaatctgaagacgccgcgcagaaaatcctttacaccattgagtgcgagatgaggcgttgtccgtacactctaggtttaggagagccgaacttgtccggcaaaccgagcctcgattacgacgccgtttgcaagccaaacgacatccacgcgcttaaaaggagcccgtatgaccactgcatcgagaaccacgagaacgcaacgcttttcacgacgcatcagatcctggaatcgtggatccaaacggcgaaacaagtactgaaacgcatcgcttcgaggattgacgctgaaatcttcgaaaccgccgcgagcgattgttatttgatgg

SEQ ID NO: 1150 - DNA, 613 bp, Gossypium hirsutum
  Clone ID: LIB3825-019-Q1-K6-B10
gtctggatctcttcaaaatgaacggccaatctctctacctgtacaaccaagcatcaacgctcatagtgtcctcggccaaattctctttgatgcttgtgtccctaagaacattgaaggttgggatattagatattcaggttccagtaagggacagccatttgcatcggcccgtcggcgttcacctccccttggtatcaagtgcaatcgtcgttcaagactgtaaagattcccaatgaatcaaaatcccatactggaaatgaatgatgcttagcttcttctcaactcgagtattggaaacgaggtccgtggactttttttttttgcaggaaattgtgttggtttacctgttgtgctgcttgcttgtgatcataatcctttggctagaagtgtacaggtagtgtatatgagaacatatgcataggattgtatgtatgtatgtatgtatttttggtaaaatgtatgtatatgtgttatgtatgtatgcatgcatgtatgtacataagaggattctaagatatgtatgtattaagtgagatatgtacaaagatgccatctttatacctctgtttttatgaattctaagatatgtatgcattaagtgaggctttttatt

SEQ ID NO: 1151 - DNA, 619 bp, Gossypium hirsutum
  Clone ID: LIB3825-019-Q1-K6-B2
cggaagcgtgggttacgttccttgcgcccttgcgaacattgtggtagacatcaggatccgaagtttcagcctgatttatccagtacttaccaacctgtaaagtgcaatttggattgcaattgtgacagtgacagggtgcaatgcatttatgagagacagtatgctgaaatgagtagcagtagtggtgtccttggtgaggatatcttttcgtttgggaatcaaagtgaacttgtgcctcagcgtgctgtttttggttgcgaaaatgaggaaactggtgacctttacagtcaacatgctgatggcattatgggattgggccgtggtgatctcagtgttgttgaccagtttgttgaaaaaggtgtgattagtgattcattctcattatgttatggtgggatggatattggtgggggtgctatggttcttggaggcatatctgtcccgtcagacatggtctttagttatgcagatcctgttcgcagtttcgggatggcaacagtccatattacaacattgatttgaaagagatacatgttgcggggaagcagctatctttgaacccaagggtctttgatggaaagtatggaactgttttggatagtggtacaacatatgcata

SEQ ID NO: 1152 - DNA, 524 bp, Gossypium hirsutum
  unsure (1)..(524): unsure at all n locations; Clone ID: LIB3825-019-Q1-K6-B3
tctctcttttcactctcccctcaagctccggcctaggtccggtcgaactccggtcatcgggccacctcccgtccgctgccgtacacggtggctggagttccaaaaaaaagcctttttagctttttgactccccaaactccgatctggggtcagtttctttagaagattgcccaaaagtcgccagaaaaaaagagaaaacctttcgactttttagggttctaaaaaaacctttctatataaaaaggaggtcactgttcctcgacagtgacgacctcggttgcttgcggagtcggaggatcgaccaccaggtaacagaaacgtcaaacgcgtgtggctgtggtggtgtgttggggaggagcaacggcagcttgtaggctagggtttcttttttctttgctgaaagttaaagttgtgggtttttgggctgttagggttttaatttatttgggcttttgttttttgttgttttagggcttgtaatggactgttttgtgattttgaagaaatagtgtccatttgtnnaa

SEQ ID NO: 1153 - DNA, 615 bp, Gossypium hirsutum
  Clone ID: LIB3825-019-Q1-K6-B4
ttcagattctttttcctcccttttcttcaaaactaagagaaaaagaaagggattcaagttccgaagacgagaaaacaaatcgatggatttggatcaatggatatcgaaggttaaagaaggccagcatcttttggaagacgagcttcagctactttgcgaatatgtaaaagaaatcctcatcgaggagtcaaatgtgcaacctgtcaacagtccagtaaccgtctgtggtgatatccatggccagttccatgatctaatgaagctttttcagacaggaggtcatgtaccggatacaaattacatttttatgggagattttgttgatcgaggttataatagtcttgaagttttcactattcttttgcttctcaaggcaaggtatcctgctaatatcacgctcttgcgggggaatcatgaaagcagacaactaactcaggtttacggcttctatgatgagtgccagagaaagtatggaaatgctaatgcatggcggtattgtacagatgtttttgactatcttacactttcagcaattatagatgggactgtactttgtgtacacggtggcctttctcctgacattcgaacaattgatcagataagggtaattgaccg

SEQ ID NO: 1154 - DNA, 535 bp, Gossypium hirsutum
  Clone ID: LIB3825-019-Q1-K6-B5
gcaaaaacaagccaccccacagcaagttgctgattacaccctcaagctcctccacaggagaatccccccagctgttcctggaatcatgttcttgtctggcggacaatccgaggttgaagcaaccctcaacttgaacgcaatgaaccaatctccaaacccatggcacgtctcgttctcgtatgccagagctctccagaacacttgcttgaagacatggggaggcagacccgagaacgttaaggctgctcaggatgcactccttgtccgtgccaaagccaactcactcgctcagctcgggaaatacaccggcgagggagaatcagaagaggccaagaaaggaatgttcgtaaagggctacgtctactaagctgctgcaaacaaagctttagctgagatgatggagatttcatgatatggtttctttctctttgtgttgaatgttttataggctctggagactactttttgttctggattgcaatgtactgttaaataaacttcttgctgatgagattacttataaatgcatcatcat

SEQ ID NO: 1155 - DNA, 633 bp, Gossypium hirsutum
  Clone ID: LIB3825-019-Q1-K6-B7
tctttctcaaagcgctcttccctttcctttcattgttgttgttccgtagtatttcttttatttttcctttttgatttccaagagactctcatatttatagaaagagaggacccaaacgcaccgtatataagcatgagcagctcttccgcctcttctcgcaaggcactaagtaaaattgcatgcaatcggctgcaaaaggaactggtagagtggcaggtcaaccctccttctggtttcaaacacaaagtcactgataatcttcaaaggtgggtgattgaagtaaatggagctgcgggaactttgtacaccaatgaaacctatcagcttcaagtggatttccctgaacattaccctatggaagctccccaggtgatatttcttcaaccggcacctctccatccacatatttatagcaatggccatatttgtttagatatcttatatgattcatggtccccagccatgacagttagttctatatgtatcagcattctctccatgctatcaagcgcaactgtgaagcaatgccctgaagacaacgatcgctatgtaaagaactgtagaaatggtcgatctccaaagcagaccaggtggtggttccatgatgacaaagtttaacggcatcaacatctt

SEQ ID NO: 1156 - DNA, 638 bp, Gossypium hirsutum
  Clone ID: LIB3825-019-Q1-K6-B9
tttgattttttcttctcaatagcaaaaactcctttttgctcttctagggttttgacctcagcaaaacacgccgtcgccagaccaccaccatatcaggtgaccggtaacgcgcgaaaggctcccgtttcagacgaagaacctgatcgacgaaggctaaacaccgaggtaagtaccccttttctttttatttatttcttttaaaatagatttgaaaccaaaaataagaaaaaagatcgaaagaaaaaaaaaagaaaagagcatagaatccaaaaacaacctttttttttttgtttttgcttttgatttctcgtatgcgtgtgaaaataccatcttttttgtcttccaaaaatcccccaaatacaatcggttccccctatttattttgctaccctcttctatttgttgcttgctgttttctttctttactttgcttgtctctctgctattttcctgtttcgtttgctggtctaggcaaaagtgatgggacgggttggtgcaaggacaagcagaggggtcaggcctcgaggccaggcgcgggcggtgcactcgaggcacgtgggggagcagcgcggcccaaagagggctcaaaaaccctaggtctctgagttggtttaaagtcttgggcctattgggtcgac

SEQ ID NO: 1157 - DNA, 648 bp, Gossypium hirsutum
  unsure (1)..(648): unsure at all n locations; Clone ID: LIB3825-019-Q1-K6-C1
acccttccaagtccctttctttgatttcatctacagggaaaattatgaaccagagacaagcaataaggcctcaagcagccgaccaggctgtcgactacggcgatgttttcggtgtcaccggtgctacgccttcatttccaactccaacgggtgcggttggtgaaagtggcatcaccattggagaagctttggaggcaacagctatctctgttggcgacaaaccggttgaccgaggtgatgcagctgcaatacgagcagctgaggccagagctgctggtggtaacgtcacccaacgtagcggccttggcgccaaagctcaagctgctgtcaatttcaatgaccgtgtggcttatgattacaataaaatcactatatcagatgttttgtcggtaataaagacttgataaattaagcccaacacttgttaacccttcactttaccagttacattacacagcagacaagaagtaaatccctcattcgtctaattttcttttttttttttgtttgggaccgacaggatgctagtgggaagctgcctcacgataaagccgtgacaagcgaagatgctgatggcgtgagaggtgcggagctgantaacagtaccgaagcaatgcccacaccaggaggagtggcggataccatggg

SEQ ID NO: 1158 - DNA, 605 bp, Gossypium hirsutum
  Clone ID: LIB3825-019-Q1-K6-C11
aaaaagagagccatatttcgagttttgtgcgtgaatctaataaaactgtaatccacacacaaaaaatgtggatttgtttcatgttagattcacgcacaaactcgtaatctgtctttccattaatttccccgtcgtttcttcatgtcgctgtccttttttctttctggtcccaaagggattggcaattttaatctataattttggagaagaaaaaggaaaaaaagagagagacagtagctgttattatcaagcctgactgtgagttaaggacagatcgatcctctaaatttgaagattcttgcccaaaattggtgcaattataaatgtgttagaaactgaaaggcaagaaattaatggtgctgctgcaaacaacatcagaaattttcgtccctgaccattagtatacacagttacacattttaagttgcttacttatgaacatctagcaagaatccataatgatagctgacgtttgctacccggattctacaatgtactttcagtaggatattctgtgttgtaataaatatgtcgaattgtgggtgaatttgttgctaacattgaacacaacatgattctctattgatgatcctgaattttgacaa

SEQ ID NO: 1159 - DNA, 644 bp, Gossypium hirsutum
  Clone ID: LIB3825-019-Q1-K6-C12
gggaagatccttttggaaggtggaatgcgctatttggaggtgaagcagattcttttgctggcctattgtcaagcaataaccttttatcttcttctcaagtctgaagggcagcctgttcgtggtcatcccgtcttaggtcgtattgtggagatccaaggcttacttgataaggtgaaacaacttggtgggaacctttcttctgaatggaaggagattctgaagaataaagaggctgaaatgggacaaaacttggttaaagagagtgctgaaccgatatctgactctggcactaaggatcatggtacatcactagtaacggatttacaaatggctgagcttgaagacacacctaatttgctaaaaatggagtttgctagtaaccttgataacaaggggatgaaacttaagcgtgagaatgaccaagtaggtgtacaaagcagggaaatgttaaaagtaagagcagctcttgaggagaaactgaaacagaagggaatctttagttccaacatccaaaagcctgataaaaccaagaaacataggaaaccagtgaagggacagcttgaaacatatgatgattttgttgatgatgctatggatgttgaaggaagtgctcatggattaagtaacgggcatgcaagctcaaa

SEQ ID NO: 1160 - DNA, 578 bp, Gossypium hirsutum
  unsure (1)..(578): unsure at all n locations; Clone ID: LIB3825-019-Q1-K6-C2
gttcgcctgcagatgttaaaagggcataggtgcaattgctatatctcttccattcgcctgtgtgataggcctcctttcatccatgacttcatcaacaatggctacacgaagatttgtctggatttacgcatcgattcaatttgttttggtggtcatctttgctcatatattttattcgcaggtgaaggtacaagcaatactatcaattctcctcgcaacgttttccgggtttggtgtcacaatgagtgggagttccatcatcgttgagatccaacgatgtagaagaagatggcagcgggctaggttagagcagcaacagcatagtccacaagtgataactcgagctccggtccaatcccctagagctgttaattcgcctcggacggatcctaataacgtaaaccggcaaaatacagaaactgttcggtgggagctcaattgatcgcaggttctccaacactacattacgaaatttatccagatttcatttaggccaaaatggaaaggggtatataatgaaatacatggttgcaatttttctttgttttaaaaaaaaaaaaaaacaaaaatactaatnn

SEQ ID NO: 1161 - DNA, 223 bp, Gossypium hirsutum
  unsure (1)..(223): unsure at all n locations; Clone ID: LIB3825-019-Q1-K6-C3
gaaaggactgagtcaaanaattggatagatgtggaccaatctgtcgtgttagaggggttgttgactataacaaaaatgagttagcagttgggacggcgaattaactatgggttggtgttgggtagcatacttactacgattttatacaatttctattgtaacttgtgatgcttgtttgcttcaactttttttttttatggcataattagtataatatttctat

SEQ ID NO: 1162 - DNA, 614 bp, Gossypium hirsutum
  Clone ID: LIB3825-019-Q1-K6-C5
cggccgcgtgggttctgatcatctctctcttcctgacgcaaaacatggctgatattccgatcagattcggaatcattgggtgtgccgagatagcccgcaaagtttctcgagctatccagcttgctcctaacgccacagtctccgccgttgccagccgctcctttgacaaagccgccaatttcgccaaggccaatggcttcccacctgacaccaagatctatggctcctacgagtcccttcttgacgaccccgacatcgacgccgtttatttgcctttacccactagcctccacctcaaatgggctgttttgacggctcagaaaaagaagcatctgctcacggagaagcccgtcgccttgagcgtggccgagtttgatcagattctaaaggcttgtgaagaaaacggggttcagattatggacggtaccatgtgggtgcataatcccagaacccataaaatgaagcagtttttaaacgacaaggagaagtttggtcagcttagaacggtaaacagttgcttcacattttttgccgatccggattttctcaagaatgatattcgtgtgaagccagatcttgatgctcttggagctctaggtgatgccgggtggtat

SEQ ID NO: 1163 - DNA, 628 bp, Gossypium hirsutum
  Clone ID: LIB3825-019-Q1-K6-C6
gggaggcaaagaagagatgttaggctgggagcaaacaagttctcagaaaggcaacctatagggacaacagcacagacagacaaggactacaatgagccaccaccagctccacttttcgaacatggtgagctctactcatggtctttttggagagctgggattgctgagtttgtggcaactttcttgttcctttgcatcaccgtcttgaccgtcatgggtgttaatagggcaccttctaagtgtgccagtgttggtatccaaggcattgcttgggccttcggtggcatgatctttgcccttgtttactgcaccgctggtatctcaggtggacacataaacccagctgtgacatttggtctgttattggcaaggaagctttctctgaccagagccatcttttacatggtaatgcaatgcctgggcgcaatatgtggtgctggggtggtgaaaggattccagccatcaagatatgaggtgttgggtggtggagccaatgttatgaaccatggatacaccaaaggggacggccttggagctgagattgttggtacatttgttctcgtttacactgttttctcagcaaccgacgccaagagaaatgccagagactctcatgtccctatattgg

SEQ ID NO: 1164 - DNA, 625 bp, Gossypium hirsutum
  Clone ID: LIB3825-019-Q1-K6-C8
tgatcttgaagtgcagaaggctgaggcgggtggcaatgatatggagggtttggtcgggttttcagatcggtcaaaggatttcgcgttcctcgaaaagagagtggttcagagggtctggtggatgaagagctttcaggttttaatttgaagtctgctggattgcttgggagacctcaggggaccataaatattacctcgacatatgagagtagaacacgagatttagaaagttctttggttgcaaggggagacctatggagagtagaggcatcaaatggcagctccacatcagggagtgacaactctttattccttctccagctcggaccagtgctctttgttagggacacaacacttcttttaccagttcatctatcaaagcaacatttactttggtacggctatgataggaagaacggaatgcattctctttgtccagcaatatggtcaaagcataggaggtggctattaatgtcaatgctctgtcttaatcctttagcttgttcatttgtagatttgcaatttccaaatggacagtttacatatgtatctggtgaagggctgacgacaagtgctttcttacctatttgtggggggacttcttcaggcacagggccaatatcca

SEQ ID NO: 1165 - DNA, 652 bp, Gossypium hirsutum
  unsure (1)..(652): unsure at all n locations; Clone ID: LIB3825-019-Q1-K6-D10
gctgcggaccactcatttcncagcaactgaagcaacaacagctaatgaagcaacaaaacgcgttggcgtggggagggttgaagcagcaacagcaaaaccatgtggtccaaaacagaggaaggtatgccaataggactttgggtttggccccatctgcgtggccccctctgcagcagcagcagcagcagcagcaacagcaaccccagccactgaacggatcgggtatgcgggctgttttcttgggcaatccaaatgggaaaagggaatgtgctggaactggtgttttcttgcctcgtcgcgttggaagcttttctgatcctcgcaagaagacagcttgtcctactgttttggttccagctagagtggctcaggccttgaacttgaatctggatgagattggggctcaaccccagcttcagcaccctcggttcaacccaagcttcacttctgatgctgctgctttgaggcttcgaagtgggggaaattttgtgggaaatcaaaagccgcggagtttgaggccacagcaagagatgagtcatgaagttcttttaccgcaggagtggacttattgactcaaacctgcatgcggtggtggctttctaattgttggttctcttgttttaaacgttnttttttaagtttagaaatttta

SEQ ID NO: 1166 - DNA, 551 bp, Gossypium hirsutum
  Clone ID: LIB3825-019-Q1-K6-D11
cttgcatagagatgcgggatcatgagcagccccaagagccttgtgtgcaccggagaagctagtgaagcaagttgctttagcaacaggagcagcacaagttccacttgccggggagaatgcacttccccgttatgatgaatacgcccacgagcagatcttacgagcttcatcgttgaatgtcgatggctcagcagttgatagagagatgtgtgcatttacgtacttgaggatgaacccatcgctctttcatccgggcaattggagacggtttgttgcattcgtgaagaagatgaatgagggaaaaggagctcgtcggtgttgggaagaggtggagcgggaagccgaacaattcgtgcatgtcacgcagcctttcattcaggaggccgccgttgcccttatgcattagcgtagcttagtaaagagtttgtattaataacagttcctcaaggattctgaaatgatatagtttttcctttcacatttttttcctatgcagtggctagggaaaaaatgcatgttgtatgatttggtattcgattttactttgtacc

SEQ ID NO: 1167 - DNA, 651 bp, Gossypium hirsutum
  Clone ID: LIB3825-019-Q1-K6-D12
cccaacaataagagcgccgccgcagagcaaaggttcagagaggaaatggcagcaaaaaggaagacccctgttaagacccgaaacccagatcttatacgtggcgtaggcaagtattccaggtctaagatgtaccacaagcgcggcctttgggctatcaaggccaaacacggtggcgtcttccctcgccatgaccccaagcctaaagcacccgtcgcccccgagaaggctcccaaattttaccccgctgaagacgtcaagaagccgctacttaataagcgcaagcctaaacccaccaagctcagagcaagcattactccagggacggtcttgattttgttggctggaagatttatggggaagagagttgttttcttgaagcaacttacttctgggcttcttttggttactggaccattcaagattaatggtgttcctttacggcgtgtgaaccaatcctatgtcattgctaattccaccaaggttgatatctcaggagttaatgtagagaagtatgatgacaagtactttgccaaggaagtagaaaaaaagagaagggtggaggagagtttttcgaagctgaaaaagagataagaagacattgccagatgagaagaaagagaccagaaagctgttgatgcatctttgataaaa

SEQ ID NO: 1168 - DNA, 620 bp, Gossypium hirsutum
  Clone ID: LIB3825-019-Q1-K6-D2
gtttagaaccttagatatcaacgttatctctgcaaaggcttgaaaaacgtcaacctcatcgataaaatggacgtttacgccgtcgtttcactcaagggtgattcatcgaagcaaaaattgaagacgctggtgcataaagattgtggcaaaaccccgaattggaattttccggtcaagttcaccgtcgatgaatcattggctaaaaacaataagcttagcatcaagttcaagatcatgtgtgaacgtatattcggtgataaagaacttggtgtagtcaacgttccggtcaaagagcttttggattcgccgggcgatggtgggtcaatgaaattcgttagttttcaggtgaggaaaccgtcggggaaacctgaagggacacttgatttttcttacaagtttggggacaaagtttcggagcctgtcggaaagaataagggtgacgatcatcctcatcatcagcctgttactgcgtatccagcggcgtatgtggcggctggatcgagttctgccgttccgtatggtggtccgggggcttatccaccaccaccacaaggtgctgggtatggataccctcctccgccgccgcatgcagtggcgggttgtggtgggtatccaccaca

SEQ ID NO: 1169 - DNA, 608 bp, Gossypium hirsutum
  Clone ID: LIB3825-019-Q1-K6-D3
cggccgcgtgggtgcacattggccctttgctgccataacaagccgaaccccacaactgcaagcgtaacacccccagtctgccccttttgccgcagcaccattgtccgattggcagtagccaagataaaagattgcgacggcgatgttggagaggacggtagttccccgaagtgagaagacggaggaagtcgaggaatttcagcgaggggagcagcagtttcaagagcttatctgcagttggatcatttaacaagatggggaggattgcagcagaaaatgaatggattgataagccttgaaaaaatgggggggcatttttggcagctcagtttgaaacattcaaattgttgaatgtaggatataattaaatcccttatcccaatggaaaaatgcaatgaagaaatgatgagtgaggagtggacccatatggtatatacgatagaaaagttgggtccatttggtaattgcagatttttttaggtgaaaataagcaaaagaaattgcaggtttggggttggtgagtggggtcaatattgttgtaatatttgttttacttgaggttgaagttgtagcattgggtctttagattaaatatttaagacatttct

SEQ ID NO: 1170 - DNA, 300 bp, Gossypium hirsutum
  Clone ID: LIB3825-019-Q1-K6-D5
attaaattttatatcagatttttatggttctaataagtggtatccgaacctcgtcatgttgaatcattgggaattgatttcgccaagttagctcggggcccggaagacgtcggaggcatgatcacactatcaactgaacatttgggtatagctagccttattattttgagtacgacatgtatagggacttgacattttgttatgtgtcatattgatcagccaatgtgttggctcatgatgttattatgatcattttgtatatggccatgagaggtagctcatattaattatttgagttgt

SEQ ID NO: 1171 - DNA, 528 bp, Gossypium hirsutum
  unsure (1)..(528): unsure at all n locations; Clone ID: LIB3825-019-Q1-K6-D6
gaatgggtgggngaaatagttcaactacttctgctggagggtggggtaaccaaggatcaggctcgggagatcaatctcagtcaaaaactgctgatgaagccacatcttctggttggaacaagttaaaggatggaggtgaaaatagcggaaaccaagatccatggggtaaggcatcatcaacaagtacttggggacaagggagtggtggtagcaagggaggatggtaattttaacctttgcttactgaacaaggtttttagtgctgtagatacttctattttgggtctgttctgcagtttctacagtgtagagagccggaatggaacaaggtagtgtttccgggcagactggtagtagtgaagacatttgctgtttagtgtttactagaacagctttatgtttgttaatattcctttccgagttagtaatgctaccatattatgtagggcttcctcattgggcatagtaatgcatagatgttgctcaaaactacatcaactgataatattatgactactgtttcangct

SEQ ID NO: 1172 - DNA, 640 bp, Gossypium hirsutum
  unsure (1)..(640): unsure at all n locations; Clone ID: LIB3825-019-Q1-K6-D8
gtggtgctctccttgaaagcctcagcagagaacgaanatcgaaaattccgtaaatttgccacctgagcaggatgatatccctcttttctattcagacttgatgccactcctcgttaatgatgaaccaagtgttggggaagatgcttttgtatggttgggatcattagttccattagttgcagatatcgttaacggaagattcacattcgaaaccctgaccgcgccaaccggaaaccggctctttttccctgcatatgataagttcctaaaggagattgacaagtaagccttgaaactctgcttgaatgattgcatgaagcatttgcagaaacaagcaacaccaaaaggtgtagagttagctgatgatgaatatatattgcatgtcgaaggaacggctaccacgcgaagagtagtgcgccatattgaaggaacaagttggcccggtaggcttacgttgacaaatcatgctctctactttgaggcctctggagtcttgacatatgatgatgcacttaagatcgatctttcgagggatatagaacatggtgttaaaccagctgccacaggtccatggggtgctccacttttcgacaaagccataatctatgagtcacccgagttccaagaaggagttctgctg

SEQ ID NO: 1173 - DNA, 641 bp, Gossypium hirsutum
  unsure (1)..(641): unsure at all n locations; Clone ID: LIB3825-019-Q1-K6-D9
gtcgaaacctgcctagcagaacgacccgcngacgcgttgcaaacaacaccggaggtggtgcgggtgcatcctcgcctctcgccacccccgtgtctcggagcggccagtctcgtcgtccctttgcccgtcgggtggggtgagatgccgggatcaacctcttcgaggcaaagcgaacaaacccccggcgcgaatcgcgccaaggaatcgaaacgaaagaaggggcacgtcttctgtcgccgcaccgttcgcggtgtcgatgcttcagtgatgttgttctgttgtcgcaaaatatacagaacgactctcggcaacggatatctcggctctcgcatcgatgaagaacgtagcgaaatgcgatacttggtgtgaattgcagaatcccgtgaaccatcgagtctttgaacgcaagttgcgccccaagccattaggccgagggcacgtctgcctgggtgtcacgcatcgtcgcccccatccaaccatgagccctcgagcctcggttggaccgcgggcggaaattggcctcccgtgcgctcacagccagcggttggcctaaattcgagtcctcgacgacatcatcgtcgcgacgatcggtggtaatgctgcaagcaacctcgttcggagtcgtgcgcgtccgtcgatcg

SEQ ID NO: 1174 - DNA, 628 bp, Gossypium hirsutum
  unsure (1)..(628): unsure at all n locations; Clone ID: LIB3825-019-Q1-K6-E1
cttctgccanattggactggagaaagcctgtgtcaataatgggattccaggnaaagaattgctagactctactgtcattactcgccttattgagattttgaagacatcaccatcaaacctgcaaagaaaagtagcttctatcttggaattcataacaataattgaaccaagcatggaaacaataatcaaagtagatgtatcatctggtttggaagctgtttttcaacaaaaagctgtaaaagacaaggaagctgatgtagaaggtcaggaactagacgaatatgctcttgaacttgaggaagctggccttgcagtctctgcagcctcaaggctactaacaaaacttcttgactcggaacagttttgccagaaaatagactctacccatttcaccaaactactccgcaaaatccttaagtccgatatccctcttcgaaacaaagattgggttgccgcttgccttgttaaactgtgctctatatccagtcctaatgtagatttcgagaatccaatcaacatggaggtaactctttatgagacaatcccaagacttatagagcagataaaattgtctctttctccagaaaccaggaatccgccgctgttgaacttaacagaataatttccg

SEQ ID NO: 1175 - DNA, 360 bp, Gossypium hirsutum
  Clone ID: LIB3825-019-Q1-K6-E11
ggaaatataaaagtaattaatgaaccgtcactacgagcttctggagacgtgtgtttgcgggcttagcaaaaatggtcgaaggaagtgttcacgccttggtcctagatcgtaatgacggttcattaattactttgggtaggtaggatgggatgggaaataataaaaagtttggatggaagggtagtcaagagctggatgagacatggaggtgactgactaataatttttaagtaccaacagccatcattcatgtaatatacttgtttgttgcatcattcattgactgactttaactcaatggctcaattttgggggagccataaggttctaagcctgaataattgaacatatgattccatt

SEQ ID NO: 1176 - DNA, 642 bp, Gossypium hirsutum
  unsure (1)..(642): unsure at all n locations; Clone ID: LIB3825-019-Q1-K6-E12
aacactttccatgaccaaaaagcttcattgtctcttcttcgaaacccctggctgctcttaagctagtttgtgctctagtgttgtgcatgttggtggttgagcccattgccacaaccaccataacatgcggcgatgtgacaagcaaagtggccggttgcttatcatacttgcagaacggagggaacgtgccgaaggcttgctgcgacgggatccggtccctgaacaacatggctcgaaccacccctgaccgccaaaccgtgtgtgggtgcttgcaagctgccgctaaggctgtcaaaattaaaggcaacttggctgagaccctcccagccaaatgtagtgtcaacatcccttacaagatcagcacttccactaactgcaaaaatgtgaagtgagatggatgaagagagggttttgcagcagcttgcaggagataaaatatatgattaaaaagaagaagaagaagaagaatgaataaggattttgggatggaattttcaaaatccaaaattagtctccactttagtgtagtgaggctttgtttattttgttttatgttttggtccctgcatgttggctctaattntatatcctctatgtattggctattttaatgttntaatgaattaaagtttatgctttgtc

SEQ ID NO: 1177 - DNA, 611 bp, Gossypium hirsutum
  unsure (1)..(611): unsure at all n locations; Clone ID: LIB3825-019-Q1-K6-E2
cgaaaaccgcctcagtctgggttcctcaaccatcatccttccggagtagattgattgagattcgaaactactctcatcaggtgcaagtcatctcccttttctaaagcttattgcgcaagtttatagacataaacattttctngacctatgaataaacggaaaattaatttcttgaaaacgagatttttttgctttgaatatctcaaataatagccccaataactgatttatctggttttgttgtttggcatttcttgatgattgttcgtgagtcccccatgattgtcgctgagagtatacccattgagattcctaacattatggcctgtaatcctgcatatgcttctgctgcaaatgaagatgaaacgttattattaaggacagttttcaatgctagaatctcacctatcaggccccgaaccaccagactcgaagtcgatttggagttttttttttgtcaaaagctgcatcaaactaaatcatcaccctcgtattctcttcttgttgtctgtggcttctatccatatgtaagattaactataaagcacagcaaaaaagtcagcactatttacaagtacccctcttgaaaacctaggtaagccattctcaaa

SEQ ID NO: 1178 - DNA, 616 bp, Gossypium hirsutum
  Clone ID: LIB3825-019-Q1-K6-E3
cttatcctctcatattttcccacttatttctcctcctcctcgtaatccaacctcctactttcaacttccaatccaatccaatgtcttcctccgtttcttcccaacatgatcatgtcctttccccttctttttcccctttttctgcagtcttgggttttttattattattattttaaattctgtattctaatgtttttcttcactccaaagagttgattttgcatcccgaagatcgtgttttctaggagataacccataaaaccttccctatcctctctctctcattgcttctccatagagcttcaattaactataaaatcaattccaacttcctttattgtctttgtaattgaaataatttcttgttgattttccatttcaattacaaatatgtaaaaattttgtttttttggataatgagaatttctccttgcttcactgcgttaactagctttggtaatatttgggaaggttcacttatatttcttcattacctctgcaggttctagtagaagaaaactccttcgcaagaattcataaccttaaaccggcctaagcagctgaatgccctttcatttcagatgatttctcggttactagaactttttcttgccta

SEQ ID NO: 1179 - DNA, 127 bp, Gossypium hirsutum
  unsure (1)..(127): unsure at all n locations; Clone ID: LIB3825-019-Q1-K6-E4
ttcagacttttcttcactcccgttttcttcanacttttcatatctcgcttccttctcattatctctctctctctttcggtctcatttcaatatnnttccccttccatttnccttttttttttttttt

SEQ ID NO: 1180 - DNA, 628 bp, Gossypium hirsutum
  unsure (1)..(628): unsure at all n locations; Clone ID: LIB3825-019-Q1-K6-E5
atgnaaactcaaagcacaagagctacgggagagggctcgngaaaaggaaagaagaagaggagaggagaatggaacgagaaagggaaaaggagaggattcgagtgggcaaggagttgttggaagcaaaacgtattgaagaagaaaatgaaagaaaacgtttggtggccctgcggaaagctgaaaaagaggaagagaaacgagcacgggaaaagattcgtcagaaattggaggaagataaggcagagagaaggcggaagcttgggctgccaccagaggagccttcagcagcaccgaaaccttctgcacccattgtggaggagaaaaagagcgcattgccagttaggcctgccacaaaggctgaacaaatgcgcgaatgtttgcgatccctcaagcaaaatcacaaggatgatgatgcgaaagtcaagagagcattccagactcttcttacatacataggaaatgtggccaggaatcctgatgaggagaaattcagaaaaattagactcaataatcaaactttccaggatagagttggatctgtaaaaggaggagtggagttcttggagctgtgtgggtttgagaaagttgaaggagaggagttcttgtttctctcaagaaacaggtcgac

SEQ ID NO: 1181 - DNA, 645 bp, Gossypium hirsutum
  unsure (1)..(645): unsure at all n locations; Clone ID: LIB3825-019-Q1-K6-E7
tttcaaagctcanatctccctcttaagctcaaatcaccaaccaattagatggctatgcaggaaggaagtcctgtctttactccaagtactcaagttattggaaatgcttttgtggagcagtattaccatattcttcaccaatctccgaatctagtgcataggttttatcaagattctagtcatttaagtcggccagacatgcatggcaacatgacaacagtgacaaccttgcaagcaattaatgagaaggtactatcactgaattatgaggactatacagcagaaataaaaactgcagatgctgaggactcttttgagaaagggattattttactggtaactggatccttaactgggaaggacaatgtgaaaaagaaattcgcacaaaccttcttcttagctccccaagacaaaggctactttgtcttaaatgatgttttcagatatgttgaagagaaagagttgcagaactctgttccggctaatggcatcagtgaacaggcttccatatctgccttgacaccagaaccagagctcactgatgaccaacttgctaaggaaccgttgacttactcagaagaggaagatattaataatggtactgaagtttgtgatcccttggataangaggaaggatcagtagtt

SEQ ID NO: 1182 - DNA, 641 bp, Gossypium hirsutum
  unsure (1)..(641): unsure at all n locations; Clone ID: LIB3825-019-Q1-K6-E9
gngtttttcttgatttttgcctttaccacaaacttaaaagcttcggtttttattttcactttgaaaaacaaaatggataagattaagactatgatgcgcgctgttcaatacagtaaatatggcggaggagtcgccgatctcaagcaagttgaagttccggttcccagtccaaaaaaagatgaagttttgatcaaagtagagacagctagtattaacccaatcgactggaaactacaggacggggtagctcggccatttttacctcggaaattcccccacattcctggtaccgatgtagctggagaagtcgtacaagttggatcagaagtccagagtttcaaagttggggagaacgttgttgccgtacttggtaatggaggtgcactagctgagtatgctgtcgctaatgaaggttccacagtttcaaggcctccagaggtatcagcccgtgaagcggcggctttgccaattgctggcctcgcagctcaccagtcactcacccagcttgctgggctcaaactcgatggaaccggcccggaagtgaatgtattggttaccgctgcttcaggtggtgtaggtcaatatgccgttcaactcctaaagtttgcaaatgcacacattacagccacttgtggggctcg

SEQ ID NO: 1183 - DNA, 498 bp, Gossypium hirsutum
  unsure (1)..(498): unsure at all n locations; Clone ID: LIB3825-019-Q1-K6-F10
atttcatctgccatcaatttgctctgaagacatgttggctatttttcacaaggcatttgctaatccaccagaggagctgaatgtccagcttctataaattaccaanaacctaaacagcctgaagaaaccctaaatgatttcctatctcatcaccctcacaacactttctccatgagctttggcaacgctgctgttttggcttatgtccgccatgaacgtgctgcttcagttcatcagaggttgttttgtgggtttgatgacatatactgcctcttcttagggagcttgaacaatctatttatgctgaatagacaatatggtctttccaaagggagcaatgaggcgatgtttgtgattgaagcatataggacgctgagggataggggtccataccctgctgatcaggttgttaaggatcttgaaggaagctttgcctttgtgatctatgacagcaagactggaaccgtgtntgctgcactgnggtctgatggtggggtg

SEQ ID NO: 1184 - DNA, 656 bp, Gossypium hirsutum
  unsure (1)..(656): unsure at all n locations; Clone ID: LIB3825-019-Q1-K6-F11
cttctctctccattaatcttcgttgaaagaaatcatctttgctttcacccatgaccactgtttatgacccttcacaccatctcacctccaaaaaattgtgtttcaaggaccttgaaatccctccanaggaaaaagcaactccattgttgccacaaagccgccgccatggaacttccccaccacgaagctaggctccacaaataccttccttccaatgaagacgatgacggcaccgatgatccatacggcaccgaccatttccgtatgtacgagttcaaagtaagaagatgtacaaggagccgtagtcatgactggactgactgtcccttcgctcatcccggagaaaaagcccgccgtcgtgaccctattcggtaccaatactcctccaccatctgttctgaccaccgccgtggcggtggttgccctcgcggcgatgactgtgagttcgctcatggagtgtttgagtgttggctacaccctacacgttacagaaccgaagcttgtaaagatggtaagaattgcaagcgtaaggtttgtttctttgctcactcgtcacgtgagcttcgtctcttgccggaatcaccaccgccattgaagtataaaaaccttgacaacaactataaccattgctgcttgttttgtcggtcggttacata

SEQ ID NO: 1185 - DNA, 628 bp, Gossypium hirsutum
  Clone ID: LIB3825-019-Q1-K6-F2
gataaatctatagaaatccaagaaaaaaatttaaaaaaacccctaattctataaaaagatcgaattaaagtagaatcagaagcaaaaatcgccgaggaaaacaagatgtcggggcagcaagaagaagataagaagcccggcgatcagtccgcggctcacatcaacctcaaagtcaaaggccaggacgggaatgaagttttcttcaggatcaaaagaagcacacaattgaagaagctcatgaatgcatattgcgaccgacaatctgtggatttcaactcgattgccttcttgttcgatggtcgccgcctgcgaggtgagcaaactcctgacgagcttgagatggaggatggtgatgagatcgatgctatgcttcaccaaaccggtggtactgtgtgaagcgagtactactttgccacatttagtatttgatgagttagttatggtctgattatgtagatgtttccaatgtttttatatacgatcttattgccatgttatgaagacttgtggaccttgttttgagtcatcttgctcttatagaagagcttgagtttctagtgtttacaaagtgagatggaactcgggactttgttccgatatgcactcgttttgaaggctgtttagcagt

SEQ ID NO: 1186 - DNA, 575 bp, Gossypium hirsutum
  Clone ID: LIB3825-019-Q1-K6-F3
ggagtgtggtaaaaaggggaatgttgtgcacgcagcgatctcaaccgagagtgttgttctctacttctgtttcttcgtcatgggatttgggccaatcccaaacatactctgtgctgagatcttcccgacacgggttcgtggcatatgcattgctatgtgcgcccttacattctggatttgcgacatcatcgtcacgtattcactcccagtgctgctcaaatcagtcggtttagccggtgttttcgggatgtacgcggtcgtgtgtgttatatcgtgggtgtttgtgttcttaaaagtacccgaaaccaaaggcatgcctctcgaagtcattacggagttcttttctgttggtgcgaagcaagttgcagctgccaagaacaactgagtttggttacatatatttgatggatagtttgaaagttttgacggctgttcaaatttatcttttttttttccttatcattttattgtcaattaggcagttcgatttgtgtagaaagattaaaaaaagaacaaaaaaacaaacatgattttctatttgttacagttttctaaatgacatttaaagttttctt

SEQ ID NO: 1187 - DNA, 633 bp, Gossypium hirsutum
  unsure (1)..(633): unsure at all n locations; Clone ID: LIB3825-019-Q1-K6-F5
cattttcaaaataagggtttttagtaaccaaattgattggccttgggagttacggttacactgcaccatcttccaaaaaaaatcaacgcctacgatgttcctcaaggcgtcgatattcgtggtcgattcgatgaagaattcgctaagattttaacaaaggatgccttacaattcgtcgctgatttgcagagagagttcaggaaccatattaagtacgcgatggaatgtcgcaaagaggcgaaaagacgacacaatgaaggggcgttgcctggtttcgatcctgcaacgaggtatattagagaagggaaatggacttgtgcgccggttccgcctgcggtggctgatcggagggtcgaaattacagggccggtggagaggaagatgatcatcaacgctcttaactcgggagctaaagtgtttatggctgattttgaggatgcactgtcaccaagttgggaaaatcttatgagaggtcaaataaacttaaaggacgcagtggaaggaacaataacgttcaacgacaaagcaaggaacagggtttacaagctgaataatgaaatagcaaggctatttgttcggccacgaggttggcacttaccggaggctcatattttcatcgacggngagcctgca

SEQ ID NO: 1188 - DNA, 645 bp, Gossypium hirsutum
  unsure (1)..(645): unsure at all n locations; Clone ID: LIB3825-019-Q1-K6-F8
gagggccttacttanaagagaaaggaatggtagagagtaactttgataaagaaacagttggatgcatcaggacaactgatactcatagtggaaatcaaggttcaggtcttcgcagggagccctccttctctcgctgggctgatgaagatgggataatccattttgaacacccttccgagagtactgctcctagcgtagaaggttctgattttgagttgcctatgcttaatcagagtgggttagacaacggatttgtagacgggattagatacggtaaatttccagagcagcgtatgcacttaaatggtggaagtgccatggaagatttacatgggaaagatagaaatgggaaatatacaccttttgatgttgaaaatgagtatattggggatggaagatcatcaaatatcagtgttgatggagccaattctactggcagcccaaaagcatctagcaactctatttctactgcagatgtgttgaagacattgttctttatacttgtatggtacactttcagcacatttttgacattgtacaacaaaaccttgttgggagatgagttgngggaagtttcctgctcccttgttgatgaatactatccactttgcatttcaagctttattatcaaatgcaataacgtgg

SEQ ID NO: 1189 - DNA, 647 bp, Gossypium hirsutum
  unsure (1)..(647): unsure at all n locations; Clone ID: LIB3825-019-Q1-K6-G10
tctcacacagcaaacctcaccactcccttgcacttaagctttaataatccataaaaataaataaaacccaccgaaaattttgaagctttagacctgttgctttcgaacaaaccccagaaaaaaatgcaagcttggttctcagggagcagtagtgtaggtgatgggcaggngaaaagaaggatcatcgcttttagctgattggaactcttatgcagctgcaagagaatcagaagatggctctgcgtttgggttcgatcttgagtctgctatgaggtctgccaatgatactgtctctggtaccttcaacgtcgtttcaaaaggtgtgagagatattcccggaaacttccaatccgccacgagtagtgtcccttcaggaaaagcacttctctattttggtttatttctggcaagcgggatcttttttgttttcatctcttttaccatgtttctgccggtcatggtgatcatgccccaaaaatttgcaatatgctttactcttggatgtggctttatcatcgggtcattctttgctctaagaggcccaaagaatcagttagctcacatgtcatcaaaagagaggcttccttttacactgggatttattggaagtatggtgggtaccatatatgtttccatggtgcgtcacc

SEQ ID NO: 1190 - DNA, 655 bp, Gossypium hirsutum
  Clone ID: LIB3825-019-Q1-K6-G11
cttcaattttcattcatctactccctatttttcctcttaacttttcttagaagaacatcacctgcaaaaaaaaaaaaatgcttttctgatatttcaaccaagtcccatctcacaaaccctagtttatcattcatatccttgcccgaaggcaaaacagtgtaaaagaggagcacaaaagtagaaaatcttcctcaatctaatcattagtagccgaatctgctctgtttaaaatggctgggagaaaccgcgttcctcgtgaagccttcaatgaccggcgtggattcccccccgagaggccgttctttcgtggtcctcctctgccacagccacctcatcctgcgttgttggaggaagaacttgaaatgcagcatgctgaaattcgaaagcttttgactgataaccacaggctggtagaagatcgaatggctatacaacaagagcttgtggctgcaaaggaggaaattcatcgtttgaatcttgtcattggtgaaattcgtgcagaacaggaactgcattcaaggggacttattgaaaaaggcttgaaactggaggcagatcttcgtgcaactgagccactgaaaaaagagctatgcaactccgctcagaagttcagaaactgaataacgttaatcaggatctaactggccaggttcaa

SEQ ID NO: 1191 - DNA, 647 bp, Gossypium hirsutum
  unsure (1)..(647): unsure at all n locations; Clone ID: LIB3825-019-Q1-K6-G12
gnaaattcatcatggccggaggaaccgaagcttttcctgatttgggtaaacattgtcaattttcaggttgtcatcaattagattttcttcctttcaaatgccaagcttgtcataaggtgttttgtgtggaacatagatcgtgtaagtctcatgaatgtccggaaccggaacataacagtaggaaggtgattatttgtgaaatctgttctacgtcgatcgaaataacgggcaaagaagatcaagagaagatgatattggagaaacatgagaagtctgggaattgtgatccaaggaagaagaagaaaccaacttgccccgttaaaagatgtaaagaaacgttgacattctctaatagaaccatttgcaagacatgtcgattggaggtttgtttgaaacaccggtttccagctgatcatgcttgcaaacaggcttcttcctccaccactccagcggcagccgctggaggaagctggaacgagaagttcttggtggcttttggtttaaggaatgggaaagattgtggcaagagtgggcgaccttcatcatcgactactccatttttaaaggcctattaggacttttatggtttatgagacactattgtaaatgctaactctttgaatcctctataagattcaatatttacg

SEQ ID NO: 1192 - DNA, 625 bp, Gossypium hirsutum
  Clone ID: LIB3825-019-Q1-K6-G2
cttctcttcgtctttttgctttcacctttttctaaaaagatttttaagtttcagagcaatgacaaggataagtcggacttttggtgatacaatgcaaaaggaagcagttccagctgtctcagctaatgtaatatttgcttcgacttccagtcggtttcccagttacagaattgggtcaaataatcagatcattgatgccaaagaaaatcctaaagttttgtctatgaaggaggttgtggcacgtgagaccgcgttgttgttggagcagcaacaacgcctctcagttcgtgatcttgctagtaaatttgagaaagggttagctgctgctactaagttatctgaagaggctaaactcagagaggctgcttcactggagaaacatgttcttttgaagaagcttagagatgccctggaatctttaaaaggacgtgtggctggaagaaacaaggatgatgtagtggaagctatttccatggtggaagcactagctgttcagctgactcaacgagaaggagagttgattcaagaaaaggcagaagtaaagaaactagcaaatttccttaagcaggcttctcaagatgctaagaaacttgtcgatgaggaaagagcttttgctcgtgctgaa

SEQ ID NO: 1193 - DNA, 632 bp, Gossypium hirsutum
  Clone ID: LIB3825-019-Q1-K6-G3
cggccgcgtgggttcagaagtgaaagaggaaatgctgaagcagcaaagaatccacatggcttgcttttagaagccattcactcggctggttattctggtgcattggcaaatcctcttttagccccagaatctgcagttaatatgttgaacagtacagttttggaggattttgctgcagaaaattttactgcttctcggatggtactggcagcaactggtgtagaacatgaagaattgttatctgttgcagaaccacttctgtcagatcttcccaatattcctcgtgctcgggaaccaaattctgtgtatactgggggagattatcgttgccaggctgattcagggggccaaacacattttgctcttgcatttgaacttcctggtggttggcacaatgagaaggaagctataattttgaccgttcttcagattctaatgggaggaggtggatcattttcagctggcggccctggaaaaggaatgtattcaagattatatctacgtgtcttgaatcagtatccacaagttcagtccttttcggcattcaacagcatttacaaccatactggcttatttggaatacaagctacaactggttctgattttgtaccatctgccattgatgttgctga

SEQ ID NO: 1194 - DNA, 620 bp, Gossypium hirsutum
  Clone ID: LIB3825-019-Q1-K6-G4
ggaagagagaagcaagaaaagaggagaagcagaagggaggcatagtagaaggtatagctcatcttcggagtcttatgattcgtattccattgataggagcaaacggaggaagagttgaaggcattgacatcttgcgtgttcgttgctggacgccggtgattgacccttcggaaataactccgtatatgtcttctttcctttttccgatgtttataagttacaatagttcccagtagttgtggaatccctttatgaaatcattgtagcttgaacatgtgtctctggatttttcgagttcccggcaagcttatcttctctttgaacttatgattttacgagtttccagctataattcttttttggaacaatttgaataaaaaattcatccttgacaaacgagagattttgttgaatgcatggatcgaagttcaataagaaatgaatccgaagttcagctcagttgatcagttgattatgcaatgtttgattcactgtactcgaacatgctggccaaggctccctgaatgttgttacctcggaaagttagaaagcagatgaccatcaggaggaggtttgcgatattggccaataacgcctgtacttattttctccaaatcgac

SEQ ID NO: 1195 - DNA, 633 bp, Gossypium hirsutum
  Clone ID: LIB3825-019-Q1-K6-G5
atttgtctggtctgcattcatcagaagaggttcaaggaatgatgacaagaaaatggtatcagatgacaaatctggtgcatatactccgcctatcattttcaagcatccaactcatcttgtgaccccatctgagatattgatggctgcaacatcttctgaaactactaatgtcaatgagggaaagagtgaaggcgaggtgcacattcaggatgtggttgtcaataatgatgcacgcaatgctgagttggaggtaaaagtggtgggtgaagcaagatcatctcagaacaatgaatttggttcccatggagactcccaaaatcgaaatttggaaaatagagagaaattcttttgctcccaggcttcagatcttggtattcagatgtcgagggagagcagtgcgatatccagggatgcttacgttgttgatgaatctcagcaagcggatggtgttggtgcatcagggtcgtatgtgaagcctaatattgctgaggaagaaatcaatgattccagaaaggatctttctggaaagggtttggaatcagccataccttctacatatcaacaatcaccaacatcaggtgcaaaagggaagaagcataaagggaaaggttctcaggcatctgctcacacttc

SEQ ID NO: 1196 - DNA, 641 bp, Gossypium hirsutum
  unsure (1)..(641): unsure at all n locations; Clone ID: LIB3825-019-Q1-K6-G6
cattggtcccaaatgaaacatcangnnataagccacnntttctttcgaaacccaccatgattggcacagttcgagtttacaatcactcaccgattccccacccgagtcacttctttattcatatactgaagcttttaatggcttcgctgcttctcttaatgaagaacaagctgagtctcttagcaaatcggaatcgattctgggtgtttatgaagatacagtttacactctccatactactcgttcacctcaattcctcggccttgacgccgatttggggctttgggccaccggcggtagtacccaggcttctgaggatgttattatcggggttcttgataccggagtttggccggaatctaagagttttgacgattcgggcatgccggagattccttctaagtggcggggtgaatgtgagtcgggtcctgattttggtcctaagttttgtaacaagaaactcatcggtgctcggagcttttcgaaaggttaccgtatggccatcggcggtgggattaataaaaaacccaaagagatcgattccccacgtgataaagatggtcatgggactcacacggccagcaccgccgcaggctctcacgtggctaacgctagccttttagggtacgccagtgggattg

SEQ ID NO: 1197 - DNA, 637 bp, Gossypium hirsutum
  Clone ID: LIB3825-019-Q1-K6-G7
cggccgcgtgggcggacgcgtgggcggacgcgtgggtgcaattgcagcagagaagcattagataccccaaatctttggcttattctacatattcaccctttaattttcttaacttttcaatttagtccaacatgcttttaaggagcgcatcgatgccgttacttaattcatgggtcccacactcgaaggagccgtcgccggagctcgatttgttgcacctgattggccgaacccgatccgtttcgttcaggattttgtgttcgagctcgacctcgagctcgagctcgatttctgttgggtcgggcgatgactcgagcaggaggatgacgagggcggtgtcggagacggatctgagggagatggtggtccctaagatgagagaagttaagcgaaacaatgggatcttgaatacgatctttgttgaggaagaagaggaggtggagagagaagaagctggatttcagtggcggagaacggcgtcgctcgcggtggaggaagagtgtgaaattggcggggctgatggtggtggtagatcggacagtggtgatgataacgaatggagctcgtgggattcgaataacggaaacgatagtaccgagttgtattatcagaaaatgatcgaggctaatcctggaaa

SEQ ID NO: 1198 - DNA, 646 bp, Gossypium hirsutum
  Clone ID: LIB3825-019-Q1-K6-G8
gtcacgttatccatctccggaaagagaagaaaaaagaacactgtgagcaaaggagcggagaaaagctgtgaaatatcccgggggggagggtcatggcgtcctctaaggtgataacgacaacgtcacagaccaatcctgatctgccacgtcagccatctctatgcccttcgctctccactctcctcgccgatcttcagaaccaacaaaacaatcaaaaccaatcccagaacggccttggttccatgaacatggacgatctgttgaaaaacatctgctcctccccacctccaccgccacctacttccgatgcacacccgcagtttgccggcgtgtccatctcacgcgaaggtagtttctcgctcccgaaggatgtggcgaacaagtccgtcgacgaggtttggaaggacatcgtggtcggtggcgacgatcagagacaggggaatccaccggtaggtatgactttggaggatttcttgacgaaagctggggcggttagggaagaggatgtcaggggagttgctaatcaggtgggagtaggtgcaggggtttatcctgttgacccggccgttatcaacggtggtggaaatcatttttcggctttcggaaacagcggtggcgttgatcatcagaggttggtggcggtggc

SEQ ID NO: 1199 - DNA, 642 bp, Gossypium hirsutum
  Clone ID: LIB3825-019-Q1-K6-G9
atagtagagcaactacaattaaagaagtgactcctatttgttatttggttccatttgttctgacttgaatcttgcagttttgctgacaattggtctaatgtgttgacaggaaggagtggagttgtctttgctgttaagttataccctgctggtgccaccacaaattctcaagatggtgttacagatctgtttgggaaatgtctaccagttcttgaagagatggttgaggaaaacatgccgttactggttcacggtgaggtcacagatcctgatgttgatgtttttgatcgtgagaaagtgttcattgacactgttttgcaacctttaattcaaaggcttccaagactaaaggttgtgatggaacatatcaccactatggatgctgttagatttgttgagtccggtgaagaaggtaaacttaagtgccttttgggaagaaatttggttcttcatttattgtgttagtggtagaatcgtttatgtccttttggatttcttccttgtttctcattagctctcaagtttttgttttccactgtaggatttttggctgcaactgtcacaccacaacatcttattctcaatagaaatgctctcttccaaggggattgcagccgcataattactgccttccagtactca

SEQ ID NO: 1200 - DNA, 610 bp, Gossypium hirsutum
  Clone ID: LIB3825-019-Q1-K6-H1
cttttcttttctctcttcttccccaagtgaagatcaaagctttgtcgccgccatgccgcaaggtgattacatagagctacacaggaagaggcatggttaccgccatgacttcttcgagaagaagcgcaagaaggaagctcgtcaagtacacgagcgttcagctaaggctcaaaaggcgctgggtattaagggtaagatgattgcgaagaaaaatatgctgaaaagccctcatgaaaaaaacattggctatgcatgaggaatcatcaactaggcgtaaggttgatgacgaagtccaagatggagctattcctgcctatcttatggatcgtgaaaataccacacgtgctaaggttcttagcaataccataaagcaaaagaggaaagagaaagccggaaaatgggaggtccctattcccaaggtcaggccggtcgcagaagatgagatgtttaaggtgctcagaactggtaaaagaaaaacaaagcaatggaagagaatggttacaaagtgcacatttgtaggacctggttttacaagaaagcctccaaaatatgagcgtttcatccgtccttcaggattgcgatttactaaagctgatgttacacatcctga

SEQ ID NO: 1201 - DNA, 639 bp, Gossypium hirsutum
  Clone ID: LIB3825-019-Q1-K6-H11
acgctccccactttctccctctgttccttccatattcctcttttccaatttttctgcctcttttttctgctttctttttctttctctcaatagagtttttcttttcctctcttccatttcttgtttttgatctataaaatttcatctattgctggaaagagcaagagggttcttagagggggaattgaaatctaaatcgaaaactaaaaatgttgagggtaaaatgagtgataaactgggcacgagcttcgatttcaaattgtcaatacctcctaagtcatgacccaaagatttccccttcacctcctcaacatttcgcttcaaaatcatccattcgcttcgtcgatatttacaagcttgcaagcaaggaacaagtcgagaaagaacgagcatgactggcagtgctgatgaattgaatagaggatattttggtgatatgtctgagctaaaacaacgcggtggggatgagcgatctgctatcttcaattttgtttgtgatgaaggatgagtcagaatcattttggtgttttgtggcactaatagaatgctttgggcccaattttaatcgtgattaaaacggcatgcattttcagctttttgcattatctaagctggtggtgttgctaaatagacctctgc

SEQ ID NO: 1202 - DNA, 655 bp, Gossypium hirsutum
  unsure (1)..(655): unsure at all n locations; Clone ID: LIB3825-019-Q1-K6-H12
gaccttagcaagcatctccactcaagnaacgttcatagttgtccctcacggtgctcgtagcagtgagagaagtggggatggcgatggagggagaaaagaagaaaaaatcatctccaatttctcttcaacaattcatctccaatatcacccctttaattgatttggaaaaggaagctgagatatcagcttcaataagttcaggagcaacaagaaatttggatactgctcaaaagaggggctccacgattctaaatttgaagtgtgttcacgctcagacagggcttatggggaaaactctacttgagttccaatcgaccaaaggagatgttcttcctgctcacaagtttggaacccatgatgtagttgtcctaaaaccaaacaaggctgatttaggttctcctgctcttggacaaggtgtagtttaccagttgaaggattcctcaatcacagttgcttttgatgatgtacctgaagatggtttaaataatcctttgcgtctagaaaaagtggcaaatgaggtgacatatcgtaggatgaaggatgccctgatacaactgagtaaaggtgtgctgaagggtccagctgcagatcaagttcctgtactgtttggagagagacagccaacagtctcaaagaaggcactgtcacattcacc

SEQ ID NO: 1203 - DNA, 622 bp, Gossypium hirsutum
  unsure (1)..(622): unsure at all n locations; Clone ID: LIB3825-019-Q1-K6-H3
ctctcccccttataaacccagtcttttcctttcctttttttctctctgtttctcaccctttttcatacaggngaaaagaagaaagaagctttgtttggcaaaagagaaataatctaaaacgatggtgggaaaagaagatctgggtttgagtctcagtttgggttttcctcagaatcgccactccttgcagctgaatctaaggccttctttgattccttcctccgttgattcttgctcttcggtcccttctgggtttacagccattcacaaatcattatggaacgatgtttctgctccttcagatcctaacgcagaatctttccgaggcgagactagatcatttcttagaggaatcgacgtgaacagattgccatctacggtcgattgcgaagaagcagctggagtttcatctccgaacagcacgatatcgagtgtgagtgggaaaaggagcgaaagggaaggcactaatggagatgagcttgatattgaaagagcttgttctcgtggcatcagtgatgaggaagatggtgacgcttcgagaaaaaaacttaggctttcgaaggatcagtctgctattcttgaagaaagctttaaagaaaacaacacttctgaacccaaaaca

SEQ ID NO: 1204 - DNA, 602 bp, Gossypium hirsutum
  Clone ID: LIB3825-019-Q1-K6-H4
ccccgcgtccgattttgtgagtgttaaacattgtttgcctttcatttctttctctattccttgttgcttcctcggcagcctctcggtttctgagtaatcgaagaaaaaaggatggggctgtcttttgctaagctgtttagtcgactgtttgccaagaaagagatgcgaattcttatggtgggtcttgatgctgctggtaagactaccattttgtacaagctcaagctcggtgagattgtcactaccattcccaccattggctttaatgtggagaccgtagaatataagaacattagcttcactgtttgggatgttggtggtcaggacaagattcgacctttgtggaggcactatttccaaaacactcaggggctaatctttgttgttgatagcaatgaccgtgaccgtgtggttgaggccagggatgagcttcatcgtatgctaaatgaggacgagctgagggatgctgtgcttcttgtgtttgcaaacaagcaagatctgccgaatgctatgaatgctgctgagattactgataagcttggccttcactcccttcgtcagcgccactggtatatccagagtacttgtgccacctctggcga

SEQ ID NO: 1205 - DNA, 635 bp, Gossypium hirsutum
  Clone ID: LIB3825-019-Q1-K6-H6
atcagttcctgagaacacaaacgctgtgtttgagccctcaagcatgatggcgaagtgcgatcctaggcatgggaagtacatggcatgctgcctgatgtatcgaggagatgttgtgcctaaggatgttaatgctgctgttgctactattaaaacaaagaggactgtgcagtttgttgactggtgcccaactggtttcaaatgcggtattaactatcagcccccaactgttgtacctggaggagatcttgctaaggtgcagcgagctgtttgcatgataagcaataatacagcagtggctgaggtgtttgcacgcattgaccacaagtttgatctcatgtactcaaagagagcttttgtgcattggtatgttggcgaaggcatggaagaaggtgaattctcagaagcccgtgaggatctggctgctcttgagaaggattatgaagaagttggtgctgaaggtggagatgctgaagaggaaggtgaagaatattgatgtgcttatgcaaaatcatctattttgaagatcggttcaccgtgtgagggtatgcccaccctcttttcctatatccttcctatcgttctttatttgtgaggtttgcgaaattatgcatgtaataggcctaggatcttttcat

SEQ ID NO: 1206 - DNA, 632 bp, Gossypium hirsutum
  unsure (1)..(632): unsure at all n locations; Clone ID: LIB3825-019-Q1-K6-H7
tccgcggccgcgtgggngaataagatcatgaagtcaaatccagctttatatgtcttaagggagaggataaggaaaggtttgcagttatattcttctgagcctactgagccgtatctgtcatcccagaactatggggagatcttcagcaaccagatcatttggtttgttgatgacaccaatgtgtatcgtgtgacaatacataagacatttgaagggaatctcacgacaaaacccattaatggtgccatctttattttcaatccacggactggacagttgttcctaaaggtaattcacactagtgtctgggcaggtcaaaagcgtcttggtcagcttgccaaatggaaaactgctgaagaagttgctgctcttgtgcggtctttgcctgttgaagaacaaccaaagcagatcattgttacacgaaagggaatgcttgatcctttggaggttcacttactggatttccctaacatagttatcaagggaagtgagctgcaactcccattccaggcttgcttgaaaattgagaaatttggtgatctaattctgaaagctacagagccacaaatggttttgttcaacatctatgatgactggttgaagagtatctcatcatacactgcgttctcccg

SEQ ID NO: 1207 - DNA, 639 bp, Gossypium hirsutum
  Clone ID: LIB3825-019-Q1-K6-H8
cggacgcgtgggcggacgcgtgggtgaatgtcggtgctacaactcataatttctcaagaactgtgctgaagtagctgaaagatctaagaaaggttttttttggtttaaactggactgatccgggatggcagagcggggtgtctgccggcaagttaaattcctaaattctcaaggagatagcactgccaaatcgttgcctggaaaaattgaggaagaatatgatgaagatgataaaaagcatgtgaaaactatgttgatttcatgcccagaagtacggaagagaaaatgcctttcctccaaccaactgagaaaagaaaaagctgcaagatgtgggaaacaaagcttaagtaatggtcctaacaagggcaagcaaaacaaacataaaaatactgtagagagatggtctgctgaaaggtataatctagctgaagaaagcatgttagagatcatgaaggctgaaggggctgtgtttgagaatccaatatctcggcctgctttgagaatggcagcccgtaaacttattggtgatactgggctattggaccatctgctgaagcacattgatggaaaggtggcacctggaggtactgataggtttcggcgttgttacaataccagtggagtgatggagtattggct

SEQ ID NO: 1208 - DNA, 648 bp, Gossypium hirsutum
  unsure (1)..(648): unsure at all n locations; Clone ID: LIB3825-019-Q1-K6-H9
cggacgcgtgggcggacgcgtgggcggacgcgtgggcggacgcgtggngaaaaattctgaagatggattaaagaagactgaaatactcaaacagataactgagacaaaaggcatagaatccacttggatggcagcattgatttgattggaacacttttatatggaccagcaaaaggctctgcctttctcaaatctgtaagggaaactggtttgccccttgttgatgactggcaatgcttgaaatccgtggtccgcttgttcgaaacgcactgtgggtcattgacacaatacggcatgaaacacatgcgtgcgttcgccaacatttgcaatagtggtgtttcccaagccttaatgaaggaagcttgtactgctgcatgcaacggccatggtccgattcaatggtatccttcaaatcaaggctatagtgcttgattgcatttactaccattacatttgaatctttccaaagctagtcatatatgtttgtttctttctgccagtcgcatctctatctagcatacttataggattgtaattgcatagcagcagtttgtatattaagcttatgcataaatagtttttaaggtaaacggatggaaagtggcgtcttcaacattgcaagtaatatttgcatgcacataaattcaa

SEQ ID NO: 1209 - DNA, 604 bp, Gossypium hirsutum
  Clone ID: LIB3825-020-Q1-K6-A1
gtccttcacttcagctcaaagaccaagttggctgcagagtatagagagcccctgttaaagaagaagcactataagaactgccctggatgtaaggttgatgaaatgaaggaattggagcaaggcctcccaattcggccactgctttccatatggattattgttttatgcactgctctgccgatatcatctctctttcctttcctatacttcatgataagggactttcatattgctgaaagagaggaagatattggctcctatgctggttatgtgggatctgcatttatgcttggaagagctttaacatccgtatcatggggaatatttgccgatcgttatggtcgaaagcctgtaataattatgggaactacttcagtggttattttcaacaccctttttggccttagtgtaaatttttggatggctgtaattacaagatttcttcttggaagtttgaatggcttacttggaccaataaaggcatatgcagtcgaaatttttcgagacgaataccaagcattaggcctatcaaccgttagcacagcttggggcataggattgatcattggccctgctctgggaggttttctagctcagccagctg

SEQ ID NO: 1210 - DNA, 638 bp, Gossypium hirsutum
  Clone ID: LIB3825-020-Q1-K6-A10
atttactagcaatttcttcaagttcttttctttgtttttttagtcaatggctgaccaccacctccaaaacactcaaccaatgactcaccaaatggtgaaagccgctactgcaacagccggtggttccctcctcattctctccggtttaatcctagctggcaccgttattgcactcactatagccactccactcttcgttattttcagtccagttcttgtccctgctctcattgcaacagctctcctagcaacgggtttcgtcgcctccggcggtttcggtgttgcagccgccacggttctgtcctggatttacaggtatgtgacggggaggcacccaccggcggcggatcagttggatagtgcggggatgaaattggctagcaaggcacgggagatgaaagatagggcggcacagctcaccggtgcggcggcttcttaaattagttctctactgcatgcttttgtaatggagctgtgcaaaagttcaggatcaagtggccattaaaccgatccttaatgatgttgttgttatgttgttgatgatgaaaagatgtttttttctaaatttaaaagcagcattagaaacttcggggggatgatgtggctgtctgtttatgttaaaaactcccatgtaattg

SEQ ID NO: 1211 - DNA, 637 bp, Gossypium hirsutum
  unsure (1)..(637): unsure at all n locations; Clone ID: LIB3825-020-Q1-K6-A12
agttgttgaagaaatgaaagctgccatgcaaaactcaactgaatatgccagcaacagtttggctatagttgccagaatcttaggtttattgactgatttaaatattcgtattcataggaggttgcttgggttagagaaagcatgttcggagttcccggcttgggttagtcccactgaaaggagactattgcaggaatccaagcctacccccaatgttattgtggctcaagatggttctgggaatgtcttgaccattaatgatgcggtgaaattggtaggaaaaaagaatgaatcaaggttcgttatatatgtgaaggaaggcaagtatgttgagaatgtgattcttgataaacacatgtggaatgtgatgatttacggtgatggcaaaacaaagactttaatttccggcagccacaactttgttgatggaactcccacatttgctacagctactttcgatacaacaagggaagagaataaggcggagcaaggaggaggtcaaggtagggtaatggaagccagttcacctgaagaggtcgagagttaagacaaggagagactgatctcaaanacaagtgctcagagtaattttaaggtgccaaaaggtcaatcccctattcattgttttctagggtat

SEQ ID NO: 1212 - DNA, 616 bp, Gossypium hirsutum
  Clone ID: LIB3825-020-Q1-K6-A2
agcagccaataatggcatctgtgttatgggggaaataaaaaactatagcaccggggtctagtgcagcagaaccatctctatctatgccactcgatctcccaggttttgatgtcattaaccctgtactgcatgatgaaacaaaagtaattctgatcaaaagaatcaggtaaaattgcaaaatgcaacgcagctcaaaccattgcctccacctccccccccctgcacaatggcgggttttaaaaccttgcttcaacgaggcagaagaaagacaacatgctttatcagagtcactgagacatgagcttgatctgaaacttcttagttcttttgtctctcagaagcctgagccacctttagttaatcaacaggaaataaatgataaggcaaatgcattgaaaccagagaagaaggtggacgaagagaaaaataatggacaggaaggggtaagcctgctcagtggtggcggagggatggatgaaaaggaagatttcttgcatcagatcagaactaaatctttcaacctaagacccacagccactgcaagaccaactgttatttctggtcccactgcaaatgtccaggtcactgcaattttgcagaaagcaaatgcaattcg

SEQ ID NO: 1213 - DNA, 618 bp, Gossypium hirsutum
  Clone ID: LIB3825-020-Q1-K6-A3
gcggtaaatttggatcaggaaaccagggattaaatgtgcctcaaacaattacatgtaacataatgtccctagaaacattgaaatccttgaccaccatgtcgtcgcataaaggtgatgttgagcagccaaaaccgattgagcaagatcttgaacttgggttggcaggcagagggagttccttggttctggctggccttcatgcttgtggagatctctcagtaacaatgctcaagtctaaatatgcttgacccttttagagtgtgaagaagttagagcagttattagcattggctgttgctacaacttactatctgaagaagggtttacaaatgctcaaattcaatatggttttccaatgagttgtggtgtaaaaagtgtttacttatctcttggaaaaagttctcgcgatcttgcttgtcagagtgctgaaaggtggaaaagtttaggaaaggatgccggtctccacaattttgagctgcatgctttccgtgctgcttttcaaatggttttgcataaatatttccctgaagttggaacaagtccttcaattgggcgccaagggaaggctttgcgccgtaagcagcaaaggaagataattgagtctgaactgcaagctga

SEQ ID NO: 1214 - DNA, 618 bp, Gossypium hirsutum
  Clone ID: LIB3825-020-Q1-K6-A4
gttcttcaaaaagtactattctgaccttgctggacctcgatattttgccaagtacaagactctcatctatcttgccggctctgcatctgctgaggtaattgctgatgttgcactttgtccctttgaggcagtcaaggtcagggttcaaacccagcctgggtttgctaggggtctgtctgatggtcttcccaagtttgtcagatcagaaggtgctgttggattgtacaagggtattgttcctctttggggccgacagattccatataccatgatgaaatttgcttcttttgaaactattgttgagatgatctacaagtatggtattcccactcccaaggagcagtgcagcaaaagtctgcagcttggtgttagttttgctggtggttatgtcgctggtgtcttctgtgctattgtttcgcatcctgctgacaaccttgtctccttccttaacaatgccaaaggagcaactgttggggatgctgtgaagaagcttggattatggggtctgtttacccgtggtcttcccctccgtattgtgatgattggaactctaactggagctcagtggggtatctatgatgctttcaaagtgtttgtggggctgccaactactggtgg

SEQ ID NO: 1215 - DNA, 620 bp, Gossypium hirsutum
  Clone ID: LIB3825-020-Q1-K6-A5
gaaacctggttcaatcagccagcaagaaggctagaagaagattggcaaaagaaggcggtaaggatctttccaagaccaacttctggacctcttcgcccaatcgtccatggccaaactttgaagtacaacatgaagttgagagctggcaagggtttcactcttgaagagcttaaggctgctggtatttcaaagaaacttgcacctaccattggtattgcagtcgatcaccgtcgtaagaacaagtcccttgaaggtcttcaagccaatgttcagaggcttaaaacttacaaggccaaacttgttgtcttcccaagacgagctcgcaagtttaaggctggtgattcaattgctgaggagcttgcaactgcaacccaagtccagggatcatacatgcctatttctcgtgagaagccttccgtggagcttgtgaaggtcacagaggagatgaagtcattcaaggcctataacaagcttcgtgtggaacgtacaaatgaacgacacattggtgcccgattgaagaaagctgctgaggctgagaaggaagacaagaagtaaggttgctttctttgaggactatgttttggtatttgacttgttaaagacattagtttttgtttttg

SEQ ID NO: 1216 - DNA, 624 bp, Gossypium hirsutum
  unsure (1)..(624): unsure at all n locations; Clone ID: LIB3825-020-Q1-K6-A6
gtttacactccgaanaactcaatgaggataccacagactctagaacagctgttcgtaattactggtcactgctgtcacccctaatattctcggatcatccaaagagacctggtgacgaggatccttctccaccttataacatgctcagaaatgttctagatatgaatgctcgttatggtggtttaaatgctgcattactggaagcagggaagtctgtctgggttatgaatgtagtctcaacaagtggacctaactaccttcccctcattcttgacaggggctatgttggtgtattacatgattggtgtgaagcatttccaacatatcctagaacttatgacatggtccacgcagatggacttctatcccttgagactagtcaacatcggagatgcaccatgcttgatctattcactgagatagatcggttgcttcgtcctgagggttggatactaatccgtgacgccgctcctcttgttgaatcagccagagctctaacgacacggttgaagtgggatgccagaatcatagaaattgaaagtaacagcgatgagaggctcctcatttgtcagaaaccttttcttcaagaagcaagcaatgtgagaacaatttctccattaaacc

SEQ ID NO: 1217 - DNA, 630 bp, Gossypium hirsutum
  unsure (1)..(630): unsure at all n locations; Clone ID: LIB3825-020-Q1-K6-A7
ggnaaagttacttgcagcaagatgtcgttttaccaggagttgctttagctttgttgtttttcactgttctaagtttcgggacattgatgacagcagccttggaatggcaaggcatacctgcatttgtaatcggcatagcacgtggaattagtgcttcaattggaatagctgcgactatagtgtaccctatgcttcaatctcatatttctacgctcagaaccggactatggtcagtctggtctcagtggatatgtctgctggtaagtgtggcttccatatgggtcaaaaatagccatttatcagcatatatgctgatggctggagttgctacatctcggctcggtttgtggatgttcgacctatccatcatccaacaaatgcaggatgctgttcctgaatcggatcgttgcattgtgggaggagttcaaaactcacttcaagctacctttgatttgatggcttatgtcatgggaatagtaatctctaatccacagcatttctggaagttgaacttggtatccttttgggcggtgacaatggcttcatttctctacacatgccatctataccggattcggaagcacctttttcactttgagaagctgtcgtccttactcattagttctgctc

SEQ ID NO: 1218 - DNA, 550 bp, Gossypium hirsutum
  Clone ID: LIB3825-020-Q1-K6-A8
gggaagcttggactgctaaggggggcaaaagcacaccaggccaacaatgaaacctacgtgtgcctaaattcaaaaataaagacatggtgaagatgagaggagaaagtaggacaggcctgtattgttacgtattgatctaaagaagttgcaagactttgaaaagatgcgtaatgaaatcaatatgcgtgccacacttggatactatcaacgggaaccagcgtagctacaccaaaagctgcatatgtgactagtaagcactaaaagccttatggacctcagatatgaaagaaaagggaactctagaaccatctgcaggataaaatagatgagaaagtgaacgaattactagagacacatatgaccttggctgaggaaaatgacagataaccgcacagtattaatcatttatgaaaggctgctgagagagagatagatgagctgaaacacaagatacttaatatctaaaaagaatggaacatgtaatgctaactagagtcatcttgatcgacaacacatagagctacgaaaagacattgatgaccatgcatat

SEQ ID NO: 1219 - DNA, 633 bp, Gossypium hirsutum
  Clone ID: LIB3825-020-Q1-K6-A9
attaaacttgatgacactaaaggtgaactggcgaatttagttgctgttgactcccctcgagtagaacatgaaccatgcagattatccccagaagcctctcctaggagccatatgacagttccggaatcccaaggaacgccttctagtcaagtatctataaaaagtaaaaagaagaaaactgaaaagagtggtcaaaagcgcaagtctttttctactgctaagggttctccaactgcggatcgtaatagtggtgccaaaagtagtacggaacaaccatccaaagatcaaagaagcgggaagagacacaattcttttggttcaacaaaacctgataacatcgatgaggaaccaagagatagtaacagtagcaattctcttccccgtttcatgcaagccacggaatctgcaagagctaaagttaatgctaataactcaccgagatcaagtcccgacgtgcaaaatggagatctttatatcaaaaagagacattccttacccggtgctaatgggaagcagcattctccaagaatccaaccatcgtcgggtgcaaaaggaaatgatagaaaatggcaaaggtgaaggcttgtatgcgaagcaaccttattaacatgttatcatggtaatcgacatttc

SEQ ID NO: 1220 - DNA, 622 bp, Gossypium hirsutum
  unsure (1)..(622): unsure at all n locations; Clone ID: LIB3825-020-Q1-K6-B1
ctctttctttccttttgccattttctgtgngagagttgcagagattttgagtctctctctttttatattgtgaagctgggaattcattaaaagaaaaacccataaattccatagatagaccatattcagaatctctttctcatcaattatggtattttaactataattatatcacctttactttccctttagttgattcgcagtgatgaagatgatcataaagcacgtgcacactcgtattaacatcaaaccaggatccacttgatcatcccaatatcatcatttaattagttcccgttgcagctataatttatcagacaagcaagttcttaaatgggttgattcaaagtttgatgattgattgtgaagaataagtgaagtgaaagcacagaaaataacagcaaacacaacagaaacagcatccgatggcgacgtactttcatgggaaccctgaaatccaagcacctgatggtcttcaaaccctcgtactcatgaaccctgcttatgttcagtactccgacaccactccgccgccgcagccaaacaacctcgtttttcacgctccaccacctccccaaactcaacaatttgtcggtgtcccacttacggctacttccaccgc

SEQ ID NO: 1221 - DNA, 354 bp, Gossypium hirsutum
  unsure (1)..(354): unsure at all n locations; Clone ID: LIB3825-020-Q1-K6-B11
gnaagagaagnacagtcgatacttccggttcattactcggataactatttttcattagtaccaggtgaagagatgtcaattaagatatcattcaaggtccctccaggtgtgtctccaagagtaacacttagaggctggaattaccatcatggagtgcacactgttctttaacttgattgaatgattctgattactcggtatctcatatttggtgaaagaaacccatttccgatttggtatatcaaaaattatttttcaagttgtgttatttttcgcatttatttcatattgatgcactaatctctgtattattctacagcatttaaatatgattacacaaatctggagtttatt

SEQ ID NO: 1222 - DNA, 641 bp, Gossypium hirsutum
  unsure (1)..(641): unsure at all n locations; Clone ID: LIB3825-020-Q1-K6-B12
ttttccatcatcctttcatcttctccatccttccaagtcatcccaaaccctcaaatcagtttcttcaaactctatttctcgacaacccaaatctcccaccattaaactaccctctcacaaccctctctcgatccttcaaaactcccctattttacaaactgtagccaaaacccatgtttcttttaccttatttaacctctttacttctttcccttgtcttgccgtcgctgacacagttatatcctctcccgagcctggcaaagtaaaccttgaagcagtgttggtctcggttgatgaattttttaacaagaatccattttttgttgctggatgcactttcatttggcttgttgttgtgcctttaactaaacagtacttgagtaaatgtaagttcatacccgccattgatgcatttaggaaactccgtgatgacccaagtgcgcagcttttggatattagagagaacaagactctggcttctttggcctccccaaatttgagtttcctcaacaaggacacggttcaacttcagtttactgctgaaaagaagatgggttcgtgaaggaagtcctggagaagtttccaaaccctgcaaatactgttantttgtgttcttgacaattttgatgggaattccttga

SEQ ID NO: 1223 - DNA, 611 bp, Gossypium hirsutum
  Clone ID: LIB3825-020-Q1-K6-B2
cgcggttgctaattctgctgaaaaagaaacaacctcagcgcgatttgccaataagaatcttgggaagtctgcttgtatgtgttgttatatacgtgggcgtttgcttgcgagatcaccgagatggtacacatacaacctccttggcgaagatgctcctttatctgaagcgtttacatccaagggtttgaagtatgtttctattttgatcagtattggagctgttgctgggcttacaacaacccttctaggtggtctatatgtgcagtctcgcttatatcttgggcttggaagggacggtttactgccttcaatattcgctaaagtgcatcctatacgccacacacctattcattctcaaatctgggtcggtatcgttgctgctgttttgggagggctgtttaacgtgcatatcctatcacacattctttcagatggctcactgaccggctattctgttgttgcagcctgtgttgtaacgcttcgctggaaaaaaacaccggcaatcgagtttcttcaaagtgcatctcaacctggagtgaaggtgtcctatgtattttcctagtggcatgctgaggttttgctgctggagttctttatcgttttggcactca

SEQ ID NO: 1224 - DNA, 288 bp, Gossypium hirsutum
  Clone ID: LIB3825-020-Q1-K6-B3
ctctatatcagagcggagcggctcatagtaccaatccaaccttcgcgtccctgccatgcgatgtcttatctcttgtgtaacgtaacctaaattcacatggacggggcgtcacaacacaacgactggactggcaaagccgtgacctaacccaaccgacttgcatagcatcacattttcgtcagctgaggtggtataaaagagaacaggaccgatcggattgcccttcacaacagcagcccaaacggaaagtggaacgcgacgtgcactggagcattacactcagcgcga

SEQ ID NO: 1225 - DNA, 630 bp, Gossypium hirsutum
  Clone ID: LIB3825-020-Q1-K6-B4
acgtctcaaagtatctaagtgaaaacaaaagctatccattgaatttcaaattacctaaatcaatggctagcaataatggtggtggtgaacagcagtcgaagaaacggcggaattgggcaaacccttaaaagaaggagaaagaattctagagccaagtcgaagacccgatggtacccatcgaaaacccgttcggattcgggccgggtatgttcctcaagaggaagtcgccatttaccagtccaaaggtgccctgtggaaaaaggagatggcttcacaagtagggcctccaggttacgatccacctacagatacaaaactgaaaaccaagtcagcaaaaagaaacgaacgaaagaaagagaaacgggtacaggctgctcttgaaaagggtaagaactcggaagcagtggccgataatgagattaaaggagacggtttaactgaggaagatttagatcatggatcggaatctaatgacagatcttgctgtttctcaaatcctgtttcaacctctcctctctcaaactcagtggatgcctcggatgctgtgacaccagctcaagatctcgataaaaaaatccgggcacttaaaaagaagaccggttagtggaagctcaacacagaaaactccgc

SEQ ID NO: 1226 - DNA, 623 bp, Gossypium hirsutum
  unsure (1)..(623): unsure at all n locations; Clone ID: LIB3825-020-Q1-K6-B5
agggtttaggcgatcagaggggngaaaaagnaacgcaaattgttttgtttttggtgangaaaaataaactgacaattcaagagaaaatcccagatggcttctgcttgataagcacagagaagatttcccttctgttttctggggaaaatatggggtagaaaatggaaggtccaatcatctgagtttagtcgagacattgattgatataatcacatatactttcaatcgcttggaaattgattcattgcttataatgtgtacgatgtggttccatctttgaaacatggtattgcagaagaggttagactatggattcaatggctatcaggtgcccactattcctcgagcaaccagatcagctaggaaaagggttccatttagaaagagagttgaaggcaaccgaattagtgcatttgatttactggccactgtagctgggacgttattgctagataaagaaagttctcctgcatctaataacgcatggaatgctgaagatcagtctgcagttgaaaaaaataatgtaaaagaggaaaggcaggatggagatcagtcattgaagctagaaacttgcaatgtttctgaacttgttccccaaactaatgacccaaattatagttcta

SEQ ID NO: 1227 - DNA, 627 bp, Gossypium hirsutum
  unsure (1)..(627): unsure at all n locations; Clone ID: LIB3825-020-Q1-K6-B6
gcatttgttcgctacaanactttactcgcggacgatggtaagtcccctttgactgagcatgttgaccccggttatattcgccctttgccgcccaacgagaaggggaatgctcagtccgggttcgaagtgaacgacgtcgttgatgcgaggtacagagatggttggtggactggcgttgtgaggaaggttttgtcgaagtcgaaatatagggtttactttgataatcctcctgatgtcattgagtttgataggaaagatttaagggttcattgggattggatcgatggcaactgggttcgtcctgaaaagcaggtatggggtgaagtgttcattctttttaatttttcagttttttttatctggaaatttgggggggggtttattttggagttgagagcctaacttttttaggaataaatttttttcccggttttgaacttgcgaatctcgctgcatgtagctttttacactgaaaatttgctatttaagtcatgctttcatgattgcttctaaaattagggcctttctagtgctcaattaattggtgtaaataatgatctcgatcgatatgttttacctttagtgctttctttgtttaagttctgctaattttcattgcattttggc

SEQ ID NO: 1228 - DNA, 641 bp, Gossypium hirsutum
  Clone ID: LIB3825-020-Q1-K6-B7
gttgctggtggttcggttttgtacttgcaggaccagtatataaatcacattataaatgaaacaggagcaactgtcatgctacgtggatgtggttccggaaaccttgagagccttcagggttaagaagcacaaccaccactgcacttattcttgtcaagtaacaatcctaaaagtcttgatgatgccaagcgtttggcagagaatcttctggacactatcagcgtagagttcggtgcatccaggatttcatcaagtaaggtttatggtgcagttccacctccacagcagttgttgactggagttcaatgttccgcaacaggacgcaatgtgaatgctagttcagctgctggtttggcatcaatgccagttgctactccagctccacctgttgcagtccctgtggctactactggctattctcaagcgatggctgtggggatgcctaattctgggccaccccaagcaaattcagttggttatccacagcctttggtgaccagagggacaagctatattggatatggcgggatatacccccaagcaacaccattgcaacaggtagcattagctcttaaacaatcatctccaatctcctctactggttgtacctgcacatctgtagcaagtgcagttgttcctac

SEQ ID NO: 1229 - DNA, 571 bp, Gossypium hirsutum
  Clone ID: LIB3825-020-Q1-K6-B8
gcactttttaccattgttgtgtctggtactgatagagtgcttcagcaagttgtggagcagttacaaaagcttgtgaacgtttggaaggccaatgacattttgtagactttcgtggaagaagtcgatctcctgtcaacacaccttatcgaagttcttaagtctcccaagattgtccattatgatatcttaaaaggggtgcatgacatttttatatatgtaaatttattaaattgacttactttaatatcagtggataggttgaatatctctaaaatgatcctcacgttgaacgtgagctaatgctaataaaagtgaatgcagacccaaagttcagagctgagatcatgtgggtagtggacatcttcaggacaaagattgtggatatctcagaacattcactaactattgaggtaacaggagatccacagaagatggctgctgtgcacataaatgtaagcaatgacgtgtatcaaagaaaatgctagaacaggaaagatcgctcttagaaaggaaaaaatgggtgcatctgcatccttctggcgattatcagcatcttaatatcctgatcttg

SEQ ID NO: 1230 - DNA, 640 bp, Gossypium hirsutum
  Clone ID: LIB3825-020-Q1-K6-B9
ggggggaaccctaaggttctgcgccgttcggccatcctttcatcactgccacgacgagtgatatccttcagtaccccccttttcgctctttcgttcactccagcatggagttcatcgttttaagccccgaaatcccatctccgactccgatttcagcgaaggagacgaggtcttcgatggctcatatgcgaaggtagggtttcgccctttttcctcttcgattcttatgttcaaaatgtgcagtatgtaaaactggagaaaaaggaacggatgggaaaacgaaaaagaactagaatctgagtctcacctttcaatttcttttgcgtttttgtatttcaaaaatgtattgattgtgcgcgtaaaaaaattacaatgagcaggggctttggctttatagtcgatacagaaataagagatattcaaaaaatagaaatagaaattgaatacaaattctctttttgctgttgttttcttttgtatgtatttgctgttgtggtttgttcttttgcaggtacggatgctgtgctggcgtacggaggtgtggcgtggcgtcgagggttgtgtgctggtcgtacggtgttgcaggctttggcgtgggcggaggcactggaggggctcggacggctgcggcacaagcaaa

SEQ ID NO: 1231 - DNA, 616 bp, Gossypium hirsutum
  Clone ID: LIB3825-020-Q1-K6-C1
aaaaatagataatttaaagaagagcttgagaaagattgaccccaaattcggaatctggggaccaacactctttacatgaaaggcttcttcacaaggaaagggaattagagatgctgatcttagatttggaaaacaaagctagatttgggcagaaagttgttgaaaggcctggttctggagctggaaggactggcagcttcacggatagacctccttctcaatctggatccattgatggctctagaagtgtggagttcatggataggcccagatctcgtggtactgctgatgcatggacaaggccaggtgatgaccgaagaggatttcaagctggcagggatagaggatttgtaggaaacagagatatggacaggccaaggtcaagggagagatggtgaaccgccattgtcattgttttgttcaactctgacaacatggaccaataatattttgtcacctctcttcttttcctactgttcttttgctctggtaaagtggagcaaaggattcttggaaacagggagctatgcgttaaatcttcataccatatgtaatatggccactcagcccgtcattctttttatttttaatttctaaagcaaggagcctgtatttg

SEQ ID NO: 1232 - DNA, 637 bp, Gossypium hirsutum
  unsure (1)..(637): unsure at all n locations; Clone ID: LIB3825-020-Q1-K6-C10
gngacaatctttctttgcagaggagaaatcccagggacctgttacaaagattcatgtcaactgaaacccaagcttcaataacaagtgaaagagaagaagatgaagcagaagaagaagtagagctgaatcttgggttatcattaggaggcagatttggggttgataagaatgcaaagaagttgataaggtcatcatccattgctagttcaatgccaacatttagagaagaaggtgccaacaacactccaccaacgattccttacccaacactaattagaacctcttctttgcccaccgagactgaagaagagtggaggaagagaaaaaaattgcaaagtctaagaagaatggaagccaagaggagaagaagtgagaagcaaaggagttcgagagagaaaatggaggtgaatttgttagaggaagacaagcaacctggaagagccaataatgttggggttggaccaccatttggattgcagagtcgggctgcatctgcaaggcagatcacttcacaaggctctataggatcactaggaagaagctcttctagtatgtcagaaatggaaaataaagctcttcaagtcccatgcattgcaggagcaggcagttgtggtgaagcgagaagctccggtagcac

SEQ ID NO: 1233 - DNA, 524 bp, Gossypium hirsutum
  unsure (1)..(524): unsure at all n locations; Clone ID: LIB3825-020-Q1-K6-C12
caaaatttcgagggtttataagttgctgttgaaatacccaagccgccaaaccgaaatgggtctccaaaacgacatcgatttgctcaatcctccagcagaacttgagaagaagaagcacaaactcaagcgtctagtccagactcccaattccttcttcatggatgtgaaatgtcaaggctgcttcaacataacaactgtgtttagccactctcaaactgtggtggtgtgtggcaattgccagactgttctttgccagcctacaggaggtaaagctagactcaccgagggatgctctttcaggaaaaaaggtgattgatatggtttttgtcaaagagagtttcacaatgggtcaatttggctcatccttttgttttgatcatcatatatagagatagatagatagatagatagatacaagtgagttttgttggtatgttttaaggatttgattcggatgttgttgcttgatggttttaaatcatcaagtatggatttttattgctgcaagtaatggttntgagttg

SEQ ID NO: 1234 - DNA, 605 bp, Gossypium hirsutum
  unsure (1)..(605): unsure at all n locations; Clone ID: LIB3825-020-Q1-K6-C2
atagagtcgccgtcctttctcttcatctggattgaacagctacngaagaatctaccactaatttcccttctttgatcctctcaatcaagtgatgataaacactgtgaatttaaaatttggggagatgtgagtgtgttgagtggctggagaaattattttgcgtagctgcgatcgaattgctgagtcaggggctaccgagttactgagttcttcatggctgattttcatacatcgactcatagagctaactggatcttctcgcctcaagaactggttgagaaatacaaggctgcaaatcaaagagcaatacaagcactggagaagtatgggacaacacaaatggaagtagacgctgatggttcactatcataccctgaacctattgcaagagataatgctgacaagcattctcgtccaaaacctcttaacattgaagaagaacagttcatgcgagtgttttatgagaacaaacttcgagaagtttgtagtgcattctactttcctaataaaattcaggcaactgctctaatttatttcaagaggttttacctgcaatggtcggtcatggaacatcatccaaaacatataatgttaacctgtgtgta

SEQ ID NO: 1235 - DNA, 610 bp, Gossypium hirsutum
  Clone ID: LIB3825-020-Q1-K6-C3
ctctgtctatctctactggtcttcgcctccacccaagctctaccaccagaccagccaccccaaaatcccgccccacgtgaggccatgtcagaggatgcgccaccgttccaaacccaagatcatgactctctcaccattcctttactctctcaccagcagcgatccattaattccacctctcaggtcgccatcgttggcgccaacgtctgccccatcgaaagcctcgattatgagattgcggagaatgatttcttcaaacaagactggagggcacgtggaaaggtccagatttttcaatatattttcatgaaatggcttctctgttttttgattggcggtttcgtcagtctcgttggtttcttcaataatctcgccgttgagaatatcgccggcgttaagttcgtcatcacttctaacatgatgcttgctcaaaggtactggatggcatttctagtgttttctctatcgaatttggctctaactctctttgccgccatcattacggcgtttatttctcccgccgctgctggttccggtataccggaagtgaaggcttacttgaatggcgtagatgctccgggaatactttcaatacgaactttaatagtta

SEQ ID NO: 1236 - DNA, 606 bp, Gossypium hirsutum
  Clone ID: LIB3825-020-Q1-K6-C5
ccccgcgtccggccggtcaggtcttttccttgttatttcgcacgctaagctgaagcaactcccaactccaacaacagcaatgatcttcgttttctttctcttcttccttaactagccgcccttatctgtcacttttcaggtttggtctttcctgtctacttctttctttttcgattccttcttttcttttctttttttcttttgttatggttttctggggttttcaatttctctcctagtacttttcaactttgattctttttttcttttgttctttttcatatatatatatgtacttcgtcaactggaagtgacttcgaatttgatcacgaagtttgaagctttgattgaattttgcagggtttgctattatgttggagttaactgtttaaaacacttttgggaggctttacatgaaagggtcagctttgatatcttatcagggtttcagggatcattgttgattcagtcaactcaaccgtgaagacttaggtcaaaatttgcagtggccttttaagaaagagaattgaacgattagaaaaatctcttgaagtcgtctcctttgttaatttggagatgaaaagtgaatttcttacccagtttgag

SEQ ID NO: 1237 - DNA, 628 bp, Gossypium hirsutum
  unsure (1)..(628): unsure at all n locations; Clone ID: LIB3825-020-Q1-K6-C6
ggnaaaatttagacaccgatcttccctttccctttcccttccccttgcccttccccttcgcttgacacctgatcttctgcttgccatcagccaacaccgattcttaacaccagacaccggctttcatcaaccttttttctatgttttgatttcggagcaataattgagggaatccgaaaattgagaaaactgatggaattgggaaagaaaatggaagcacagaagaaaagcaaagtttcaaagatggatcaatttgtgggtatacttcgcttcaccacctcttgagcgcaaatctcaagcctcaactctaccagtgtagcataatgctaatattatgcacaatcggagcccaccaattgtttacattttttgatcaaaccatcgaaaaaaggaaagaaaaaatcttccatctacaacgctgaagcaaactctcaagtctcaaccttgaaatttgctggttcttaaaccctcaagatataaccggtatgcgctgctaaaggtccaagacctcggtatcctcgggtataggaatcaaggaatagaattgggactatctcaaaatcagcaaagcttgttacttgtgttaagcaactgtcaaatgtcaaggaggaagtttacggngctctca

SEQ ID NO: 1238 - DNA, 627 bp, Gossypium hirsutum
  Clone ID: LIB3825-020-Q1-K6-C7
ggacagtcgatgtcgccaaatatggctgcatgcattgccgtggaggcaatatcaattcttggaaaagcttcatttaaaggggtttgtccatggagatgtgaagcccgagaattttttactaggtctacctggatcagctgatgagaagaagctatatcttattgatcttggtttagcttcaagatggaaagatgcacagtctggtcaacatgttgattatgatcagaggccggatgttttcaggggaacaatcaggtatgctagtgtgcatgcgcatttgggtcggactggaagtcgtagagatgaccttgagtcattggcatacacattgatatttctaataaaagggcggttaccatggcagggttatcagggtgataacaagagttttctggtttgcaagaaaaagatggccacttctccagagttgatgtgttgcttttgtcctgccccgtttaagcagttccttgaggctgttacaaatatgaaatttgatgaggagcccaattatgcgaagcttatatccttctttgagagcctaattgaaccatgcactccattgagaccgataagaatcgatggagctcttaaggttgggcaaaagcgaggaagactggtcattaattt

SEQ ID NO: 1239 - DNA, 628 bp, Gossypium hirsutum
  Clone ID: LIB3825-020-Q1-K6-C9
tctgttttgttttatttctccacgaaaccgcctcagtctgggttcctcaaccatcatccttccggagtagattgattgagattcgaaactactctcatcagtcccccatgattgtcgctgagagtatacccattgagattcctaacattatggcctgtaatcctgcatatgcttctgctgcaaatgaagatgaaacgttattattaaggacagttttcaatgctagaatctcacctatcaggccccgaaccaccagactcgaagtcgatttggagttttttttttgtcaaaagctgcatcaaactaaatcatcaccctcgtattctcttcttgttgtctgtggcttctatccatatattaactataaagcacagcaaaaaagtcagcactatttacaagtacccctcttgaaaacctaggtaagccattctcaaaagctttgaatcatttatttatgacccaaaagaggtttaaattttaccagacctctattattgtggggattgtcgaaagacatgataactatcttcttcctaagtaccacagtgaggacatatagtatttgtggccactcgtttatgtatgagatttactaggggagggatgtaattctaggaaattcgtcata

SEQ ID NO: 1240 - DNA, 78 bp, Gossypium hirsutum
  unsure (1)..(78): unsure at all n locations; Clone ID: LIB3825-020-Q1-K6-D10
natttcctctttgctagctctttggaatctctgcaggaaanatatgcgcggccaatggggaacgggagttttcgacga

SEQ ID NO: 1241 - DNA, 457 bp, Gossypium hirsutum
  unsure (1)..(457): unsure at all n locations; Clone ID: LIB3825-020-Q1-K6-D11
cggncgcgtgggcggacgcgtgggttatgctaaagcaaatgcccgggtttcattggaaagaaattgcaggcaaactaggttatagagatgtatcagatcttactccaacagagattgcaatcgaggcattgcaacaaattgaagggtatctaaaggaggaaggtggcatggtcattgctggattatagttttagaaaaagctatagatatggtgattgaatttcgttttatttgtggcatagcatgtcaaaattgaccagtttttttttccatctctgcaccggtgtagtttgtttccacaactaagttgtgtaactcacaatgtattgtcactaaatatcatgaacatgatgcacttgtatatgtttgcctaattcatttttgttttagtcaaaaaaaaaaaaaaaaaaaaaacaacaaaaaaggaccttaaaaaaccataactacataaaaaata

SEQ ID NO: 1242 - DNA, 652 bp, Gossypium hirsutum
  Clone ID: LIB3825-020-Q1-K6-D12
ggcattggaatatcaagctttaggagtgattctgaatttagtggaaatgtgagggaagcagtttcattatcgagaaatgccccacctggccctcctccattgtgttcaatatgtcagcataaggcccctgtatttgggaaaccgccgaggtggtttacctatgctgaattggagcttgcaactggtggattttcacaagctaatttcttggctgagggtgggtttggatccgttcatagaggacttctcccagatggtcaggcaattgcagtgaagcaacacaaattggctagttctcaaggagatcttgagttttgctcagaggtggaagtcctgagctgtgctcagcacaggaatgttgttatgctgattgggttctgtattgaggatagaaggcgactgctggtttatgagtacatatgcaatggatccctagattctcatctatatgggcgtcatcgggaacctttagaatggtctgcacggcaaaagattgcagtaggagctgctagaggtctgagataccttcatgaagaatgcagagttggctgcattgtgcaccgtgacatgcggccgaacaacattctcatcacccatgattttgaacctttggttggtgattttggccttgcaagatggcagcctgatggtg

SEQ ID NO: 1243 - DNA, 621 bp, Gossypium hirsutum
  unsure (1)..(621): unsure at all n locations; Clone ID: LIB3825-020-Q1-K6-D2
tccgggnatatacatgattttattgttggaactgaagatttgagttgatggcgaggatcaaaccacaagctttgctacaacaaagcaaaaagaagaaagggccagctcgaatcagtgttataacaattatactctatagtttgattgttgttgtgactgtgttttttctctatgctacgtacagacattggtctcaaaggtcaagaactcaaattgagtacaggcaatcagtttttaagggtgacactgacaactctttcgtggatttgaagaaatctgatctccctggatatgctattttagatactgcaaaaggctctataactgtggagctcttcaaggacaattttcctgaggttgttgatcaattccttgatttatgtcacaaagggcacttcaatggaatgctttttcgccatgttataaagcactatgttattcaagctggggatagtgacaagctggaagcagccgaggactggactttgaaaggaaagcattacagccaacttgataccagtttgaagcatgaagcattcatgcttggaacttctaagaagaagcatgataatggagcatttgagcttttcatcacaactgcaccaatcccagatctaaatg

SEQ ID NO: 1244 - DNA, 591 bp, Gossypium hirsutum
  Clone ID: LIB3825-020-Q1-K6-D3
ccgagtttgggcctgggaagttgagggtattgtaggggctctcatgggcaataagttcgactagtgtttgtttgtaatgttctgtttatgaatgccattttatcagtagttttaaaaaaaaaaaaaaaaaaaaaaaaaaaaaaaaaaaaaaaaaaaaaaaaaaaaaaaaaaaaaaaaaaaaaaaaaaaaaaaaaaaaaaaaaaacgggcggcccgctttaaaaaaacccaacttttcttacccgtccatgtaaatttaatagcgctttctttagtgcacccaaattccaattaaatgcccgccttttaaaaactaattaactggaaaaaccctgccgttaccaaaataaatcgccttaaaaaaaatccccttttcgacagttgttctaaaaaaaaaaaggcccgaactgatgacctttccaaacacttcctcaacctaaaaataaaatgggacgccccttttacccacacataaaccgccccgtttgttggggttacccccaccgtaacctttacattttccattcccttactccccagtcttttcggttttttccctccctttataacaaagtgggccgcttttccccgg

SEQ ID NO: 1245 - DNA, 603 bp, Gossypium hirsutum
  unsure (1)..(603): unsure at all n locations; Clone ID: LIB3825-020-Q1-K6-D5
cggnagcgtggggccgaaaagatcaaaaggaaaaagaggcaacatctctcttccgccgtttgggttagcaacttacaagatgcaaggggacgtgtggttgtcctcctccggttgtggaggaggggaccaagaaaggctattgtcacttttgggtgttgccgattcgtggctaaagcaactaagcgttcaacaccatgacttcaactatttctcgggtattcgacatggctaaaaaagccctctacatccctaataaacatggaaaaaagttcactcatcactcatttatcatcaaaagccaaaaaaaaaaaggaggaaaaaaaagaaagtaacattttggtttttttagaagctttagttatggggatgcttttgagcacttgttagaaaaccccgtttttaggccatgtttttagtagatgttttcttttcaagtttgtgggcttttgttgtaaagaaatgggtgagatttgagagttagtgtgaggctcttttaagcttttgaaccttttttttttctttttttttttctggactgtatgatatgttctctgttaaccttagtataaagctaatgaaaatgttctcaataagtttttccac

SEQ ID NO: 1246 - DNA, 635 bp, Gossypium hirsutum
  unsure (1)..(635): unsure at all n locations; Clone ID: LIB3825-020-Q1-K6-D6
gaaaacaaagggaagagtgtgtgagggacatgtgaanagtaccaccgtgagaaaaggatagagagtcccttaaagaagttgggcaagaccctgatgtcgaatttcaccctggcgacggattgagtgagtgccagagccggtgcgcgggactagcaggagaggtgcggcagctgtgcctcttccggtgccaacagaaatggcggagagattatgcgagccggtgggaggaagaaggcaagaaacagagtaaagaagacgcagaagacgaaggagaagaggaaaagcacaatccttacgtatttgaagataaacatttctctactgcaatcaagacagggaaaggaagagttgatcttctcaccaaattcacacacaactcggatattcttcgtggcattgagaattatcgactggccctccttgttgccagtccaaagtcattcgtagtcccaaatcatttcgatgctaacgccatatttgttgtcactcaaggacgtggaacactcacgctgatccatgaagataagagagagagctttaacattgaaactggagacatcatctatgttcgtgctgggactcctctatatttgatcaacagagatgacgacgagaaactgtttatcgtcaagtta

SEQ ID NO: 1247 - DNA, 620 bp, Gossypium hirsutum
  unsure (1)..(620): unsure at all n locations; Clone ID: LIB3825-020-Q1-K6-D8
ccaccacanaagcaccatcaccaaanaaaaagaaagagagatgcttttgagaagttcttcaacaccagttcttggatctctggtatcttccatagctgctgatagtcctagcaacaacaatcattactatgaaaccagcagcccctttaggcattacccatcgagctcttttcatggtcacacccaccataacaggctctcgtttcattcttctccaggctccgtccacctatctactgtagtttcttgtggctcttccccggtatctccttctgttgatcagttttctgattttgagcttacagggtttcgtcgggctcaatctgaagggaacttggaagggctcgcccatgctgcttgcgatggcaatgatgaattctacaagcggaaccaacctaagaagttttctgcaaggcacaacaagaagtgcttgatgttgcaaaccatcccttccttttcgttttataaatcgggcgcaaggtgtgaggaagaagatgatgaagaagaagggagtgatttcgaggaagaggaaaaagtgttgaacgaaaatgaagaaagggtaatggctgtcagtggtagccatggattcaaccctatcagcatggagaatatactgttga

SEQ ID NO: 1248 - DNA, 643 bp, Gossypium hirsutum
  Clone ID: LIB3825-020-Q1-K6-D9
caacatgtctcttcactcttctctcaccatgtcattgctgtctttctccttcttgttgctgtttacttttagtgccaaagctgttgttcctccatctgaaacttttaggtttgtcaacgacggagaatttgggccgtttgttgttgaatatgatgcaaattaccgtgtcataagcatagctaatgcccccttccagcttgcgttttataacaccacccctaatgccttcacccttgcgttacgcatggctacaacgcgttccgagtcgctcttccgatgggtttgggaggccaacagggggaaccctgttcgcgagaacgccacgttctctctcgggactgacgggaaccttgtcttggctgatgccgatggtcggattgcttggcaaagtaacactgccaacaaaggtgtggtagggttccaattgttgcctaatggtaacatggtgttacacgattccaatggcaagttcatttggcaaagttttgatcatccaactgatacactcttggtgggtcagtcgcttagaatcggaggggcgacgaagcttgtgagtcgggcttctgctcaaaacaatgttgacggagcctatagcttggtgatggagcctaaacagttggttttgcagtacaagggaatgaac

SEQ ID NO: 1249 - DNA, 620 bp, Gossypium hirsutum
  Clone ID: LIB3825-020-Q1-K6-E1
caacacctccaaatttcccttaaacccttcctttttacctcaatcaacgctgcttttcaagcccgcaaaatagttcccttccttaagaaatgtgtggcggtgctatcatatctgagttcatcccacggaaagtggccgccacgtgaccgccgccgatatctggcctaactcccctttcgtgaaaatcaatggcttttgctcttaccgcgaccactcagtctaccatttcaaaagatcccaacccgaaccgccatcgtcgttaggtgatgaacaagtggagaagaaaccgaaaaggcagaggaaaaatctttacagaggcataaggcaacggccgtggggcaaatgggcggccgagattcgcgaccctcgaaaagggttcgtgtttggctgggcactttcaacactgccgaggaagcggcccgcgcctacgaccgtgaagctcgcaaaatcaggggcaagaaagccaaggtcaatttccccaacgaagacgactccttctccaccccgtacaatctgaaccgttccacgcccaattcgaacccttgcgtttatcaacagcatataaacagtaactatggattcaattacgatttgaatgaaatcggtgggtacgcaactga

SEQ ID NO: 1250 - DNA, 657 bp, Gossypium hirsutum
  unsure (1)..(657): unsure at all n locations; Clone ID: LIB3825-020-Q1-K6-E10
ataacttggttgttcatggttggcctaagttgatttatgagaagaaagttggaccagtttaaatgctggggtttttctgattaggaattgccaatggtctatggatttgattaacacttggtctagcatgggtccaatgagtaaagattatgagaagtggggtcagattcaacgatcaacgttcaaagataagcttttccctgaatcagatgatcagtcggctatggtttacttgctttatacagaaaaagagaaatattatgatcatatttatttggaaggagagttttattttgaagggtattgggttgagattgttggagggtacgagaacacaacggagaggtacttggagattgagagaggggcgccaaagttaaggaggagacatgctgagaaagtgagtgagcaatatgcagcttttagggaagaattcctgaaggaagctgggaatgggaaagggagttggaggagaccattgatcactcatttcacgggttgtcagccttgtagtggcgaccataatcagatgtatgctggggagtcttgttggaatgggatggtcaaagctttgaactttgctgataatcangtattgcacaagtatgggttttgtgcactcggatctagatgattcctccactgttactgaaattc

SEQ ID NO: 1251 - DNA, 630 bp, Gossypium hirsutum
  Clone ID: LIB3825-020-Q1-K6-E11
ctcgtagaaggacaacaacaggcagctcttcttccttttctgcgtctcatcatcaaaccccaaactcttaactagcctcttcctcctcctctttactttaatttcattttgctttcacaaatctaagaccagagctccaaaagattgaatttttaacccctcaaattaaaatccttcctttttcgcgttttcggttgaaaatttgtataaaaaagagggtgatttagaaacaatggatgctgattcatggagtgctcgtctttcttcagcttctaagagatatcaatcggctcttcaattacgatctgatatgcttatggggtttgaagaaattgatggagaagatgaaataagagaggagtttcgatgccctttttgttcagagtatttcgacatcgttggcttgtgttgtcacattgatgatgagcatccagtggaggctaaaaatggggtttgtccagtctgtgcaatgagggtgggcgttgatatggttgcgcatataaccctacaacatggaaatatatttaagatgcagcgcaagaggaaatcacgtaaaggtggatctcattccacgcttttctcttctgaggaaagagctgcgagaaagaaatctacagtccttcttccggg

SEQ ID NO: 1252 - DNA, 656 bp, Gossypium hirsutum
  Clone ID: LIB3825-020-Q1-K6-E12
ctcttccgtcttcaaacacttcgaatcgttttccaattactctgacaagatgcaaatctttgttaaaaccctcactggcaagaccatcaccctcgaggtggagagttcagacaccattgataatgtgaaggctaagatccaagataaggaagggatcccaccggatcagcagaggcttatatttgctggcaaacaacttgaggatggccgcacgctagccgactacaacattcagaaagaatccacccttcacttggttcttcgacttcgtggcggcatgcaaatctttgtcaagactctcactggaaagacaattaccttggaggttgaaagctctgacacaattgataatgtaaaggcaaagatccaagacaaggaagggatcccaccagatcagcagaggcttatctttgctggaaagcagcttgaagatggtcgcaccttagctgattacaatatccaaaaagagtccaccctccacctggtacttcgtcttcgaggtggcatgcaaatctttgtcaaaactctcactggaaagacaattaccttggaggtcgagagttcggataccattgacaatgtgaaagccaagattcaggacaaagaaggaatcccaccagaccaacaaagattgatttttgctggaaaacaacttg

SEQ ID NO: 1253 - DNA, 624 bp, Gossypium hirsutum
  Clone ID: LIB3825-020-Q1-K6-E3
ctctctcaaaaatctctcaaatccatactctccgctcctctgatcttttcttcgacttggtttatgagctcgaaggagaaacccactcttggcggtacgcggattaagacccgcaaacggaatattgctgcacccctggacccttcagcatttgctgatgcagtagtccagatctatttggataatgctggtgacctggaacttgttgccaggagcattgaatcttcagatcttaacttctcaagatacggtgacaccttctttgaggttgtttttgctggaggccgcacacaacctggcacacttaaacctgatgaaggggagtgccacccttactctatcatagagtgtgaggctaaacgtgatgccattttactatctgtgatttacattcagaaaatcttgcgccgaagaccttttctgataaagaatcttgaaaatgttatgcgaagactcttgcagtcgttggagcttttcgaggaaaatgagaggaagaagcttgcaattttcacagcacttgctttctcccagaaattatcagggttgccacctgagactgtgttccagccattgctcaaggataatcttgtggcaaaagggctagttctttcattcatgacagac

SEQ ID NO: 1254 - DNA, 580 bp, Gossypium hirsutum
  Clone ID: LIB3825-020-Q1-K6-E5
agataacgagaaagtatcgatgtgaagcggttcggtgagcttttgatgtcgtctggggtcgtgttgaatgatgatgtccattgggtcacctttcatagtggatacgacttcggatacttgcttaagcttttgacttgcaggagtttgcctgatagtcaagcagggtttttcgatttgatcaagatatatttcccaatggtatatgatatcaagcacatgatgaagttttgcaacagccttcatggtggtttgaacaagctcgccgagttgttggaagtggaaagagtcggtgtgtgccatcaagctggttccgatagtttgctcacctcgtgcacctttaggaagttgagagataactttttcaacggctccacagagaaatatgcaggtgtattgtatggcctaggtgtccagaatggacagaatactaattagaagaaaataattggaaaaaaatgttgatggatgtagactatttagagcttgagcctgaattttctttgtatacattgtcaaaaaaaaaggtattggtgatttagctgtgacttttctgcttttgcttgcattgtaactgaaaacc

SEQ ID NO: 1255 - DNA, 640 bp, Gossypium hirsutum
  Clone ID: LIB3825-020-Q1-K6-E6
actcactattgttacaacatccttcgatggttatctgtatctgatagatggaccaacatcatgtgctgacgttgttgatatcggtgaaacttcgtatagcatggtgttagcagacaatgttgatggtggtgatgatctagatcttatcgttacaactatgaatggaaatgtcttttgcttctcgacccctgccccgcatcatcctctcaaggcatggagatcaaataaccaaggaagaaacaatgtcgcaaacaggtacaaccgtgagggcgtctacgttacccattcatcccgagctttccgtgatgaggaaggcaaaagcttctgggtggagattgagattgtggataaacatagatatccttcagggttccaagcaccttataatgtcacaacaacattgttagtcccgggtaactaccaaggagaaagaaggataaagcaaagccagatctttgagcgtccgggaaaatatcggattaaacttccaacggtaggggtgaggactacagggactgttgttgtggaaatggttgataaaaacggactctatttctcagacgacttctccctcacattccatatgtattactacaaactgctgaagtggcttcttgtcataccaatgcttgggatgtta

SEQ ID NO: 1256 - DNA, 642 bp, Gossypium hirsutum
  Clone ID: LIB3825-020-Q1-K6-E7
cttcttgacctcttcctccggtcgaaggatgtcgattcaactcctctcctccagaaacattgttgtgaagggtcgactttaagaccaggagctcgcccgtcaagccccaaaccaccaggcttgttgctgatttgaagtttcgaatgtcgaacgccacattgaactggatcgttattctcgatatgtccttctgacctctgtgattcttgtttgtgttgaaaggattcggagtttctctcaccccttcattttctgccatatacctctgtattcgatgagcaagttctctacctgtcttttccttcctctcgtgaatgagttgatttctagaaaaccagattagccataaagcaatacaaaaaaggcaacattgttccccagttcctctcttgaaaacctagggcattgacgaaaaaaataaggactgtttcaacctaagaacggcaacagggacatctgtcacttgtagaaactcttcggtatctgagattagctagatgaaggatgaaatcccaagagattcgccaaataattatagtgatttttgaaggaagctgtaaaccccataattttttgtagaaatctgtagtttcggtttgtattaagaaatactaggatccggattagcccattgtaatagtt

SEQ ID NO: 1257 - DNA, 633 bp, Gossypium hirsutum
  Clone ID: LIB3825-020-Q1-K6-E8
gttaatttcatcctcttatatggtctctctcaattattgttcatattgcatgctccggtttttaatcattgtccacaaagcttttgttaacctttctttgatctgcttcctttcgatgccatttcgtgaagtgcgatataaaggataagaatgcgtgcgacaacggttgcggtggaggcctaatgacgaatgcctacaagtatttgatcgaggcaggaggcttaatggaggagaatgcatacccctacactggggaacgcaacgaatgcaagttcaacccagagaaagtagctgttgaagttgtgaatttcactaacatccccatcgatgaaaatcaaatcgccgcaaatttagtacttcgtggccctttagccggtgagttaacttcctccaaaaatcaatggaagtaatatgctataattatacatgatgttagatgaagttcttttctaatataggtatgaaacaggagttcatatagcataggttgcatatatcttatgtatattccgagtttcgacacccttgttcggtttatatccttttttagaagattcttaaaggatctcttcttatacataactaacacactcgtacgtatatttgtatttgatactcgtgtttgatattttg

SEQ ID NO: 1258 - DNA, 649 bp, Gossypium hirsutum
  Clone ID: LIB3825-020-Q1-K6-E9
gctattaagagctgggcacggcaaatccttagaggcttacactatctgcatagtcacaatcctccaatcattcatagagatttaaaatgcgataatatatttgttaatggaaataatggagaagtgaagattggagatcttggattggcaactgtcttgcagcagcccaccgcccgaagtgtaattggcactcctgaattcatggctccagagctttatgatgaggagtataatgagcttgtcgacatatattcttttggtctgtgcatattggagatggttacttgtgaatatccatataatgaatgcaaaaatccagcacaaatatacaagaaagttacctctggtattaaacccgcttcccttggtagagtgaatgatccacaaattaagcagtttattgagaagtgtcttcttccagcatctatgagattgccagctgcggaactcttgaaagatccattccttttggctgaaactcccaaggagcctgcgagtggtccaccagtgaacttgatccagactgaacctcatctgatggaaatagatctcaactgcaaaatgcttatggtcaaaccttctactgaaagcatcaaagaaactcctcggttctcagctctggagctacagtctttcactcagaataatg

SEQ ID NO: 1259 - DNA, 602 bp, Gossypium hirsutum
  Clone ID: LIB3825-020-Q1-K6-F10
gttgttttcttgggattatgctcaagccgagttgcagtgcttactccacaaaatttaaaggtaccaaccatggcagaaatggtagatatgtggaagaaaaagcataacatgttcggtatcctttatagctggtttcttgctaaggttgccagcaggcttgaggttttccctgggtctgaatttcgtgtggcatttgaagaagcaatgaagtatggtggcaaggtgattcttggtgatcgtcctgtgcaggttacgttgcgcagaacctgggggaaaatgccactttggcataagattaagttactgtattccttactttttcaagctgtcttcttgcccagccctgaagagcttaacaaaatgctgaaggacatggatgatgttgacatgctgacccttgtgattcaagaaatgagcaaggaattccctactctaatggaaactcttgtacatgaacgagaccagttcatgtcatccacgttactaagaacagcgagtgagcatagttcagtcgttgcggtggtcggtaaaggccacttgcaaggaattaagaaatattggaagcagcctgttttgatagatgatctcatgacagttccttc

SEQ ID NO: 1260 - DNA, 580 bp, Gossypium hirsutum
  Clone ID: LIB3825-020-Q1-K6-F4
atcgtcgcccccatccaaccatgagccctcgagcctcggttggaccgcgggcggaaattggcctcccgtgcgctcacagccagcggttggcctaaattcgagtcctcgacgacatcatcgtcgcgacgatcggtggtaatgctgcaagcaacctcgttcggagtcgtgcgcgtccgtcgatcgagacccttgaaccctttcggcatcgcaaggacggtgctcgcatcgcgaccccaggtcaggcgggattacccgctgagtttaagcatatcaataagcggaggaaaagaaacttaccaggattcccctagtaacggcgagcgaaccgggaaaagcccagcttgagaatcggtcgccatcggcgtccgaattgtagtctggagaagcgtcctcagcgacggaccgggcccaagtcccctggaaaggggcgccggagagggtgagagccccgtcgtgcccggaccctgtcgcaccaagaggcgctgtctacgagtcgggttgtttgggaatgcagccctaatcgggcggtaaattccgtccaaggctaaatacgggcgagagaccgatagcgaacaagtcc

SEQ ID NO: 1261 - DNA, 619 bp, Gossypium hirsutum
  unsure (1)..(619): unsure at all n locations; Clone ID: LIB3825-020-Q1-K6-F6
ggnaaatgtttttcgtgtttgtctaattttctgggggttagggtttttaatcgatctgagagagtcagattatgggtggggatggcgattcgagtgagtcagtgactcggttgacaatgagaggaggcagaagaagagggagtaatggttaatatccgatgctctaatggttcaaaatttacggttaggaccaaactcgaatcaaccattggatctttcaaagttgttttagctcagagttgctatatcccagctgatcagcaacgattgatttataaaggccgaatcttaaaagacgaccaaacccttcaaagttacggtttgcaagctgatcatactgttcatatggtccgtagttttgccccatcttcatcagcccctcctcctgttgctactacaaatgttggaactcctaatactacaccaggggtcactcgtggtgttggttctaatgagggtgctggtctggaagcatcaattttccctggacttaatctgcttggtggtaacggacgtagttttggtttgtatggatcaagacttcctgaatttgaacatgtacagcaacaactaactcaaaatcccaacatnatgagggaaataatgaatacacctgcta

SEQ ID NO: 1262 - DNA, 630 bp, Gossypium hirsutum
  unsure (1)..(630): unsure at all n locations; Clone ID: LIB3825-020-Q1-K6-F7
tattactcaagaaaagacccgctcacaagactaaaagacctcaacatggctgcctcgttaatagctaagaccgccatgttccagctctcaaaagcgttccctcgaaccgtgtctcttcgttcctccgccaatgtctcacgagtctgcttcaccaccaccgcttccaaacgctctgaggggagagacaccaaagctggctttgcttacagggaaaaagatatctcatccgatgaagacaccaccgccgaagaagctatggaaagagcaaaagaatacgcgcataacgctaaggagaaaacgaaaggagcctttgatacggcggctgatagggcaaaagatgcaacgaacagagcggcggagaccgcacaaagcgccaacgagaaaacaaaacagaaagctagagagtacgcgcaagggaccaaagagactgcccaaagtgctaaagataagaccaaagaaggggctgataaggcatctcaaactgcgtacgagttgaaagagaaatctaaagagagaagcacaaggggtgatggnagaagtcggaggagaatagccggttcagttgccgataaggcgtcggagaccatccaaaatgttggagagaagcaaagcaaactgcacaagggagct

SEQ ID NO: 1263 - DNA, 610 bp, Gossypium hirsutum
  unsure (1)..(610): unsure at all n locations; Clone ID: LIB3825-020-Q1-K6-G1
gnttggtatccgtggaccaaaagcagatgcagcaacgctgagaaacagttaatcgagttttgtgatcagaaattatgatcaagcttgataatgagagcctcccgattgaacacataaccaaaggtattatgtttctcgaccatgtactttgtcggagagtggtatatccaactcttcggtacacggcaaccggtggtaagattattagtgagaaaggtgttgggacccttttatctgtcacggcgagcttgaaacaatgcatcaagcaatttaggaagttaaactttcttaagggtgatagggaaccagacccacaaccatgttttagaatgttccatgcaactcaagctcacaccaatgctcaaatgaacaagttcttgtcaacaatggtggagtggtatagatatgccgacaaccggaaaaaagttgttaatttttgttcctatatcattaggggttccctagcaaagctctatgctgcaaagtacaagcttcgttcacgagcaaaggtttataaaattggtgcaagaaatctgagtcgtcctttgaaggagaggaaaggacagtcacccgagtaccagaatctactaagaatgggtcttgctgagtc

SEQ ID NO: 1264 - DNA, 634 bp, Gossypium hirsutum
  unsure (1)..(634): unsure at all n locations; Clone ID: LIB3825-020-Q1-K6-G10
ggaaaatcttttcactggttaccagnaaactgagcaggaaatccgatttgcaaaaaaagaaaaaaatgaaaggaatagaagtagattatatttatagctagagttagggtttccttgattctgggttttccacttttttcctccttttgtaaagggaaatttagaaaaattaaattattttaattgtttttttgtaaaggaatttagaaagagtaaatggcagatggttactggaatcggcgacagccaaatcctccgatgctctcttctggtgggatgcttaaacgaccacgtactgattacgatgctccgccctttggaccacgttcagcccttgagatgcctagttatttggcaagagatgatgatcatggtggacatctgtctgtgagggatacaaactctattggatcagcatatgatcgttatctccagagtgcaaaactttcttcttttacttctggagaagctagtgcatttggtgggtcaggaagggctgttggtggtgcaatgcctgttcatccaatagctgatcctcccctgatgggtcttcttggatctgctgctccagatctgtcaccaaatggtcataatatcggttatagtggtcaacatccagtggatgcaattgcaa

SEQ ID NO: 1265 - DNA, 647 bp, Gossypium hirsutum
  Clone ID: LIB3825-020-Q1-K6-G11
cccagcgtccgtgaaagacggtctctcttttctctgtgagtttcgtagggttagggttttaagggtaaagcatcctccaacatgcaatacatggatccaactaagaaacgcaagttagatgaaaacggtactgtttcagcgcagtcggaacctgaccctatcaccaaactaaccccacaagatggccgcaaacttattgagcgattcaccgtcgaccaactcctcgacatcctccaagacgccgtttgtcgtcacgtcgacgttctttcagccgttcgatctattgccgatcaagatccgtctcaacggaagctcttcatacgtgggttgggttgggataccacaactgatggccttcgttcactcttttcggtctatggagaacttgaagaagcggttgttatcctcgacaagactaccgggaaatcgaaagggtacggatttgttacgtttaagcacgtagatggtgctttgcttgctcttaaagaacccagtaagaaaatcgacgggagagtcaccgtgacacagctggcggcggcagggaattcggcgacgaatagtaacccggtggatattcatatgaggaagatttatgtagccaatgtaccgtatgatatgccggcggataagttattgggccatttttc

SEQ ID NO: 1266 - DNA, 108 bp, Gossypium hirsutum
  Clone ID: LIB3825-020-Q1-K6-G2
acgtagaggtataaacgcgtcgttctgtgacgcctatctctaatattgctgtcgtctattgcatctaggatattaacagctggtgtagtatcatatatggccttacat

SEQ ID NO: 1267 - DNA, 612 bp, Gossypium hirsutum
  unsure (1)..(612): unsure at all n locations; Clone ID: LIB3825-020-Q1-K6-G3
cttaactttctcatacaatacaaccaacanacaaaccaaccaactggccgatgaaactccagcccagaatccccctatggcagcagcgccgccgcctccaacctctgccacggtgaccgactccgagtcacctgctgttttagaaaaacaagacccttccccgccgtctcatgtaccagctgtgtctgtttctgttaccgaatctgcttctacgactatagctgaaaatgaagagcaggctccgccaccggaaccggcggcattggaacctgattcatcggataaagggtcagggaaagaggagctgcccccgacgccaccgccgcaagcagtggagtcagaatctgagccacctgttgtcaccgaggcaccaaaggaagaaaacccaccagctccagcagcagaaactgtagtgatatcggaatccgagccgcagcagccgcctgctccactgcagcaggaggtggttacggagtcggagtcactggcggcgatgatggagaaagaagagacgggagcaccagcagagcctactgcggcgggtactactactactactacaactagtgctcaagaagaggtggctgctgctgttgaagagaaaaagttcct

SEQ ID NO: 1268 - DNA, 523 bp, Gossypium hirsutum
  Clone ID: LIB3825-020-Q1-K6-G4
atccaaaagctccagctcatggatggaattcttcttgagcaacaggtgatttaccaaagcaacccgattctgatgaagttgcagcactgaggttagctttggtgtcatcgaatgattatggtgttgatggattaggatatggattcctgttcaccagcctgtcccgccgcttctcaaaaaatcgctgaagggagtgtctccttgcaattggtagttctttcagtttgcagaaaggggtcctgttagtaggatacacctgtgcctgtggtgaagccagagcagttgcagtagcagtactttgaagcgaaggagacctcgtaagaacaggtgaggtggtggcacaatcagttgcaactttcttcatgtcaacagagttagcagcaccagttgcagcaataagcataatctcccgcaccttttccacaggaattgcatcaaacacacaaacgtgtccatcatagaacatggttagttgagatggagcagggccagtggaattcagaccaaatacacgagttggcac

SEQ ID NO: 1269 - DNA, 592 bp, Gossypium hirsutum
  unsure (1)..(592): unsure at all n locations; Clone ID: LIB3825-020-Q1-K6-G6
ngagcaaacgaaacggagaagaaacaggggagaaagaaagaaagaaaaagaaaaagaaaaaggaaaatttgagtttcaaggctcaaagtttaatttgaaatctcggctaagaaaggacaagacaaagtcaacgggagttagctcgaaattacggtttagtaaagatagaacgttgaatcagcatcccagttcgatcccgaattcattaaggtaaagtgtgttaattattggtaatggcatgtacctaggatgttttatgagagtcatttaggttgtagatgtactcatgaaatgagtaaattatggttggcaacggtatgtagtatgaattttgaaatttactaaaaattcgtagtaattttaaattagtcccgaattgaatttactgttcatattggaccgcgagggcccattaaagggacgacatcttaaaactaggatgtgtgtaaatatttattttaattaatgaccgaaattggactgtactgactggtaatgtctcgtaaccctgttccgatgacggtatagggttagggggcgttacaaaaccagggaaaagagccaatgcctatggaactagtcttggattana

SEQ ID NO: 1270 - DNA, 502 bp, Gossypium hirsutum
  Clone ID: LIB3825-020-Q1-K6-G7
gattcttcagcttttgaaattcagagagtaggtgttcttcggagtaagccgaaaactaatagaggaaaacgctatctttgttagttctgcccttcgaatcttcttgttctttaaccttcttctttcccttacttcttcttttatctgtaattttcgcttcaaacatggaaattaatcctccaactaagtcagttgaaattaaagagaaagacctcttcaaagctgcggagaagggcgattcttccatattcaaatccctctcccaagaccaccttaccaagtctgttaaactccggaatgaagacgcccgatctcttctccacgtcgccgtctcctccgcccaccctgaggtggtcaaactactctctgccgccgctgatgaatcagttgtgaatggtatcgatgaagaaagttgggctcccattcactcagccgccagcattggtaatttggaaaatatggaaatcctgttgaataaaggagcaaatggtaatgtgaaaaa

SEQ ID NO: 1271 - DNA, 653 bp, Gossypium hirsutum
  unsure (1)..(653): unsure at all n locations; Clone ID: LIB3825-020-Q1-K6-G8
nncgtccgctcccgnanaagtaaacagnaaaagngaagaattttggtgaccggtgattcgtgagtattgtaaacagcagcagcagcaatggagctgttctacttcgtggtgttcggggcattgggagcggtggtggcagcattagagctaagcaagaacagcaaagatcgaatcaacacatcctctgctttcaattccttcaagaacaattatcttgtcgtttattctctcatgatggctggagactggctgcagggtccgtatgtttactatctttacagtacatatgggttcggaaaaggtgaaattggacaactttttattgccggttttgggtcctctatgttgttcgggacaattgtcggatctttagcagacaaacagggccgaaggagggcgtgtgttacttactgcataacttacatacttagttgcataacgaaacattctcctcaatacaaaattttgatggtaggtcgggttttgggaggtatcgccacttctcttctcttttcggcattcgagtcatggcttgttgcagaacataataaagtgagtcgtcactttcttgctctttactcttcgatgcatatcaagctagatttacggtttatgttattcttgacgagtctgtttttgctttgaatctttgc

SEQ ID NO: 1272 - DNA, 624 bp, Gossypium hirsutum
  unsure (1)..(624): unsure at all n locations; Clone ID: LIB3825-020-Q1-K6-G9
cggacgcgtgggttaagaccttgactggtaaaaccataacactggaggtcgagagctcggacaccattgacaatgttaaagcgaagattcaggacaaggagggaattcctccagaccagcagaggttgatttttgctggaaagcagcttgaggatgggaggacactcgcggactataacatccaaaaggagtccaccctgcacttggttttgcgacttcgaggagggatgcagatatttgttaagaccttgactggtaaaaccatcaccctggaggtcgagagctcggacaccattgacaatgttaaagcgaaaattcaggacaaggaggggattcctccagaccagcagaggttgatttttgccggaaagcagcttgaggatgggaggacacttgcggactataacattcaaaaggaatccaccctgcatttggttttgcgccttagaggagggatgcagatattcgtgaagactttgactgggaaaaccatcaccctggaggtggagagctcggacacgattgacaatgtgaaagctaagattcaggacaagngaggggattcctccagaaccagcagaggtttgatctttgctgggaaagcagttggagggatggttcgaa

SEQ ID NO: 1273 - DNA, 649 bp, Gossypium hirsutum
  Clone ID: LIB3825-020-Q1-K6-H10
caaaacagtatccttgcctttacagttgtttgtctgaaaagaagaaatggctactgtaggaagaaacgcagcagctcctttgttgttccttaacctgatcatgtatttcattgtgttgggatttgctagttggtgtattaataggtttatcaatggccaaactgctcatccaagtatgggtgggaatggagcaacaggtttctttttaaccttttcaatcttggctgctgtggtgggtatagtatcaaaatttgcaggtggtcatcatattaggtcatggagaagtgatagtttggctgcagctggttcttctgcacttattgcttgggctctaactgcattagcctttgggtttgcttgtaagcatataaatataggaggatggaggatggaggttgaggatacttgaagcattcataataatccttgcattcactcaacttttgtatgtgttgttgatccatgccggtgtgttcagcagcctgtacggaccagggtatcgagattccgactatgggatgcatgcaccgtgggatgaaccatggcacaagaccggcactgctgtaactggatctatggtctgaaagggactgtagtttaaaactagctaaaatatgtaattcggatttgcagttcgatagcgagtaat

SEQ ID NO: 1274 - DNA, 660 bp, Gossypium hirsutum
  unsure (1)..(660): unsure at all n locations; Clone ID: LIB3825-020-Q1-K6-H11
ctgtcttggtaaaaggcagctttacttctacttctgggnaaagcatcagaagctattgtttatttctcgtccatcgggtgttcgcctctaattgcaatgaaccctgcagagtttctacttgaccttgcaaatgggaacttgacggatatttctgtaccatcagagcttgaggacaaagttcaaatggagaattcggaaactgaaaccggaaatgggaagcctccaccggcagttgtacacgagtatctagtggaggcttatgaatcaagagttgcagatactgaaaagaagaaacttatggctcctcttccattagacgacgaactgaaatcaaaagtgtcatcttcgaagcgacaatggggtgcgagttggtggcaacaatattgtatcttgttctgtagagggatcaaagaacgaaagcatgattactttagttggttaaggatcacacaagttctttcaacagcaatcatcttgggattactatggtggcaatcagatagtaaaacgattcgaggccgtcaagatcaggcagggttgttgttcttcattgctgttttctggggtttctttcctgttttcactgcaatctttacatttccacaagaaagagcaatgctaggcaaagagcgagccgccgatatgtatcgattgagtgca

SEQ ID NO: 1275 - DNA, 630 bp, Gossypium hirsutum
  Clone ID: LIB3825-020-Q1-K6-H2
gggcgaagttgactgctgatccgactactagggtgtttttacagcagccggattttgttaaggcgatgcaagagattcaaagaaatcctagcaaattgaatgagtatttgcaagatcagagggttatgcaagctttgggtgttttgttgaatgttaagtttaaggcacatggtggtggcgatgatatggagattccagaggcggattcacctccagctccgtctccttcacgaccagctaaggaggaggtgaagaagcctgagcccgagcctgaaccagaaccgatggaaattacggaagaagagaaggagaaaaaggagaagaaagagaaagctttaaaggagaaggaggctggcaatgctgcatataagaagaaggattttgagacggctattaagcattacacgacagcaatggagcttgatgaaggagatatttcgtacatcactaatcgggctgctgtttatttggaaatgggcaagtacgaggattgcattaaggattgtgacaaggctgttgaaagaggtagagagctcagatcagactataaaatgatagcaagagctttgactaggaagggaactgctttggcgaagatggcaaaatgctcgaaagattatgaaccagcta

SEQ ID NO: 1276 - DNA, 638 bp, Gossypium hirsutum
  Clone ID: LIB3825-020-Q1-K6-H3
gtggcaggtacgggtgagccaaagataatagcttctcgccgtcggatattagagctgcgatcgtttaagataggagctgacgctgctgatcaaccaccgctagagaacgatcggaaacgccatgaagactccatcgcaatctattcctaccggtatcttgtcggaattgcgattacgcggttcaaaactcaaaagacacaggtttaacaacgaaggtctattttctaatggcaacagtcaaattaatgattgagaagcccatggaagatgaaaaggaaccgccgaagttcggaatggcttctgtttgtggaacgagacgagatatggaagatgcatgtcgcgattcatccttctttttgtaaacaaagctctcaagttcaaatttcgtcggatattcactttttcgccgtgttggacggtcacgggtgcactcatgttgctatgaagtgtatagatcggtttcacgagatagtgaaagaagaagtccaagcatgcggcgtgtttgaaggcagaggagtggaagaatacgatggagaaaagctttgagaggatggatgaacaagttagagaatggacagtaaacgccaaggagagttctacctgccgatgtcagcttagaactccacagtgcgacgccg

SEQ ID NO: 1277 - DNA, 625 bp, Gossypium hirsutum
  Clone ID: LIB3825-020-Q1-K6-H4
aacccaccccacactgtttctctgttgcatcctttgtttctctcttcatctcctgcactacttgcaaagtaacgagctgaagccgtgctacaataacactagtgttttcaacaataaattaatcatagctgcagcttgtttcttttaaactctaaatataaaggaggccaaacatgccgcctcgtagataccaatttgggagggctgatgaggccactcatcccgactccatgagagccaccttggctgaattcctctccactatcattttcgtctttgccggcgaaggctcaattcttgctcttgacaagatgtacaaggatacgagtgcgacgcctgcaagactggtgatgatagcacttgcgcatgggttgtctctgtttgcagctgtggcatctagtgtaaacgtatctggtggccatgtgaatccagcagtcactttcggtgccttgctcggtggaagaatctctctcgttcgggcgctgtactactggattgcccagctcttaggttccattgtggcttgtctcttgctccgcctcaccgctggaatgcgaccgggggggttcgccctggcgtcaggagtaggggagttgcgtggtctgatattggagatagtgctgac

SEQ ID NO: 1278 - DNA, 644 bp, Gossypium hirsutum
  unsure (1)..(644): unsure at all n locations; Clone ID: LIB3825-020-Q1-K6-H7
gngcatttctgaaacattttgatttcagaaactttttaagtcaaaagaaaacaaaaaaagctgcagccggagaatttcgagctctaccgtttcctcgccgaaaacggcgtcggatcctacggcggctttccttccggttccgagtttccggctatgcaaagcttctccagttcctcgacgtattaccctttggagatgtccggtgttaccaccgaaacgacaccgcatgataaagcacttgcggcgttgaagaaccacaaggaggcggagaagcggcggagagagagaattaactcgcatctcaacaggcttagagcccttctcccttgtaattctaagacagacaaggcttcacttctagcaaaggtggtccaacgagtaaaagaactaaaagagcaagccctcgagacaactgagctcgacaacttgccatcggaaactgacgagatcactgtgctctcgtgcgattactcgggcgacgggaggttgatattcaaggcctcgttgtgttgcgaggacagatccgatcttttacccgaattaatcgacatcctaaagtccttacacttgaagaccctgaaagccgagatggcgacgctcggtggacggattcgcaacgtattcatcgtatctgccgacaggat

SEQ ID NO: 1279 - DNA, 652 bp, Gossypium hirsutum
  unsure (1)..(652): unsure at all n locations; Clone ID: LIB3825-020-Q1-K6-H9
gacaaaaggtacttcaggcaagagcagtgccattacttctgcttctgcacccttttctgaaaggctgacaacctctgctataatagaaaggatcccaagcaaatggccacgtcccgtgtggcatcgtccatggaagaactacagggtcatcagtggacatttgggatgggtgagatcagtagcctttgatcctagtaacaactggttttgtactggttctgctgaccgtacaatcaagatatgggatgtagcaagtggaaggctaaagctcacactgactggacacattgaacagatacgaggcctcgctgtcagtagcaaacacacatatatgttctctgctggtgatgataagcaagttaaatgctgggaccttgaacagaataaggttatccggtcctatcatggtcacctaagtggtgtttattgcttggctcttcatcctacaattgacattttgctaactgggggacgtgattctgtctgtcgggtatgggatattcgcaccaagatgcaaatttttgcactgtctgggcatgataatactgtttgctcagtttttactcgaccaacggatccgcaaattgttactggnttctcatgatacaaccataaaattctgggaccttagatacggaaaaacgatgtcaac

SEQ ID NO: 1280 - DNA, 658 bp, Gossypium hirsutum
  unsure (1)..(658): unsure at all n locations; Clone ID: LIB3825-021-Q1-K6-A10
cgtcgccttgggaatttgagacccgaaatactactgcactgtgattgatgcacctggacaccgtgactttatcaagaatatgattactggtacgtcacaggctgactgtgctgttttgattattgattccaccactggtggttttgaggctggtatctccaaggatggtcagactcgtgagcacgcattgcttgcttttacccttggtgtcaagcaaatgatttgctgttgcaacaagatggatgccactacccctaaatactcgaaggctaggtatgatgaaattgtgaaggaagtctcttcctacttgaagaaggtgggatacaaccctgacaagattccatttgttcccatttctggttttgagggtgacaacatgattgagaggtctaccaacttggactggtacaagggccctactcttcttgaggctcttgaccagatcaatgagcccaagaggccttcagacaagcctctccgtctcccacttcaggatgtgtacaagattggtggtattggaactgttccagttggtcgtgttgaaaccggtgtcttgaagcctggtatggttgtgacatttggcccttctggtctgacaaccgaagttaagtcagttgagatgcaccatgaagctcttacagaggcacttnctggtgat

SEQ ID NO: 1281 - DNA, 641 bp, Gossypium hirsutum
  unsure (1)..(641): unsure at all n locations; Clone ID: LIB3825-021-Q1-K6-A11
acaggaccgcattacatttgcccgaagtccaggagtatcgattatttttattgacccaanatgagccagggacaacctaggaggcctcaacaaccagcaggtcaaggtgagaaccaagagcctatcaaatatggagatgttttcaacgtgagcggtgagttagccaacaagcctatcgcaccccaagatgcagccatgatgcaaacagctgagacccaagtgttgggtcagacccagaaaggtggaaccgctgccgtgatgcaatctgccgccacgaggaacgaacaagttggcgttgtgggtcataataatataactgacattgctggtgaacaaggcgttagcgtcgctgaaactgatgttgctggtcggcgtataatcactgaggcagtcgctggccaggttgtggggcaatatgttcaagcaacaccggttatgacaagccaagtgggcgctgtgcagcaaaacgcaataaccataggtgaagccctcgaagcaaccgctaaaacagcgggcgacaagcccgtcgatcaaagcgatgccgctgccgttcaagccgcggaagttcgagcgactggttcgaatgtcataatccccggcggactcgccgctactgctcaatccgccgcggctcataacgc

SEQ ID NO: 1282 - DNA, 656 bp, Gossypium hirsutum
  Clone ID: LIB3825-021-Q1-K6-A12
tttcactcaactgaagcaaccaaatgaagagtgagatattttccggaagaccaagtcttaggcgagatgaagaagaagagatcaaaggcaacagaagacgcagctgcagcctcccacaacaacaaggatgaatctcattacttgagagaagaagaagaagaagaagaagaagaagataagacggagattccacatgtgacccatggttatgatttggttaaaggaaaaatggatcatggaatggaagattatgttgttgtagaaagtaggagaatcaacggacatgacatacgactttatgcaattttcgatggtcattcaggtcgtgatgttgccaaatattttcatactcatctctttgacaagatgttgagccagtctgatttctggagaaacccggaaggagcgatcaaaagagcgtataaagaaatggatgatgagatattggaagatgttgctggttcaagaggtggttccactgctgttacagcgatattaatagatagaaagaagctaatggtggctaatgttggtgattctcgggctatattatgtggcggagatggggtgaaacaagtaacaatagatcatgagccgaaaaggagaaacaagtagttgaaagtgaggaggatttgtgtcaaaaaaccagggaatgt

SEQ ID NO: 1283 - DNA, 612 bp, Gossypium hirsutum
  Clone ID: LIB3825-021-Q1-K6-A2
cccacgccgtccgaagtgatgctatagttcttgggtatcaactgcaaagggtcccaggcagagatgtcagtatccctgaatggtacacaaactgctgaaaacgaacttggtctaagtaccggatcaccgacttctgaaatgagtgagagcaacgcgattacagaattttgcactgacgactttgaaattcttcatggggatcttcaaggtctttccgatacaaggagtttcctaaattctttggtagaacttaataatgtttctgattcagaaaagaataatgagaagcgtcagatgcgtgagcgtaaggctgctgctgggctttttaattgggaggtggacatctttgtgacaagggcacctggaaggctggatgttatgggaggcattgctgattactcaggcagcctagtattgcagatgcctataagggaagcctgccatgtagccgtgcaacggaatcatccaagtaaacacaggctctggaaacatgcacttgcacggcagaatgctaaaggacaaggaccaatgcctgttttgcaaattgtatcatatggttcagagttgagcaaccgtggcccaacttttgacatggatttatctgactttatg

SEQ ID NO: 1284 - DNA, 346 bp, Gossypium hirsutum
  Clone ID: LIB3825-021-Q1-K6-A3
ctccggggcctatggatgtgtgccggtctagattgatggtgtttgttggattaaccattctgatgtataggggcacagcttggttggtttttgctggaataaatagagaccactgtgtggagaccctgaatgcaagataccattaatttttagatgaatttgattcaaaaaattaatggtatcttgcattcagggtctccactaccagtgggtctctgatttattccagtcaataaaaccatacacatagcctgttgtcccctaattacattacagtaactgtgtttcatatccatacaaacaccattcaaatcttagacacggcacactatcacatatggctccg

SEQ ID NO: 1285 - DNA, 517 bp, Gossypium hirsutum
  Clone ID: LIB3825-021-Q1-K6-A4
caactccggacctccaaattagtgatgatgatttgattctttcgtctgttttgtcactcggagagaaacaaagccgaactggatatacagtctgtgtgcagcatatccctaccgccttaactttccaatcttcaggtgagaggagctactttgctaatcaaatcaaaactctcaatcggttaaaggccaaacttcttgtagtagcaaacgagcaaggagtctccgatgtaagtagcatcaacacagccgccatgatggacatgtggcaaaaggagactcgaaggtacatgtttcatcccagcaagttagtacgggatgtaaaaactggcctcgaattacccgacctaaattccgttctagatggaaacattgaagcccttattgtagctcatatcaacactagacaatctaattttacaatctaaaattccacattgcttgcttgtactccctacaatccaaacattgtacacaaacatatatgcttttgaaaaaataaacctcattttttcggttt

SEQ ID NO: 1286 - DNA, 624 bp, Gossypium hirsutum
  Clone ID: LIB3825-021-Q1-K6-A5
cccacgcgtccggttttcccagaaactttcctgggtttcggctcttgatccaacccataagtctctaggtttcaaaaattggctggaaaggagttcactgttaatctgaacaaaccccttgtcttccaggttggacaccttggagaagcttaccatgaatgggttcatacgcctattgtgacagatgaaagtcctagctttttcaagagtgatttcatggagatcctgactcggacagtgcggtgggtagtaccattgatatgggtgccggttgcaatgtggttcatctcactctcttacacaatgggtcatacacttccccaagttgttttaatgtctgttgttggaagattcatttggacattcttggaatactgtctccaccgcttcctttcacacattgaaacaaagagctactgggcaaacacttttcactatctaatccatggctgccaccataagcaccctatggatgggctaacgcttgtgattccacctgcacaagctgctatactagctataatgtttgggaacttgtatgggattttattcactatctccacaagacctgcattattaggaggtggactaattggatatgtgatatatgatatgatacattac

SEQ ID NO: 1287 - DNA, 629 bp, Gossypium hirsutum
  Clone ID: LIB3825-021-Q1-K6-A6
ctgaaactaattgaaatcgtcggctgtctctcatttctgttcctctcgggcttccgccgccgtcgacacccaaaatggaggctcaccggctatcttctactaaacctgttcaagctctcaagccaacaaagaagatttctttagaggaagataccggtaaagcctccgacgcactgccgcttcccttgtacctaacgaatgccctgttcttcaccctcttcttctcggtggtttatttccttctttcccgttggcgtgagaagatccgtacctccacacctctccatgtcgtcaccttttcagagatcatcgccattctctcatttttcgcgtcctttatttaccttttgggtttctttgggattgacttcgttcaatctttggttttccaaccatcgcctgacgtttggattgccgaggaagaggatgatgaagttctgcttgcaaaggaagatgcccgtaaggtcccttgcgggcaagctctcgattgttcgcttccacctctgcctcctgcggcaccaatcgtgaccgtccagaaggtgttcgatgaaaagcctgtgacggttctaacggaggaagatgaagaaatattaaatctgtagtggctggtacaaccccttcatattcct

SEQ ID NO: 1288 - DNA, 652 bp, Gossypium hirsutum
  unsure (1)..(652): unsure at all n locations; Clone ID: LIB3825-021-Q1-K6-A7
gnagcgatcggaagactacttgaagcttgctgttaaaacaccgtaattttccagatgaataggcgtgtaagatggaatgaggaaaatctgggggaaattgaagcaaataaacccgtaaggcagaaaataactgaacccaagacgccgtaccaccgcatgattgatgacgatgggtctttgtctcccagaggacgtagtttcaatgattgtgtcattgatgtggatgctgaggaattatgctctgctttgaaagatgtggcttcctcaagtagaaaaacaactgggcaatcaggtggttggacttcttctgaggatgaggctgatcctatggatcatgatgaagaagatcggaatagtaagagttttaaggagcaaaggaaagcacactatgatgagtttttgaaaataaaggaactgcgacgtaagggttctttcattgaggatgaagatgatgaagtggagggtgattcatcatcatcattaagctctggtgtcaaagacataggaattggggaaggtcctgcaagtttgccccaaaagtcttctgcaagtcctgggcatccaggtaatggattgtgattgtagaagtcatccgaccagtcaaagacgcaaaagctcgctcttttgacattctttatggttgtttgatgtt

SEQ ID NO: 1289 - DNA, 636 bp, Gossypium hirsutum
  Clone ID: LIB3825-021-Q1-K6-A9
ggctgttggacaagccccgacccaaggtgtaaaatccatttcttcaggtgatgtgaagaagtgtctcggacacaactggactctgaagaatcaacaaaacccaatgttaaggggaaaactccacctgagaaacctcccatcaataaggggaaagttaagactctgaagaaaccaaacacgggagtcttacccatgaagaaagggaaaggatcaaagctacaaaatggaaccgaggatgcttccgagtcggggttaggtaatcctgatcttgggccgtttctactcaaacaagctagggatttggtgtctgcaggagacaatccccagaaagctcttgaactagcacttcgagcagccaaatcgtatgaactttgtagcagtggaaaacccaatttagaattggtcatgtgtttacatgtcactgcagctatatattgcagcctaggccagtacaatgaggcaattcctcttcttgaacaatcaattgagattccagtgattgaggaaggccaagagcatgccctggctaagtttgctggtcatatgcagttgggtgacacttatgccatgctaggacagcttgagaactcaataacctgttacagcactggttttgaagtccagcaacgagttctt

SEQ ID NO: 1290 - DNA, 620 bp, Gossypium hirsutum
  unsure (1)..(620): unsure at all n locations; Clone ID: LIB3825-021-Q1-K6-B1
gngatttgaagacatctaatctgcttttaaaaaccaagtgaattgaagatttgtgattttgggttggctcgtcagtatggaagcccattaaaaccatatacacatttggttgttactctttggtacagggctccagaacttcttttgggagcaagacaatattccactgcaattgacatgtggtctttgggttgtataatggctgaactactttcgaaagaaccacttttcaacgggaaaactgaatttgatcaacttgacaagattttcagaacactgggcacaccaaatgagacaatatggcctggtttttcgaagttgcctggagtcaagatcaattttgtcaagcatcagtataatctattgcgcaaaaaatttccagccacgtcgttcactggcacacctgttctctctgacgcaggatttgacttactgaataaactccttacttatgatcctgagaagcgtataactgctgaagctgctcttaaccatgagtggtttcgtgaagttcctcttcccaagaccaaagctttcatgcccactttccctgcccaacatgctcaagacaggcgaatgagaagatactgaagagcccagatcctttgcaagagcaacgt

SEQ ID NO: 1291 - DNA, 647 bp, Gossypium hirsutum
  unsure (1)..(647): unsure at all n locations; Clone ID: LIB3825-021-Q1-K6-B10
ctgatcttaaaaaaccctanagtttaaaactttcttgtttctccttgccacagctgaagggctaacagcccccaccaccgccgaaaccaactgcaacgaatggtcctccaatggagcggtaagtttccctctctcccttatactttagtatgcaaaagaatctaaatgaagagctgaaagtaataggggaaaaaatatgcaatcacctttaaaataaaaaccaatattcacttgctgttttttgcctgtattcggtatctcgtgtgaatctttgtactcgatttctattttatttctctgaaaaaaaaacaacacacccttttacaatcaaaatttgaaggttttatagccaaatacaagcggtttctgcctattctcttgctcaaattgcaaatcgtgaagacgtggagagacgtgggcgagcaacgagcgagttgggggtcgtgcttggtgtgtcgacgagcgtggtagagggaagcagcggctgttttctctttttgctgaaaaattagttagttttgggctgtttgggctctagggttaagtttattttgggcttataattgggttagttgtttttgtaattttggactcttttttttgaattttttatgtcgattatttgggttttatttatttattgggct

SEQ ID NO: 1292 - DNA, 639 bp, Gossypium hirsutum
  unsure (1)..(639): unsure at all n locations; Clone ID: LIB3825-021-Q1-K6-B11
cacctctgcaaggggaacagtcaagattttagcttcgattctcacaccacctctatgcccatccccactatctttgaaatttagagtttctgttctactacatggtctgccagggtgtgggaagaggactgttgttagatatgtttctaagcgactgggtctacatgtagttgaatatagctgccacgacctaacagcctcttctgagaagaagacctctgctgctttgactcaagctttcaacagttcgcaaagatactcaccaacaatacttcttctacgccattttgatgtttttcggaattttgcctcccatgaaggtttgccaagtgaccaaattggactttcctctgaatttgcatcagtcatcagaaagtttactgagccagttgctagtgatgaagacggcaatgcggaagacatgtcaaacgttgaatttgctgtaaaggacagtggaaatgtgggtaggcacgaggtgctgttggttgcagctgctgacagttctgaaggtctgccaccagctatntaggcgttgtttcagccatgaagtaagcatgnggtcccttgactgaagaacaaaggctgaaatgttgtcacagtcaatgcaaggtgtttctgaacttctttctgatactcgct

SEQ ID NO: 1293 - DNA, 636 bp, Gossypium hirsutum
  unsure (1)..(636): unsure at all n locations; Clone ID: LIB3825-021-Q1-K6-B12
gtataaaatcaagtgcaggagctagggtttccatcaattgcaaaatggagggattagtttcaatgaaaacagcttctggaatttccttccactctattccttcccctaatcagcgacctaatttcttcctcagacgctcctcaatggaccttcagcatcggcgattccattttccctccattcgagctcaacagtcggggacgatatttccgggaaaagaaggtgaggaagattctttgaaggtaagggaatgggaagttggaatgttgcaaaacgaagtcgcagcgagtcaagggattagaatacggcggcgtccaccgtcgggtccgcctttgcattacgtgggtcccttcgaattccgtttacagaatgagggaaacactcctcgtaacattcttgaagaaatagtttggcacaaagatgtggaagtttcccaaatgaaagagaagaagcctttgctttcattgaagaaggttatcgagaatgcacctccaactagagatttcgtcgggtctcttaaagctgcccatttgcggactggattgcctggtttaattgctgaagttaagaaggcttcgcctagcagaggaattctcaganagaattttgacccagttgagattgctagagcatatg

SEQ ID NO: 1294 - DNA, 611 bp, Gossypium hirsutum
  unsure (1)..(611): unsure at all n locations; Clone ID: LIB3825-021-Q1-K6-B3
ggaagcaaagtaactacaatggaaaagcgaccgagtataaagactatgcagctngaaaaagcgaaggaagcgaaggacgtgacagctgagaaccaaaacaggggacggaatatgcagcggagaaagcaaaggaaggtaaggatacaacagttagtaagcttggggagttgaaagattcagctgcagacgctgctaagagggctatggatttcctcactgggaagacggaagaaacgaagcagaaggcatccgagactgcacagaacaccaaggagacattgagtgaaacgacggagtcagctagacagaagatggaagagatgaagctgagaggtgatgaaggtagaaggaagacttatgatgatgatgcgaaacgccacggtcgtgaagggttttcagagacgatagtgattaaggttgaagaatccccggcaggagccgttgatgctacactgagatcatctgatgaaacattcaatgatgttgggccgtgttggggaggaaggcgttattcgtgatcgctccagcaaaaccaaaatgtgatctcacactgcacacacccttaattaggggtggaatatttgcgttgcttttcattgttttacttctgt

SEQ ID NO: 1295 - DNA, 628 bp, Gossypium hirsutum
  Clone ID: LIB3825-021-Q1-K6-B4
gtttcctatctctctcatcatcttcttcctcttgctttttccccaagtttttattttggattggattagaaacttccacccacgtgtttggtttttttatttaacttcatatttttttcctcaataccctttctagattattttcctggaaaatttcccttttttcttttcataatccaatcctgtttgacaattttacatgggataaaggaatatctactttcctctggattgttcttcaaaggtttttagggtttaaaggtttacgtgctttcagtggaagtgatcctggtttcgattagcttctgaaaatctcaattgttttgactttttttttatttaaaaagaagaagaaaaaagcaggcatatgcttgagtttgaatgaaatggaaggatcgcagggaagttgtaatgggccgccgccttttcttacaaagacatacgagatggtggatgatccagtgactgactcgttggtgtcttggagtgaaactggttacagtttcgttgtatggaaccccccagatttctcaagagatttgctccctagatatttcaagcacaataacttctcaagctttgtccgtcagctcaacacctatgggttcagaaagatagatcctgatca

SEQ ID NO: 1296 - DNA, 621 bp, Gossypium hirsutum
  unsure (1)..(621): unsure at all n locations; Clone ID: LIB3825-021-Q1-K6-B5
cggacgcgtgggcgagagcgtgggcgngagcgtggggcaaagtattgcaagaaacttatatcattgattggcaggcacatagatgacttgccaactttccgccctaaagtttgaatcggtttgcagtgatagttgtatcttagtttttgtgttgatttagagacatatacaaggaaccatgatctgaatgtgatgcagctgcagtggggaaaaaatcccttttatactgttgtggggctagcggattggtgcatagagccactatgctatttttcattctgcttgtatcttggtccaatgattaacaagaggttagttgcagcaattgcttgttttggtggcaaagtattgcaagaaacttatatcattgattggcaggcacatagatgacttgcttgtagagattaatttttcgaggtgattgagttacagccttcctcaattcacttattaggatgattttgtgatgaattgtaatggtccttagcaccgattgaaaggtgaaggttattattgactttaccttttcttagtatattgtatcagatgcttgtgtatatatctttagccatgtttaaaaatttccttactgtcatactcaaattatcgctcacattgttt

SEQ ID NO: 1297 - DNA, 621 bp, Gossypium hirsutum
  Clone ID: LIB3825-021-Q1-K6-B6
gtttattgtgaattatcaggaattggctggtttaagcgttgccacatcgattaatgaggtttataaaccgagtgagtataaccgtgttcttgctatttgtggtccgggaaacaatggaggtgatggtctggttgctgctcgtcatttgtatcactttgggtataagccatttgtgtgttatcctaagcgaactcagaaaccgctttattctggtcttgtcacgcaggtatgatactagctagagctgtaagtgtaatgttattgaacattgaacaataaacaatatggtttatctgagttgttattcaatctattggtaccatagctggaatctctgtcaatccctttcctttcagttgatgagttacctatggacttgtcaaaggactttgacattctagtggatgctatgttcggcttttcatttcatggtgcaccaaggccaccttttgatgatctgattaagaagcttattaacttacattattatgaacaagcacaacgaaagccccctgttattgtgtctgtagatattccatctggatggcatgttgaagagggtgatgttggtggtgatggaattaaacctgacatgttggtttctttgactgctccaaaact

SEQ ID NO: 1298 - DNA, 646 bp, Gossypium hirsutum
  unsure (1)..(646): unsure at all n locations; Clone ID: LIB3825-021-Q1-K6-B7
ggaacagtctccaactcagtcgttggtgtaacttgcttggttgcttctcccgctgaacgagagcgtgggggctcatccaaactggtagaagcaatgngaaagaggggtacgagtggtgagtgaagcttggttacttgacagcattgagaagcaagaagcacagccattagaagcttatgacatagttacagatcttgctgttgatggcaaaggaattccatgggataaacaagttcctgaagaacatgcaatcgaatcactttcagctgaactcaagttgtatggaaaaagaggagtctacaaggatactagattgcaagagcaaggtggccaaatatttgaggaagatgggatattatacaactgtgtcttttcgctttgcgaccaaggaggagccattaatgagtattgcattatgcaactgatcaaagtaccagatagtaacctccacttgtactacaagaaagggagagtaggggatgatcctaatgccgaggagcggctcgaggaatggaaggacgtagatggtgctgtgaaggagtttgttaggctgtttgaggaagtaacaggaaatgaatttgagccatgggaaagggagaagaagtttcagaagaagccactgaaattttatcccatagacattgat

SEQ ID NO: 1299 - DNA, 601 bp, Gossypium hirsutum
  unsure (1)..(601): unsure at all n locations; Clone ID: LIB3825-021-Q1-K6-B8
ttttctttgtataaaacaaatttctaactttctatctcagcaatctcgttttactcttgaanatgtcggctgctgaatcagctactgcaattcacagaaaccaagttgatctcttggattttattgattggtctggagttgaatgccttaatcaaagctccagtcaccctttgcccaatgctctcaaacagggttatagagaagatgaaggcttgaacctagagagcgatgctgatgagcaacttctgatttatatccctttcactcaagttattaaactacattccattgttgtcatgggatctgaagaggatggtcctaagacagtgaaactttttgcaaacagggagcatatggggtttagtaatgtgagtgacttccctccaagtgacactgctgttttatcccaggataatctaaagggaaaacctgtagtcgtgaagtatgtcaagtttcagaatgtccgtagcttgacaatatttattgaagataatcagtcaggttcagaaattacaaaggttcagaagattgctttgtatggatcaacggtggaaacgacggacatgaaggggttgaagaagattgaggatcattaaccctg

SEQ ID NO: 1300 - DNA, 604 bp, Gossypium hirsutum
  unsure (1)..(604): unsure at all n locations; Clone ID: LIB3825-021-Q1-K6-B9
gccttcatgtaaggttatggccccctttacaccattcttcactgaggttctttnatcaaaacatgcgaaaaatctgtgatggagcagaggaaagcatccattattgtagtttccctcaaaagaaggaaagagggggagcgaattgaagaaagtgtggctagaatgatgaagataattgaccttgcccgcaacattcgcgagcgtcacaacaagcctctcaaaacacctctgagggagatggtagttgttcatccggatgaggactttcttggtgacatagttggcaaattaagagagtatgtactggaggagctcaatataaggtctcttgttacatgtaaagacactttgaagtatgcatccattcgtgcagagcctgattttagcgtattaggtaagcgactaggaaaagctatgggagctgttgccaaggaaatcaaagccatgtctcaggaagatatcttagctcttacgaaagctggagaggtgactattgctacacactgtttgaagctgactgaaattaagcttgtgcgggaatttaaacatcctgatggcatgacagataaagagatggatgcagctggagatggtgatgttttgg

SEQ ID NO: 1301 - DNA, 627 bp, Gossypium hirsutum
  Clone ID: LIB3825-021-Q1-K6-C1
ggaaaatcgtatttattgtaattaaatacagactaacttcaatttcatccaacttaaatgactattttgatgaaaatacattagtttaattaaatttaattataatatatactactataaataaacgtaatgtcattacagttttaccacttgacacgtgtttttggttagccttttggttttttttttaattataagataaaggtcaaatttcagttttgacacctatattatactaaaacttaagtttaatctatatactttatttatttttatttaatttagtttctctacttttataatgtcattagttagcctaaataattaatattgttaattatttcaataaaaatgttagcgctaatttttcttaagaacactactccaacaaaaaaatttatcttattatgacgagttaagatgatgtttttaagaaaaatcctattgaatatttttaacattatttttattgttacataactactcaatgaatatatatttttttatttcaaaatgttatggacaatggtaatatcttataccttcttgtagagtttttttttttttattctgctagcaatgtatagaataattaccctaaacgttaacataaaaattaatattgta

SEQ ID NO: 1302 - DNA, 649 bp, Gossypium hirsutum
  Clone ID: LIB3825-021-Q1-K6-C10
cagccacaatcaccaaataaatacaaatgcagatagattccaggctaagcttgaaaaatagaaatccaatagaaacgaaaagtccacgaaaatttggaagtttagaaaggaaagagtgattaatcacaaatctatttcattattgattactatatattttgtaaaattcagaaaggaaagagatgcaggccatagttattagccctacatattgctgcaacgcccatcaatccccagaaccctcctcttctcgtcccctaactaccaagccctctagcttctttggcatccgcgtcttgctcgcgaaagggcgtaatcccgcgcggcgttgctcatggcgttgtgtgcgggtccgatcacctgctctcacgcgcaggaaagttgtaaaggctgttgccacacctgattcagccttagaattgcccctaactgctgagaatgttgagagcgtgttggatgaagttcgaccctatctgattgctgatggggggaatgtggcattacatgagattgatggtaatgttgtgcggttgaagctccaaggagcatgtggctcatgtccgagttctgttacgacaatgaagatgggtattgagaaacgtttaatggaaaagatcctgaaattgttgcagtggagcctataactgat

SEQ ID NO: 1303 - DNA, 636 bp, Gossypium hirsutum
  unsure (1)..(636): unsure at all n locations; Clone ID: LIB3825-021-Q1-K6-C11
cggccgcgtgggttttaataacaggnatggtcacatgcagccaagagttgctcctaggttaatgaggcatccccccccacctcctctgcctaatacttanccatttattgctcacactcctatgcggccttttggcaccccaatggggtatcctgaattggcatctctttatatggtcccagctgctcctccagagtcacttagaggtttgccatttgttgcctcaatgtccccaatgtttttcccatcccctgagcctcatgacaatcagttgcatgctagtatagtgaatcagatagattattatttcagtaatgaaaatctaattaaggatacctacttgaggcagaacatggatgaccagggctgggttcctattaaattaatagccggcttcaaaaaggtttcacttttgactgataatattcagctgataacggatgctctgcaaagttcaacagttgtggaagtgcagggtgacaaagtaaggaagcggattgattggatgcgatggataatgccgccttctgttcatttccctaccatgtctggtcaggatacanctagcagctcgtgttcagaatatttcanttggatcagnagaactgcaaaccagnatggtgcaagtaacccctg

SEQ ID NO: 1304 - DNA, 568 bp, Gossypium hirsutum
  unsure (1)..(568): unsure at all n locations; Clone ID: LIB3825-021-Q1-K6-C2
cttgtatcaagnaaagtgtagctttngagacatccttctggaaaggatcgcattttacggcctgaagggctgtgatattccgggatgatgtcgatgtcctaaacaaggttaggaaaattgctggaggcatgagatgggacaccaagatgaatgatcacgaggatggtccccttgtgccagagaaaattctagttgcagttaaacagtactgggttggtggtatcaaaggaaacagtacatccagtgctgaataaaccaacatcaacaggtcaagtatttcaaggtaaaactaaaaagcaaaggttaaaatctcgaactgatggtgaagttggttcagacagagggactgaagagttccgatcaacaaccctcaaaaagatacttaagttgctacattgtgttatgcaccatgtagagaatatacacaattatgttagcttgtaatcctgagtgttattttgggaggaaatagtgtttttttacattatttgtgtagctgcccaaataattatgtcaagatacaagaaagcatagtgatgaatgacaataaacaattctatttatcatc

SEQ ID NO: 1305 - DNA, 627 bp, Gossypium hirsutum
  Clone ID: LIB3825-021-Q1-K6-C3
ctccctgccgccaaacgttctagggtttgaaatcttatcttcctcatggcggagaaagagcgtcgccggagcccgccgaggccaacccaccaactgaagacatggatctcgaaaaccttgactcctccgcccaaaaccctaatgccggagacgacgccaacggtgactccaaatcgaagcgcgggagagaggaagacggcgaagaaaccgaagacgtttccaaaaaaacagaaactggagaagtccgtagaggaagaaaggttggagaagaagtcagatgagtcaccggagtcgggtcgtgtacggctcggtccgaaggagttcgggtcgtcttcggagatgttggattacttttgctatttgctttatcattggggtactcaactgaactttaacaagtatgaacatatggtattgctggacttgcttaaaaaaggtcatctagagcctgagagaaagattggtggaggggtcaaagctttccaaatccgtaatcatccccagtggaagagtaaatgtttctttgtgattagggatgatgaaactatggatgattttagcttccgcaagtgtattgatcatatccttcccttgcctgaagatttgaagggaaagagcaattcaaac

SEQ ID NO: 1306 - DNA, 472 bp, Gossypium hirsutum
  unsure (1)..(472): unsure at all n locations; Clone ID: LIB3825-021-Q1-K6-C6
ctcggnaccacacaagctggaagacacaggtgggttgaatatgcgaaaaagatcgttatgatgcttctcaggtaccaccagaatggcatggttggcttcacttcataactgaccataccggtgatgagcttttgatgctaaaacccaagaggtacggggtggagcacaaggagaacttatctggtaaggggaatgagtttatctaccattctaaaggacatgcacttaatccgggtcagagagactggacaaggtaccaatcatggcaaccaaccaaggctgagtagtaatcttttgactttgcaagctgtgggacggatgtttgacttttgtttttgatgaataaatatgggttgtattcgtctcaaaggatagcttttgggcatattttttaaatacaagaaactgcaaactatcaacttgatatttggatgttgccaaataagtttgaaatcatcacctgatattgttc

SEQ ID NO: 1307 - DNA, 630 bp, Gossypium hirsutum
  unsure (1)..(630): unsure at all n locations; Clone ID: LIB3825-021-Q1-K6-C7
gnaaatagtaggaggaaaaaagaaggtgaaaggaaaagaaaagagctttttcatttttcccacctgaggaaacgaaaatcaaacagtcttttttctcaatccctctctaacaatgagtctcttcggtctgggaagaaatcagagaacattccgccccaaaaaagtgcaccttctggaagtaagggtgcacaacttaaaaagcacattgatgctaccctgggcagtggaaacctaagggaagcagtgaggctacctcctggggaggatttaaatgaatggctcgcagtcaacactgtggatttcttcaatcaggtgaatctgctctatggtaccctgactgagttttgtactcctgagaactgtcctacaatgaccgcaggccctaagtatgaatatagatgggcagatggcgtgcaaatcaagaaacctatcgaggtttctgccccaaaatacgtcgaatatctaatggactggatcgaaacacaacttgatgatgaatcaatatttcctcaaaaactgggtgcaccatttcctccaaacttcaaagatgtagtgaagacaatattcaaaagactgttccgagtatatgcccacatctatcactctcactttcagaaaattgtgagcctt

SEQ ID NO: 1308 - DNA, 630 bp, Gossypium hirsutum
  Clone ID: LIB3825-021-Q1-K6-C8
gcattttctccctcgccaaacagaaatcttagttcatttctagacgcagggaacgatggagaaagcgatcaaccgacagcaagttttgcttcaacaccttaatccttcagcttcttctttttcgtcgcaccaaaacaactctgccctctctgcatcggcttgtttagctggagatagcgctgcttatcaaagaactaatgtatttggagatgatgtggtgatagtagcagcatataggaccgcgctttgcaaatccaagcgagggggtttcaaggatacttatcctgatgatttacttgcacctgttttaagggcagtgatagagaaaacaaatttgaatcctagtgaagttggggatattgttgtgggaacggtcttggcaccaggatctcaacgagctagcgaatgtcggatggctgcattctatgctggcttccctgaaactgtgcctgttagaactgtgaacaggcaatgctcatccgggcttcaggcagttgctgatgtagccgcagcgataaaagcagggttttatgaaattggcattggagctgggttggaatctatgaccactaatccaatggcatgggaaaggttcagttaaccccaaggtgaagcaaatggagcaagctc

SEQ ID NO: 1309 - DNA, 606 bp, Gossypium hirsutum
  Clone ID: LIB3825-021-Q1-K6-D1
ggcaatttcgtgggaggagcctcatccctctcaaagttccccagcgaagctgctctgatgctgatgaagataattggagatcagcttgtccgtcgctacaaccatgggatcctggatctttactgtactccaactgggctcagagccataatcagcctggaataagcagtggaggagttgtcccaaaccagatcagtaatcattctccaagcctaaaggaacttactaataatcattctattttgaaaaggaacctatcaagcgtatctggatcagaacgagctctaaggaaaaagagaattgatcaggcatatcgggaaagatgtaagaatcacaaaatggaaatgcaatcgaatgtggagaaccttaaagaagaaaatgattctttaaagaaagagaatacgtccttactaaaggattattctttaatgaatggaactttgagagatcaagaaaaagagattgaacagttgaggaatgatcttcttcagcttaagcgcgagcatgagaagcaaaatgttcttgtgctaacactttcagggtttttagcattgttatgctgaagggattttatgttgtccaatacgaaaaaatgctaaccagttt

SEQ ID NO: 1310 - DNA, 609 bp, Gossypium hirsutum
  unsure (1)..(609): unsure at all n locations; Clone ID: LIB3825-021-Q1-K6-D10
gnaaaagctcaaggaagttgggattttcttcgtctgcgattttgtaactatgcggggtagaagttacagttacagtccctcgccaccaagggattatggaaggaggcggcatcgtagccctagccctaggggtcgctatggaggtcgtggtagagatcttcccaccagtcttctagttcggaaccttcgccatgactgcaggccagaagacctgcgtggaccttttgggcaatttggtcgcctcaaggacgtctacctgcctcgggattattatactgggcaaccacgtggttttggatttgtccagtatctagatcctgctgatgctgctgatgcaaaatatcatatggatggctatgttcttcttggaagagaacttactgttgtatttgctgaggaaaacaggaagaaaccttcagaaatgagggcaagagaacgcagaaggcgctctccaccaagttattctcgatcaccaagatatgctcgaagttactcccgcagtccatactattattctccttctcctaggaaaagacgttactcaaggtcaatttctcctggagataagagatatagagaacggtcttactcgagctcaccctatggctc

SEQ ID NO: 1311 - DNA, 636 bp, Gossypium hirsutum
  Clone ID: LIB3825-021-Q1-K6-D11
ataagaactggacagtaaaggtgtgtgattttggactgtccagattcaaagcgggcacttttatatcatcaaaatctgttgccggaacacccgagtggatggctccggaattccttcgtggagagccttcaaatgaaaaatccgatgtttacagtttcggagtaatcttatgggagcttgtgaccatgcaacaaccttggagtggactcagtcctgctcaggtggttggtgctgttgctttccaaaacagaaggctggccgttcctccgaatacttctccaaagttggcttccctcatggaatcttgttgggccgacgatccggctgaacggccgtcatttgctaacatagtagaagcactaaagaagtttctcaagtcaccattgcagttggtggaaatgggaactcagtgaccgagtggcccttaaaggccattcctactgtgaaatagttcgaataaagccgattccagggatctattttttaaccttgcagcaaagcaactcttggacttggctgtataatgttattccactaacagagctgcaactgtagatgcctatcttactaacccgtttggaaggcagttaaaatcccatcttaaaagacaaaaaacctataaataaaaatcacagc

SEQ ID NO: 1312 - DNA, 639 bp, Gossypium hirsutum
  unsure (1)..(639): unsure at all n locations; Clone ID: LIB3825-021-Q1-K6-D12
gcggnaaatttggatcaggaaaccagggattaaatgtgcctcaaacaattacatgtaacataatgtccctagaaacattgaaatccttgaccaccatgtcgtcgcataaaggtgatgttgagcagccaaaaccgattgagcaagatcttgaacttgggttggcaggcagagggagttccttggttctggctggccttcatgcttgtggagatctctcagtaacaatgctcaagtctaaatatgcttgacccttttagagtgtgaagaagttagagcagttattagcattggctgttgctacaacttactatctgaagaagggtttacaaatgctcaaattcaatatggttttccaatgagttgtggtgtaaaaagtgtttacttatctcttggaaaaagttctcgcgatcttgcttgtcagagtgctgaaaggtggaaaagtttaggaaaggatgccggtctccacaattttgagctgcatgctttccgtgctgcttttcaaatggttttgcataaatatttccctgaagttggaacaagtccttcaattgggcgccaagggaaggctntgcgccgtaagcagcaaaggaagataattgagtctgaactgcaagctgaagnaagtacttattctgatct

SEQ ID NO: 1313 - DNA, 550 bp, Gossypium hirsutum
  Clone ID: LIB3825-021-Q1-K6-D2
cctttttaccctcactcctatataagcagtaaaaaaaatatggctcgctctgtttcttcctttaagctccttggtgcttctatttttgatggtctttatgtctccatatcaaggagaggttactcgggtgcaccgccggcggcagtgacggctagctttggtaggcctggggcgatggggaaagtggaacgaagagatgcgatgaaagagtcgtcgtcgtcggagacaagggcttattcttcagcttgggcgcctgaccctgttacggggtattaccggccggagaattgtggggctgagatcgatgcggcggagctccgggagatgttgttgaatcacagggttagatcacagtagaaacttgccaccgcatgtgatcaccgtagcagagcagagccataatgttttgcagatgtttgggtgcctttgtattttgttttggttttgagttcaaaatcttttatcttaatagtcggtagttttttcgcataaagagtgtagtgtgctgaactttaagctaaagcagaaaattaactaaattaccactttt

SEQ ID NO: 1314 - DNA, 339 bp, Gossypium hirsutum
  Clone ID: LIB3825-021-Q1-K6-D3
cactcgccctgtacatgaacatcaagcgcggtgggtgttgcgctcacccgcaccgttaccgttgcacttgccatagccctagctcctgctcctttctctcttttccctttcttcatcgccacctgctccgcctgtcccgctctagctctaaagctgcggctacgtttacggttcagagctatagctttactgcacctcaaccaacaagaacttgattatggtgaacgttcacgtacagggccatgatccacatagactggtcctctgactttgacgttcaagtccacaatattaaactcggactctagacccaaactgcaacaacacttcaccctatct

SEQ ID NO: 1315 - DNA, 609 bp, Gossypium hirsutum
  unsure (1)..(609): unsure at all n locations; Clone ID: LIB3825-021-Q1-K6-D4
ctttattcttctctctccattaatcttagttgaaagagatcatctttgctttcgcccatgaccactgtttatgacccttcacaccatctcacctccaaaaaatgtgtttcaaggaccttgaaatccctccaaggnaaaaagcaactccattgttgccacaacgccgccgccatggaacttccccaccacgaagctaggctccacaaataccttccttccaatgaagacaatgacggcaccgatgatccatacggcaccgaccatttccgcatgtacgagttcaaggtaagaaggtgtacaaggagccgtagccatgactggactgactgtccttttgctcatccaggtgaaaaagcccgccgtcgtgaccctactcggtaccaatactcctccaccatctgttctgacttccgccggggcggtggttgtcctcgcggcgatgactgtgagttcgctcatggagtgttcgaatgttggcttcaccctacacgttacagaaccgaagcgtgtaaagatggtaagaactgtaagcgtaaggtttgtttctttgctcattcgtcacgtgagcttcgtctcttgccggaatcacaaccgccatacaaaaactcc

SEQ ID NO: 1316 - DNA, 619 bp, Gossypium hirsutum
  Clone ID: LIB3825-021-Q1-K6-D5
cggacgcgtgggcggacgcgtgggcaactgtcaaatttctctctctctctctctctctctattgttgaagttcataagcttttgtatcaatggctgaagtccgtgaccgcaacctgcctcaccaagttcaagttcacccacagtaccgtttcgacaatacaaccggaggcggttacggtgcaaagaactatcacagtggaccatcaacaagccaagttctagccgtccttacacttctccccattggtggtacactgcttgcattagccgggttaacactggccggcaccgtcattgggctgatgctagccacaccgctgttcatcatcttcagcccagttcttgtcccagctgccattgccattgccatggcagtgacggggttcttgtcgtcgggggcgtttgggttaacagggttgtcgtcgttgagttacgtgcttaacaggctgaggtacgcaacagggacggagcagctagatttagaccatgcaaagagaagggtacaggacatggcagagtatgtggggcaaaagacaaaggaagttgggcagaagattgagaacaaggcacatgaaggtcaagttggaaggacttgaagatgataacagggcttttggga

SEQ ID NO: 1317 - DNA, 620 bp, Gossypium hirsutum
  Clone ID: LIB3825-021-Q1-K6-D6
ctccatactcgtcaacttcttcttctttttactttccttttggcttttcttgtcgtacaacaaaagaaaaaaaaatgtctgatttaagagatttgcacggcaaccccattccacttactgacgagcatggcaaccccgttcaattgactgatgaacatggtaaccccgtttacgtctctggtgtagccgccaagcagacagatatgtatggtggtcagatgggatatgatcccactctttccgccgctgctgagtatcagcagcagcagcagctgcggcctcagtacctgcagcaggaggaacagcagccgcagtatcagccacagcacctgcattacgaggtttccaccacagaagagattcagcgctccaacgcctccagccctagctcggtgaagaaaaccacctcatatcatctataaaattatttatattgatgatgacagttcagggttttggctgtattttgattatatataaaataactgcgtttttttttagtctgaggacgatgggatgggcggtagaaggaagaagaaagggctaaaggagaaaataaaggagaaactaacgggtggaaagcataagacggagggggggggaaggaggggcaatcacaa

SEQ ID NO: 1318 - DNA, 623 bp, Gossypium hirsutum
  Clone ID: LIB3825-021-Q1-K6-D7
ctctgccaagaattgttgctcatcttagaagaaagtagtggattttctagaggggcttcaatttacagaggagtaacaagcttggaatcatggaatcaaagaattggaattggatttgaagataggctttgattgactgaaaacgtcagctactaaatatgaatctctctggaactttagtgcctgaacttggccaactttctcacctcaaaatactacatttcatgtggaatgaattgactggtaatataccgaaggagataggacatatctctaccttaagactcctgtacgactactctggctatggacaatcatcgggaaagccaagtcagcagaatacgtatgcggatatcgaagctgcatacaagtgtcttgaagagaattacggtgccaagcaagaaaatatcatcctgtatggtcagtctgtcggaagtggccctactgtggatcttgctactcgtttacctcgattaagagctgttgttctgcatagtcctatattatccgggttaagagtcatgtatcctgttaaacgctcttactggttcgacatctacaagaatatcgacaaaatctcattggtgaagtgtcctgtgctgataatccatggaactaatgat

SEQ ID NO: 1319 - DNA, 598 bp, Gossypium hirsutum
  Clone ID: LIB3825-021-Q1-K6-D8
caaagagaactgagcatactcaaagagccattgaaaagcatgctgatgatgaagaggcagctgacctgtcaaaatccactgctgctcttaagaatcataagatgaactcagatcaatcggaaggagaggacactgaaatgggggatgagaacctaacagatagggaagaatctgataaagaagtgggttcagtttcccaggagaggtgttcagaggatacaaagggaagcccaaaccatagtgaggaggcacatgaagtaaaatctgatgctgatagctatctttctgaagaggcagatagcatttcgaaaaatgctgaaaaggaggatgaagaagagaaagcagctaatgaattagcaagtgaagtctcaagagaaagagatcctactgctagtaaagcaactgaacgtgaagtcaaagagactgaagaaagtgaccaaattgagaccaaatctcgagtttcaaagaaatcctcgaaaggattgatgtcatcttcagtagatgtggattccgggatttctgatgatgagcccctttgtaagtggaagcttaaagttgggaaatcaggttctaagaagccagtgcagtaggcaaatgc

SEQ ID NO: 1320 - DNA, 619 bp, Gossypium hirsutum
  Clone ID: LIB3825-021-Q1-K6-D9
cggacgcgtgggattttccccaaaatttccccaaggcaagaaccctaaaccttccccaaatctgctgcgctccaggacccgaaccttccccaaatctgctgctttgaaaataaccgtcccttctgccgttgatcgtctaccatcgcattcgtcgaccgtcgcagtcctctaccatcgcactcctctgccgtcgaagaaatcgaattaacactgcatttgccaaactgttaaagatatttgaaacggaaaaattgtggattaaccatttgttactgccttattgatcagctcgtatttagataaaatgcctagaagaaaagtgcgatcgcaccgcattgttcaaggtacttcaaactcggcggaaacaaatagcactgaacaatagactgctattggttcttcgaatgttccggttacacctgaggaacctatagaagttcaaaatgaaactgatgggacgcggagaggtcgcggacgtacggtactgagcgatttatacgacctagatccagtcgagcgtgtccaagtatccagtaatagctttggtcagcctgttggatcagaagctcgccttttagcaagatacatgggcattctagcacggaatgcaaaatatgtg

SEQ ID NO: 1321 - DNA, 535 bp, Gossypium hirsutum
  Clone ID: LIB3825-021-Q1-K6-E1
ccacgcccgtccgaaaaaaaaaaaaaaaaaaaaaaaaaaaaaaaaaaaaaaaaaaaaaaaaaaaaaaaaaaaaaaaaaaaaaaaaaaaaaaaaaaaaaaaaaaaaaaaaaaaaaaaaaaaaaaaaaaaaagggaaaaaaaataaaggggggcccatttttaaggaacccaggcttccccccccgggcattcccctttcttgcccccttattttgggccccctgaaccccttttttttggccccggttttaaaaaaaactgtgggggaacccccttgagtccccccggggaaaacccctttttccccacccccttttcccccgagggggcctcccccgttggccccctccaaatggcccttaaaaaccagggcaaatgggacttcccctgggggccccctttgacccgcccctttaaccccccccgctcttggggttccccccagtggcccggttccttttcccagccccttacccccccttcttttactttttttccccccttttgggcctccttcggggggtttttcttggggg

SEQ ID NO: 1322 - DNA, 634 bp, Gossypium hirsutum
  Clone ID: LIB3825-021-Q1-K6-E10
tcgggaccgggggtttcgtagtgaaccgggaggatattgtcgaaacctgcctagcagaacgacccgcgaacgcgttgcaaacaacaccggaggtggtgcgggtgcatcctcgcctctcgccacccccgtgtctcggagcggccagtctcgtcgtccctttgcccgtcgggtggggtgagatgccgggatcaacctcttcgaggcaaagcgaacaaacccccggcgcgaatcgcgccaaggaatcgaaacgaaagaaggggcacgtcttctgtcgccgcaccgttcgcggtgtcgatgcttcagtgatgttgttctcttgtcgcaaaatatacagaacgactctcggcaacggatatctcggctctcgcatcgatgaagaacgtagcgaaatgcgatacttggtgtgaattgcagaatcccgtgaaccatcgagtctttgaacgcaagttgcgccccaagccattaggccgagggcacgtctgcctgggtgtcacgcatcgtcgcccccatccaaccatgagccctcgagcctcggttggaccgcgggcggaaattggcctcccgtgcgctcacagccagcggttggcctaaattcgagtcctcgacgacatcatcgtcgcgacgatcggtggta

SEQ ID NO: 1323 - DNA, 631 bp, Gossypium hirsutum
  unsure (1)..(631): unsure at all n locations; Clone ID: LIB3825-021-Q1-K6-E11
ctgtttcatccttttcaagccaccaanatatctttctttagaaatgttaaacatggatgtaatatcatgaaaaaagattaaatatatgttgtcctaggtctgctttcatttaaagtgttgatgcttgcattcagtgaacagaagtcatttaactggtctttttgtcgatttctgctgcagtgctctaacagggatatacttggtggatggtgtgattcgggtagcatttttgtagttgacgtaatagctaaaggatagtaaaaaggccaccttgaagtaagtgttgttaatggattttcctagtggctgttcgtcggccttctaatccaggaattcacatttcactccaaaacatgcttaatctaaggctttctcttatcatatgtgcatgcaatcatttcaagcagcctcattacccccaagtcaagccctgctattgaacactcataattccttccaaaaattgtagtatttgattatcttgtgcccccccccccccccaaaaaaaaaaaaactcctgaaagtagaattgttggggtttgaagttgactgtgcatgactttgtgcatgtcagccactagttcattgcatgggatattacatgcaacttatgcacagattattaattttg

SEQ ID NO: 1324 - DNA, 618 bp, Gossypium hirsutum
  Clone ID: LIB3825-021-Q1-K6-E3
gcagtgacaccacaacagttaccttatatggggtctttccctaatgctgaacaaacctcatatactcaaaaggctcaagaagaattagacacctatataggcagggataggtttgtgaatgagacagacatcggcaaattagtgtacatccaagccatagttaaagagacattaagaatgtatccacctgcacctttgtcagcacctcgtgagctcagtgaaagttgttctattggaggctatgacatccccaaaggcacccgactgatcataaaccttcataagatccaaagggatcctaaaaaatggccagaaccatcagagtttaagcccgagaggtttctcacaacccacaaagatgtggatgttaggggccagcattttgaactgatgccttttggcagtggtaggaggagttgtcctggaacatcgtttgcactccatatgctatacttgaccatgtctaatttcttgcacgcctttgatttctcaacaccatccaatggtttgattgacttgactggcacagttggattgaccaacattaaatctaccccgcttgaagcattggtctcacctcgccttgctcctgagctctataactaagattgcaataat

SEQ ID NO: 1325 - DNA, 611 bp, Gossypium hirsutum
  Clone ID: LIB3825-021-Q1-K6-E4
ggccggcatctagaattctcgttatttgcaacaactaagcgaagcgagacaaaaaggcgacttcagccatgtcggaaaacgggtcgtcctgctctgcggcgactatgccgaggactatgaggttatggtccctttccaggctctgttggcttatggtatatcagtggacgctgtttgtcccggcaagaaggccggcgaaacttgccgcaccgctattcatcaactttccggccatcagacctataccgagatccgtggtcacaatttcacactaaatgcatcatttgaagatatagaccatactaaatatgatggtttagttatagccggaggacgagctcctgaatatcttgctatggatgcatttgtattgaacatggttcgcaattttgttaattctggaaagcctgttgcttcaatttgtcatggtcaattgatattagctgctgccggggcagttggtggtctaaaatgtactggtttccctgctgttggacctacacttattgctgctggtgcattgtggattgaacctgatactttggcagcttgtgttgttgatggtaatatcattactgctgctacttatattggtcatcccgagtttatca

SEQ ID NO: 1326 - DNA, 608 bp, Gossypium hirsutum
  Clone ID: LIB3825-021-Q1-K6-E5
gttggcacccttctcttgcttgctggtttgagccttattggatccctcataggtcttgctattgccgccccacttttcctgattttcagccctgttttggtacctgctgctcttctcattgcgggttccatagccggattcttgacctccggagcatttgggatcactggactgtcatcgctgtcgtggattgctaattatattcgtggaagcaggagctctatgtctcaggggctagacccagtgaagtggcccttgccggacacggcagtgagtatggagcagaagatccagaataggagccaaggaggaggaaggatctctgagggaggcagagaacaggaaggtggcaagagtacgacacaagaaggtggcaagagtaagacacaagaaggtggcaagagtaggacacaagaaggtggaaacaagactgtgggttgaagtttcctgttgtagcagtcggctgatatgctagaaagtaatctatcaattttgttgctctgttctgcttctatgcttatgtccttgtgctgctctatgtggttgtatattgtaacttgtaagcagctctctgtattcaaataaattcctggtcatttgctttttcg

SEQ ID NO: 1327 - DNA, 587 bp, Gossypium hirsutum
  unsure (1)..(587): unsure at all n locations; Clone ID: LIB3825-021-Q1-K6-E6
ctttatgttaatcttagcatctaataaaacggtgatcactgtcttgttgtaactcccatcactcatttattttaataatgtatgtggattctcttttgtaggcttaggagctcattgtggcttcaatttaagccccaccatattgctgccggagctgcttatctcgcagccaagtttctaaatttcgatcttgcttcttaccatgatatctggctagaatttcaaacaactccagctattctccaagatgtttcacagcagttgatggagctgttctaaaaggataacgagggtagatctacgattcagatcagattcatcgttggcttagggttcttagttatatatatgaatgaaagattggttgtttaatgatggtgaaggtggtatgtgcagaggctgaagaaaattgttatattaggatgggcggagaatcaagagcgctaatatactactagtatgagaagtgattaaatgggattttataggtttataaattcatggcctcttgactctagctgtatctatgtgaatgtcatgatccatcccaactactntttatgcaatggaatatcattatttacttg

SEQ ID NO: 1328 - DNA, 608 bp, Gossypium hirsutum
  unsure (1)..(608): unsure at all n locations; Clone ID: LIB3825-021-Q1-K6-E8
cacatatcaaagagcaatggtggaagctatgcctaagaacaaatggagctcatttttgctgatgttatgtgttccattattaatccattagaagtcataggaagtccgacgaacttggatatttgggcagctgttcatctgttaacagtttaggtgtggcaactggtactaggtgtagtctaggaggcttgatatgggatctactagaaggacggagaatggaagattacttgcttttatggattgggcctgacaattcagctttttccaatgttgtgctgacatttaatggctgtgagatagtcagatatgatgcaacagaggatcaattagtgacagatgtttcacaacagaaaaggatccttaagcgtagatattatctagtggagagagcaaaagatgctaatatggttgggattttagtaggaactcttggtgtggctggctaccttcacatgattcgtcagatgaaggaactgatcatgcttgctgggaaaaaggcctacactcttgtcatgggaagaccgaaccctgccaaacttgctaattttcctgaatgtgatgttntcatctacgtctcatgtgcgcaaactgcacttttggatagc

SEQ ID NO: 1329 - DNA, 641 bp, Gossypium hirsutum
  Clone ID: LIB3825-021-Q1-K6-E9
caatctgttgctgcaaaattgacttctagctcacagtccaaaaaccataagaaagagcaagcaagtcatcactcatcaggcaagacgtctaagggacatgctagatggaagggtaaaacatctgcgaggaagaatatttcctcttatatgaatgtcagctctgaaagtttatggtctgaaattcagaaatttgcaaagctgaaatatcagtttgagttaccagaggatgcaagattacgggtgaagaaaatttctgtcttacgcaatatgtgtcaaaaggttggtataactattgctgctcgcaagtatgattttaacaccgcaatgcctttccatacatcagatatcttgaatctccaacctgtagtgaagcattcagttcccgtatgttcagaagccaaagatcttgtagagatgggaaaggtccaactagttgaagtaagcattttaaaatcagaaacagaccctatcaagctaaagggcatgcttactgaagcgtacacaatgttttcagaggctttttcaatacttcaacaggtcactggaccaatgcaccgggaggttgccaattgttgtcggtaccttgctatggttctgtatcatgccagagatatggctggggccataatgcagcagcacaa

SEQ ID NO: 1330 - DNA, 614 bp, Gossypium hirsutum
  Clone ID: LIB3825-021-Q1-K6-F1
gcgtaaaaggtcggaatgttgctcctttctgtaatctctgctgctgtttttgtttgggtcgtgtatgttggcaaaggtgaataccaggatagtgacaatgttcgtaaggtgaacgatagcttaccgattaataattccggatttcccctgatatatgaagtgcaaagtgtcaaaatagacaattggacatctttagttgccagtgacagtgttgaaggaactgaagttagaaaaatgcctcctcctcctccttcatattttctcggctacactcttcctccggggcatccatgctacactttcagtttaccccctccaccagcagacaaaaaaagaacaggaccacgtccttgtcctgtatgttaccttcctgtggaagaagctattgctttgatgcctaaagtcccatcattttctccgattcttaagaatttaacatatatttatgaggaaaacttaaataaagacaaggaatttggaggttcagactttggtggatatcctactttgaagcaacgggatgattcatatgacataagagagttgatgaatgtgcgttgtggatttgtcaaaggaagcaaacctggccgtgggtcagggttcgacatcaatga

SEQ ID NO: 1331 - DNA, 581 bp, Gossypium hirsutum
  Clone ID: LIB3825-021-Q1-K6-F11
caccacgcgtccgcaataaatacaacacatagcagaaaaaattctcgcaataaatcgcatgcaatcaatgctgatgacaaggattaagctgactatatacttagtcataacattatccacaaccaaacccagatccaaaaactaacagtaaaaaaaaacagttttgcagctagagattacttgacagctaacgagtttcaaactgctattgctaatactatcgtaaacaaaaacataaaattgaagcttcaacaaaatcaaaaatcaacccatttttccaaaaccctaagactgatcacaagcatgtaaacataaacttaaaaagaaattcctctcgttttagaacagatatataatcagctaagcgaaacaccaagtacaaaatatattccttgacccatttcaagaaaaaaaaagagagagaaaatgaccatcaaacagaacagcgaacgaaaaagagagggatagagcaaggaatgaaacaaggaaagagactttaacccttagataaacccccaaaaaatcaattaaaataaaaagttaaaacaaatgaggaaactcgagagagattgcgatgttac

SEQ ID NO: 1332 - DNA, 648 bp, Gossypium hirsutum
  Clone ID: LIB3825-021-Q1-K6-F12
gccccctcttcctgatcctgtttggcattctcagggtggcaccaagctcctacaaataaaacaaagtagaaacacttttttttggatcattgggttttcaaagtttttagggttggtttatcttttcctttttggttttgaaagattgttgtgggtggttttgattgtttatttttcttctttgttttcatttttgtaagagagtgaagatcatccaggtgttggtggtggacccagtcatgactgttgacgagagtaatccattggtctttgttcaacccaatgccctcaagttcgtttgttcttcaaatgcaattgcaaattttgatagcaatactgctaacagaagcctgcaactagaaagacaatgagcatgtcgagattctcattttagtgacggtgcttctatttgcaacaataatgaaaaatttaaaggtgcgtgcagtttgccgtgacaatggagaaaagactgatatctctagagtcttttaggttgaacaagtaaaaggaatgttggataagattcaacagaacttattcgatgtggcaaaacaaaaaagagatgcctgcattgaagttgtaaaaacgtgggatgagtttgtaaaagctcttgggcaaaagaaactgatcttagctccttggtgtgat

SEQ ID NO: 1333 - DNA, 629 bp, Gossypium hirsutum
  Clone ID: LIB3825-021-Q1-K6-F3
atgggttgttgctgatcatattagaactttgtcttttgccattgctgatggtgcttctccaggcaatgagggacgtgaatatgtcttaagacgtattcttcgccgtgctgttcggtatggcagtgaggtcttgaaagctcctgagggttttttcagcaggcttgtaaggattgtggtggaagtcatgggtgatgttttcccagagttaaagcagcatgaggcacgcattggggacataattgctgcggaagaagcgagctttggcaagactttggtgaagggaatcgagaaatttaagaaggcagcccaggatgttcaagggaggatattaagtgggaaggatgcatttatcttgtgggacacatatgggtttccattagatttaactcagttgatggcagaggaaagaggtttgatagtagatgttgattgtttcaataatgctatggatgaggctagagaaaagtcaaggagtgccagaaataagcaagctggtggtgctatcgtcatggatgctgatgctacctctgcactgcacaagaagggagtgtctacaacagatgattccttcaaattcatatggttccagccccatgaaagtgtaataaaggccatatacaatggctctg

SEQ ID NO: 1334 - DNA, 625 bp, Gossypium hirsutum
  Clone ID: LIB3825-021-Q1-K6-F4
tgtttttaaagtgcttttatgatggaagattgtgtttttttacttaaaatgtgcataagtttttgtaattttcattgtgaaatttaatttttatatttttatttttagaaatttagtctctttattttctagagattttaatttttaaaatattattaaaattattttgtcaaattcaagtttattagcaagtatttttcctattttaaaagtcaaataaacaaaattttaaaaaataaaatttaacagaaagtgatgtaattaaaattttaaaaataatagtatagaaattaaatattaaatttgtgaagaacatattttaaatttttttttattatcaaaatcaaaagttggtttgaagtgtttttgctattaataattacatatttatatgtttaaaattttatgttatatttataatttttaaagttacttaaagaaaatttctttgttaatgaagttttaaaaaaaaatgtcttgaataaatttttaaaattatttatttatggatttggatttagtcggaggatgatgggatgggcggtagaaggaagaaagggctgaaagagaaagtaaaggagaagctaacaagtggaaagaaggaggatcaatctcagaccaaaac

SEQ ID NO: 1335 - DNA, 616 bp, Gossypium hirsutum
  unsure (1)..(616): unsure at all n locations; Clone ID: LIB3825-021-Q1-K6-F5
nnncgtccgagnaaaccctcgctattaagaaagaatacgatagatctaaacactccatcctctacctttaactgttcatttgtttaagatgtcctactctaggaggtcaagctattctccttctccttccccatacaagaggtacaggaggtctgtctcgagatctttgtcaaggtcaaggagtcgctcaaggagtgttgaaaatcctgggaacaatttgtatgtgacaggcttgtcacatcggatcaccaagagagagctggagaagcatttttccagtgagggaaaggtggttgatgttcatcttgtggttgatccgtggacaagggaatctcgtggctttggattcgttacaatgtcgactatagaagaagctgaacgttgcattaagtatttgaaccgctctgttcttgaaggacgtgtcattacagtggagaagcttttgtggcagcaggttagctgtgtgttgcagctcttcaccaaactccaaaagtcttacatctaaacaaacaattcaaacacaacaacaacagtcagactgttagggttgccaagaggcggagggggagaactcctactccaggaagatatttggggttgagaacttctcgtgcta

SEQ ID NO: 1336 - DNA, 634 bp, Gossypium hirsutum
  Clone ID: LIB3825-021-Q1-K6-F6
tcttctacttttcgccggcttcaatgttttgttgacctctcaacttgcttagtttcctttggttgtcgtcgttgtttttcgtgaaaatggcggtggatctgatgagttttcctaagatggatgatcagatggccattcaagaggctgcaacgcaaggtatgaagagcatggagcacctgattagcctcctttctcaccagtctaaccgactcgactgcgctgaggttgccgatctcacggtctctaagttcaaaaaggtcatctcactaattaatagaaccggtcacgctcggttcagacgtgcaccgattcagtcctcgtcttccttttcctcaccgtcatcatccgctgcttctctaactgttactgattcccacaaggctctaactcgaactcctgctccggttgaagcaccgccgctgaccgtaaatccggcgccggttgaagctccaagtacggctcctgttagtttcgttccttcgcaaccccagagtttaactctcgattttacgaaaccttgtttgtttagctctaatactaaaagtactgagttggagttcacaaaagaaagcttcagcgtgtcgtcgaactcttcgtttatgtcttctgccatcaccggagacggcagcgtttc

SEQ ID NO: 1337 - DNA, 632 bp, Gossypium hirsutum
  Clone ID: LIB3825-021-Q1-K6-F7
ctgattttgaagaagaacacttatttttaagatgaatgcttgttggagttcagcatccttcaaacaagattgattgtttagtttgtagttattgtttcaaatttattggatcaatagagaaacaaatagggcgaaaactgtatctgaaaacaataggaataggaaattcttcacgtaatggatgtcaaagcaattcatctgatgatgaagaagacaatcattatgttcaaaatcaccatagttctgaaaatggagcttctagcagttctggtagtactattcctttgcctatgatggctgtcgagtcgttaatgaatggtgaattagcattgccttactccaacaagtttcccttaccttctgttgtttcatgccttggcggatgtgaagaagctttctattgtagtaaatcgtgtgcagaggctgattgggaatcgtctctttgcttactttgtactggggagaaatcagagtcttgttctagaaaggcacttttaaaattcatacaacatgccaatgaaacaaatgatattttcctccttgctgccaaggcaatttctttcaccatattaaggcctggaagccaatatcaattggacataagagaaagtggtgggactgtattgccttgc

SEQ ID NO: 1338 - DNA, 619 bp, Gossypium hirsutum
  unsure (1)..(619): unsure at all n locations; Clone ID: LIB3825-021-Q1-K6-F8
attttcaaaataagggtttttagtaaccaaattgattggccttgggagttacggttacactgcaccatcttccaaaaaatcaacgcctacgatgttcctcaaggcgtcgatattcgtggtcgattcgatgaagaattcgctaagattttaacaaaggatgccttacaattcgtcgctgatttgcagagagagttcaggaaccatattaagtacgcgatggaatgtcgcaaagaggcgaaaagacgacacaatgaaggggcgttgcctggtttcgatcctgcaacgaggtatattagagaagggaaatggacttgtgcgccggttccgcctgcggtggctgatcggagggtcgaaattacagggccggtggagaggaagatgatcatcaacgctcttaactcgggagctaaagtgtttatggctgattttgaggatgcactgtcaccaagttgggaaaatcttatgagaggtcaaataaacttaaaggacgcagtggaaggaacaataacgttcaacgacaaagcaaggaacagggtttacaagctgaataatgaaatagcaagggctatttgttcggccacgaggttggcacttaccggaggctcatatnttcatcgac

SEQ ID NO: 1339 - DNA, 619 bp, Gossypium hirsutum
  unsure (1)..(619): unsure at all n locations; Clone ID: LIB3825-021-Q1-K6-F9
cggacgcgtgggtgagaagcaatcgacaccagcatgtccagaacctagatccttactaccatgaggagcgaagcagcattcaaagtgagcaagagaaagctcgtaaagagaaggagctggcgaagaagcattttaagcccaggatgattgtccatccacgcttccaaaatattactgctgatgaagctgtggagtatttatgcgacaaggagcctggagaaagtatagtccgtcccagttctcgtggaccttcttatctgactttaactctcaaagtctatgatggggtttacgcccataaagaaatagttgaaggtggtaaagagcacaaggacatcaccagcctgcttcgcattgggaagacattgaaaattggggaagacactttcgaggatttggatgaggtaatggatcgatatgttgatccccttgtgtctcatctgaaggcaatgctgagttatcgtaaattcaggaagggaactaaatcagaggttgataagcttctaacaatcgagagacaagagtatcctatgaggattgtctatttggtntgggcatttctcatgaacatccnagcactttcatttctacttatatacgaagtacgaatccgctcatg

SEQ ID NO: 1340 - DNA, 597 bp, Gossypium hirsutum
  unsure (1)..(597): unsure at all n locations; Clone ID: LIB3825-021-Q1-K6-G1
agcagtgaagactggaagagcaaaagaaggaaggggaaaggnaaatagtagaatgaatcataatcggcaatccaacgatgggaagcatgatgatgactctgctctctccgatttccttgcttctctcatggattacactcccactgtactcttttttctttttttcttcaaaagagggaattcctataattacgtttctgaacccttttttttttttttcaaaattcattgcagatacctgacgaactggtggaacattacttacccaagagtggttttcaatgtcccgatgttcgattgtaggtttttctctctccctttttttttttttaacttcccattacctttaatcctctgttaagctgcccagccggaaattttcaataaaggattttcttttatatataaaaattgcagttaatctttacagcttttattggtcttaatgacaaaaacctaatttcaattctgctttcctcgaataggggcatcttatccatcgtcaagatggttctagggttccagaataaggcttgtacctgatgctactcaaaagttcgccgcagaggttgcaaacaatgcacttaatcattgcaa

SEQ ID NO: 1341 - DNA, 83 bp, Gossypium hirsutum
  Clone ID: LIB3825-021-Q1-K6-G10
tttttttttaatggattaattatgtattttatacataaaaatgtcaccttgacttcttcgaaggtatccagcaagacagcccc

SEQ ID NO: 1342 - DNA, 643 bp, Gossypium hirsutum
  unsure (1)..(643): unsure at all n locations; Clone ID: LIB3825-021-Q1-K6-G11
cggncgcgtgggttctatttcnaagccactgcattcatttaaactgggctaacactccaaaaaccagggngaagaagaagaagaagaagtaggaaatgcccaccttgaatttatacaccaacgtacctgtggacgccgtcaccacctctgacatccttaaggacgccaccaaagctgttgccaaaatcattggcaaacctgaatcttacgtgatgattttggttaatggcggagttcccatggcatttgctgggacggaagcccctgctgcttatggagaattgatttctattgggggccttggaccttctgttaatgccaaattgagttcaactgtagctgatattcttcaaaccaagctctcaattgatagctcccgcttctacatcaaattctatgatgttcagcggtcattctttggattcaatggttcgactttttgatgaatggctgaaaaagcatccggggtccaagtcagaatcatatatgtgctggaatgatttgtttttatcaattgaagacttctctctctctctctccatctctctctctctcaagactttcctcccttaagaaattgttcaactttctgagtaactcatcaaatgtagaattgccactatggaaagcgttgcaagttgaa

SEQ ID NO: 1343 - DNA, 639 bp, Gossypium hirsutum
  Clone ID: LIB3825-021-Q1-K6-G12
ttttggaaaccccttctttcttttatatatatatttatcttctccattaatccatctccgttggattcaggagaatcttttgtacgccataatcgaagctctatctctcgagtcttcaatcatgagtttcttcaaaagctaattcacgttattcttatttcattcatttatttttcttctttgaatccgctctctgaggagagaaaagagaggggagggaaatgacatcggggttctccgggggtggcacagagttttacggtagaatagcaggcggatccgtctctaacagtggcaccatgagcaacaaccaacccactgcaccgtacgggacacatggaatcttcatggaccctaagtctcaaatcgtgaacagggccgcacccggtttcgtcgggaagcgaacacgagctgacttcaataaccacggcctcaatgatcttaatccccgtccagttaagcccagaaattaccagcacgcttatccgatttctcccttatcgcctatagatttctcgtgcaacatattaccggacgttacatgtaatttctcgccttcttcttccatgtcgcagcgatacggggtgccggttttacagcagctgaggcggcagcaacttcctctcggtatcagctccg

SEQ ID NO: 1344 - DNA, 608 bp, Gossypium hirsutum
  Clone ID: LIB3825-021-Q1-K6-G2
acaaagtcatttaggagcatctaaacatattttggtgatggataatgtagcgatgcaaataaagtttgccatgtagatctttaatttttgaagggaaatttttaaatttaaacactaaaggctctagatttttacaggaattaacgttggttaaatataagattatttgtttgtgtgaataggttttcaagtttgccactctcttggagggggaactggttcgggtatgggtactctgttgatttctaagatcagagaagaataccctcatagaatgatgctcacgttctcagtcttcccatcaccaaaggtttcagatactgtggttgagccatataatgccaccctttctgttcatcagcttgtcgaaaatgcggatgagtgtatggtgttggacaatgaagctttgtatgatatctgtttcaggactctcaagttaactactcctagctttggtgatttgaaccatctaatctctgcaaccatgagtggtgtgacatgctgccttaggttccctggccagctcaattctgacctccggaaacttgctgtcaacctcattcctttccctcggctccacttttttatggttggatttgctcctctca

SEQ ID NO: 1345 - DNA, 613 bp, Gossypium hirsutum
  unsure (1)..(613): unsure at all n locations; Clone ID: LIB3825-021-Q1-K6-G3
gtgcttggcgtctcggtgttgatcacaaagaggctgaggcttggagacaacaccatgggtccccactctcccatcctccatttaacattacgggctctgccttggctgtattcggtgtcttgggtattccacttgcggtaacatacagtattccattcgctttggcatccatctactgttctagtactggtggtggtcaaggtctttctctaggagtgctaaacttgtctatagttatcccacagatgttcgtatcagtaattagtggaccgttggatgatgcattcgggggtggcaacttgcctgcttttgtgctggggtccatagcggctgctgtcagtgcgttgttggctatattggcattgccgaacccacctaaacaagtgtccctttcgccaggaatgggtggtggccattaataaataatcaattccactgcttctgatcagcctctttgcatgccaacaatgtgtttcaagttttatgatttgcttggtgtagtttcatataaatattttctttgatgcaatgcagtcatggcttagtcccatgcctctccttatgtatttttaaggtttccatatatagnggaagtttgcagggaaaatccttg

SEQ ID NO: 1346 - DNA, 622 bp, Gossypium hirsutum
  Clone ID: LIB3825-021-Q1-K6-G4
tttcatctgacggagatttgattgtaactggatccgcagacaagaatttgaggatttggggcttggattttggtgattgccacaaatccatctttgctcatgctgacagtgttatggcagttcagtttgtccgcaacacacattacatttttagtgtggggaaagatcgccttgtaaagtactgggatgccggtaaatttgagttgcttttaactcttgaagggcatcatgcagatgtttggtgccttgcagtcagcaaccgtggtgactttgttgttacaggatctcatgatcggtccattcgccgttgggatcgtactgaggagcctttttttattgaggaagaaaaagagaaaagattggaggaaattttcgaggctgacattgacaatacatttgaagacaaacatataccaaaggaagaacttccagaggagggagctgttgcattagcagggaagagaactttggaaaccctgacagccactgattcaattattgatgcactagatgtggcagaagtggagttgaaacgaatagctgaacatgaggatgagaaagccagaggaaaagttgctgaattccagccaaatatgattatgcttgggttgtccccatctga

SEQ ID NO: 1347 - DNA, 589 bp, Gossypium hirsutum
  unsure (1)..(589): unsure at all n locations; Clone ID: LIB3825-021-Q1-K6-G5
gccgtgttgaatcacgactcggttggtggattcataactcactgcggctggaactcggtgctggaatcggtgcgtgcaggggttccaatgttggcctggccactttatgcagaacaaaggctcaatagggtgttgatggtagaagaaatgaagatcgcattgccgatggtggagtcggaaacagggttcgtttgttcaactgaggtggagaagcgagtcaaagagttgattgagtcgaaagaaagtgactcagttaggcagcgaacgttagatatgaaacgtgcagccgaggtagcgacgagtgagggaggttcctctcgtgttgcgctagtcaaacttttcgagtcatggaagctgaaatgactcggaccgaaccggttgttatttttgttgtgttggtccgatacacagaaacgatgtccaaatcttgacggcttcgagttttaggtaaaattccaagttttactccctttacgatttgatttttataatttaactgtacataacttttggactcaattgatgaaagtgaaataatatctctcaatgcacaaaaaaaaaaatgaacaagatttaatgaattntctat

SEQ ID NO: 1348 - DNA, 618 bp, Gossypium hirsutum
  unsure (1)..(618): unsure at all n locations; Clone ID: LIB3825-021-Q1-K6-G6
cttaattaagcaagctcgtaagctgttttcatcaatggccgaccgtgaccgctcttaccgatttgaccaggttgttcgtggtgatagaacgaactatcaaagcggaccatcaacaacccaagttctaaccgtcctcaccctccttcccatcggcggcactctccttgcattagccgggctaaccctcaccggcaccgtcatcggcctatgcgtggcaacgccactcttcgtcatcttcagcccggttctgctcccagctgccatcgcggttttcatggctgtggccggtttcttgtcgtccggggcttttgggttgacgggactgtcctcgctctcctacgtatttaaccgcttcagacaggcgactggcaccgagcagctcgacgcggaccgggccaagaggggcatgcaagatatggtggggtatgtgggacaaaagactaaggaagctgggcagactatcgaaaacaaggctcatgagggtggtaggacatgaatatgaaccatggaaggttgctttgcttgcttgtaaaatgtactttaagtgtgtttcattttcgagaagtctttcgtctttgcgattttcgtgcatgttgattntatcttcttctttttctc

SEQ ID NO: 1349 - DNA, 489 bp, Gossypium hirsutum
  unsure (1)..(489): unsure at all n locations; Clone ID: LIB3825-021-Q1-K6-G8
gntaatttaaccgtcatcgtcatatgcttctccgaacctgattacagggaacaaccatctcctcggcaaagaagattgaggtgttgtagcctatctgcagaggctctgtgtagcttgaggagtgcaatgcgaattcgtgaccggtaaacacgagtctttaaataatactaattgttcaacctgggatattatatatactgtttctggctgcttcagttacaggtataaaaaaaaaagcagcttgaagttttgcaggggttggttttggtataatttttttttttttgggggggnggggaatgacatagaggatggggggtgtaaagatcaaggatgtaataatttatgtgtgcttactgcttagctcaaagtcatttatggattcttttgctcaaaagtccaggtggctgaccattgttagttcattgatgttgattcgtgagatgtattatgtacatattgtcaataaagacccaaatcttcattgct

SEQ ID NO: 1350 - DNA, 493 bp, Gossypium hirsutum
  unsure (1)..(493): unsure at all n locations; Clone ID: LIB3825-021-Q1-K6-H1
cggaagcgtgggcgngagcgtgggcagtatcactaatgaacttgaaaatggaacttcagggtgtctcaagtataaataagctgaactctgaggacaccgagtctaaagaacaatctcttcctgatgtagaagagcaaagtgccgaggacccatcaagactcatgatgtctcgtaaaaagagggggctttataaggccattgagatgggcaagcaacagaagaaggagcgtgttgaaaaactcaaggagcggaagaggaatattgaagcagctcagaaatctgagaagaaacataaaaaagctcaagtttcttgaggtttttatttttatgtttttggtaatattgttttatgacaaagctagtcaaggttgatagtgattgtaagtttagagttgcgccaattattggtgtaaatggctaaaattttgtctagttatggtttaaagttattgagatttggaatgataaaaaaacaaaaactgggttcatcata

SEQ ID NO: 1351 - DNA, 651 bp, Gossypium hirsutum
  Clone ID: LIB3825-021-Q1-K6-H10
gctggataaagagcaatggcatgtttactctgcttctgctgaatctgttaacaccaaagcccctacttacactttagagatgtgcatgactggtttggacactgaaaagctacggttttttacaaagacgaatcgacctcggcagcttcgatgaccatgaagtctggcataaggaacatacttccaaactctgagatatgcgattttgagttcgaaccttgtggttattctatgaattcaatcgaaaccgatgctatttcgaccattcatgttacacccgaagacggttttagttatgcaagcttcgaagctgtgggctatgatctgaaagagttgaatctggagcagttggtgcaaagggttttagtttgcttcaaaccaagtaatttctctgttgccgtgcatgtggatgttgattgtcactcatttgaacagacctgtctgctggctgttgaaggataccattgccgggagagtagcatcgaagagcttggttcaggcggttccatcatttaccagagcttcaacggcattgggggaatgtggatcacctagatcaactctgagttgcctctgggaagaggaggaagagtattattataattaaaacggcttattttcttatgttataactattaaataaattgctac

SEQ ID NO: 1352 - DNA, 642 bp, Gossypium hirsutum
  unsure (1)..(642): unsure at all n locations; Clone ID: LIB3825-021-Q1-K6-H11
ctgtccttttgcnatccagtgaaaagcccgccgtcgtgaccctactcggtaccaatactcctccaccatctgttctgacttccgccggggcggtggttgtcctcgcggcgatgactgtgagttcgctcatggagtgttcgaatgttggcttcaccctacacgttacagaaccgaagcgtgtaaagatggtaagaactgtaagcgtaaggtttgtttctttgctcattcgtcacgtgagcttcgtctcttgccggaatcacaaccgccatacaaaaactccgacaagaactataaccattgctgcttgttttgccggtcggttacatcgtcgtcgtcgttgtccccaacaagtactctcttgggtttatctcaattctcgagatccccatccctgtcaccgcctctatctcccttaaaacaccagcaacgaacaccaaggtacggcggtgatcgtattagtaaatttggaaccgaaatgacaaccagttacgatgatgttttgttgaaggaagtcatgagttgtttaggaaccatgactttgtccgaagtaccttcaccaatggctactactccaaatacaaacattccatggcttgatgtttcattcaaaggagctccttcaatggtaagtccttctggttc

SEQ ID NO: 1353 - DNA, 635 bp, Gossypium hirsutum
  Clone ID: LIB3825-021-Q1-K6-H12
cggccgcgtgggcattgaagcaatcattgttgctgacctttttttatctcattagctgcatcttgcaacaattttttttttttttggtatttgaggactctaagatccaatacttggttcagtggtattcttttcatttttatcccttaagctaaacatctttttttctttgctgatttttggaatatttgaatatgaacagtcgggatttgaaggattcatcagggacaaatacacagcacttcctgaaacacgagaaaggatgctggcaacagaggtcacagcttcttggaggtattcttatgaatctgtctctagcatccctcaaaagtcgctctacttcaatgagcaatacttgaatgtgaaaaaggctttggttgatactttctttggtcctcctgaacggggtgtatatagtgcatctgttcaaagcactcttttgcagatggcaaaggctgtacttggcaggtttggtgacatatcatcagttaaactaaaaatgccgaatatccatttcttacctgttaatatatcaagcaaggatcacggcagcattgtaaagttaatgatgatgtatatcttccgacggacgaacctcacggatcgattgaagctagcttgagccgattctggtc

SEQ ID NO: 1354 - DNA, 629 bp, Gossypium hirsutum
  unsure (1)..(629): unsure at all n locations; Clone ID: LIB3825-021-Q1-K6-H4
ngattcatttgccattagccacttgccggcaatatattctcggagattgcccttgtttccctctttcctgtttgcggcaacatgaggacgtcgtttcgagccttccctgttgttacagttccccctcttccttctctcggccccaccgcttcctttcctgctcgcttcccctcacttcctcaacgccgcttgtgcaagtttggtgtgaaatgtagctatgcagaagcaggaatcagtgatgactcaagatcagctacaatagatgttgtggctgatgtcagaaacgaacggattgtagtcttaggaggaagcggttttgttggttctgcaatatgcaaggctgcggtatccaagggcatagaggttataagcctaagcaggtcagggcgtcctacttactcgggctcatgggtggatcaggttaattgggtaccaggagatgttttctatgcaaactgggatgaagtacttgttggagctacagctgtggtttcaacccttggaggttttggcagtgaggagcagatgaaaagaattaatggcgaggctaatgttgtggctgtaaatgctgcaaaggattttgggattccaaagtttatcttaatctcagtgcatgattacaacctacc

SEQ ID NO: 1355 - DNA, 628 bp, Gossypium hirsutum
  unsure (1)..(628): unsure at all n locations; Clone ID: LIB3825-021-Q1-K6-H6
cccagcgtccgctaaaatttgggtattttttgtttggtttttattttcgttcttgtttggtggttgaacaaggataaataatggctatacaagcgcagttgtattctgataatattgggttcccaatttgcggttctttggatttgatcgataatggttgtggacttgttggtgctgctgctggtttcaatcaacagatatcatcacagcttcaacaactgcaacagtttcaacaccttcaaaaccagcaccaaagggaccaaaccttttcctttggtagcactaacaacaatcgtgaatcaatcatgtttgagaagcaaagatacgagattgatcagtttatcaaatcacagaatgagaggctgaggttgttactgcaagagcaaaggaaacaacagtatgaagtattggtgaagaagatagaatcaaaggcctcttttttgcttagacaaaaagatgaagagattgttaaagcgaggaacaaaacaatggaacttcagaatatgttgaagaaattggagatggagaatcaagcatggcaaagggtggcgcaagagaatgaagccatggnttgtgtctntaaacaacaggcttgaacaagtacgggaggaacaagcttctttgtcgt

SEQ ID NO: 1356 - DNA, 628 bp, Gossypium hirsutum
  unsure (1)..(628): unsure at all n locations; Clone ID: LIB3825-021-Q1-K6-H7
ggagatgaagagaatagcctccatcaagtttcttaccttgtgttagatgaggctgatcgcatgttagacatgggttttgaacctcaaatacggaagattgtgaaagaagtgcctacacgcaggcagactctaatgttcacagcaacatggccaaaggaggtccgngaaaattgcagcagatctactggtaaatcctgttcaggtcaatattggcaatattgatgagcttgtggcaaacaagtctattacccagtatgttgaagtattatcacctatggaaaagcacagaagattggagcagatactgcgttcgcaagaacgaggatccaagattattgttttttgctcaactaagaagatgtgtgatcaacttgctcgtaaccttactcggcagtttggagctgctgctatacatggagacaaatctcaggctgacagagacttcgtgctgagtcagtttcgcactgggaggtcaccagtgcttgttgctactgatgttgctgctcggggattagacattaaagacataagggtggtaatcaactatgacttcgctactggagttgaggattatgttcacaggattgggaggacagggagggcaggtgcgaccggattgacatataca

SEQ ID NO: 1357 - DNA, 630 bp, Gossypium hirsutum
  Clone ID: LIB3825-021-Q1-K6-H9
ccccgcgtccgcggacgcgtgggttcattcgtatcctgtacactcttacaaagaaaaagaaaaaaatctctgttcttaatgttctacttctttatgttatctcttgcgttgtatatgctagaattctgatcgaaaaaaaaaaattcaaagcttttcttgtagtgtatttttctcgagattgtaacgaaaaatggcagagaaaactagaagtgaaaacccagctttgctacatggaaaatacgagcttggtcgtatgttgggccatggaactttcgctaaagtctaccatgctcggaatcttcagacagggaaaagtgttgccatgaaagttgttggcaaggagaaagtgattagagttgggatgatggagcagatcaagcgagagatttccgtcatgaagatggtgaaacaccccaatattgttgagttgcatgaagtcatggcgagtaagtccaagatttactttgccatggaacttgttcgaggcggtgaactcttctcgaaaatcgccaagggtcggctcaaggaagacttggcaagaagtctatttccaacagttggtttccgttatcgatttctgtcatagccgtggggtttaccaccgtgatttgaagccggagaatttgctct

SEQ ID NO: 1358 - DNA, 627 bp, Gossypium hirsutum
  unsure (1)..(627): unsure at all n locations; Clone ID: LIB3825-022-Q1-K6-A1
accagctgcagcctcttacccttaatatgggtttcgcttagtttctgaagacagtcaatctgtttatcagggtgattcaaatcagagtaaaagcagcgaaaaagagtagataagttaataaaggttgaactccatggaagtggagcaactgggggtagcagagctggacttttcagaaccccaatttctggtggagtgcacagtgcaacttcagcacatggattacctcggccggccttagctgtccgtaatctgatggaacaagccagatttgctcatttatgcactgtaatgtctcggatgcaccaccgacgagaagggtatccttttggctctctggtagattttgcccctgattcaatgggccatccaatattttcattttcaccattggccatccacacacggaatttattagcagaccctaggtgtacccttgttgtgcagatacctggatggagtggcttatcaaatgcaagggtaacaatatttggtgatgtctatccacttcccgagcatgaacaggaatgggctcataaacagtacatagcaaaacatcaacaagggccttcacaacangtggggaaatttctactacttcaggatgcagaatataagtgatatata

SEQ ID NO: 1359 - DNA, 654 bp, Gossypium hirsutum
  Clone ID: LIB3825-022-Q1-K6-A12
cacgatgataaagtccatcctcttacgtacctattctgctcctatccttgtggaggttaaggatatccgccgttcgggattatcaccgttgtcgaaaacgagatttgcttccacgattcgctgttcttcgagcaacgacgcctacataccgaagcttgagccttttagtagaacaaaattcgagcgtgctgttaaagaccctcccttgattgagaaatctgagaacgatctcgctgattactgttcgacacttgaaggagacgaatcttatagttgctggagagcttatttcgaactcaaagatcttgagaaagaggtagcgaaagaagaggtagagcagttgattatacaagcagggggagttaagtcactgattggtttcttacatggaatcgcatccatccacaacaatggaaacaacaaaggaatttcaagtaaggcaaagccattgcagactgaacatgaaggtaaaagattcagtcatatcccagatgggttgccaaaatctgcagaagaaatagaggaagaagagagagcaagaatgctggattccccatttaccagaatgcttagaaccaaaggcacacttcctgcctggtactctcctgcacctgaccacgagaccaattgatataaatgttattatcatacata

SEQ ID NO: 1360 - DNA, 598 bp, Gossypium hirsutum
  unsure (1)..(598): unsure at all n locations; Clone ID: LIB3825-022-Q1-K6-A2
acctccgtttctggagaggcaaaaccctaatttgcttgtctccaagaagaaaagaaccaanaaatacgaatttcgaaggaaaaaagatggtgttttacttcaaagctcgaccagaggctggcgattacaccattttcatgggtctcgacaagtacgagaacgaggaactcatcaaatatggcttccctgaagacatttggttccatgtggacaaaatgtcttctgcccatgtttatttaagacttcaaaaaggtcaaaccatcgatgatataagcgaaggcttgctcgaagattgtgctcagcttgttaaagctaactccattcaaggcaacaaggtgaacaatattgacgttgtttacactccatggtccaatttgaagaaaaccccttctatggatgttggtcaagttggctttcacaattctaagatggtccggaccctgagagtggagaagcgaataaatgagatagttaacaggctgaacagaactaaagtagaacggacgcctgatttgaaagctgagagagaagcagtcaatgcagcggaaagagctgagagaaagcaacatatgagggaaaaaaaacgacgtgaggaact

SEQ ID NO: 1361 - DNA, 629 bp, Gossypium hirsutum
  Clone ID: LIB3825-022-Q1-K6-A3
cagctatcaggttttgcacacccatttgttttgctttgctttgctttgaaagagttgaaataactattatgaatccaacaatgacaagattggcagaggaagagcaccccaacaaggcttttggatgggcagccagagacagttccggtgtcttgtctcccttcaaattttccagaagggcaacaggagaaaaggatgtggctttcaaggtgctttactatgggatatgccattccgatcttcatatggccaagaatgaatggggcatttctgtctaccctctagtccctgggcatgagattgttggtgaagtgacagaggtgggaagtaaggtccaaaagttcaaagttggagaccgagttggagttggatgcgtggtaggatcatgccattcctgcgatacctgtagcaacaatcttgagaattactgccccaaatctatacttacgtatggggccgagtaccacgatggaagtattacatacggaggctactccgacactatggttgctgatgaacattttatcgtccgcatccctgacaacctgcctcttgatgccgctgctcctctgctttgctctgggattacagtgtatagtccattgagatattatggactcgataagcct

SEQ ID NO: 1362 - DNA, 609 bp, Gossypium hirsutum
  unsure (1)..(609): unsure at all n locations; Clone ID: LIB3825-022-Q1-K6-A5
ttgagaagcaccatgaagctcttacanaagcacttcccggtgataatgttgggttcaatgttaaaaacgttgctgttaaggatctcaagcgtggttttgttgcatccaactccaaggatgaccctgctaaggaggctgccaacttcacttctcaggtcatcattatgaaccaccctggacaaattggaaatggatatgccccagtccttgactgccacacgtcacacattgctgttaagtttgctgagcttttgaccaagattgacaggcgatctggtaaggagcttgagaaggaacccaagttcttgaagaacggtgatgctggtatgattaagatgattcctaccaagcccatggttgtggagaccttctctgagtacccacccctgggtcgttttgctgtgagggacatgcgtcagaccgtggctgttggtgttatcaagagtgtcgagaagaaggacccaaccggtgccaaggtcaccaagtctgctgctaagaagaagtgaagaggccaaaaggttttagcggtgaagcagattgagtgtttttatctttggttatatgtggtttgaagtttttgcctgttttatgtaggatttttaaagtttg

SEQ ID NO: 1363 - DNA, 623 bp, Gossypium hirsutum
  unsure (1)..(623): unsure at all n locations; Clone ID: LIB3825-022-Q1-K6-A6
ataatttcgacctccaanaaagctttgcttcctttcaaagccatcgatggcagctcaatctcttgccagaaccctaattctttcttcaaccctaacccctaatatcaacccaccatccttcaactgcctcaagtctatggacccgacggtgagcacaacaaccaccttagctccgccgcagagacgaaccatgtctgcgttcgaagctcgaatctcccttgtcttcgctctcgcttctcaagcttcctctgtctctcaacgacttttgatggacttggcctcagagactgcaaaatacgtgtttccgaagaggtttgagagccagaacttggaggaagcgctaatggcagtccctgatcttgagacggtgaggtttaaggttttgaataggacagacaagtatgagataagggaagtagagccttattttatagctgagacaacaatgccagggaagactggatttgattttaatggttcatccgagtctttcaatgtgttagctgagtacctgtttggtaagaatactagtaaggagaaaatggagatgactacccctgttattacaagtaggactagatctgatggggagaggatggaaatgacaacacctgtgataacga

SEQ ID NO: 1364 - DNA, 622 bp, Gossypium hirsutum
  Clone ID: LIB3825-022-Q1-K6-A8
cggccgcgtgggctactttggggggcgaaatacgcctggccaacaatgaaacactcggtgtacctgtattcagttataaggagatggtgaagttaggaagagaaattgtgctgtccttattgattctcttgatgctagaaaggttgcagatatgaagtgatcggctgacatgatattgctgccattgtatatacgagtggaaccactagtaacccaaaaggcattatgctttcacataaaaacttattgcaccagatagaaaatttgggggttcttggacctgctaaagcgggggatagatttctaagtatgcttcctacttggcacacatatgagcgggcttgttagtatttcgtatgtacgcatggaattgagcaagtatatacaactgatgatttgagaaattataagccaaattacatgatttcagtacctttagtgtatgaaacattctatagtggaattcaaaagcagatatcttccagccccaatgctattaaattaatagtattttcattcataaggatcagcttggcatacacggagttgaagataatttgagaatatggtgacttgtctagcagtcggtggaatcgaccaaactgaataatgcaaattaaat

SEQ ID NO: 1365 - DNA, 633 bp, Gossypium hirsutum
  unsure (1)..(633): unsure at all n locations; Clone ID: LIB3825-022-Q1-K6-A9
ctgnaaaacctttcactaaatattgaagatgcagtcaatgaaggatgctgctgcctctgctaaggccggcatggagaaggccaaggcctccatgcaggaaaaggtggaccaaatgaagacaagagaccctaatgagaaagagatggcgagggaaaggaaagaagagagacaagaagatgcagagctgaggaaacaagaggcccgccatcataacgccacagctggccatgctggtggtggtggtattggtggcactggctacaccacagctgggtacaacataggcgacactggtggctatggcggtaccggtggacatgacaaccgtgggtaccccaccgcaggtagtgggtatgatacaggcaggcaagatgacctcagcagtatggggtttggcggagatacagagggtgcttacggtacaacggggaaccaagacttcccaaatgcggcgtctaacaatgctgggactagaaggaacacccgcggaggtacccaggatgatccttattatcgatcctattaaatgaaaggagcgagtttttgtgctctgctactgccttgagtctgtgtttgttgtttgtttgcttctacttttttctttttcaagatcgtactgttgtaccatataaa

SEQ ID NO: 1366 - DNA, 400 bp, Gossypium hirsutum
  Clone ID: LIB3825-022-Q1-K6-B1
ctttctcagatttttcttgatttttgcctttaccacaacttaaaacttggtttttttttcactttgaaaaacaaaatggataagattaagactatgatgcgcgctgttcaatacagtaaattggcggaggagtcgccgatctcaagcaagttgaagttccggttcccagtccaaaaaagatgaagttttgatcaaagtagagacagctagtattaacccaatcgactggaaactacaggacggggtagctcggccatttttacctcggaaattcccccacattcctggtaccgatgtagctggagaagtcgtacaagttggatcagaagtccagagtttcaaagttggggagaacgttgttgccgtacttggtaatgggagtgcactagctgagtatgct

SEQ ID NO: 1367 - DNA, 646 bp, Gossypium hirsutum
  Clone ID: LIB3825-022-Q1-K6-B10
ctctctgttcttgaatccaagttcctgcatcagaaagcttttcttctctctgaatcataaggatcaggtgtctgaaacattgtgtaaaaatccatggaagcaacgagagggacgagaaaccacagggttactagacaagatcctccctccacgcctggaagacgccggactcgaggattgcgctcttccgccagattccatacacgaggcctttctcaaagccgcttccgccatcaagtcacgagcagccaacatcttccactctgatgatgaagatgaagttgaacgcggatgcttagatgacccatttcttgacaagagtaagtgctcctccgatgttcttgtttcgccaccgtgtcccgacatgtctgacgccgtagtggttggcggagggtcgccggatccaacctcggacgctgtggagggctgcgtaaaggaaaagggatgcggtaaagaggtagaggagggtaaggatatggtgattgtgggtggtgatggtggagaagccgcggatgggaagggttgtttagatgatgagctcaagggtatgaagattaagggtgaagagaaaaagaagaagaatcaaaatcaggaggacgatgatgagagggaaaaggaaaaaccaattctggttgagggttttgtg

SEQ ID NO: 1368 - DNA, 619 bp, Gossypium hirsutum
  unsure (1)..(619): unsure at all n locations; Clone ID: LIB3825-022-Q1-K6-B12
gcttgctgaattcacatgaaatcagaaagctgtcgtaggccttccctatgcattagcaagcctttcgtattgtcagacatttaacttggatcttcttagagcgtcagcaactcttacactggctgaattatggctttcacttggatccaatcatgcaaagactgctttaactcttttacatggtgcttttccaatgattcttggccatggaggtttggaactctgtgctcgggcctatattacagaagcaaaatgttatctctcagatccaagcttctcagtttccaaaaatccagaacttgtgctggatcccttaaggcaagctgcagatgagttgcaagctttggagcatcatgaattaatggccgaagctttctacttgatggccattgtatttgacaagctggggcaaccagaacagagggaagaagctgcatgttctttcaagaatcacgttatgtctcttgaccatcctcatgacgtggaagatcccatccaatccgataccctcttaaacgcctgagccccgaggagcataattaaagtagggtaagcngggtgttttgcccattcctttttgatgaattaattataaggctgattatatgattgctgaaaa

SEQ ID NO: 1369 - DNA, 621 bp, Gossypium hirsutum
  Clone ID: LIB3825-022-Q1-K6-B3
cacccaagctgtgattttctgcaatacaaacgaaggttgattggctaactgagaagatgcgtagcaataacttcacagtatcatcaatgcatggagatatgcctcagaaggaaagagatgtgattatggctgagtttcgtgatggtgcaacccgtgttcttatcacaacagatgtttgggccagggggctcgatgttcaacaggtgtccctggtgataaattatgaccttccaaataatcgagagctttacatccacaggattggtcgttcaggtcgctttggacgaaagggtgttgccattaactttgtaaaaagtgatgacatcaagattctgcgagatatagagcagtattatagtacccagatagacgaaatgccaatgaatgtggcggatctgatataagaatggcatggttgaagaagaatgtcatttgtgttatttgcagcgtcttttaagagtgatgggatttgtagtttgtacaccgtggaaactgaaggcacatatcagattaggattgacttttgctttttgtgtagttgatttgggatttgctccattttaatttcaagtatattcgaaaggttttgggggtgtatgtctttttcgtctatcgtcacat

SEQ ID NO: 1370 - DNA, 362 bp, Gossypium hirsutum
  Clone ID: LIB3825-022-Q1-K6-B4
ggcgcgtgggttaattttccctctttactttccccctttgtcaagaaaatggctcttaaagctgttaatgtcaccgacgtccctaacctcgaccaagtcccagaaaacacgcttctctgtctctctactcgtctcgttttaattccgaaggttggagttgaacagtgaagcaacgtttaaggtaccgaagtttttggtaatagggcatagagggcatgggatgaatattttacaaagctctgattcgagaatgaaagccattaaagaaaacaccattctttccttcaattccgctgctaaatttcccattgatttcattgaattcgacgttcaggtgacgaaaagagactgccctgtcattt

SEQ ID NO: 1371 - DNA, 625 bp, Gossypium hirsutum
  unsure (1)..(625): unsure at all n locations; Clone ID: LIB3825-022-Q1-K6-B5
tccgcgactgtggnaaaaggcagnaaaaataaaactaatttttttttactgtaaatagttaatagttcttgaaagcaagagcagcagcagcagcagaagaagccgtagctgctgattcttcaagctttcgaactgtactttgtgagcaaattttaattgcatggattcttctttagttttctcctcgaaactgaaactccaccatcactctttgcctctccaaacccatttccaaagacgcccgcttctcacttcatcccacttccgcttagcggcggccaagaaaccacccaggaaagttctctgtgaattcgaacctaaagttaatggtgctctctcaccggaccctgattcccgtttcctcgaccggcaaaaagcattggaggctgcaatgaatgatataaatagttcatttggaaaaggaagtgttacaagattggggagtgctggtggagcattggtacggaaaaaagttgtccctgctatgggttgaaacttttccgagtggttgtttgacgctagatttagccttaggtggtggccttcccaaagaagaatgtggaggtatatggaccagaaagtagtggaaaaactaccctagcactccatgccattgctgaagtgc

SEQ ID NO: 1372 - DNA, 588 bp, Gossypium hirsutum
  unsure (1)..(588): unsure at all n locations; Clone ID: LIB3825-022-Q1-K6-B6
gtttaccaggatctcatctccggtgacgagcttctttctgactcattcccctacaaggaaatcgagaatgggatgctgtgggaagttgagggaaagtgggttgtgcaaggagctattgatgttgacattggtgccaatccttcagccgaagatgctgatgaggatgaaggtgttgatgaccaatctgtgaaggttgttgacattgttgacactttcaggcttcaggagcaaccccctttcgacaagaagcagtttgtcgtgttcatgaagaagttcatcaagaacttgacaccgaaactggatgcggaaaagcaagagtccttcaagaaaaacattgagggagcaaccaagtttttgctttcaaaattgaaggaccttcaatttttcatcggagagagcatgcacgatgatggatgtttggtatttgcttactacaaggatggtgctgttgacccgacatttttgtactttgcgtatgcattgaaggaggtcaagtgctgaggtttgaagcaaagaaaaaaaagtggttgctgaagaatttagtcctttntattattgcttttgtctcttattttcagtactctgcta

SEQ ID NO: 1373 - DNA, 457 bp, Gossypium hirsutum
  Clone ID: LIB3825-022-Q1-K6-B7
aagattgccatgaaccgatgagatctttggggagctcttcttggtgcttgtagagtcataaagagtcggaattgccaaaaggcagctaaaaatttctcgaattagacccccaaacggggctgtttatgttctgctgtgtaatatatatgcatattgcaaaaaatgggatagtctacatgagctaagggagtcaatgatgcatagaggaatcaggaagaccccaggctgcagtttgattgagatgaatggagttgttcacgaatttgtggccggcgaccggacacatcctcgatcaaaagaaatatacttgaagttagataatatgacaagggacttaaaactttcagggtattccccggacacttccgaggtgttccttgacataggagaggaagataccagcatagcaaaaggtttgtgttgcttccgggttgagtagttcggaacctggggttac

SEQ ID NO: 1374 - DNA, 625 bp, Gossypium hirsutum
  unsure (1)..(625): unsure at all n locations; Clone ID: LIB3825-022-Q1-K6-B8
ctaaaaaggagtttgctagtanaccttgaaacaaggggatgaaacttaagcgtgagaatgaccaagtaggtgtacaaagcagggaaatgttaaaagtaagagcagctcttgaggagaaactgaaacagaagggaatctttagttccaacatccaaaagcctgataaaaccaagaacataggaaaccagtgaagggacagcttgaaacactatgatgattttgttgatgatgctatggatgttgaaggaagtgctcatggattaagtaacgggcatgcaagctcaaaccattctaatatttccaaacttattacagctagacagaacaagtccaaggtcatatctggtgatgatgatttacccaagagagatgatattggagaaagacggaggaaacatgaactcagagtattagcaggagcaacagttaaatccgaggatgatcatggaggtgaatatgacatgttggaagaagatgatgggggtaatggaggcatttctggggacgaggatggtgatacggaagacactgaggaatcagaagatgaattttacaaacaagttaagcaacaaagagcctcaaaacttgctgcaaaggctgagatatatacaaggacctcagcgcc

SEQ ID NO: 1375 - DNA, 631 bp, Gossypium hirsutum
  unsure (1)..(631): unsure at all n locations; Clone ID: LIB3825-022-Q1-K6-B9
atggtatccaagtacagatgcaattctgcctgcttgagtgacttagaggacagtgatggatgtcttgtgatctcatgaatttctcattaactaggttagatgaagatagatatatctggtatagcatcagagagaatttacgcacattattccttattttcccattgatatgaaactggggtcatcactcacccagactgtttttctattaagagccacaaccttttatttttccgccataaaaatccacaacttaaatcctgtggaaagcccaaaagatcatttttcgtagaagaacattttggtttgacttatatacatgtttttttcctgtggttaattcatcgtatgttcttaatgcttttctaagttctgagtattttattatcattgagatctttaagtcgcatgctaagtttctttacttgagttgggctgtgggctgtatttcataccacttttccttttaaatatcctaatctcttctatattgaacattaaaaagatgtagtaatggtgtcttatagcatcctttaaaagtgaattatattgaactntagtctttgtatttgcttaattaggatcataaatataccaagcatttcaagcttgatcatgaatgttattgact

SEQ ID NO: 1376 - DNA, 577 bp, Gossypium hirsutum
  unsure (1)..(577): unsure at all n locations; Clone ID: LIB3825-022-Q1-K6-C1
cggccgcgtgggttttagcgcacggttttccagggnagttgaanatggtgttggagattccagggtttcacttaggccgaggattaaatcttgcaggagattgtgttgccagttttctgatttagggcatgtccaatattatgtgtcaccgaggggtggtggtagtggcgatgccacgaagaaagacaagggaaagagctgtgagattaaacaagtcaagaagaagctgaagcttctcaagcgattgtccaaggacttgtccatgcttcctcagattgctgatggcgaggatattaggattggattggccgctgaagttaaggccacgacgattcacgaagcaagcggtgttttgctggcccaactgcaaaaattgaaatcagaacaaaaggagttgaagagaaaattgaaagaggaacgagccaagctcaaagccacttttgggaaatcagaatcatcatcttcctctgaatcaagtgacagcgaatgtggggaggtagttgacatgaaagccctgagaaacaatgctttgaaaccttccctagagtcagaaacaccaattggcaatgctttggaa

SEQ ID NO: 1377 - DNA, 622 bp, Gossypium hirsutum
  Clone ID: LIB3825-022-Q1-K6-C10
ggatttcttccagtgcgaagagcagcagccatggttctcaagacggagctttgccgatttagtggtgccaagatataccctgggaaaggcatcagatttgttcgtggtgattcccaggtcttcctcttttccaattcaaaatgcaagaggtacttccacaaccgcctgaagccatcaaaacttacatggacggccatgtacaggaagcaacacaagaaggacattgcccaagaagctgtgaagaagaggagacgtactgcaaagaagccatactccagatccattgtgggtgccaccttagaggttatccagaagaagaggagtgagaaacctgaagttcgtgatgctgccagggaagctgctctccgagaaatcaaggaaaggatcaagaagactaaggatgaaaagaaggcaaagaaggcagaagtagcagcgaagcaacagaagacacaaggcaagggtaaccttccaaagggtggtgcacccaaaggtcccaagcttggtggtggtggtggaaagcgataagtttacctggttattatctgtttttacataggtagtatgttgattttgaaggcatttgtatggactgaatggccattcggccgtgtatcttttttgc

SEQ ID NO: 1378 - DNA, 650 bp, Gossypium hirsutum
  unsure (1)..(650): unsure at all n locations; Clone ID: LIB3825-022-Q1-K6-C11
agaagaaaagaaaaggaaacaaagaggcaattgagattcctagagtgaaacttggaactcaaggatttgaggtttcaaagctgggatttgggtgcatgagtcttacaggtcacgatcattcagtgtcagatgaagatggcatagccatcattaagcatgcagtcgaaagaggagtcactcacatcgatacagccgacctctatggacccaaaactaacgaaattctggtcggaaaggcattgaagcatctgccacgagagaaggtacagttggctacaaaattcggtgttgaaagcatgggtccagatggtccggttatcaatggcactcctgaatttgttcgttcttcacttgaggctagccttcaacgcctcgatgtggattatattgatctttactatataatcagagttgaccgcaagactcctatagaagatactatggaagaactgaagaagttggtggaagagggaaaaataaagtacattggtatatctgaagctagccccgaaactataaggagggcacacgctgttcatcctcttactgccgtacaacttgagtggtcgctttgaactcgtgatgttgaggaagaactaattccnctttgcagggaactcggaattgggattgttgcatatagtcccctt

SEQ ID NO: 1379 - DNA, 641 bp, Gossypium hirsutum
  unsure (1)..(641): unsure at all n locations; Clone ID: LIB3825-022-Q1-K6-C12
ggcgcgtgggcaacaaaaagaaaccggagggcaaagcttagctctaaccaccaccaccatagccattcaaatcttaaccttcagcctaattttttcgttcagcttcgctctcctcaaaaccccacaagaacccaaccatacaccaagtcactgaaaattcagatatcccaactctgaagaccaaattctcgagaaaccacgtccacaaacagttccgagttttcatggaaacgtacggaaagaactattcgaccagggaggagtacatgcaccgcctcgggatctttgcgaagaacttggtgagggctgctgagcaccagctgcttgatcctatggctgtgcatggtgtgactcagttctctgatctatctgaggaggagtttgagagtctttacactggtttcaagggccccaatgtggcggcaccattattgagggatggtgttggtggtgaagcagaggcgttggaggttgatgggttgcctgagagctttgattggagagagaaaggagctgtaacagaggttaagatgcagggtacttgtggatcatgttgggcatttagcaccacaggagctattgaaggagccaactttattgcaacagggnaagcttctaaatctaagtgaacaacagcttgt

SEQ ID NO: 1380 - DNA, 613 bp, Gossypium hirsutum
  Clone ID: LIB3825-022-Q1-K6-C2
ggctagccaaactcaaagccgaagagcggctgctactctccatgctagcggttcttcaaaatttgattttgaccctttctttttttttttttccaaaattttcttagggttttttcctattcggtttcaatttgggttttcccaaagttttcctttaaagggactattcaagctcttctaaataatcgaatacaatctctgtagttatcttatgtggacgagcctcatttttagtaccaactatgctctttagcctttagtcatacattgtttgctgctaggtttctgaacatgaggcaaggcgagggagaagcaatatccactgttgaacaggcaattgacttgatttcagtggttaaggagattcatgggcttaactcacaggagcttaataagttgctgagagactctgaaaattttaccattctctttgttactgaacaaggtttagatgtaaagattgacgtggaaaaacttgcaggatttcttcctttgcaccttattgcagtgcttgtgtcatctgatagagatgaagctctgctcagatatttattatgtggcatccggattttgcattccttgtgtgaattagcccctcgccatactaaacttg

SEQ ID NO: 1381 - DNA, 627 bp, Gossypium hirsutum
  Clone ID: LIB3825-022-Q1-K6-C3
ctcttttgcatcctttgtttctctcttcatctcctgcactacttgcaaaaaacgagctgaagccgtgctacaataacactagtgttttcaacaataaattaatcatagccgcagcttgtttcttttaaactctaaatataaaggaggccaaacatgccgcctcgtagataccaatttgggagggctgatgaggccactcatcccgactccatgagagccaccttggctgaattcctctccactatcattttcgtctttgccggcgaaggctcaattcttgctcttgacaagatgtacaaggatacgagtgcgacgcctgcaagactggtgatgatagcacttgcgcatgggttgtctctgtttgcagctgtggcatccagtgtaaacgtatctggtggccatgtgaatccagcagtcaccttcggtgccttgctctgtggaaggatctctctcgttcgggcgctgtactactggattgctcagctcttaagttccattgtggcttgtctcttgcttcgcctcaccgctggaatgcgaccgggagggttcgccctggcgtcaggagtaggggagtttgcgtggtctgatattggagatagtgctgacatacggatttggtgtacacag

SEQ ID NO: 1382 - DNA, 348 bp, Gossypium hirsutum
  Clone ID: LIB3825-022-Q1-K6-C4
cggccgcgtgggcggtgttgctgacatggcgaggccattcgtgaggcgtgacgcgaagtcttccagaagcttcactatttgggactgctgatggtgtttgcggtgcataggaacggcggcttagtggcctagggtttccactttttctgaaaagagtcaatggactaagttttgggttaggttattgggctgtgtaatgggctaggattaggttttaatgttttgggtcttaggcttggtctgttattgggtcctagaccgtttaaagggacttcgattatttatttggttttattttgtatgggctagtaaagactgtaagcggactatttttagactatttaattt

SEQ ID NO: 1383 - DNA, 84 bp, Gossypium hirsutum
  Clone ID: LIB3825-022-Q1-K6-C5
ctaaacgtgagcggccggatccgagcagcaagcttaagaacgcgtacctgcagatcgctagctttcatatagagagatctaagc

SEQ ID NO: 1384 - DNA, 639 bp, Gossypium hirsutum
  unsure (1)..(639): unsure at all n locations; Clone ID: LIB3825-022-Q1-K6-C6
taaagaagtcgaggatccaaaactccggcctcaccgatatgtaggggtcactgacaaacctttcttgggaatgatgatttccctgatgggccggcttagtcgcacacatcaatactgngaaaaccaagatagagaaacatggagggacagtctccaactcagtcattggtgtaacttgcttggttgcttctcctgctgaacgagagcgtgggggctcatccaaactggtagaagcaatggaaagagaggtacgagtggtgagtgaagcttggttacttgacagcattgagaagcaagaagcacagccattagaagcttatgacatagttacagatcttgctgttgatggcaaaggaattccatgggataaacaagttcctgaagaacatgcaatcgaatcactttcagctgaactcaagttgtatggaaaaagaggagtctacaaggataccagattgcaagagcaaggtggccaaatatttgaggaagatgggatattatacaactgntgtcttnttcgctttgcgaccaaggaggagccattaatgagtattgcattatgcaactggtcaaagtaccagatagtaacctccacttgtactacaagaaagggagagtagggggatgatccctaatgcc

SEQ ID NO: 1385 - DNA, 559 bp, Gossypium hirsutum
  Clone ID: LIB3825-022-Q1-K6-C7
aagaactgaaaagcgtggcagtgattgagctgcgaagtgagacaaaaagaattttgcgaggaagaaaaagaagaatatgcaaaggttttgcttattcttcttcttcttcttaaatgctttgagggattaagttattcgaaggaaaaagttcgtcgtcttccttcgctgcctcagaaaagctaaacgtttcgttctgtgctgtctgcgtattgatttattgtaatggcgtttgcttttttttccgacgcttgatggccttcttctctgaatctgctgttgtataaggcaataattgaagtccggtcttactattgcaagaaatatggattttgagtcgaacaagagatggaaatctatgtctgtggtgccacgtctgttgaaaaacaaatcagcctctcgttgttttctaccgaaggtgaagccagctagttctgatccaggctacacaccggtctatctgaatgtatatgacctaacgcccatgaatggctatttttactgggcaggccttggtatctatcattctggtgtcgaagttcatggtgtggaatatgctttt

SEQ ID NO: 1386 - DNA, 637 bp, Gossypium hirsutum
  Clone ID: LIB3825-022-Q1-K6-C8
gttcttgagaagttaatgaaaaaaaactgctgaaactgaaccagctgatgatgtacatgcagaacctgataagagcctcaagatacaccctcgtgaaaagagcttattgattttagagagaagttgtatcttgctcctctaaccacagttgggaatcttccttttcgtagggtttgcaaaacactgggagcagatgtgacatgcggtgaaatggcaatgtgcaccaaccttttgcagggtcaagcttcagaatgggctctgctgaggcgacattcatccgaggatttgtttggagtccagatatgtggggcatatcctgacactatagcacgtactgttgaacttatagaaaaggagtgtacggtggacttcattgacattaatatggggtgtccaattgatattgttgttgataagggtgctggatcttttcttctcacaaaaccattacgtatgaaaggaatcattcaagcagcttctggcactgtagataaacctataactgttaaggtgagaacaggttattttggaggtaaaaaccgcattgattcgctaattgcagatattggcagttggggtgctactgcattgacatacatggtcgatcacgtcagcaacactacagtaaacttgctga

SEQ ID NO: 1387 - DNA, 647 bp, Gossypium hirsutum
  unsure (1)..(647): unsure at all n locations; Clone ID: LIB3825-022-Q1-K6-C9
gtggngaacttcaatctgcaaaatcttcttattctgacagctattaaggcagatccatctagagttatggattatatcaataggctagataattttgatggacctgcagttggagaagtggccgtcgaagctcaactgtatgaagaagcatttgcaattttcaaaaagttcaaccttaatgttcaggctgtcaatgttttattggataacataagaagcatcgatcgggctgtggaatttgcattccgagttgaagaagatgctgtttggagtcaggtggcaaaggcacaactgagggaggggctagtaagcgatgcaattgaatcgtttattcgtgcagatgatgctactcagttccttgatgtaatccgagcatctgaggatgctgatgtgtaccctgatttggtgaggtaccttctgatggttagacagaaggtcaaggagcccaaggtggatggtgaactcatttatgcatatgcaaagactgatagactgggtgaaattgaagaattcattctcatgccaaatgttgctaatcttcaaatgttggtgatcgtttgtttgatgaagccttgtatgaagctgctaaaataatatttgcatttatatcaaactgggccaagttggctggtacactggtgaggctt

SEQ ID NO: 1388 - DNA, 642 bp, Gossypium hirsutum
  unsure (1)..(642): unsure at all n locations; Clone ID: LIB3825-022-Q1-K6-D1
cgggacgccgtgggcgggacgnncgtgggntnncaacactgtnntccacttactagnaaacaaagcaagcaaaatccaaaatcagtgagatatggcgtcagaacaacttagtcgtagagaaaacaccacatccgagagagacattcatttggaggagaacagagtccctaagatggctactcatttcgaatctctggccgagaaatccaggcagtccgatgtgggtgctgctgctgccaagcacaatcctattcatggtgagcgccatgaatttcactcccttgaagggaaagtcggtgacgtgaatgtttccgctaccataatcgccaaaacggaagcaggtgatcaggccagagaaggaagagggaaacagcttcaggagaggaagggagaaccttacgcgatagggaaattccaagtgactgctcctggagctggagctggagctggagctggacaggagagaggtacttcaatggcgtctaaggccgaacacgagagtgataaagagaaaggacgacggagttatgctgctgctgctgctggacatcgacaagagagaggtgcttcaatggagtccaagggcagaaaacacgagagtgataaagagcaaggacactgcactcaaatggctagtagcga

SEQ ID NO: 1389 - DNA, 653 bp, Gossypium hirsutum
  unsure (1)..(653): unsure at all n locations; Clone ID: LIB3825-022-Q1-K6-D10
ggggaacccanatcgggtcttgttctaatgcttattgcattgggtcttataattttggttaacatccatgaccttttggctcatctcgccggcatcgattatcgtttcactttgatgggtttcgatccccagcttgctctcgttgaattctctgttccactggttcaaatcttaggctcactgcttctctttctgggaattctcttcctcttcattcaggcggagaaagggtacgggttttttaaactggagaggcatgctttgggaatgcttattgctggaccggttttatgggttgctgggtcgattcataactcgtgtcaaatctatgagagagccgatgcacatgttcaaatcttgcaacagagtgtccacgtcccgtttttaattggcagtgtattgttcatggtgggagctattctcaacggccgcgagcaaactggagttattcgtcatggtttacaattactgggaaaaagatgggtgtggttagggatatgtgggagcgtaatgtttatgaataggggggttgacgaatgtggtaaaggtgttcaagatgcagcagatgaacgggattaggcttgagaaattgcgtggcggagcacaagacgggttggttgaaggcagggaagggcaggtgccgctcattattg

SEQ ID NO: 1390 - DNA, 652 bp, Gossypium hirsutum
  Clone ID: LIB3825-022-Q1-K6-D12
tttatcttttacttggttcgagagtgctggagaggaaggtgaactgagacgatttttgactgatcataaagcaagacaacagtttctgctagaagctgcccgccaatgccaagattctgggctgtacgacaagtctatagagattcagaagagaattggagcattttcgatggcattggatacgataaataagtgcctctctgaagcaatttgtgccttatcacgtggtagattggatggtgagagtcaaactgctggcctcattcactccgggaacgagatcttggagactttcaaatattatcctgaagtcagtttccaagagagggaacatgtttcggagcaacaaaccatattaagacagctcgagactatattatcgatccataaattgatgagactaggccagtatcttgatgctctacgagaagttgccaagatcccattccttccattcgatccacgagcacctgatacatctgctgatgtgttccaaaatttatctcctcatgtccaagcttgtttgcctgatttgctaaaggttgctataacttgtttggacaatgtatccgatacagatggatcacttcgagccatgagatcaaagattgcaaccttccttgcaaataatatgcgtcagaattggcctcgt

SEQ ID NO: 1391 - DNA, 617 bp, Gossypium hirsutum
  unsure (1)..(617): unsure at all n locations; Clone ID: LIB3825-022-Q1-K6-D2
agnaaaaaaatttaaaaaaaaaaaaaaacctctgcagnatggctgagcatcgccgcaattgcgcaaactgatgacatgaagaatttcttccatgaaaatggaccctcaacatcaaaagttcttacggttgccaccctccttcctgttggtggcacccttctcttgcttgctggtttgagccttattggatccctcataggtcttgctattgccgccccacttttcctgattttcagccctgttttggtacctgctgctcttctcattgcgggttccatagccggattcttgacctccggagcatttgggatcactggactgtcatcgctgtcgtggattgctaattatattcgtggaagcaggagctctatgtctcaggggctagacccagtgaagtggcccttgccggacacggcagtgagtatggagcagaagatccagaataggagccaaggaggaggaaggatctctgagggaggcagagaacaggaaggtggcaagagtacgacacaagaaggtggcaagagtaagacacaagaaggtggcaagagtaggacacaagaaggtggaaacaagactgtgggttgaagtttcctgttgtagcagtcggctgatat

SEQ ID NO: 1392 - DNA, 595 bp, Gossypium hirsutum
  Clone ID: LIB3825-022-Q1-K6-D3
ttttttttttttttttttttttttttttttttttttttttttttaaaaacttccaacttgttgttttccaaccaacttgcattttgaaaacttttccctacctaacatatgggtccctttcaaaaaaaaaaaaaaaaaaaaaaaaaaaggggggggcccttttaggaggacccaagcataccaaccccggcatgcaaagtaagacctcttctataggggcaccaaaattcaaaacaggggccgggggaaaaaaacggggggaagggaaaaacccgggcgtaacccaaattaaccgcctggcaaaaaacccccttttgaaaagggggggaaaaaacaaaaaggcccccaccggccccccctcccaaaagttgggcacccaaaatggaaaaggggcccccccccggagcggcccaaaaaacccggggggggggggggttacccgcaaagggcccgaaaccccggccaaccccctagcgcccggtcctttcccttccttcccttcctttccccccccggacgccggtttcccccgttaagttttaaatggggggcccccttgggggggcccattgagggcttaaaggaaccttgaccc

SEQ ID NO: 1393 - DNA, 636 bp, Gossypium hirsutum
  unsure (1)..(636): unsure at all n locations; Clone ID: LIB3825-022-Q1-K6-D4
ctaagaagcatattaacccgagttgctagggaaattccagnagatcttccaaactgtaatttttatttttgaaggaagatcaagaagccatagcttcctgtaaaaatccttatagtcatcttgtaaagcataagctctaggattattcagtgttttgtaatagttgataggcgctcctgactgtgaactcacccgacgcttcagcgctccatacttggaaatcatcgtgtggtttttcagccagcggaatactaagaatcttctcggcaacaacttccagaaagatggaattatgggtcgagttatgtggaactaccagagcagctcaaagatatctggttgttgttagatcaacacttggaagccaagattagttattgatttttttcaaacctataataattatgcaatgatttgaaatttaaaattttgtacataacaaaattgataattgtgcactacagtttgaatgggtgtcatacatcgatctagatattatagaatgcatcccgctcgaatttttggccattcgaaatatgtaggacgcaaatttgtcattgattgtttacgtgacggtgaagatgcacaaatcagatcaagtgatgcgataattcgggtgaaggcaaaaaattttgc

SEQ ID NO: 1394 - DNA, 619 bp, Gossypium hirsutum
  unsure (1)..(619): unsure at all n locations; Clone ID: LIB3825-022-Q1-K6-D8
gngaaacaacaggattgtccggtcagaggatgaaaagggaataagatgattaatgagtatgtgagggaatacaagattggttctggtagctatgaaagtggttctgtatcgaaacgcatagatgggggacactatgctattaaggcttttcataagtctcatttgtcaaagctgcgagttgctcttacagagacggcactgactgatgttcttcgtgagattctaattatgaaagtgttggaacatcccaatatagtcaatctcattgaggtgattgatgaccctagcatggatcaattctacatggttcttgagtatgtggaaagcaaatgggtttgtgatggttctggtcctcctggaggcattggtgaagatactgctaagaaaacattgtgcatggagatataaaacctgataatttgttgattactagcacgggtacggtgaagataggggatttcagtgtcagccaggtttttgagaatgacaatgatgagcttcgccgttctcccgggactcctgtgtttaccgcacctgagtgttgtctaggttcagtatatcacggaaaagctgctgacacgtgggctgtaggagttaccttgtactgtatggtacttgg

SEQ ID NO: 1395 - DNA, 597 bp, Gossypium hirsutum
  unsure (1)..(597): unsure at all n locations; Clone ID: LIB3825-022-Q1-K6-D9
ccgggtgcctgnagcatggnaagacaatatcgtgtcgaattgcaaaaaagcgatgatacgacttgctcaatcttaccttgtggaggccagatggactcttcaaaactacaaaccatcattcgaggagtttaaggctaatgcattgccaacttgtggttatgccatgcttgctattacatctttcgtcggcatgggagatatcgtaacaccagagacctttaaatgggcagccaatgaccctaagatcattcaagcttccacaattatttgtaggtttatggatgatgttgcggaacacaagtttaagcataggagagaagacgattgctcagcaatagagtgttacatggaagaatatggcgtatcagcacaagaggcatacgatgtattcaacaagcatgttgagagtgcctggaaggatgtgaatcaagagtttctgaaaccaacagaaatgccaacagaagttttaaatcgtagcctaaaccttgcaagggtgatnggatgtactttacagggaaggagatggatatacatatgttggaaaagcggctaagggtggaatcacttcattgctcattgaaccaattgcactttaaa

SEQ ID NO: 1396 - DNA, 628 bp, Gossypium hirsutum
  Clone ID: LIB3825-022-Q1-K6-E1
gtttgattagatggagaagaggaaattctgagattggagctattaaggtgtagtggaagcatttttctttgtaaatttgtttatttaaaattctatttttgagcttggcttggaataagaaatacctcaaaaagttccttcaaattccaagccaagctcaaaaatagaaggatactttttgaggtatttcttattttggagctgaatttttggttttaatggataacattgaggataatgctagacacccttcaaatccatatggtgttggtcaccagcctggttaccgttcttcgaatcatcaaaagctttctgtaagtaataatccgtatgtgaggccgaccgggaatcaatatgttgttgatgatgaagatgaggaggaagaagaaaatgatgaagatttggaagaggaggaaaatcgtaaccgaaataatggtgttcggtatgtaggaaaagatatggatgatgttgatgatgatgacaatgacgagcttgatgatgatgaagatggggatgaggatgattatgatgaaaacggtgataaacagaaaggttatgatggaaagaacgatgatgttgacatggagaggcaccccaagaagaggaaattgaagagtttgttgtcgag

SEQ ID NO: 1397 - DNA, 644 bp, Gossypium hirsutum
  unsure (1)..(644): unsure at all n locations; Clone ID: LIB3825-022-Q1-K6-E10
ngagcaactttgctagcatgtggttcattctccttttcgtctccatttttgccactggaatacttgagcttaggtggagtggtgtcagtatcgaagactggtggagaaatgaacaattctgggtcattggtgggacatcagctcatctctttgctgttttccagggtcttctgaaagtgcttgctggaatagataccaacttcactgtcacttcaaaggcgtctgatgatgatggcgattttgccgaactttatgttttcaaatggacatcacttctcattcctccaaccacagtactcattatcaacctggtgggcattgtggccggcgtgtcgtatgctataaacagtggttaccaatcctggggtcctctttttggcaagcttttctttgccatctgggtgattgctcatttgtatcctttcttgaaaggtttggtgggtcgtcaaaatcgtacccctacaattgtcatcgtgtggtctatacttcttgcttccatcttctcattgctgtgggtgcgtatcgaccccttcacctcagaagctacaaaagctgccgctaatggtcaatgtggcatcaactgttagtttcattttcggatctttttattccggtaaatgctgtctctccttcagttggctatt

SEQ ID NO: 1398 - DNA, 644 bp, Gossypium hirsutum
  unsure (1)..(644): unsure at all n locations; Clone ID: LIB3825-022-Q1-K6-E12
gccttccgaaagngacatgagggtgatgtagaaaaaatggtcaagagcctataaaaccaggtggggatacaaatcctggagaggctgaagttactgatcaagcaaaagatcaggttctgaaagtgatggtgaactatcaatggctgatatggtcaaacttgtccaggagaaagaaggactcttggaagtcaagcaaatggagattgaacaaatgaaggacaaagttgttcgcactcttgctgaaatggagaatgttatggctagaacaagacgtgaagctgagaactcgaagaaatttgccatacagaattttgcaaagggcctactagatgttgcagacaatttaggaagggcttctactcatgttaaaggcagtttcgctaagctagatgagtccaaagacactgctggagctgtacctcttttaaaaacacttctagaaggagttgaaatgaccgagaaacagcttggagaggtatttaggaagtttggagtggaaaaattcgatcctacaaatgaaccatttgatccacacaggcataatgcagtattccaagtaccagataatgctaagcctcctgtcacggtcgctcatgttttgaaggcggngtacatgcttcacgatcgggtaattcgacctgctg

SEQ ID NO: 1399 - DNA, 614 bp, Gossypium hirsutum
  Clone ID: LIB3825-022-Q1-K6-E2
cgcaatcagtcttccgggttcgtcctaacagtatttaccgtcaaacccggcgagttaacattacgagccacgtcgccccgtgcctgaaacccgaaagtatcgacgaaagcaatgccgaggaggaagttgaccaaggcgctatcttaccaacgacaaaggattctttttctgagttacaacaataaatcaagtcagttgagaaaaggatcgttttcggacttggtattgggatctctgtcggaggtgctgtattagctggaggatgggttttcactgtggctttggctgctgctgttttccttggtgcacgtgagtattttgaattggttaggagccgtggaatcacagcaggaatgacacctcctccacgatatgtctcgcgagtttgctctgttatatgtgcgttcatgcccattctcacattatactttgggaatattgatatttcagtgacatctgctgcatttgttgtggctacggcattgctcatgcaaagaggaaaccctcgttttgctcagctcagcagtaccatgtttgggttattttattgtggctacctcccttgtttttgggttaagctcagatgtggtttagcagctcctgccttgaatact

SEQ ID NO: 1400 - DNA, 467 bp, Gossypium hirsutum
  Clone ID: LIB3825-022-Q1-K6-E3
ctatacgaactagacgctgggatcagaaaaaaaagacgatgactcagcactgcataaccgaaatgggttatataggaagatacgaccagattactagcagataatatattagacaacatactatgcctaagataaaatcaacagaagaaatataatcaggcagacctcatcatggaacaatcattcacaagatcatatcacaccctcagcttctaaacataaagactaagatcttttaattgtgatgtgaatgacattattataactaaaacatgtgacaaatcagatcttatattacaaggccatcatatctagaatgactacaggattgcttgataccacatctcagatgaatagggaggatcctgctcaaggcggactgtcttaacaactgatcctaactcacataatggtactcattgatgacaacagattagtatgacgcatcctcaagttcatgtcgatga

SEQ ID NO: 1401 - DNA, 589 bp, Gossypium hirsutum
  Clone ID: LIB3825-022-Q1-K6-E4
attttctagagagaacgcgagagtttcttcttcttttcttcttcgctgctgtagaaagtttatttgctcttcaacaataaaaaataaaaaaagctttcctacagcagcgctcaagtttttatcaatccagagtttgaatttgaattgaacagatcaatattaagataagagaaatggcttgctctctctccaacgctaagcttttctctacttttgtcgtcgatgtaatctctaacgttatctccagacgaggatatgcggcggcatcacaaggaattgtgtcgagtggaataagaggaggagcgggaaggagcgctgctacggtggccaagaaaacaggggaagatatgtctggcggagctaaagagaaggtttcgtgggttcccgacccggttaccggatgctacagacccgagaactgtcccaatgagatcgacgtggccgagctcagatccatgctcttgaagaagcactaaataaacaagggtgacctggttgcttgctcctctgtccttttgtcgacgaaatagattttaagatttgatgatgtaatatttataataaataataatacttaacatttttaatc

SEQ ID NO: 1402 - DNA, 546 bp, Gossypium hirsutum
  unsure (1)..(546): unsure at all n locations; Clone ID: LIB3825-022-Q1-K6-E5
ccgagcttctgcagacagcaagaacgacgacgttttccccagtcctactggaaattcacatcgttctatccaaagagaggcagctctaacgaagttccgcttgaagcggaaagatagatgctttgagaaaaagtccgttacgagagccgaaagaaactcgctgaacagcgtccaagggttaaaggtcagtttgttcgtcaaccacaagctgatctgtcccattacggcaattcatccgatgggtagctaagagttttttaaaccgaggagatgccattgtacatatctatagcttggtaagtatactatttggttatctaaaagaggttgctatatatacttattgtaacataatattttgagcttgttttcgcattaggggattgattgcctttggtcattctttattggtttacctggtagatttgtaactagaaagatttacttagggcttttaactcggttttatacattcatcttaaagaggtaataggtaacgtagaaatccgagtttaaatctcanaaaaaaaaaaaaaaaaaaaaaaa

SEQ ID NO: 1403 - DNA, 635 bp, Gossypium hirsutum
  unsure (1)..(635): unsure at all n locations; Clone ID: LIB3825-022-Q1-K6-E7
ctctgatctcccagggaaggaaaagaaaccaanaataacgaatttcgaaggaaaaaagatggtgttttacttcaaagctcgaccagaggctggcgattacaccattttcatgggtctcgacaagtacgagaacgaggaactcatcaaatatggcttccccgaagacatttggttccatgtggataaaatgtcttctgcccatgtttatttaagacttcaaaaaggtcaaaccatcgatgatataagcgaaggcttgctcgaagattgtgctcagcttgttaaagctaactccattcaaggcaacaaggtgaacaatattgacgttgtttacactccatggtccaatttgaagaaaacctcttctatggatgttggtcaagttggctttcacaattctaagatggtccggaccctgagagtggagaagcgaataaatgagatagttaacaggctgaacagaactaaagtagaacggacacctgatttgaaagctgagagagaagcagtcaatgcagcggaaagagctgagagaaagcaacatatgagggaaaaaaaacgacgtgaggagctagaaaggcttgaaaaggaaagacaagcggagataagaagctacaagggtctcatggtatctgaaa

SEQ ID NO: 1404 - DNA, 602 bp, Gossypium hirsutum
  Clone ID: LIB3825-022-Q1-K6-F1
cacctaatccttttgatctactctttcctgggttttccttcttttttgctttaatgttccatctttgatttgattcccccgatatgggttttcgatttcatttcagaaatttgggatataatgattcaagcattgaggtcttggcagaaaactgtgatgatcatgatgatggctgtaacgacagttgtgcttcactatcctgtttccaggatgatggttctatcgctcatcatcattcagcgttgcgcaccaagtatttgataataattttcacagtacttgcgttttcgttttttatcctctgtttgtacgtttactacgtcaggtattatcgacgccgacccgattttaggagaagaagatcaaatgaaacgactgaaacccgtgatgagtttctcgatgaagatcatggtccggtcgttgatcatcatgtatggtatatcaacaccgttggtttacaaccgtcgatcattgattccattgctgtttttaagtacgtgaaaggtgagggtcttgttgaaggaacggagtgctctgtttgtttaaacgagttcgaagaaggtcccataccaattgtcctatgtgccgagcacctattgttt

SEQ ID NO: 1405 - DNA, 620 bp, Gossypium hirsutum
  Clone ID: LIB3825-022-Q1-K6-F10
catcaacataataagaaattcaaggttgctttgaaccaaatttatatattgaaagggttcagggggctgatattaatgttaatagttcttttttttttctagctttctagtaatttattgttcataaatttttttttcaaaagccaggcttgtgaaatattagtaattaaaaagtttatatttgggtggaaattcgtcatgggtgttttggttgattcccaaaaggaagggtttggatcttcatggggtggtttaaagagtttggtaagaagaaaacaagtagattccgctcattccaagcgttctggtcatcatcagttggctaaagagttgacagttccacatctcatagcaattggtgtgggatcaacaattggagctggagtttatattcttgttggaacagttgcgagagagcattcagggccagctcttgccatttcctttctaatagctggaattgctgctgcactctctgctttttgctatgccgagcttgctagtcgttgcccgtctgctggcagtgcctatcattattcatacatttgtgttggtgaaggtgttgcctggttgattggttgggctctgatactggagtatacaattggtggtgcagctgt

SEQ ID NO: 1406 - DNA, 648 bp, Gossypium hirsutum
  Clone ID: LIB3825-022-Q1-K6-F11
gcttattactcattttacctcccagttgcatgtgcattgcttatggcaggggagaatcttgacaatcatactgaagtgaagaatgtccttgttgaaatggggacctattttcaagtacaggatgattttctagattgttttggtgatcccgaggtaattggcaaggtcggaactgatatcgaagacttcaagtgctcttggttggtagtaaaagctctggaacgtgctaatgaggagcaaaagaagttgttatatgagaactatggaaaagatgatcgagtatgtcttgccaaagtgaaagagctatatcaaactctggatattcagggtgcgtttgaggagtacgagagcaagagttacgagaagataatgaaacaaatcgagggtcatccaagcaaagcagtacaagcggtgttgaaatcttttctggcaaagatatacaagaggcaaaaatagaaacttaaacaaagcagagagaataagcacaggagactatgtagttctaatatatttagtattgatattatactattagaggggaataaatagctaatgatgtagtcacatgatgaatctctagggagtagtagtgaaaaatagagggttagatggtagttaaacaatgaataatagatattacaaccatga

SEQ ID NO: 1407 - DNA, 186 bp, Gossypium hirsutum
  Clone ID: LIB3825-022-Q1-K6-F12
ttctttttatttttatttttctgggaattctttcttggatattttaatgaaagaaaggggagaggttgcgattgatagagaatgtgattttatgcattaacagtgcgtatgacattggagcgctggttgaggctagggcgtcattgctcccgacatgctgtgccggggctccaaacttcttgttct

SEQ ID NO: 1408 - DNA, 616 bp, Gossypium hirsutum
  unsure (1)..(616): unsure at all n locations; Clone ID: LIB3825-022-Q1-K6-F2
gtatccatacaggnaccgcattacatttgcccngagtccaggagtatcgattatttttattgacccaagatgagccagggacaacctaggaggcctcaacaaccagcaggtcaaggtgagaaccaagagcctatcaaatatggagatgttttcaacgtgagcggtgagttagccaacaagcctatcgcaccccaagatgcagccatgatgcaaacagctgagacccaagtgttgggtcagacccagaaaggtggaaccgctgccgtgatgcaatctgccgccacgaggaacgaacaagttggcgttgtgggtcataataatataactgacattgctggtgaacaaggcgttagcgtcgctgaaactgatgttgctggtcggcgtataatcactgaggcagtcgctggccaggttgtggggcaatatgttcaagcaacaccggttatgacaagccaagtgggcgctgtgcagcaaaacgcaataaccataggtgaagccctcgaagcaaccgctaaaacagcgggcgacaagcccgtcgatcaaagcgatgccgctgccgttcaagccgcggaagttcgagcgactggttcgaatgtcataatccccggcggactcg

SEQ ID NO: 1409 - DNA, 634 bp, Gossypium hirsutum
  unsure (1)..(634): unsure at all n locations; Clone ID: LIB3825-022-Q1-K6-F3
ctactattacttctaaaggttcggggaagagagaagatgtccgagctttgtttacattggcagccaaagtctcaccaactattatattcgttgatgaggtagatagcatgctagggcagaggactagagtcggagaacatgaagccatgcngaaaaataaaaaatgagtttatggctcactgggatggcctcttgacgaggcaaaatgaacgtatcctagttcttgctgcaaccaatcggccatttgacctcgatgaagccataattaggcgttttgagagaagaatcatggtgggacttccgggtgcagagaaccgggaaaagatttttcgaactcttttgggaaaagaaaaagtagaagatggtctagacttcactgagctggcattaatgacggaaggatataccggaagtgaccttaagaatttatgcacaaccgcggcttatctgccagttagagagttaatacagcaagagagattgaaagatctggagagaaacaaagagttgttgaagtacaaaacaaagaagatggtacagatgaaagagtcattaccctaaggccattatctatnggaagatttcaggcaagcaaagaatcaggtggcggctagcttcgcatctgagggagctg

SEQ ID NO: 1410 - DNA, 454 bp, Gossypium hirsutum
  Clone ID: LIB3825-022-Q1-K6-F4
catgattgcatagcatcggatcgcgacattcaaggttcttccagcacttctgcagtcagcgacgtgcgaggaaggtatttgtcaggtattagcgcacatgtggatagctacgcatctcgattcttcttcgagcaacgatgttgcgccgacatcatcctcgggttctagtagaataagaaaaggcaaaagacccgaatttgagaggaagctgggtgagttcttcaagcatcaaatagaatcagacacatagtccgtatatggagatgggtttagagcagggaatcaagcagtttataaatatggacttagaagaactctagaacatattcagatgaccggcagatttccttactgaaaatcgctatccctcacagttaattttttctctatcctttcgaaagctgattcatatgaatttaataagtggcataagatggagatgaagtttcaataa

SEQ ID NO: 1411 - DNA, 625 bp, Gossypium hirsutum
  unsure (1)..(625): unsure at all n locations; Clone ID: LIB3825-022-Q1-K6-F6
cgagtcgactcagaagacaagccggggngagagagaaagaagggaagactcagcgaactcgaaagaacatttacagaggaatcaggcgaaggccatgggggaaatgggcggctgagataagagatcctcacaaaggtgtccgaatctggctcggtacatacaacacggctgaagaagcggctcgagcctacgatgaagccgccaagcgcatccgcggggacaaagccaagctcaacttccctcaaactccacgcctaactcagcctcctgctaagaaaaggtgtatgatggctcctgagttgactccaccgagttctgaaaccaagagcccaccaaccccacaaccttttatgggttttggttacgagaatggagtttacaggccgagtgaagcaatggaaagcgagatggagctgaaggagcaaatctcgagtctggagtccttcctgggtttggagcctgatgagatgacaactgagttgagtggaagcgctgagcctgagtcagtgaacctttggatgcttgatcaccttgtgacacatcatcaacaacagcctcagctcttttattagaaattaaaaagtttaaattagggtaatgtttatgtttgatatgattatgctta

SEQ ID NO: 1412 - DNA, 617 bp, Gossypium hirsutum
  Clone ID: LIB3825-022-Q1-K6-F7
gaacaaacagcaaaatccaaaatcagtgagattggcgtcagaacaacttagtcgtagagaaaacaccacatccgagagagacattcatttggaggagaacagagtccctaagatggctactcatttcgaatctcttgccgagaaatccaggcagtccgatgtgggtgctgctgctgccaagcacaatcctattcatggtgagcgccatgaatttcactcccttgaagggaaagtcggtgacgtgaatgtttccgctaccataatcgccaaaacggaagcaggtgatcaggccagagaaggaagagggaaacagcttcaggagagaaagggagaaccttacgcgatagggaaattccaagtgactgctcctggagctggggctggagctggagctggacaggagagaggtacttcaatggcgtctaaggccgaacacgagagtgataaagagaaaggacgacggagttatgctgctggaactggacaggagagaggtacttcagtggcgtctaaggccgaacacgagagtgataaagagaaaggacgacggagttatgctgctgctgctgctggacatcgacaagaaagaggtgcttcaatggagtccaagggcagca

SEQ ID NO: 1413 - DNA, 461 bp, Gossypium hirsutum
  Clone ID: LIB3825-022-Q1-K6-F9
gcgattaataatactgggaccaaggtaatcttcatagtgcttggacttgttgcagttgggttgttttcatttttccttttcaagttgtggcaaaagaagaaacgagacgaacaatatgcccgtcttttgaagttgtttgaagaagatgatgagctcgaggtcgagcttggcctgcgggactagcagcacattgagaactgagctcgtcctaattgaggcttaaatggcaacaatggcttgtgtgttgtttaggaatctcatttttgtgaaggacaatgtcaggattttaggcatatgctgtggtgaggtctgataatttttcaaccttaaagttgtactatttgtaatgatatgttggaatttattatgaatttaagttttttgtggatgcttagaaatgaggttggtcggttaccattttgtacaagatgtttgaaagaaaagttagttcattggtttgt

SEQ ID NO: 1414 - DNA, 645 bp, Gossypium hirsutum
  unsure (1)..(645): unsure at all n locations; Clone ID: LIB3825-022-Q1-K6-G11
ctttgagagagaaaaaaaaaaaggaaagaagagtttgctttgtggtttgtgataatcttcaaaggcagcagcttttttttaaacaagcttaaaaaccaagagaaagtagcaaaaggtggcagccagcaacagcaacagaagtagcagatagcactagcagacattgttgttttcaaagagaaaaaagaaaaagaggtgggctcaggttcagctgataggagcaaagaagctgtggggatgatggcccttcatgaagcacttagaaccgtttgtctcaactcagattggacttactctgttttctggaccatccgtcctcgcccgagagtgagaggtggtaacggttgcaaggttggagatgataacggcagcttgatgttgatgtgggaagatggattttgcaaaggaagggttacaacagaatgtttggaagagattgaaggagaagatcctgtgaggaaagctttcagcaaaatgtctattcagttatataattatggagaagggttaatggnggaaagttgcatcagataagtgtcataaatgggtattcaaagaaccaactgaatgtgaacccaatatctccaattattggcaaagttcttttgatgctactattgctgntattcaagctggccatggtct

SEQ ID NO: 1415 - DNA, 653 bp, Gossypium hirsutum
  unsure (1)..(653): unsure at all n locations; Clone ID: LIB3825-022-Q1-K6-G12
atttgattgaccctggataatataaaaaaaagtaaagggcgtcggtcaacactaggagattcgtggccaaaagtccagagtgcactagatcatagagccttttccttgattactgcaaaaccaaaagaacatagacgaaaattagccacgccatctttggcactgccggaaacggctgcttcagttgcaatcgctgcaacagttgtgggagcggcagcaacatttcttgttaggagaactaaagcttctgatgcaactgaggttcctttgagaacttgtgaagattgtgagggttctgggatatgttcagaatgtagaggtgaaggatttgtgttgaaaaaactgtcagaagaaagtgcagaaagggcaagactgactgcaaagaatatggccacacgatacacagctggacttcccaagaaatggagctactgcacaaaatgctcttctactcgatcttgtactacttgtggagggagtggaaagttaagctagttttgctcgaacagcaatgttgtgtttttgcccaaaatgttgctgcctcatggaaggcgagaatcatgtttcagctaaggaatagaagtaaattaattnntttgtgtttcagagatgatataagataccttgtttcatgcatgtacctaaagtacttg

SEQ ID NO: 1416 - DNA, 350 bp, Gossypium hirsutum
  Clone ID: LIB3825-022-Q1-K6-G2
cggggctgtgcgttggcgctcgggtacgggtctaggctagggtaccggaggtggtaccggtcgttgcgatgctgttgcggcgcaagagggtgacctagggttcccgaagtgttgaagtttttgggctttttgggctattcgggattgggcttacttgggctaggatattaagtttggtttttgggtcatgtattgggttttatatattttttgtattttttttgttttgtttttgtttgttttgtgtttacacgggcccgggcagatttggcccattacaatgtaaacatcaaaagttaaatttattattatactaataaaaattatgtacaattgatagagacattaac

SEQ ID NO: 1417 - DNA, 620 bp, Gossypium hirsutum
  Clone ID: LIB3825-022-Q1-K6-G3
cctttccctccaactttaatctaccacaactgtaacgacgccatggttcacgtcagtttctaccgtaactatgggaagacctttaagaagccaagacgtccatatgagaaagaacgattagatgcagagttgaggcttgtaggagagtatgggctccgatgtaagagggagttgtggagggttcagtatgctttgagccgtatccgtaatgctgctagggaccttctcacccttgatgagaagaaccctcgtcgtatttttgaaggtgaagctcttcttcgtaggatgaacaggtatggacttttggatgagagccagaacaagcttgattatgtcttggctttgaccgtcgagaacttccttgaacgccgcttgcaaacacttgtgttcaagactggtatggccaagtctattcaccatgcccgtgtcttgattaggcaaaggcatatcagggtcgggaggcaggttgtcaacatcccatccttcatggtaagggttgactcgcaaaaacatatcgatttctctctcactagtccgtttggaggtggccgacctggaagagtgaagagaaagaaccaaagagcagctgccaagaaggctgctggcagagatggcgatga

SEQ ID NO: 1418 - DNA, 641 bp, Gossypium hirsutum
  Clone ID: LIB3825-022-Q1-K6-G4
cttgttttaaattataatcatctcttctgaaattgaaatttaagattaattttctcgatttgctgcttgtaggagtatgcctacttcagctgcccttgatgttgttgccaagaacttgaacttaaaattttttgaggtacccaccggctggaaattttttggcaacttaatggatgctggattatgttcgatttgcggagaagaaagttttggaactggctctgaccatatacgtgagaaagattgaatttgggctgttttggcttggctttcaatacttgcttttaaaaataaggaaaatctcaatggggataagctcgtgactgttgaggatatagttcgtcagcattgggctatctatggtcgacactattacactcgatatgactatgagaatgtggatgctggtgcagcaaaggatttaatggcctgtctggtcaaattgcaatcatctcttgatgaaatcaatagtattgtgaagggggctcgttcagatgtgtcaaatgttgtcaatgctgatgaatttgaatacaaggatcctgttgatggctctgtttcaaagcaccagggtattcggtttttgttcgaggatggatcgcaattggttttccgtctctctggaactggttcagaaggtgcaa

SEQ ID NO: 1419 - DNA, 626 bp, Gossypium hirsutum
  unsure (1)..(626): unsure at all n locations; Clone ID: LIB3825-022-Q1-K6-G5
cggccgcgtgggctgngataccatctcagttgcagctggggttgctttcaccactttacttaaggaaactgtttgagcgtatgggtgcaacttatatcaaattaggtcagttcatagcatccgcaccaacactcttcccaccagagtatgttgaggaatttcaaaaatgctttgacagagctcctgcagttccttttgaagatattcaagcaatcttgcgtgaagaattagggagaccaattgatagcatatatgaatatattgatccaacaccaattgcctcagcttctatagcacaggtacatggtgcaaggcttaaaggctcccaagatgatgtagttataaaggtattgaaacctggaatcaaggacattttggtggcagacctcaacttcatatatatagcagctcgaaattggagttcctaaatcctgatttcagtcgtgcttcactggttggtattgttaaagatatacgggaatccatgcttgaagaagttgatttcaataaggaggctacaaatattgaatccttcaggagatatcttgaagtcatgggattaacaaggcaggcaacagcgccgagagtgtataactattgcagcacgcggcgagttttgactatgg

SEQ ID NO: 1420 - DNA, 575 bp, Gossypium hirsutum
  unsure (1)..(575): unsure at all n locations; Clone ID: LIB3825-022-Q1-K6-G6
gcgtcatggcatcgaagcggattttgaaggaactcaaggatttgcaaaaggatccacccacttcttgcagtgcaggtcctgtagctgaagacatgtttcattggcaagcaacactcatgggcccttccgatagcccttatgcgggaggtgtatttttagttagtattcattttcctccagattatcctttcaagccccctaaggttgcatttaggaccaaggttttccatccaaacatcaatagcaatgggagcatttgtcttgatatcctaaaagaacagtggagtccagccctaaccatttccaaggttctgctctcgatctgctcgttgttgactgatccaaaccctgatgacccacttgttccggagattgcacacatgtataagactgatcgggcaaagtacgaagcgacagcatgtggctggacccagaagtatgccatgggatgatggtggttagtgtgtaatacgtattggctttggtacgatgccatatatgtgttaaaaccttcatatattttgatttggatttgaattacgtggacatcttatntgaaaaaaaaaaaaanaaaa

SEQ ID NO: 1421 - DNA, 655 bp, Gossypium hirsutum
  unsure (1)..(655): unsure at all n locations; Clone ID: LIB3825-022-Q1-K6-G7
ctggacggtaccgattgtgtcatgctcagtggtgagagtgctgctggagcctatccagagcttgccgtgaagacatggctcggatttgtattgaggcagaatcttcccttgactatggagcaatcttcaaagaaatgatccgatcgactccacttccaatgagtccactggagagtcttgcatcctcagctgtacgaacagctaacaaggccaaagctaaactcatcgttgtcttaacccgtggtggaacgacagccaaattggtcgccaagtacagaccagctgttcctatcctatccgtggttgtcccagtcttgacaaccgattcatttgattggacctgcagtgacgaaggtccagccagacacagtctgatatataggggcttggttcccatcctggcagaagggtcagccaaggcaactgatgccgaatccaccgaggtcatcttagaagcagcaatgaagtcagctacggagaaggggttgtgcaagcctggtgatgccatcgttgcactgcaccgtatcggggctgcttcggttattaagatctgcatagtgaagtgatgatcaaaagctggctntttagatattgcatttaattatccctttattgttcttaaaaatctaagctggttcaactttgaatattcagc

SEQ ID NO: 1422 - DNA, 596 bp, Gossypium hirsutum
  Clone ID: LIB3825-022-Q1-K6-G9
cacaatgactcaaccaccacatttccacatgccttttaattacctttttcccttttttgcagaagtaaaataggcgagtggggggagtgactagagtagtcacaaactttagtatggttagcgacattagtattgtttacatcctgaaaatgataaatttattgttttcgttctactgcttgggttctttcctcgctttccttagtttacctaattagaatggtcttacttttccaccttcttttaaccattctaaggatgcatttattgtacttatggcatgtagaaataaattatttttaacttctgtttgggtgagtattcatactctcccttgcagtgcggcaatcatgctgtgtttctatatatgctattataaagaatcaatatgaagctgttaattactgagcgattatgttgcaagatcactcattcagcaccaggtatacattaagatctaattctggagatgtaatactatatgcagggtgctctaagggaatgtcttggcctatacatgagatcacaatcttgtaaatattatgaatggtactgtacagtatctaacagaggctgaaaggtcatgctgcattatc

SEQ ID NO: 1423 - DNA, 630 bp, Gossypium hirsutum
  unsure (1)..(630): unsure at all n locations; Clone ID: LIB3825-022-Q1-K6-H1
cccagcgtccggtactttccagnaaattgcaggaagcaaggacactgttggtcaatatgagagtacactgctttcactcttcctggtttataccgagtcgtacacggtatcgatgtatttgatcccaaattcaacatcgtgtctcccggtgctgacatgagcatatacttcccttacaccgagaagaagaggaggttgaagcatttccaccccgagattgaagacctcctttatagcaaagtcgagaacgaagaacacttatgtgtgctaaatgaccgcaacaagccgatcctattcacgatggcaaggctagaccgtgttaagaacttaaccggactcgtcgagtggtacggcaagaatgcaaagctgcgcgagttggttaacctcgtagtcgtaggtggagacaggagaaaggaatccaaagatttagaagagaaggccgaaatgaagaagatgtttgagctgataaaaacatacaaattgaacggtcaattcagatggatatcatcgcaaatgaaccgagttaggaatggtgagttgtaccgctacatttgcgacacaaaaggtgccttcgtacaaccagcattgtacgaagcctttggattaacggttgttgaagccatgacttgc

SEQ ID NO: 1424 - DNA, 652 bp, Gossypium hirsutum
  Clone ID: LIB3825-022-Q1-K6-H10
actggcgataggagttaaggccttgcacttgtcgtttgtgcctcatgccctcgcgattgccggcgctgttatggtattggtttggtgcattcacttcaggggtggattagcttgggaatcttctaacaaaaatctcatctttaatctccatcctgtattgatgttgattggcttcattatcttaggaggtgaagccattatgagctacaagtctttgccactgaagaaggaagttaagaaagtcatacatcttgtgctccatgccactgctctgattctaggcattattggaatctatacggcattcaagaatcataatgagagttcaatacctaatctctacagcgtgcattcttggcttgggattggaatcattaccctttatggcattcagtggatatatgggtttctcatattcttctaccctggagggtcgaccggattaagaagcgaatcacttccatggcatgtactgttggggctgtttgtatacatcttggcagttggcaatgccaccttagggttcctggagaagcttacattccttgagaactcagggcttgataaatatggtgccgaggcataccttgtaaacttcacagctattgtcacaatattgtatggagccttcgtcatatttacagttctctcc

SEQ ID NO: 1425 - DNA, 633 bp, Gossypium hirsutum
  unsure (1)..(633): unsure at all n locations; Clone ID: LIB3825-022-Q1-K6-H11
cggnagcgtgggcggacgcgtgggtgaaccttgtcgagctggtccaagaaatgttgttataactggaagcacaaggggtttgggaaaagcgcttgctcgggaataccttctttccggagatcgtgttgttgttgcttctcgcagtcccgaatctgttgatatgactgtcaaagaactcgaggaaaacctgaaggaaggtatgactgctggtggcttatctagcaagaatctggaacgagcaaaagtggttggcatagcatgtgatgtttgtgaagccaatgatgttgaaaaattggccaactttgccgtcagtgaactcggttctatcgacatttgggtgagttatatggcgtggtgtttgtatatttttccctcctcctgtcactctcttgcatggagatgcactgtagtgtcatattagcatgttgatgctttcaggggaatgatgttaggtaaaattttcaatgaagttgaacgaccttatgtttattatgaattgactcttagccttaagaaatgtgataaaatcatgcatggtgatattattgaacttaattcttggacctgcaagcaaagaggtcctcgcaaatggtcatttcctattgattatgatgactactgncattgttgtgt

SEQ ID NO: 1426 - DNA, 609 bp, Gossypium hirsutum
  unsure (1)..(609): unsure at all n locations; Clone ID: LIB3825-022-Q1-K6-H2
cggncgcgtgggttccactccaaaaactgtagctatggctaacaatttcctatatttttgcctcttctgtagcttagttgtattaactcattcagctcctgaggaggctctggtcactcaactccctggcttttctggcacttttccttcaaatcactactctgggtatgtgaatgtcgatcaaaatcatggcaagaacatgttttactattttgtggaatctgaaaggaatccgtcagaggatccactggttctttggctcaatggtggacctggatgttccagctttgacggctttgtttacgagcacgggcctttcaattttgaagcagcaaaggcaaatgagagtttgccccaactacatctcaatccctatagttggtccaaggtctctaacattatatatttagattctccagtcggtgttgggttttcgtattcgaagaacaaaagtgattatgagactggtgatgtacagactgccattgacacccatgcatttttgctcaagtggtttgaactatactctgagttccttccaaaccccttttttattgccggagagtcatatgctggtgtatatgtgcctactctatcttctgaagtcgt

SEQ ID NO: 1427 - DNA, 639 bp, Gossypium hirsutum
  Clone ID: LIB3825-022-Q1-K6-H4
gttcacttcgtatccagtccttgcatggcgggtggctggaatccacccttatcaccagcaatggcctccggtaccagctcctccgccccctccagcagcagcatcagctgcccctccgccgcctcctgtccaccatcctcctccacctgctccttctcatgacgaggttcggactatcttcattacgggtcttcctgaagatgtcaaagagagagagctgcagaatttactgagatggcttccaggttatgaagcttcgcaagtgaactacaagggagaaaagcctatgggttttgctctcttctcaagtgcacgacttgcagttgctgccaaagatgcccttcaggaaatggtttttgatgccgagtcaaagtcccttttgcatgtagagatggccaagaagaatctatttgttaaaagaggaatagtaacagattctgatgcatatgatcaaaccaaacgattgagaactggtgggaattattcacacagtccttatacgagtccatctccatttcaccctcctgctcctgtttggggaccacatgggtatatggctccaactcctccatatgatccatatggatgttatccagttcctccagtgccaatgcctactccggctcctgtaccagctcc

SEQ ID NO: 1428 - DNA, 612 bp, Gossypium hirsutum
  unsure (1)..(612): unsure at all n locations; Clone ID: LIB3825-022-Q1-K6-H5
nagagtttaaancagaacgacaaaggggaatctagctcaaattattcagcgactaaaactcgtgaagagagtattattggaaactatagttacatctggtggtgtccgtctacaacctactcgagatgctattcaggctttccttgtggaggctgcaaagcttgatgcattggctttaagtcatgctcttgaatctaagcttctatctccattgtggcaggttcgcatgaaagcggtgtgtgtgcttgagtcaattttgaggagaaaggaagatgagcattttgtgattgtggcttcatattttactgagaacaaagatgttgttttgagatgttccgagtctccccaagcttctctaagagaaaaggccaacaaggtgttgatccttttgaatggagaacaggcaggtgatttggctagtaattcagagaagtcttcaaagcccatgacaactcctgttcaaatgcctgacctgatagacactggtgatcctgatgattatgatggacaaaatacatctataaaagattcgcataatcaaaatacttcaaatctgaccggaaccccacttattgatgacttacttggagatggtatagatgctggtctgag

SEQ ID NO: 1429 - DNA, 626 bp, Gossypium hirsutum
  unsure (1)..(626): unsure at all n locations; Clone ID: LIB3825-022-Q1-K6-H6
cttcccctatatccccaattttgcgttgctaaaaaccctgattctattccctttggtttcaccaatcaaaatccccttctcattaaattttctctctttgaaaatttcatgcctatccacctttaatctcaaccaacggaagagacgtggtgtgcaatttgactattccaatttccttttcaatattcaattaaaaccctagcctcttccttttgtttctatcggggggggngggaagggaatcatgtctttcgatctcatatgttgaagctgtcctgcagctgcttcggatcctcccaagatctgtacggctgaggaccaaaagaagaaagatgatgaggatttggtgagtggctattcgggattttgccctcgctgattctctacactgcaaatcctgaaccagacgacggcattgaaagtggggttgtgtctattgggcctctgtttattcggctacatagtgggtccacctctgtattggcatttcatggaaggattattagccttcagccacacttccaacacttgcccaccttgcctttgcgattgctcttctcagcctcttctcacaatccctgaagacgtttgtgagaagaaaaaagctnttcactagcattttaact

SEQ ID NO: 1430 - DNA, 652 bp, Gossypium hirsutum
  Clone ID: LIB3825-022-Q1-K6-H7
ccaatagcaagtgcttctcttgcgcaagtccatattgctcgtacgcatgatggtcaaaagttgctgtgaaggtccagcacactcacatgacagatactgcagctgcagaccaagccactgtggaattccttgtcaacactctacatcggttattcccatcttttgattatagatggttggtcgctgaaattcgagaaagtttacccaaggagctagactttttgatagaggcaaagaacagcgtcaaatgtttggaaaattttcggaagctgtctcctcatattgcagattatgtttatgcaccagaggtgcattggtctttgagtacctcaaagcttttaataatggaattcatggacggtgcatatgtgaatgatgttattaccattcaaaaacttggaatccatcctagtgatgttgcaagattggttagtcaaacttttgctgagatgatgtttaaacatggatttgttcattgtgatccacatgctgctaatttattagttcggccgttaccttctggcaaaaggagaattttcggcaagaaaaaaccacagttgatattgttagaccatggtctttataaagaactcgacttctctactagattcagctatgcttctctttggagggcattggtgttttctgatgc

SEQ ID NO: 1431 - DNA, 642 bp, Gossypium hirsutum
  unsure (1)..(642): unsure at all n locations; Clone ID: LIB3825-022-Q1-K6-H9
cgagctttccaatacaaagcttcatattatcttttttagttccgacaaagaaaacgaaaaaaatagaagaaatacaatcgttttctttttgaagtcgggttttagtttttggggagaaaaaaatgttgggagtatttagcagtgcgatagtgtctccgccggacgagctggtggcggccggttgccgaactccatcacctaagataacggcggatgctctggtgaaacggttccttgagacgaactcctccggcgtgtccatgcagatcggagaccatgtccaattcgcttattctcaccataaagagtctcctttacggcccagatcatttgctgtgaaagatgaaatcttctgcttgtttgagggagcccttgataacttggggagtttaaagcagcaatatggtctggcaaagtcggcaaatgaagtgattttggtcattgaagcttacaaggcccttcgtgaccgagcaccttatcctccaaaccatgtggttggccatctaattgggagctttgctttcattgtctttgacaaatccacctccactttgtttgtggcttctgatcaatttggtaagggttcctctctattggggaatcaccgncgacgnatatgtggccctttgctgataatgctga

SEQ ID NO: 1432 - DNA, 597 bp, Gossypium hirsutum
  Clone ID: LIB3825-003-Q1-K6-A10
ccagcttataattctattatttcttgtaaatcagtgtttaatatttttagaagcataagttcatttttctaattctttaatttttattggttcttttaattttcttattttattggtcaacaaattctcagactaaaatgattcataaacgtccttacaccgatgactctcaagaggttgcctgtaagcatatgaggcaatgtgatgatactgtccacattgcttcctttgttgatgtcaatgatgttcatcccaacaacgcttttcaaaaccatcaaattcctgaaggtaaatgggaggacatttacactgggtgccaagatgaaggtaggtttgctgaagatcaatgcaacaatgttcatcgtggcaccaataaggaatacgaaagtggtgcttctgcttgtgttcctcatttttggtgggtaaatggcaatggcatggatgcagatgcagagtcaaatgtggcagttcatcttccactgtttccggagtattttgcatccgggaaccaagtccaggcttttcttcattctgatgaaatctattcatctcttctttctcctaaaaaagtttctgttggaccagagtatcaagctg

SEQ ID NO: 1433 - DNA, 601 bp, Gossypium hirsutum
  Clone ID: LIB3825-003-Q1-K6-A11
ctttcctctggtcaggagaaccttttaagtaccatcgtctttgctgggatgcttctcggagccaatacatggggccttttatcagataactacgggaggaggaaaggttttcttactatatctatggtaacttttggagctggattactgagcacattctctccaaactatttaacgcttgttcttcttcgaggtttggttggttttggccttggtggctcatctgtattcttatcctggtttctagagtttattccagcttctaatagaggcatgtggatggtagtgttttctactttctggacatttggatcaatttttgaggctactcttgcatgggtatgtatatttcctatatcacaatttaaggctatctttaccatagcctcttctccctgcacctaaaactacagattttttttattttatctcttttccttatggaggctcagagctcgaaactcacatatttttaaactgaaacaagtacaagaaaagggtcatgaaaatataggccttagatgttaacttcttttctcttcaccaactaacagtgctgccaagatgtgcagccacaagcctagacactaaattatggtcc

SEQ ID NO: 1434 - DNA, 574 bp, Gossypium hirsutum
  unsure (1)..(574): unsure at all n locations; Clone ID: LIB3825-003-Q1-K6-A12
tgcttttcaanacaacattttgaggctcctgcgcaaanaaatccaatacgagcacgatcactgccctccaaaacaacccacgaccagattcaattcttttaccgttgatgaccgatcaggagagcaatggattagattgaaaagaaattcggagaaaaggaagatattacaattgatgtaaccatgtttgacgggtctgttcctgtccctgattctggtcaagtacagtctgatgagcagcttcatataacatttattgtcaacatctctaagggggatgatagtgatgtcttggagattgtctgctcagcttggccaaataccatagatatccaaaaattttatgttcgcgggtgtaataggacagcgaatcatccttacactggtccagagttcaaggaattggatgaacaactgcaggactcactctatgagttcttggaggaaaggagtataaatgatgggcttgcaatattcttgcatgaatacatgaaaaacaaagacaaaactgagttcattagatggttgcaaactgtcaaatctcacattgagaagaaatgagtagttttttttt

SEQ ID NO: 1435 - DNA, 579 bp, Gossypium hirsutum
  Clone ID: LIB3825-003-Q1-K6-A7
aaagaaagaaaaggcgtctcatgaacagagttacaaagctggtcgagctgaagccgactcatgaaagggtgagcaaatgaaggagagcatgaaggagaaagcagaagcagcgaagcaaaagacaatggagacagcagaagcagcgaagcaaaagacaatggagacagcagaagcagcgaagcagaagaccagaggggccgccgagacaaccaacgacaagacaaaacagacagcgggagctgctagagggaaggcggaggaaaccaaggagacaagcggggggatactgcagcaggcgggggagaaagtgaggaacgcggcacaaggtgcgactgatgcggtgaaacatacctttggaatggctgatgccgatgaggatgaacataattatccggctactgttactaggaaggattagggtagcatgtagggttaagataataataatagttgcaatatgtacgtgagtggttttagataacgtacggttgcaaacgcttcgttgttatgagtgtgtgttgtgttactttgttgttttagctttttttttaataataaaaattttaccttttcactttt

SEQ ID NO: 1436 - DNA, 356 bp, Gossypium hirsutum
  unsure (1)..(356): unsure at all n locations; Clone ID: LIB3825-003-Q1-K6-A8
gnaactattgctctgtccattttaaagcaagtaatggaagagaagtgactcccaacaatgttgatattgccaaagtagcaccaacataccatctatacaccccttcagaggtggaagctgtcattactcgcctatgagaatgcgctgccatcatacgatcttaccatgcaacaacctgctttactgtcataatgatgcatgacttgagggggagaagcttgtatttgtttcttgggattcaagctgtgaaacgttatttttggtgtggcactaaactcatctactctttcagttggataatttaattacaccagatcagaaaaaagaaccttttttaattggatattatgttctcg

SEQ ID NO: 1437 - DNA, 573 bp, Gossypium hirsutum
  unsure (1)..(573): unsure at all n locations; Clone ID: LIB3825-003-Q1-K6-A9
ggaaacagnaaagcagnaccgcatcactttttgctagctaagctactgtgggagttattgttcttcagaacagcttctgcagtagctaataataacgttatatattatataaattttatacatcctttttaccctacgactccatatataagcaagtaaaaataaatatggctcgctctgtttcttcctttaagttccttggtgcttctgtttttgatgctctttatgtctccatatcaaggagaggttactcaggtgcaccgccggcggcagtgacggctagctttggtaggcctggagcgatggggaaagtggaacgaagatatgcgatgaaagagtcgtcgtcgtcggagacaagggcttattcttcagcttgggcgcctgaccctgttacggggtattaccggccggagaactgtggggctgagatcgatgcggcggatctccgggagatgatgttgaatcacagggttagatcacagtagaaacttgccaccgcatgtgatcaccgtagcagagcagagccagaatgttttgcagatgtttgggtgcctttgtattttgttntggttt

SEQ ID NO: 1438 - DNA, 595 bp, Gossypium hirsutum
  Clone ID: LIB3825-003-Q1-K6-B11
gtggttttgatctttgatcagctgagtggagtagcatgaagttttgtaagagcttaagcatattgatcgaagaagcgttgcctgattggagagataagtttttgccttacaaggatttgaagaagcagttgaagttgatataccccaaagatgggagcgagaagcagcctaacaaacggcccagattagattcaatggacggtggggatggggaggacagcgaggtttccaaggaggtgatggatttcgttttgttgttggaaaatgaagtggagaaattcaatacctttttcgttgagaaagaagaggattatgttatcaaatggagggaactgcaagatagagcagaaaaggccaaagcatcagatggagggttgatgaatgttgggagggagattgtggattttcacggagagatggttctgttggagaattacagtgcccttaactatacaggtactaatctgttttcttttcaccttagtccatcttttcagcaaatgacttaaagcatagctggaactaattgatgttccgacctcagtcgtgccttacgtttttcaaaattcgagaatgttatttgtggaattcaatc

SEQ ID NO: 1439 - DNA, 577 bp, Gossypium hirsutum
  Clone ID: LIB3825-003-Q1-K6-B12
cggccgcgtgggtttttcaactcctaaagcctaaccgtgcaaaaaagaaccaaacccatttcttaatcggatccaaaaccccatgtacttatcggagaaaccccgttccatagatttgtacaaggaggaaggtcctgctaccgcccgtgacatgatcattgacgtcactaccaatggagatttgccacctcaccaccaccaccaccctcctcctcaccagcagcaaatgatcttaggtgaaagcagctgcgaagacccagaagtcaaagcccccaagaaacgagccgagacctgggttcaagacgaaactcgaagccttatcgcctttcgaagggaaatggatggccttttcaatacttcgaaatccaacaagcacttgtgggagcagatatcggctaagatgagagacaaagggttcgatcggtccccaactatgtgtacagacaaatggaggaacttgttgaaggagtttaaaaaagctaagcatcaagatagagggagtgggtctgctaagatgtcttactataaggaaattgaagagattttaagggagagaacgaagaatgcttataagagt

SEQ ID NO: 1440 - DNA, 557 bp, Gossypium hirsutum
  Clone ID: LIB3825-003-Q1-K6-B7
cactatcattgagatatggagtcaacaccagcgtaggcgtggagacaaccaccacatgcgacagagacatgggttaggcggagaacagacacgtagttggctcctacatgttggaatgctcttgccgagaaatccaagcctacccaagagggagctgctgtcaagcccaatgctattcatggctgagctgccatagaatcatcagctccctaagaatgccaaagcgctgtgactatgactgtatccgcttcataatcatccaaactgaacgcgagaccagcccccataaggaaaatggaaacacctacaagagacatagggacaaccttgccccatatggaaagtgcaagtgactgctcttggagctgcagctggagctcgagctcgacaggagagatgtactttaatggcggctaacgccgaacactagagtgatcaagagaaaggaccaccgagttatgctgatggaactggacacgacagatgtacttcattggcgtctatagccgaacacgagagtgataaagtagaaagacgaccgagttatgctgctgctg

SEQ ID NO: 1441 - DNA, 597 bp, Gossypium hirsutum
  unsure (1)..(597): unsure at all n locations; Clone ID: LIB3825-003-Q1-K6-B8
cttaaccaaattcctgccgaggcagnaacgtggctctccaaatctgctcttctcagataagtattttctcctttctcaagcgcattctttgctaatctgtgagcatccatgttctaagatctatgagtatactgaaaaagacttcttgaaaatcggctttcttgttctgaatatctctaataatggctccaatgactgatttgtctgtggaattctcctggcatttttttattattatttttgaatcccccataagaattaccgactggatccttagtaaaatccctaaattttcaccgtctaaacatgcatacgcctctgcagcaaacgaagaaggaacgtttctatggataaccgtctttaataccttaacatttcccctcagatcccgtcctacaaggccagacgctgaactgaaagttttgctgtcgtacgttgcatcaaagtggatcctgactctcgaaccatatccaccataacgcgtaactgaatagtagacattggccgttgtcgctgctcttgaagacccaggacattctcgaaagacgtggaggctacctttagccgctaaactacatcgaggacatctgtcatttg

SEQ ID NO: 1442 - DNA, 580 bp, Gossypium hirsutum
  Clone ID: LIB3825-003-Q1-K6-B9
tttcattttcttgttccttccttcgccgtctattgcttttagttgcctcgatttcaagtgaatcagaatgggtaagggaaaagactcacattaacattgtggtcatcggccacgtcgattcttgggaaatcaaccaccactggccacctgatttacaagcttggtggtattgacaagcgtgtgattgaaaggttcgagaaagaagctgctgagatgaacaagaggtcattcaagtatgcttgggtgcttgacaagctcaaggctgagcgtgagcgtggtatcaccattgatattgccttgtggaaatttgagaccaccaaatactactgcactgtgattgatgcacctggacaccgtgactttatcaagaatatgattactggtacgtcacaggctgactgtgctgttttgattattgattccaccactggtggttttgaggctggtatctcaaaggatggtcagactcgtgagcacgcattgcttgcttttacccttggtgtcaagcaaatgatttgctgttgcaacaagatggatgccactacccctaaatactcgaaggctaggtatgatgaaattg

SEQ ID NO: 1443 - DNA, 622 bp, Gossypium hirsutum
  unsure (1)..(622): unsure at all n locations; Clone ID: LIB3825-003-Q1-K6-C10
tctgctttgtttacattggcagccaacgtctcaccaactattatattcgttgatgaggtagatagcatgctagggcagaggactagagtcggagaacatgaagccatgccgaaaaataaaaaatgagtttatggctcactgggatggcctcttgacgaggcaaaatgaacgtatcctagttcttgctgcaaccaatcggccatttgacctcgatgaagccataattaggcgttttgagagaagaatcatggtgggacttccgggtgcagagaaccgggaaaagatttttcgaactcttttgggaaaagaaaaagtagaagatggtctagacttcactgagctggcattaatgacggaaggatataccggaagtgaccttaagaatttatgcacaaccgcggcttatctgccagttagagagttaatacagcaagagagattgaaagatctggagagaaaacaaagagttgttgaagtacaaaacaaagaagatggtacagatgaaagagtcattaccctaaggccattatctatggaagatttcaggcaagcaaagaatcaggtggcggctagcttcgcatctgnaggagctggaatgaatgagttaaaacagtggaatgac

SEQ ID NO: 1444 - DNA, 574 bp, Gossypium hirsutum
  Clone ID: LIB3825-003-Q1-K6-C12
ccttctcatcgcagttctcacccaccgccgtgtccgctggtttttttccggatctgacccgtagcccgtgtcggatcgcgtcgattcaggtacagcaccccaaattgccgagtccgggcaacgaaggtggcatggtgtgtgaactgtgaacagagtgtttaagagttgaatatgataaagtattatggagcttgaagaactaagaaaaacttgctattagcagttaaagtttcaagcttaaaaatgggtatgatatggtcctgactgcataagctactgtccctagcattggtatgtttcgcgccagaagtatttgtgctcgactctcaacccatttcaagacaagacccttttgcagcagcatcaaagatggcaagaacaagaagaagaacaatatcgacattgttgatggcaagattgaatcaaatgtgagcactttcaatgagtcgtatcgtcagcttgacaatcttgacttcttgactgctgctaagatcctcttcactcatcctccaaagaaaaagaaatttgggctagatttccatttggtgcagctcttctttgcgtgcatgcctta

SEQ ID NO: 1445 - DNA, 630 bp, Gossypium hirsutum
  unsure (1)..(630): unsure at all n locations; Clone ID: LIB3825-003-Q1-K6-C7
cacaacccacatggaaatggggatcaaanaagccaanatgaaagagaagtgacggtggcgatgttggttcccccgcatctcagggcgaccccaatcaccagcatccattcaatgagaaggaagaagaaggaaaaagaggggcttcacctgttcaatcgcatgtaactgaggacaagtctgtggaagaagccaatagagatgcagaaagctctgagatatcgagatcagatgatgttttctctgttaaagttgaaaatgagtcgggacctaaggaggatcttgagagcacgcttgtcgccattcggcacattaagcatgagaagagctctagtagcagcagtagcaggagcagttcagatgatgaatctcaagcctctcagaagaattctaaggaagaagcctataattttgtttctgaagcgactgcatatggcaatgaggataagctggctactgttaaatctgaagaagtcctgaagttggttgagaatgaagcagtcggaaatgttgatagtaattctgcagttgaaactgctaacgttgacaatttggtaaaaagtgggttatatgtgccagaggaactggatcatgctgcagaagtttctgcaaacaaatcagtgtctgttgtag

SEQ ID NO: 1446 - DNA, 505 bp, Gossypium hirsutum
  unsure (1)..(505): unsure at all n locations; Clone ID: LIB3825-003-Q1-K6-C8
gnaactattgctctgtccattttaaagcaagtaatggaagagaagtgactcccaacaatgttgatattgccaaagtagcaccaacataccatctatacaccccttcagaggtggaagctgtcattactcgcctatgagaatgcgctgccatcatacgatcttaccatgcaacaacctgctttactgtcataatgatgcatgacttgagggggagaagcttgtatttgtttcttgggattcaagctgtgaaacgttatttttggtgtggcactaaactcatctactctttcagttggataatttaattacaccagatcagaaaaaagaaccttttttaattggatattatgttctcgaaaaaaaaaaaaaaaaaaaaaaaaaaaaataaaaaaaaaaaaatgaaaaaaaaaaataagaaaaccaaaaaagagaagaacatggagtagaataactttggaggatatcacataaaaacaacgaattattctatcttttcattgatttt

SEQ ID NO: 1447 - DNA, 577 bp, Gossypium hirsutum
  Clone ID: LIB3825-003-Q1-K6-C9
cgtgtttttacctctcaccttctcccactcctcgtaaaaccctagttctcagacgccactaaaaccttagtcctctcactcgtctttcatcatcctcatcaatggagttctggggtattgaagttaaagctggacagcctattaaaacggaccctggtgccagtcatgtcatccatctttcccaggcaacacttggtgagtcaaagaacaaagcagagtcggttcctctctatgtgaatgttaatgggaagaaactcgttctcggaacactttcccaccagaattgcccgcaattgtgttttgatttagtatttgagcaaggctttgagctctctcacaactggaaaaatgggagcgtctatttccttggttacagaacttttgtcccagaggaaggctctgatgatgaatttgatagtgaggaagaaagtagcgaggatgaggaacttcctgtggctgctgaaaacggaaaagctaagacagatgcaaaaacggctaatgctgggaaacctgatgctgtaaaacaagctgtcaagataactgaaccaagtgataacaagaaaaatgaggacgatga

SEQ ID NO: 1448 - DNA, 612 bp, Gossypium hirsutum
  unsure (1)..(612): unsure at all n locations; Clone ID: LIB3825-003-Q1-K6-D10
ttcctcttcaattactacagtcaaananaganagaaactaagagaaaccatgaattcagttattaccggcaccgattgaggtggagaaagaggagagcggcggcggcagcggcagctgtggtttagcttgtcccatttgttataacccattaacggggatcaacagttgggtctaatttgcaatgtaatacatgcaaaaagacttactctggtacccaaacgcatcttgaccttgttgcctcaagtgggtctaagcaatatgatgaatccatgccgctagccaccgaactcttcaggactccagtggtgtcctttctctacgagagaggctggcgtcaaaattttgtatttggcggctttccaggtccagagaaagagtttgatatggcaaagaattacctaaagcgagtgctaggtggaaagatcgttgatgctagttgtggcagcgggatgttcaccaggcttttcgccaagagtggattattttcacaggttattgctttggactactcagaaaacatgctgcgacaatgctatgagttcatcgagcaagaggaaaacttccccaaagagaaagtgaccttggtccgagctgatatctctcgacttcct

SEQ ID NO: 1449 - DNA, 589 bp, Gossypium hirsutum
  Clone ID: LIB3825-003-Q1-K6-D11
ctttcatttgcaaattgtttgtttactaagggggccaaaaaaaaaacagcctgcacataccactgccgcctttggtttatagcttctaaatccaactagagaactaggttgtcttcatttgctcagctaattcactacaagtaaaatcacatggattggtatctctgtaatggtatggaggatcttgttgtccccagaaatcaagaattagaagataatatcccttccccagaaagttggtcaaaatgggaattcagccctcctgcaaattttaacgatgaatgctttggcgtggacacgaatttaagtggtgataaacccaagtttagcggcaaattatgccatgatgtagctgatgttaaggatccatcaatctgttcgagtgtatatggaggtttcttgaatcagggtcacatttttcaacagcagacggattaccagctccacgatttcggcagattcgagcagctcgatgacatattcttgggttccttattggaagatcctacttggagtgaagatcttcaaaaatcgttttgcttttctcctgagtacgagtgcgagacgatggcaactgatcatcttctgg

SEQ ID NO: 1450 - DNA, 606 bp, Gossypium hirsutum
  Clone ID: LIB3825-003-Q1-K6-D7
ccaaaaactgttatcttttagttcatattttaattgtactcctacttgagtaaagtcaataccatgataatacgatcatcttcacttatgcagctcaggacagaaaagaatgctggaagaaatcatgcggagaggaacaagctcacttggaacagatgttccaagtgagagggaaatcaatcgacttgcagctcggtcagatgatgagttccggatgtttgagcaaatggatgaggaaagaagagtaaaggagaattatcggtctcgtctcatggaagaccatgaggtacctgagtgggtatttgtacttaatgatgataggaagggcaaaatttcagaaagctatgttgaattagggaagcgaaaaagaaaaggtgggaactattatccagatacattaagtgacttacagttcatgagggctgtggaaaatgcagaagacatggcaaagaagttaccaagcaaaaggaagagaaaagaccatcttccagctgatgaggactccgagttgcctattaataacataggagtagaatttaggaacgagaatatggcagcaataagtgaaggaactagtgaagataccacctatggttcatcagcttc

SEQ ID NO: 1451 - DNA, 351 bp, Gossypium hirsutum
  Clone ID: LIB3825-003-Q1-K6-D8
aaaacaagtacgatattgggtatatttggttcaaaactaggaacaatctatagcgcaaaaactgaaccaactcagcaaattcaaacattcatcaaattgataaaatgcaaaacaaaatccaaccatgaatttccgaccggtttttccaagattatgccttgagccgaccataaaatttctgtttctcctgtgttgtctggaaccgtccgtgcccaaacttcgaggaggtgtcgatgaacttgagtttgatttcctcgagagccacacgagatgtcaggttaatcagagactggcgaagcgtaaccaccctttttttaggtccaacacagcctccctagttctagatcgcga

SEQ ID NO: 1452 - DNA, 589 bp, Gossypium hirsutum
  unsure (1)..(589): unsure at all n locations; Clone ID: LIB3825-003-Q1-K6-D9
taaaanatgcctccgaggttgaaaagagctctcatgttgtagacatagctagcagcgacgatgacggcgacgctcaaactgtcgccagaaagcaagcttcctctctcggagaacgacaancttcgacgggaatantatccccagtcctgaaataccacagagctcaggacccatcacgccgcctgcactaccctccggtgaaaccctagactctcgaagtttctggaaggcagggaattatgtcattggccccacttccaaaccagctctgcttgaaggtgcattggagcatgcgcgtgtacaccccaagtttcttcattcaaatgcgacgtcgcataagtgggcgtttggagcaattgcagagctaatggacaatgctgtggatgaaattcaacatagtgcaacttttataaaggttgataaaatcgatataaagatggataattctccaggtccagctttactttttctagatgatggtggtggaatggatcctgtattgctacggaaatgtatgagcttgggttattcttctaagaaatcaaatacaacaattggacagtatggaaatggattcaagacaagtacc

SEQ ID NO: 1453 - DNA, 603 bp, Gossypium hirsutum
  unsure (1)..(603): unsure at all n locations; Clone ID: LIB3825-003-Q1-K6-E10
cttcaccaacctccgctctgttcagcccgtgatcttttgatctttctccatggctaccatttccaagctcgctaaccccaacccagtcgcttctctttcattatctttcaaacccagatcttcttcatcgcttaaatgcttcgttgggttccctaccaggcctgctttcagctctaagctggtttcatcttctagcttgtcctcgataaacacccaccctttcaggggctccttggttgtcaggtgttctcttgctgatggaaacggtagttcagtgaagacgactactttgcatgatctgtatgaaaaagaagggcagagtccatggtatgacaacctttgcaggccagtgaccgatttgctgccactgattgcaagtggggttagaggtgtaactagcaacccagcgattttccagaaagctatatcttcatcaaatgcttacaatgatcaattcagggaacttgtgcaatcaggaaaagatatcgaaagtgcttattgggagttagtggtgaaggacatccaagatgcctgcaaactttntgagccaatctatgaccaaacagatggaggtgatggttatgtttctgttgaggtttctcc

SEQ ID NO: 1454 - DNA, 423 bp, Gossypium hirsutum
  Clone ID: LIB3825-003-Q1-K6-E11
cggccgcgtgggcggacgcgtgggcggacgcgtgggaattagactacgaagacaacagcgatatcagagattacttctagcatatacttccatggcataagtagatatggtaatgcattaattacatacaaacacaggcgttaggggagcgggtgaaagagttgacaatgccaaagagcaagtggaaacctttttattttattatttttgaaatgaaatcatggttcaatgtactatcatatatatgaccaaggaaataaaggaatagattttgagggctcaaaagaattgtagttaaatctttgtaagttggcggtggtattttgaaccacagtcgtctactgtacataggagggtaatatgatatcttgttctggtgtaatactcgacataaatgttcattatccattcatattattattt

SEQ ID NO: 1455 - DNA, 357 bp, Gossypium hirsutum
  Clone ID: LIB3825-003-Q1-K6-E12
cggccgcgtgggcagcgccattggtatatccagagcacatgtgctacttccggtgaaggactgtacgaggggctggactggctctcaaacaacattgcaaacaaggcataggtgtgacatgactgagttggcagtcttacaacccttttggattttatgaatgtctgcccccgttttatgtgttattttttatggtttttcacgtttgttgcaaacactgccatttgttacttatagtttaagaataattgacaaagtttgggaccgttatttcctagcgggaattgatggttagccagtttaattacccttttaatgtaaaatatacataatatatacatatatattttttccttc

SEQ ID NO: 1456 - DNA, 609 bp, Gossypium hirsutum
  Clone ID: LIB3825-003-Q1-K6-E7
ctttcccttacatcagatttctcaaaattatttttcatttttttaggaaaaaccctaaattcttcaaaactctcacggacagaaatctcattcgattttctccagaaagtttagcgaagatggtgttagcacaattaggggggagcatttcccgggcgatacaacagatgagcaatgccacgataatcgatgagaaggttttaaacgaatgcctcaatgaaatcaccagagctcttcttcaatccgatgttcaattcaagctcgttcgtgatatgcaaactaatattaagaagatcgtcaatcttgatgatctagctgccggtcataacaagcgaaaaatcatccaacaggcaatttttaatgaactttgtaagatgttggatcctgggaagccggctttcacaccgaagaaagggaaaacgagtgtcgtgatgtttgttggtttacaagggtctggaaaaacaactacatgtacaaaatatgcctattatcatcagaaaaaagttggaaaccagctctagtctgtgctgatacgttcagagctggtgcttttgatcaattgaagcagaatgccactaaagctaagattccattttatggaagctacat

SEQ ID NO: 1457 - DNA, 598 bp, Gossypium hirsutum
  unsure (1)..(598): unsure at all n locations; Clone ID: LIB3825-003-Q1-K6-E8
catagctgaaaaagaaaagagggatgggagttttaggcaaagtggtggatgggattctattgctaacattcgtgtccatgtcggtggtgccagcgtgcttggacgcccaggtacttttgcctaaagcgcttttccccgatgtgctgggtcgtgtatattcatggtatacgaccacataccaagattatttgctgttggatgagcctcattttttcatggcacttatgaaattggagcttgttttagtattgccgcttgctatacttaacacttatggcttgttgacctccaagccctggttcaacaccacctgcctcatcttcggttctgctcttgttacctccacgacagctatggtgggagacatgctgggatccgacaaaccatcagcaggtaaactggcgtcgatgtactcgccttttataggatttgggttcctagccatactgcgagggctgctttcggaatcccccaacgcttccaaaaccatggccaacggaccaacgtcggctttgaaaaagaaagcctgaagttgacacatgaattataaaacatcatcnttcttccttgaaatgcgatatccatgttacaacaataa

SEQ ID NO: 1458 - DNA, 581 bp, Gossypium hirsutum
  Clone ID: LIB3825-003-Q1-K6-F10
ctttgagctgagttcccgaccccattaggtcctgcaatgcaattggtagcagtgaatggtttcatgcgctcgaattcacaagtaaaaacagctaacctatgaatcgaagtgcttggtggagtttaatagcctcttctgtttcttgctttccagttcatgcattgcagaatgtggaatggccagagcagttccccttcaaggacgaggatttccaacgcttcaatgaaacaccagattcattgttctatgaagctccacgctttgttacacatattgatgatgcagccattgccgcacttactaaatactactcagaggttttccctcccagcaatactcctggagtgagcatcttggatatgtgcagtagttgggtcagtcattttccaaaaggatacaagcaagaacgggtagttggaatgggtatgaatgaggaagagcttaagcggaaccctgttctaacagaatatgttgtgcaagacttaaatttgaaacctaagcttccctttgaagataattcctttgatgtcattaccaatgtggtcagtgttgattatctaacaaagcctcttgatgttttc

SEQ ID NO: 1459 - DNA, 586 bp, Gossypium hirsutum
  Clone ID: LIB3825-003-Q1-K6-F11
gaacattgagacctttttgatctggtggagatggaagatgatgagaggcgtgagctgttacagatgtctgatttgcagcttctggacattgcgaagttctgcaatcgtttccccaacatcgatttatcatacgaggtgattgatagtgacaatgtaagggctggggaatatgtcaccttgcaggtaaccctcgagagggatctagaggggaagacagaggttggaccagttgatgctcccaggtaccccaaagcaaaagatgaagggtggtggctggttgttggtgacaccaatagtaaccagctgcttgctatcaaaagggtgtctcttcagaggaaagcgaaggtgaaacttgaatttgctgctcccactgaagctacggagaaggcatacactttgtatttcatgtgtgattcttacctaggttgtgatcaggagtatagcttcactgtcgatgtgaaagaagccgctggccctggtgaagacagtggctcagagtaggctcatgttctgctaatttttttttaaattcctgaaccactgttttactggtttgtctgcttctactctactagttagaacgtga

SEQ ID NO: 1460 - DNA, 568 bp, Gossypium hirsutum
  Clone ID: LIB3825-003-Q1-K6-F12
cggccgcgtgggtcgcgcttaaagcttctcttttttccccttgcactggacgcgtgtaggggtagcggagacatttttccttccctctcccttcttctattctgccttacctttctttcttcttgtcttctttttttttttcaatccgagggaagtttaatttttatactgttgaatacccttttgttctttgtgctgaattagtggtgggttttatctgaaagtgaagtagcattggttatacaaatttctttcggttcatatgactgaaattttatgcctttctttgtttctttatttttaatttttttctgagaagggaagagaatattatgaagattacggcgaggaaaaggatgttggaagtggcgggaagaaggttagaaaggaagaatgttagaaaggaagaatggtataacaacgtagaggccggcgctggaggaaatacagctttggcgagagtattagttccagtagagaagaaaggagaaggaaggtcaagtgttgaccgtgaatccaataatcaacaacttatacagttggaagaaaaggatgttgggacatctgc

SEQ ID NO: 1461 - DNA, 492 bp, Gossypium hirsutum
  unsure (1)..(492): unsure at all n locations; Clone ID: LIB3825-003-Q1-K6-F9
ngattttattgttagtattaaattccataataatggtgtgactaacaattcattaaaccaaatattttaaancctgaaaatccactaaaggaagatctgcaacacaactgtaatgataaaccagaaatgagttcaacagaaagcttttggagagaacttaaaaatttgctggatagttgagagtctaggctgatccagagaggaaagctcttccaggttgacgattagccaaaggaccatgacatccaagaagctttgcattgacaccgtctggcatgatcctgttctcagacttccacttcagataatcagcacggttgtacttggtaaatccccacttcctgctaacaataatcttttgacgaccaggaaacttgaactttgcacgacggagggcctcctgtgcatgatggctgttgctatccttgcaacgaacagagagcagaacctgaccaatgtcaactctggcacatgttccttgaggttttccaa

SEQ ID NO: 1462 - DNA, 325 bp, Gossypium hirsutum
  Clone ID: LIB3825-003-Q1-K6-G12
agacgcaccctgtatcggcgcattaatcacgggcggtgtggggggtacgcacacccagaccgatacactcgccagcgacctacctaccgctcctttctttttcttcccttcctttcttgccacgtacgccggctttccccgccaagctataaataaggggctggctttatggatgcgatctattgattgacggaacctacaccccaaaaaactagattagggagatggatcacgtactgagccatccacctgatagacagactgtcgtccttcgacggacgagggcacgcacttaataaagaactctcgctcgaaactggaacaa

SEQ ID NO: 1463 - DNA, 586 bp, Gossypium hirsutum
  Clone ID: LIB3825-003-Q1-K6-G7
agctccacttgctatgttggctgacaagacaagtggcgatatactgcttgaccaagacaaaaagaatgatttctacaagaaaatgagggaagagctgaagcaggtggacaaggaagacaaacttctagagcggcaacggcttagggagaaacggatcaagaagaagatgaagttgaagaaagggcaaagggaagaagaggatggtgaagaggaggaggatgatctttcaggttcagaaggagaaccggatgcgaacagaaaacggaaaagatcgaaaatatactttcatagtgatagcgatgacggtgaaaaggaagaagataaggctggatcggcgagtatcaaggccgaatccatttctctggcagaacaagaagaacttgctcttaagttattaaactcaatgcactcgtaaattttacgatacgattttccagttttggtcggtgttgtttaccgtttaccggttgtagtatgtcagtttcttattcaatcataaaacatagtcaaatgtttacctgcacaactggaacaatgaatttgaaaaaagacaaaaggagtaatgacaggaaatttttggtttatt

SEQ ID NO: 1464 - DNA, 599 bp, Gossypium hirsutum
  unsure (1)..(599): unsure at all n locations; Clone ID: LIB3825-003-Q1-K6-G8
cccactgcaggtcttggagatttagcaactgttttcatcgaagtagtggacgtgggttatgcaagagaataattgcagtagtcaaagctgcaaacgtcttgggtctttcatttccagaggcatttggcaaacagcctattgaattgctacagctactttctcttaaagctcaggagtcttttgaggaagcacatctccttgtgcaaactcatgttatgccagctgctagtatcgctcaaattcttgcagagtcctttctaaagggtttattggctgctcatcgtgggggatatatggattctcagaaagaggaagggccagctcctcttttgtggagattttcagatttcttgaagtgggctgaactgtgtccttctgaacctgaaattggccatgcattaatgcgtttagtgattactggacaagaaataccacttgcctgtgaggttgagcttcttattctttcacaccatttctacaaatcatcagcatgccttgatggggttgatgttcttgtagcccttgctgcaaccagggttgaagcttatgtttccgagggtgattntgcatgtttggctcgcttgataactggagtcgga

SEQ ID NO: 1465 - DNA, 588 bp, Gossypium hirsutum
  unsure (1)..(588): unsure at all n locations; Clone ID: LIB3825-003-Q1-K6-G9
ccccgcgtccggnttctttaagcttctctgattttcctagtatggcggaagctcctacccanagccaacagcctagtcctgtcgtttacgtagttttccagatcggcggcgtaggagtcctcagcngaaaataaacttaggccggcgccagcttccaaagcttccatagaagcaatgccgaggataaaagtgaaagagagtggcaaagattgttgtatttgtttggaagattttgaagttgaagaagaaggaagggagatgccatgtaagcatgtgtttcattcgggttgtattgagaagtggttgttgatccatgggttatgcccggtttgtcgattcttgatgctgcctgagacggctgaaataggaggtggtgagggtaatggtggccggcgaagaattgagggtggggagatcaatggtttggaatttttgcagtcggtttttgcttttgctagcttggctagcatgatgggttcgggtcgggctttccgtcaacctgattcgggtcaagttgatgatgatgtgtattccaattgcaacacggatgatacgccttccaatcaaaacacggatagcaattgacac

SEQ ID NO: 1466 - DNA, 590 bp, Gossypium hirsutum
  Clone ID: LIB3825-003-Q1-K6-H10
cggccgcgtgggcggacgcgtgggcggacgcgtgggtgcgagagtgagaaactattgatctgagccaaggttgataatcgagtttctataagaggttgatcctggcattccaaaatttgaattgtgtggctgaatgatctatggagactaagggagggagaaagaagtctagtagtagtaagtcattattctacgaagctcctctcggttacagcattgaagacgttcgaccaaacggtggaatcaagaagttcagatctgctgcttactccaactgcgctcgcaaaccatcctgatattcgtaacgcaagtgcgcccttctgaccactgttaaagtggtcaatttatttttatttgctttattacttagtattagtatctatcttcggccggcttcctcccccgctctccttgcaactgttttctttttatctacgatctcctcacttggcgcctgtctactttctttgtttctaagaaaccctgttctggtatttccttgggcgacttcacaatggcggtatctgtaattggatttgagggttatgaaaagaggctcgagatttcattttttgagcctggtgccttgg

SEQ ID NO: 1467 - DNA, 572 bp, Gossypium hirsutum
  unsure (1)..(572): unsure at all n locations; Clone ID: LIB3825-003-Q1-K6-H11
attttctagagagnaagcgagagtttcttcttcttcttcttcttcttcttcgctcctgtagaaagtttatttgctcttcaacaataaaaaaataaaaaagctttcctacagcagcgctcaagtttttatcaatccagagtttgaatttgaattgaacaaatcaatattaagataagagaaatggctcgctctctctccaacgctaagcttttctctacttttgttgtcgatggaatctctaacgttatctccaggttcttttttatttctttccatggctctgttttttttttacgtgtatatataatgaagtgacaaacgaataaagatttgatgatgtttatttttgtttagacgaggatatgcggcggcatcacaaggaattgtgtcgagtggaataagaggaggagcgggaaggagcgctgctacggtggccaagaaaacaggggaagagatgtctcgcggagctaaagagaaggtttcgtgggttcccgaccctgttaccggatgctacagacccgagaactgtcccaatgagatcgacgtggccgagctcagatccatgctcttga

SEQ ID NO: 1468 - DNA, 586 bp, Gossypium hirsutum
  unsure (1)..(586): unsure at all n locations; Clone ID: LIB3825-003-Q1-K6-H8
ttttgagaatacgngaaggaattcatttcgctgcatttttcagctcaacatcctggtctgctcaggaagatgctgttgtttaagtttgccctccctgatgccaaccacatggctgacatcactcgcttggtagctcttgtaccatactacattgacttaattgggcggtacaagctcagctcacaggctcgatccaaaactgaagcagcaagagtgaaggctgcccaagaagcatacaaagaacttcaaaatgcaaggcacagaagcattgcagtagaaagaaagcagagaagaaaaagatgttagaagaggcagaggcaaagctcagtgcagaagcggctcgcaagagagaagcaaaagatcgtgctcggcagatgaagaaggcaatgccaagaatgaagatgacccgcgcacattagatggctgtggacattagtagtatgaatgcttactcatctgcagattgcaggttattagttccctggtttctgtatgtcactgggaatgtatttttagttgtcaactaccgattcggaatgttcctgaagatactgctccaggaacttgataaagtttcttccatgga

SEQ ID NO: 1469 - DNA, 527 bp, Gossypium hirsutum
  Clone ID: LIB3825-003-Q1-N6-A10
caaatcggttggacttatcactttttattcaaggtatacagtagtagactcactggaacaattaattcccgattcaaactattttaatgtctggtgttggccaatgtctaccactaataatacatgtactgagtactgacagtctggcagacataaattagattttaaaaaaaaaaaaaaaaccatgtcttgctggccacattcaggataacctaggctattcatgaactgtttcctattttaatcacacgtctgcagtatttttcttaatcagaagttaaacactttttttgtaccaaaaatgaagccaccattgaacaaagaagagagcaaatacatcatacttgcaaaaagaccaaattttaaatcaaatcgagagctgctgaaattttggagtgtcaccactcgtatgcttttatattatttccaacatccatgatcctggttaagagaaaaaagaaaaacacggaatcatgtcttggcagtacaagtgcttgcagattgcatacagaaggcaatattccatg

SEQ ID NO: 1470 - DNA, 541 bp, Gossypium hirsutum
  unsure (1)..(541): unsure at all n locations; Clone ID: LIB3825-003-Q1-N6-A11
aagaaaaanaagaanagcataaagaaggaagtgagaatgagacataatacctgccatactggtgatgaatgcatttaggtagagaccatcatcctggggatttatattgctttggagagatgggaaacatgtactttgtccactacttagcttagaggtaagcaatatgataccataatatgaaaatgaatctccaaagaataatacccataggagcagcgttgttctaattaattttgaagagaaaagcataaaaaatgatgagaagcctgattttgattgtgtggtacttttactgagtgagggaagtaatggggcagtattttctgatggagcagactcttcatccttgtcatttgatctaccagaaactaggacaccaggaggaagctttgtttggttcactgaagctatcttctccaaaattcgaagtgcatcacttgtgttacctttcatgcataggtatctcggagactcaggtgcaacaccatacaaaataagcaaagcaaaagatggcacagccgaaaatgcaagtacccac

SEQ ID NO: 1471 - DNA, 518 bp, Gossypium hirsutum
  Clone ID: LIB3825-003-Q1-N6-A12
cttgtaatggaggcacagatagaattggtatagcaagtcatgattttgttaactaaaacagcaacaagtcaaaatgaacacggcaaaaaaaactactctatttcttctcaatgtgagatttgacagtttgcaaccatctaatgaactcagttttgtctttgtttttcatgtattcatgcaagaatattgcaagcccatcatttatactcctttcctccaagaactcatagagtgagtcctgcagttgttcatccaattccttgaactctggaccagtgtaaggatgattcgctgtcctattacacccgcgaacataaaatttttggatatctatggtatttggccaagctgagcagacaatctccaagacatcactatcatcccccttagagatgttgacaataaatgttatatgaagctgctcatcaaactgtacttgaccagaatcagggacaggaacagacccgtcaaacatggttacatcaattgtaatatcttccttttctccgaattttctt

SEQ ID NO: 1472 - DNA, 529 bp, Gossypium hirsutum
  Clone ID: LIB3825-003-Q1-N6-A2
gattataaagctcaaaagttgcatatttataagaggaatgaggcaaatgcatagagagctaactcccacttaaaccaatccatatctacataagaaaacatcaagatccacttctttatgctacttctaatgaagaaattttgaagacaacaaatacgaaaccacttcaaatatctttagctaaacccgacaaatcaatatgcccagattcagttggtttaggagaatcttccttttgtttgtgatcttcaatgggtattcctcgccttgtagatggtgctgatgatgatcctctgccataagcatctccgaatatgtcgaagaaattatttttcatctcctcagcagcatcaaagaaacggtttatcccaccaaagaactggcgttcgattgcctccatgtcactacgtagcccgggaaaatcaaacgaaccttctacgtgtgatccagatgagaaactcccttttagcatttgttctgtgacatcatcttcggtatactctttggttgattgcagcacttcgaccgg

SEQ ID NO: 1473 - DNA, 541 bp, Gossypium hirsutum
  Clone ID: LIB3825-003-Q1-N6-A3
aaatgaatatcatgccttttcttattaaacttgcaataattacacaaagataatacaatcaagaaggttcttagtatctcagtggggaatgtaatccaatctgtcacagaccatcagacatacagtaactttactgcaacaataaatatccaacatcaatttgttgactgcaaatccatctcagatcacccacacacatacaaacatacatatacagagcaaatttattgcaaagatatccgacaactttgttttagagagacttagaagtccctgtctgggaagagaataggagcaaggagagaccacatatagagagctgcaattacccaggctgttagaatccgtatccacacagatggccaccctacatctaccaacttcccgctctccccaactgaggtagaccatcccgtcaaaagcattgctgagtacatacttgccagagaaaaaatgatgtggaagaaggcgtacgagtacgtcactgccttattcttcttctcctcatcagccttgtccaatggaagtaatggctttccac

SEQ ID NO: 1474 - DNA, 521 bp, Gossypium hirsutum
  Clone ID: LIB3825-003-Q1-N6-A4
gtacataatcgttttttttattttgtaacaaaaacaggttttgattttcccttttcataacattactaaagacatacaggacttgcataagaaccaaacgtgaaaacctgaattggggtgctatttaaaagcatagaaaaatatgttccagaactcaaaaactaagcccccaaaacccaccctaattcattacatacattaccccaaaaaaaaaaccatttgttgctcaaagaggtcaatattgtgtaacttccatcaccctctgggatcacatcttcgaaagcgcctccactggggatcataggcgggacatgttcttgatgggggacaatcacatccaacaagtaaggtccaggagtgaccaacattttgggaattgctgctttgagatcttctttcttcgtcacccgggcaggtggtatcccccatgcttcagcaaatttcaacatatttgggaatatttccgactcgttggatgggtctcccaagtatgtatgagccctgttagccttgaaaaaccg

SEQ ID NO: 1475 - DNA, 539 bp, Gossypium hirsutum
  Clone ID: LIB3825-003-Q1-N6-A5
ggtaataatagtgcatgtataaccacttcttataatagtgttgaatcatgcagtaaaagagcaaaatccacttatttcttatttgtatacacatattatgatatcatcaatattaagaatcaaattaattcaaaaaacaaaaattcttgtaaaaatctgcaatgaatccaacctgcgcatgatgggggtggccagaaacagcatatcttattagctggaagggaattatattttaccatatcatatatcaatggtgagttcgattggattgtgaaggaaccctatgtttcggagaggccattggtggagctgtaggaggctgagcaattggtggaggagccttaggtggcggagcaagtggaggagggggtgagggagaagagtcgtggtagtaaggatatatagtgtacacagtttgtactatagtgagggcaaaaagaaaaatggcaccaatcaaagaaagcatagcccatgggtttctaaaataggtatggatgaggttagctcgccattcattccaagctttcttgcagtacttg

SEQ ID NO: 1476 - DNA, 536 bp, Gossypium hirsutum
  Clone ID: LIB3825-003-Q1-N6-A6
aaatcagaatgtaactacttttttttggagttttagcaacaaaataatggaccattgtcaattgttgggccaaacaaattttttgacaatttgactatgattatgatcagaataaaatagaacagattcagttagctattattctccgagactacttacttggttggagctacgatagagcatggcataatgatttgtacgcccctacacacatcttaaatttctcttcagccatctcctgtgaaggaccttgatgcttatcaggatgccacttcaaagctgatatgtgaaaggcattcttaacgtcttcaatctttatggggcctgctcaaggcaaaccaaggatttctctatcagaacatgatcctacatcatatgacttctcctcctcagactcagactcagagtcactagtattttcccactccttcgtcctttgatttatccagcctgatttttctctccactcaaatccagattctggattcttgaaagacttatctccaccagaagtccaagtataccatttgttccca

SEQ ID NO: 1477 - DNA, 516 bp, Gossypium hirsutum
  Clone ID: LIB3825-003-Q1-N6-A7
aaaagggaaaagggaaaatttttatttttaaaaaaaaagcttaaacaaccaaggtacccaacccacacttattacaaccaagcgtttggaaccggacgttatttaaaacccctcacgttcatattggaacttttattattattttaaccctacatgctaccctaaaccttcctaggaacaggagccgggtaattatggtcattctcatcgggattagccattccaaagggttgtttcaccggattaatcccaccttgggcccggttccttaattttttccccggctggtggaagatccccccgcttggctccttgggttccttcgcctttcctttaacaacttccggtggctggtttggcttggcggtgggtggcttggggggccctttgggcttttggttcgctggttttggtggctccattggcttttggttcgctggttctggtggctccaatggcttttggttcgctggttctggtttctccttcaagccctccttcatttgctcacccttt

SEQ ID NO: 1478 - DNA, 399 bp, Gossypium hirsutum
  Clone ID: LIB3825-003-Q1-N6-A8
gggggaaaaaaaaaaaaaaaaaaaaaagggggttttttttgggggggggggaaaaaaaatcccaaaaaaaaagggggggggggtttaagccaaaaaaaaaaaaaaaggtaaaaaagggaaaaaaaaaaaaaaaaaaaaaaggtgggcccccggaaaaaaaggaaaaaaaaaaaaaaaaaagggggggggggggggaaaaaaaaaaaaagggggggcaattttaaaagggaaaaaaaaaaaatttccaaccttgaagggggggaaaaaaagggggtggggggaaatttgggaaaaaaaaaaaagggggggggaaaactttttttaaaaaagggggaaaaaaaaaaaaaaaaaaaaaatttcggggggggggggggcccccggaaaatcggggcgggggcc

SEQ ID NO: 1479 - DNA, 534 bp, Gossypium hirsutum
  Clone ID: LIB3825-003-Q1-N6-A9
gaagtaaaagtggtaatttagtgaattttctgctttagcttaaagttaagcacactacactctttataagaaatactaccgattattaagataaaagattttgaactcaaaaccaaaacaaaatacaaaggcacccaaacatctgcaaaacattctggctctgctctgctacggtgatcacatgcggtggcaagtttctactgtgatctaaccctgtgattcaacatcatctcccggagatccgccgcatcgatctcagccccacagttctccggccggtaataccccgtaacagggtcaggcgcccaagctgaagaataagcccttgtctccgacgacgacgactctttcatcgcatatcttcgttccactttccccatcgctccaggcctaccaaagctagccgtcactgccgccggcggtgcacctgagtaacctctccttgatatggagacataaagagcatcaaaaacagaagcaccaaggaacttaaaggaagaaacagagcgagccatatttatttttacttgctta

SEQ ID NO: 1480 - DNA, 465 bp, Gossypium hirsutum
  Clone ID: LIB3825-003-Q1-N6-B1
ggggggaaccaaatgggtgggaaaacgggtttgttccattatacccacgggggcaaaaaaaaaaccttaaaatttctaaataataaaaaaagcttcgggctagcagtcaggaagaccttaaaattactaaaggttttatagaaccttgaaactttttcatttttaggcctattaactagcatggggatccgggattttaatgggttaaaaattgggaacctccagggggggtccattttaaccactcaaatttgggtttttatttaacaccccaagggtttggggggccaaagttccatttttttaaggctccatggggggggaaagcctttccagcagttcctgggagtccattggtggaaccataaaactaaaacttgaccgggcttttcaggagccaaggggtattgccaaagcatttggttggatatgggcttttttaaaaaaatcacacaggagcctaaa

SEQ ID NO: 1481 - DNA, 532 bp, Gossypium hirsutum
  Clone ID: LIB3825-003-Q1-N6-B11
aaactagcacttatgttttggtttttaactatgaaaaggtgtcatacaagttccaaacagaaattggatttaggatacaaagctttgtaagtatcttgcagcagtatatgttaaaaaaaaaaaaaacaaagaaaagaaaggtgggagcttatttggctgcctgttctaacacagtaattttcttctgatcatccaatgcacgattttgcaaaggcggcagtgagaacacgctcacggttgagcttccgctccggatctctttcaagacgtgtagtgctgacaaagtttgcttcatatacatgttctccatatccttgatttctgcaagttcttttggaactttgagcaagttttcattacttctgctagaagtatcaggtttgtggtctttctcgttggttacatcaggtaacgccgatggttcatttgtggagaaaagacgatcaagtaccatctcacactccttcacaagctcattaagaacatcggtccggtagaacggttgttgcaagaccttttgaatgaagggcaa

SEQ ID NO: 1482 - DNA, 529 bp, Gossypium hirsutum
  Clone ID: LIB3825-003-Q1-N6-B12
gcaagataaattttcaaaactgaaatttcaagcagctgacggatcaaaatgctgtaaaatttacatgtaaaaagcttgctagactactttgttttcaactgaaatgcacatttacaaactgcacttgagtgaatacctaagaagaaacattatacaacatcctattaaaagctgacttatgcaaaaaagcataatcacaatcttcagaaaagcattagagcaaatcttggaattctacatgcacacttatgccaggataaggccactttattataacctcttgacagcaatgcagttgtgcaagcaagatgtgccagatttcaactcacacctcgatatatggcattagttctaaggtcgtccaaattgtcaatgtttctgtatccattaatctccctgagacctgtgtagcctcgacggagtagatattcacggtaatcatcttctacataaaagatcttctcctctgtgtggactggtatatgatccgactcatcataaaggcaaacttttataggcaaaccttcat

SEQ ID NO: 1483 - DNA, 533 bp, Gossypium hirsutum
  Clone ID: LIB3825-003-Q1-N6-B2
aaacattctttcaaatcatctaacaattgaaaagctcatatatttgcttacgccacatattaaaccttaataagaaactctttcttcctctcttatatgagaagagagcatcgtctatacagaaacacgactaggcctcattctttaaaaaaaccatgagcatctgcctctgaaaaaatctcatgatcaaacacattggcaaatacccaaaaaaaaaacctttaacccgcaccttccctgatatatatacagagccagataccatattacccatagccttcaaccctctagggctgtaacttggtgatcttctcctccatgaatacattgcgaacaccggataacttgaaaaacatgtcacccccacttaccaaataggaggtacattgcataaaatatgaccggttaagcatactttgcaccaccgtaatattccataaaaggtcatgaaatgcctcatattcatcttatatcagtgaaagcgatcgccccattagatcgacaaccacatggccgcaccagctatctccacc

SEQ ID NO: 1484 - DNA, 537 bp, Gossypium hirsutum
  unsure (1)..(537): unsure at all n locations; Clone ID: LIB3825-003-Q1-N6-B3
ggcaaaaaccaccaataggatatgaaaataacagcggaaatactcacggtaagacgagtttatttatacatgnggagtgctgaggtagaagtatgtacgacattatcccaatagaaaatactattctattattgagcctaaatgacccaaacccaagtgcatttttcctgtaaaaatcccattactgtgttttcacaggaattgaattacgatgcttaaaatttggaataaaattttggtgttgacaaccaactgtttgcgactgacttgactagttgcaagtgtgaggatatcagatatgacaccggcaatttaatatcagtgtcagcaggatgtagatgtccactacagtcttcaaattcaagggatctgctttattatatttcaatctcgtcccaatccacggatctgtcttcaaattccagctctaattgtagaagcctgttattttgagctagcctgctcattgcagcaagacctgaaacaagaaccaattattgatgatgaacaatgaaaatacaatgaaacaactttatt

SEQ ID NO: 1485 - DNA, 536 bp, Gossypium hirsutum
  Clone ID: LIB3825-003-Q1-N6-B4
aagatgaaccctaaagaggtacaataacatagaaaattgccacgattttattacacagcttgcgctgacatctaaaatcataatttacttacaacagagaatcattcaatttcatcatctatctatctatatatttgtaatctatgaaacaatagtggaaaggctatatagataccagccctcagaaactaatatattgtattttttttttcttcgaatgaaagaaggcacgatggaatccgaacttcggacttgctggatgctacttcttaaagataacagccatagattggactttcgacttgtggaggtaagagatgaaggtctttacactgttgtcttccgtaatcccgagtacctggtattgctccagtgcaaagtcgaaggaattcattccctgtgagacaatagtgagcaaatgctattcctccatcgaccatctctgagagggttggcattgaaaccgatcttgcaattagttttccgtttgattttctaaccattgtaccactatgttcgttattcaagattctgtc

SEQ ID NO: 1486 - DNA, 529 bp, Gossypium hirsutum
  Clone ID: LIB3825-003-Q1-N6-B5
aaccaaacagcactcctaacgatttcactttattactattgcaagttaaaacgaaagtcacaacagtgaatggaaagaccagcattttaaaggaaatagtccacatttgttcacaaggtcttaagattactagatttttgttttagtgcagaaaacctcatgaacttaaagcttaagagcttgagcatggtggcggatgtgatcatcaatgaaggtggaaatgaagaagtatgagtgatcatatccaggctgcaaccgcaataacaacggcacattcacactcctacatgcctcctcaaacttgtgcgccagaagttggtctaaaaatttgtcatcctccccctgatcaatcaaaatggtagctgatacattatggaatttttttatcaggcaagtggcatcatattcctcccaagcagctttgtcattgccaagatagtttgtgaatgccttctgaccccaggggcaatttataggattggcaatgggtgcaaaggcagacgctgacttatacttatcaaggtttttc

SEQ ID NO: 1487 - DNA, 405 bp, Gossypium hirsutum
  unsure (1)..(405): unsure at all n locations; Clone ID: LIB3825-003-Q1-N6-B6
acttgaataatactatattttatatgttaactaggcacataaacacaaaaaattgagagcattatacacatcataatgagaggatcctgcgatacaaacaagaacactaaaacctgctactgatactaggatatcaaaaagggaaaccaaccggtatcaactaccacaaaagatacagtcaacaccttatctgaatactaggcctaacaaaatcaatgtctgtatacaacactactaaaatctttacgactcaaaaccactctgcaccataacacgaacatactttatttcattcaaccaacgcatgttcttatatgagcaccctgcaccatcattagcaattatggtcgatcgtaaatactactaaaanctcctttatattgtcgcacaaattcatatggattc

SEQ ID NO: 1488 - DNA, 527 bp, Gossypium hirsutum
  Clone ID: LIB3825-003-Q1-N6-B8
ctctcaggaatctcttcattaagtcaatcggctattggtagtattctctagctctttattccttcttttacctggaaaaagcatatgggctgcaaagggtcttctccaaaaagggatgtgctggagagtagacagaggagataggatatccatatgggataatagctttcaagaggatattgctcggaaaattcttcaaattccccttgcagagattgagcatgaagattttcaagtttggaaaggagaattatctggtgagttctcagtccgcagtgcctataaactattacaaattgctaactcggatcctagttactatttattacaaaccgaaataaaagaattttacaaaaaactgtggaacctacagatgccatcaaaaatttcatttacaatctggcggatctcttgggattttttaccaaactttgttaacctcagaatcaggagagttgtttcaaatgacagatgtcctcgatgtagtttagcggctaaaggtagcctccacgtctttcgagaatgtc

SEQ ID NO: 1489 - DNA, 535 bp, Gossypium hirsutum
  Clone ID: LIB3825-003-Q1-N6-B9
agaaaaaagaacagacaaatatatagaaaaaacaagtatagttccgcaagatcagacacaaaacttgactaagatgccttggcaaaccaaagcatctcaaactttaaaaatcctacataaaacaggcaaaaacttcaaaccacatataaccaaagataaaaacactcaatctgcttcaccgctaaaaccttttggcctcttcacttcttcttagcagcagacttggtgaccttggcaccggttgggtccttcttctcgacactcttgataacaccaacagccacggtctgacgcatgtccctcacagcaaaacgacccaggggtgggtactcagagaaggtctccacaaccatgggcttggtaggaatcatcttaatcataccagcatcaccgttcttcaagaacttgggttccttctcaagctccttaccagatcgcctgtcaatcttggtcaaaagctcagcaaacttaacaataatgtgtgacgtgtggcagtcaaggactggggcatatccatttccaatttgtccagggt

SEQ ID NO: 1490 - DNA, 519 bp, Gossypium hirsutum
  Clone ID: LIB3825-003-Q1-N6-C1
gagcaaccaaaactgtttccaacaaaatgcattataaagtagaaaaatccacaatgaaccaaacccttcaaaagatttcaagtaaaaacatacttgaacatacttggtctatgggcaattatactaagcattaaacaaaacaaaggttctttcaacaaaaagagtgaataagataactatcaagacagccaactagttgaggatttagagtatcgtcagatcttaaacggcagcatggaggaatgctcttcctggctcccgattagctagaggtccatgacatccaagaagcttagcattaacaccatcagggacaatgtgattctctgacttatatttcaaataatcagttcggctgaactttgtgaaaccccacttcctgctgacaataatcttttggcgaccagggaacttgaacttagcacgtcggagggcctcttgagcatgatgactgttgctgtccttgcaacgaactgaaaggaggacctgaccaatggctactctagcacatgttccctg

SEQ ID NO: 1491 - DNA, 492 bp, Gossypium hirsutum
  Clone ID: LIB3825-003-Q1-N6-C10
atgactctaatccctttaacaagctctttaagttactacactcgtacgggtacaacacaaaccactgtaaaataatattacaaaccttttcttgtatcattacaggactaggctagcaacaaggatagattctcaggttggcttttgcttctcctggttagcatcgatttgcttgcttgttctttagtagtatttcatctggtcgtcaatggaggatgacttcaatcatggcttctctgttaaaattcttcttgaggtgtctgtaactgtaaaacgaatcccttcataggaagtaagatagttgctccttttttcttgaacccccttctccgtacaagtcattccactgttttaactcattcattccagctccctcagatgcgaagctagccgccacctgattctttgcttgcctgaaatcttccatagataatggccttagggtaatgactctttcatctgtaccatcttctttgttttgtacttcaacaa

SEQ ID NO: 1492 - DNA, 556 bp, Gossypium hirsutum
  Clone ID: LIB3825-003-Q1-N6-C12
ggaaaaaagcacacgacattcaagctataccaggaaaacagagtaaatgcaatctatgcacatcgacatcccttacaagcaatgcaaacggataacctatcttcatcacctgtgccactagagagaagtaaagcacacactatatcctagggtcaataaactttggcgcaagtgctgtatgcttttcttaaaaagagaaagaacgaaagttttgtttgtataccacaaaaggctctgcatcatcttttggcatcttgagaaggtcctccaatccggttctcaccctttgatccttccgggaatcagaatctggtgacacacttcttgcattgctaggatcagcatttggtatttgtcccaatagactttgtcaaagtgctgtatgcttttcttaaaaagcgaaaaagaatagaagttttgtttgtataccacaaaaggctcgtcatcttttggcatcttgagaaggtcctccaatctggttctcacccttttgatccttccgggaagcatcagaatctggtgataaacttcttgcattgctaggatcagcgttcgg

SEQ ID NO: 1493 - DNA, 455 bp, Gossypium hirsutum
  Clone ID: LIB3825-003-Q1-N6-C2
caaggggaaccaccatccgtccaaaaaaaaaaaaaaggcaaagccaaaccggggggggaacatggggccccaaataatagtcaaacccaaaaaaaagggcggcaacaaaagagagggatttaatccgaaaaacccatcccctctcccagggaaaattcatttatgggggacaaagctaccaaaaaaaaatctaacctaaccaacaaccccaaatttaaggcccttcaaaattttggaagtcaacccatttaaaaacggaaaaattggtttccccaggcaggggaaaagtcccaacttaaaaagcggccccccctaaacagggaatatggtttcgggggcaaacagggggtaaaatgggcccaaaccaaacaaaaaacccaaaaactatccccaacggggggggggctggccctggccaaagtcggaaagcccccaaaaaagctttttctttaaac

SEQ ID NO: 1494 - DNA, 532 bp, Gossypium hirsutum
  Clone ID: LIB3825-003-Q1-N6-C3
acgggacggaaagtaaccatccattattgtctaccgaagtttcaaaaccaaacatatttatacaaccaccgaaacaaagcatataaaaactcatctactctcaaatcttaatctcatcaccaccactcagcattgcagcaactcacagctcctcatctcgctcacgtcctcgcccttgtcccccaccgttcacatagttatctttcagttcttgggatttctgcttcgccgactcgtagcccgaagctatggtatcctttgcagattctatggtctcttcagctttgcttttggccgcatcgtacccttgtttagctttctctttcgcccacttcaggctctcccctgtctcttcgttctttttcttggtttcctccgccgcaccctttgctttctcggcaactacctccttcgctttttccgccttccgagcccccctttcctgcgcttcattcgtcatctcacttgtcctatccgccatgtccctcaccttttccttcgctgcaatatatgctgtgttcgcattttcttt

SEQ ID NO: 1495 - DNA, 524 bp, Gossypium hirsutum
  Clone ID: LIB3825-003-Q1-N6-C5
aagacaacaaaaaattgaacataaggaagtaagtcataaagactataaagtgtaaccgattcaattatgtttaaaccagaagagaacacagaacaacagtctgaaaacatctgataaacaaatcgaaccatgtcataggtaacaaatcctggtactactaccatgagttgaaagcaggtcactctagcagcaagcccctttcctatctcgacaagcccagtcttaaaagaatactctttcatccaattaactctcagcctgaggttcatctgcttttgattgctcacctccttcctctggcagatccgaggtccacaaggtgaggttgtccctaagaagctgcatgataagggtgctatccttgtaagattcttcattaaggctatcaagctcagcaatagcctcatcaaatgcttgtttagccagatgacaagccctctcgggagaatttaatatctcatagtagaaaactgagaagttcaaagccaggccaagtctaattgggtgagttggaggcaaatctg

SEQ ID NO: 1496 - DNA, 554 bp, Gossypium hirsutum
  Clone ID: LIB3825-003-Q1-N6-C6
cgacgcatgcatgcatgcaaatttgatcaaacaatgacaacaaccgtgccttaaggcttaaactaataattattactatggttcaacttcaagatcgttccccttgtgcaacttcccgagccttatacttcacatactggccatactccttagccttctccgtcacacccctcgtcatacttgcaagcatatcccttgcataatcaagcttatccgcacctagtgggtgcttcccttgcacgtaattatatatccacgataacgccgtgatggctgccacgccacacccgccagaaaacaagaacccagtaatcaccaagaagatgactatggcagagggaactagtactggactaaacaacaccataactggcgtcgccataatcagggcaatcacagtccacgtcaaggttaatcctgacaagaaaagcaacgttgcactcagtgtggttgctgttaaaaacttggccgtcagccgagatgatggaactgactcgtacagcttctgagtcatgggtttgttttgatcattcgacatgatgaacgatcctggt

SEQ ID NO: 1497 - DNA, 497 bp, Gossypium hirsutum
  Clone ID: LIB3825-003-Q1-N6-C7
agctaagaaacactaaccataaatttgctgggaaagaaacagagacaaaattcagaatatcggcactgacaaagcaaccatgctgaaattacactcaaaagcctaggtattctttaacgaaactagtccacacagtttggaacaagaactaaataacctagctaagaaactatgccgcaaaagggacaataaaagaatgtaatcaaagctaggaaccaacaactagcaactatcagcattcacagtataactacgacaaaatttcattactggttttctagctagggctgatgccccttattcttaaaaaaaagaaaagaaaacaaatcgggccttaaaatgaaatagacgtttagaaaccaaaccctttgtgactttgacgaattgccaagtctactgaagccccatgaaccgatggttctgcaattatctcccagatccagtaagaacatcaagcaatccgcagcaactgaacaacgaggttctttgcaccactg

SEQ ID NO: 1498 - DNA, 522 bp, Gossypium hirsutum
  Clone ID: LIB3825-003-Q1-N6-C8
tttttttttttttttttttttttttttttttttttttttttttttttttttttttttttttttttttttttttttttttttttttttttttttttttttttttttttttttttaaaatttttttttttggttttttttttttttttttttgggaaaaaaaaaaaaaaaaaaaaaagggggttttttttgagggggggggaaagaaaataaccaacgggaaagggggggggggttgggccaaaaaaaaaaaaaaaaggaaaaggggggaaaaaaaaaaaaaaaaaaaggggttccccccgaaggggagggcaaaaaaaaaaaaaaaaagggggggggggggggaaaaaattaaaaaaggaggcttttttttatatggggaaaaaaaaaagcccaaaccatgggggggggaaaaaaagggggggtggggctttttttaaaaaaaaaaaaaggggggggggaaaaactggtaaaaaaaatgggtaaaaaaaggggaaagagaattttctcagggccgggggggtg

SEQ ID NO: 1499 - DNA, 555 bp, Gossypium hirsutum
  Clone ID: LIB3825-003-Q1-N6-C9
gatgaataagcattgccattcaacatttcgttatccaaaaaaaatacaaaagttttaacttctataggctccaaaaacataaacatcaaatttaatgccagaaaaaaaaaacacgactaaaatagtaaacgatttgagatacgcaacattacaccctaaatatataatttgccaaaacaataagctttcaatcagaagcaaggggactcaattgccttttttagacaataaactaccagtttactaagaaaagcataatctctcaaaaattaaacatgcacataagagcatgtaatatcatctcatttgccaccatgcttggccttcttgtgggactctagaccaccctcggaaccaaaggacttgctacaagatccacaagagaattgaccaccagactttggactctttccagaagttttcccagcttgctttgatgggtgtggggttgcagtgtgaccacccttcttaccatctgttttctgaggtgtcgctgcaggtttagccttctttgcagaaacaggtgttgcagcttctgccggtctctttttgctc

SEQ ID NO: 1500 - DNA, 547 bp, Gossypium hirsutum
  Clone ID: LIB3825-003-Q1-N6-D1
aattaggcatcattgattaacattaaaaaaaaaaactaattgaatatgtcaacattaaacagggattagatttaggtgggcccaataatacaaaacatgatgtcccaccaaaatcacattctaaccaccatatcttagaacatgggattggtacgatgctctaaacaacactagatattctccgtactcaatttgtgatgcttttttttttcatttgacaaaaacgaccttgagcatcggttgaataattacgattgaggccgaagagcatcgaacggtccatgagggattggggcagcagccggagcccaagggttgatggggatggccctgtggtgggtttggggtagctgatgatgggatcttggatcaacggtggatgatgcacccactctctcacacgatgggcacatggtgagggtggtaggtggggtcatttgcatgtagaactgcggggaaagtttcagtgctctcagctcctgaacttccttctgcaaccgcctgttttcctccgtcagattctcacagcatctctttaggaactcac

SEQ ID NO: 1501 - DNA, 538 bp, Gossypium hirsutum
  Clone ID: LIB3825-003-Q1-N6-D10
aaagataaaaatgatctctcatccttcataatgcacattatctttactacaataaaaagcccaccagaaccataaacttgaatcaaaagaaaaaccctctgtagactatacactgtttagtttgtaaaatcattgagatttgcttaactgctgcgttttctagcagatatcatcacaaacggtccgtttctcatgcatgtaaaaccaactagtccacaagttcggcacagatcttcgagttctcgttccgaaacggcgaaatagctaccagcaattcccatcatattctgtcggaaagtattcacaaatggcagaaatgtaaacggcccatcaactatgtaggtggtagcgacaaaaacaccgcctggtcgaagaactcgacttatttcagctaccacagttgaaagaaatgcttacagcggttgatggtgaaggccaacagtgcaaagcagcaccagcatgcacagcatcgattgaacttgactcaaaaggaagtcgagagatatcagctcggaccaaggtcactttctctttgggg

SEQ ID NO: 1502 - DNA, 547 bp, Gossypium hirsutum
  Clone ID: LIB3825-003-Q1-N6-D11
ggcactaaagcattaaatgcatactaatgtaacattcacggtgagtcaaaattaacacatggtactatgcaatttgaagcaatttctacaaatgcttctatcaaaactgagccgagcagagagcagcagcaatatatacacatattcaatgattgaaacacgcccaaaaaaatttaatctaaatcttttcctttgagcttccctttcaatcattctttttaagtcgtggtattcttgtcggttgcatcagttctcgaggcatatccatgtctgcaactccggcatcacttcgtgcctagcgtaatggatctctgagcgactgacttgaaactcgtgtttgcttttccagtcacttcgatgacaattttgcttagagttgtcgggtgtggcaaaccggaaagtctcgaacgttcatatccatcttatcgaaggtgaggttcgcgatagttcgatcgatggtgttggtctctgattcagttgtttcctttttcccagaccttattttctcctctgagattgtccacttcggagaatgagttcgaacatg

SEQ ID NO: 1503 - DNA, 546 bp, Gossypium hirsutum
  Clone ID: LIB3825-003-Q1-N6-D2
aatattaattacctcgtaacattaatttaacccaccattttatatatagaatagataataacaaaaaaaaaaaaaacagtaaagcctaaggaagagagttaatgatgtgaggatagcatgcgaagcatgaacctaaaatctatcttttatcccttgtggtagctacgtatgttctcaaggaaggtgactgggtgagaccatcaggtgccaccgtcgtgttctgtattccattcttctgttgcatccttctcctggctatcaaacctctgatccatggtgtaacatcctcactgatctttatcatcaagaagaatatgattcgatatattatgatcatgctgaatataacactcagatcgatccacttggaccgtcttacattgatttggaacacgttttccagtatgtattcaccagggatctggggaagctctggggactggttcttgaatagcaatccctttagatcattttggtattgcccctgtagagcccagaaatggaagctgatgtaggacattgggtaacgccagacaggttttggga

SEQ ID NO: 1504 - DNA, 537 bp, Gossypium hirsutum
  Clone ID: LIB3825-003-Q1-N6-D4
aacaatcatgattaaagaagctagtacataaggtagctacaaaatcctgtttcaataacacctaattcaagttctgactaagataaacgaccatggaatacaacattaaataacactctacttgaaaaagtgctaagccttggcttttccagcttgaagagattcaatttttccaagtttttccatgaatctaaaggcttactgggacaacacagctttttcttcaacacaagtaacctcttcaaaataagcaaaatattttccttctcgttccccaaaacaagtcatgtgagtggcagattcccttgttgataaacaatagtttcagcaacaagcatctttgtgtaaagccatgcatgtttggagataaggagcgcaagagtcctataatgattatcagtccattccatcatgggagctacgctaaatagaggaggaagatagcgactagcacccatcatgtcttctgtatgtaattgaacgttttgggcataagaagtgacccttgatttagttgaatggttgataggtatattt

SEQ ID NO: 1505 - DNA, 535 bp, Gossypium hirsutum
  Clone ID: LIB3825-003-Q1-N6-D5
aggggaagtttttactgtatctttatctgcctcttatcatcagagatgtttgaggtgattatgtacaacaaaagacatgaacatccatttacatgatcacgtccccccatactataacaaccatctttcccaccatcccatattccaaaagtccagtgaaactatacaaaaacgatcagaaaaccctttcttgatattcccctccttcaatcctgggcgtccatcactgtatccttctcttcaaacttcactcccaccaagaacctcatgctcacctgtctgggatcatagactgtgtattcattatattcgagagggctatcctggtgttctgaggggatcaaactgccacaagggactttgatatcatctttccaatctatatattctgattcatctggtttctttctccccagtcccttcacacacactttcttctcttccaatggcttaatatcctccggtgggttcttgagctccacaatttcttcaccttgtgaaaacacagcgagaaccaagaacccttcaggccggt

SEQ ID NO: 1506 - DNA, 450 bp, Gossypium hirsutum
  Clone ID: LIB3825-003-Q1-N6-D6
aagcccaaaacaaaggtccattaaacaaacccccgggggttcatattacaaaaaattcaagggctaaaaaaacgcccgctcaccaacttttttttacggggggaaccaacccccggtgggttttatgggggtggcgggggccgcaaatctaaaaaatcacaaatttaaggggggtggccttctcttgcaagggggcgaaaagggtggaaaagcttttttggaaagaccccaccccctcgttttccaggggggaaccgactttgccccagaaaatccccaacttttaaagggccctatagaggccttcagcttaaaacacgttgggggaaatcgcccttgaaacggggccgggggctaaaaaggcttggagggcttggccaggcatgggtgaaaccgggtcagggccaagggggggggccaccttttgggggtcaggggaggcagggtttt

SEQ ID NO: 1507 - DNA, 474 bp, Gossypium hirsutum
  Clone ID: LIB3825-003-Q1-N6-D7
gaaaaaaaaaggggggaaaaaaaaccctttaaaaaaccctggggggggggaaaaaaaaaaaaccaggggggggttttttgggggaaaaaaaggggcgggggggaaaggaaaaaaaaatttaactggaaaaaaataaaacccccccctttccctttcaaaaggaaaatcccccctaaaaaaaaaaaaaaaaaacggggaaaaaaaaaaccgggaccctttttttttttaaaaaaatccccaggaaaaatttggcaaatcaaaaaaaccccccccccaaaagggcaaaaattttcaaaccccaaaaaaaaaaaattggggttttttaaaacgaaaaaaaaaaaaggggggattcaaaaaagcccctaaaaaaagggggccaaaattccggcccaaaaaaccccccccaaggtaaaaaaaagaaaacggggggccccaaaaaggggaaaaaggggttttttctttcccttggggggg

SEQ ID NO: 1508 - DNA, 351 bp, Gossypium hirsutum
  Clone ID: LIB3825-003-Q1-N6-D8
tcgcgatctagaactagggaggctgtgttggacctaagaagagggtggttacgcttcgccagtctctgattaacctgacatctcgtgtggctctcgaggaaatcaaactcaagttcatcgacacctcctcgaagtttgggcacggacggttccagacaacacaggagaaacagaaattctatggtcggctcaaggcataatcttggaaaaaccggtcggaaattcatggttggattttgttttgcattttatcaatttgatgaatgtttgaatttgctgagttggttcagtttttgcgctatagattgttcctagttttgaaccaaatatacccaatatcgtacttgtttt

SEQ ID NO: 1509 - DNA, 537 bp, Gossypium hirsutum
  Clone ID: LIB3825-003-Q1-N6-D9
ggttgacaataatttcaacactgctttcatctgtagtatatgaatcggttttcttttgatttgttttgctttcaaaaaaaaaaaaaaaaaaaaaaaaaaaaaaaaaaaaaaaaaaaaaaaaaaaaaaaaaaaaaaaaaaaaaaaaaaaaaaaaaaaaaaaaaaaaaaaaaaaaaaaaaaaaaaaaaaaaaaaaaaaaggggggggccccccctttttttttttttttaaaaaaaaaaaaatttttttaaaaaaaaattggggcccaaaaaataatttttgaaccaaaattttttaaaaaaaaaccctttcccaaaaaagttcccccccttaaaaattaaaaggaaaaaaaggggggttttaccccccaaaaaaaggtttttttcccggggaaaaacctttccacggggtttgggggacaaaaaggggttttcccccccggggaaattgggttaaaaaaccccaaaagggtcctttggggccctttgggaaaaaaaaagggggccccctttttttttttattttttcacccccttttt

SEQ ID NO: 1510 - DNA, 489 bp, Gossypium hirsutum
  Clone ID: LIB3825-003-Q1-N6-E10
aaaagcccaaaacaaaggttccattaaacaaaccctcgctgcttaatattacataatattcaacgtctaaaataacgctcgctcaccaacttttttttacagcaggaaccaacccccgcttgtttttatggggttggcagggcccgcaaatttaaaaaatcacaaatttaagagggttggccttcttttgcaaggggtcaaaaaggctgtaaaagctttttttgaaaaactccactccctcgttttccagctggaaaccgactttgccccagtaaatccccaacttttaaagggcactataaatgccttaagcttaaaacacgttggcgtaaatcgcccttaaaactgggccggggtctataaaggcttggagtgcttggtcaggcatggttaaaaccgtgtcaggtccaatgagaggagcaccatatggggtgtcagggtaggcagggttcttgacactagttgaggcccagagcaacctttgttttt

SEQ ID NO: 1511 - DNA, 424 bp, Gossypium hirsutum
  Clone ID: LIB3825-003-Q1-N6-E11
aaataataatatgaatggataatgaacatttatgtcgggttttaccccagaacaagatatcatattaccctcctatgtacaggaaacgactggggttcaaaatacccccgccaacttacaaagatttaactccaattcttttgagccctcaaaatctattcctttatttccttgggcatatatatgatagtacattgaaccatgatttcttttcaaaaataataaaataaaaaggtttccacttgctctttggcattggcaactttttcacccgctcccctaacgcctgggtttgtatgtaattaaggcattaccaattctacttatgccatggaagtatatgctaaaagaaatctctgatatcgctggtggcttcgaagtctaattcccacgcgtccgcccacgcgtccgcccacgcgtccgg

SEQ ID NO: 1512 - DNA, 356 bp, Gossypium hirsutum
  Clone ID: LIB3825-003-Q1-N6-E12
gaaggaaaaaaatatatgtatatattatgtatattttacattaaaagggtaattaaactggctaaccatcaattcccgctaggaaataacggtcccaaactttgtcaattattcttaaactataagtaacaaatggcagtgtttgcaacaaacgtgaaaaaccataaaaaataacacataaaacgggggcagacattcataaaatccaaaagggttgtaagactgccaactcagtcatgtcacacctatgccttgtttgcaatgttgtttgagagccagtccagcccctcgtacagtccttcaccggaagtagcacatgtgctctggatataccaatggcgctgcccacgcgtccg

SEQ ID NO: 1513 - DNA, 519 bp, Gossypium hirsutum
  Clone ID: LIB3825-003-Q1-N6-E2
agagagaaacagagtgtgattcttttatccatttgcctttggatcaaaatatgatgaacaaagtagaattcatgtctcttttaccatacactcaaaatttgtggtgtgaacaagaagcaaggtgtgacaaaattaattgtgaaagaaaaagaactacagaaaaaacttttctgatatgtcctcacttggacatgtgtgcaaaagaagatcaatcagttggtacagactggattaaactctgttcaaaggtggaagcaattgcaaaagcttggataaaaatcgagcactgcaagcagattatgcgtctattgtccatccttgagcagcaagtgccttcatcacctggctagcggcctctgctgtgtcatttaacggtgtatagctccagctctcagatatatcctctttgccagtgaaaggacaaactgctcctcgttcccgcagagacttttggaagtcagcaaacttccatgtacatctctcagctcctataacatagactggttttcctgtagtgca

SEQ ID NO: 1514 - DNA, 549 bp, Gossypium hirsutum
  Clone ID: LIB3825-003-Q1-N6-E3
gagctgaaatttaaccattaatttataacgtaaaaagagcaaaaaaaacaatagacgggtgatggaggaaggctttagggctttcacagatacagctaaagatgtttgtttaggagaaagtttggtaacagcttaagccgtgtaataacccttacatatatagaactgcagtaaaaaactgaagataataaactaatgcaaggtaaggcgcacatgaaacaaaatggaggagggtacttgtgaacatagttgggttttccatccatgggttaagaggaagcgtgagtttgattcctggctttctccttctccttcacttcactcccctgcgtcttgtcataagctgggtgacttccatgaatctccttgtttttttttatgtcagatatactctcgttctctccataaattcctccaaatccttcttcatctgatctcgtagcatatccctctccgaatgactcagacatgacatccccaggtttttgttcaggcttttcgtctttctgctccatgctttctggttgcttggaacaacttgtgatgatt

SEQ ID NO: 1515 - DNA, 106 bp, Gossypium hirsutum
  Clone ID: LIB3825-003-Q1-N6-E4
aaacattaaacctacttactacgttttgagccatgatccatgatgaaagattaaatatgcatagaatgcatgcatcatccttgaggataacaggctagcccttacc

SEQ ID NO: 1516 - DNA, 486 bp, Gossypium hirsutum
  Clone ID: LIB3825-003-Q1-N6-E5
tttttttttttttttttttttttttttttttttttttttttttttttttttttttttttttttttttttttttttatttttgggtttaagaaaagaaaataaaatgaagaaaaaaaaaaagaggaataaaaaaaaaaaaagggggaggaaggggggggagaaccgggaaaaggggagggggagggggagagggaaaagggggggggaaggggagagggaagaaaaaggggaaaaaaaaaggaaaaaaaaggagcaggggaaaaaaaaaaaaaaaacacaaaaagaaaaaaaaaaaaaaaaaaaaaaaaaaaaaagaaaaagagaggggggaaaaaaaaaaaggaaaaaaaaaaaaaagggggaggaaaaaaagaaaggaaaaaaaaaaaaaaaaaaagagagggaaaaaaaaaaaaaaaagggggaagggggggaaaaaaggggagggaaaaaagaaaaagagggggggcaaccggcccgcgaggg

SEQ ID NO: 1517 - DNA, 550 bp, Gossypium hirsutum
  Clone ID: LIB3825-003-Q1-N6-E6
gaacaagccactcatatcgttaatttcctcgactggtgttaaaagcagataattgtttatcccactacagagaagaaatacttgatacaaataaaaagggggataaaaaagggacactcagtaatgtccctggtctctggccaaaagtaatctcaaataaaacaacatatcaccaaattacaatcataatttatagccaactgttaaaaacacccttggggccaagctttatgctgagccttcctcttgctttgcttcatccgacttttggttcgatggggctaatggggatggagagccctccactcccatctctgcttttaggtcattaatgctctgctccagctcatttacacggtttcccatttcatcaagtgctttggagttaagtaagaaatagatgtcccacaattcacaataatactaaagaaaaaaactatttgcatactaattagtaattaactatctatttccctttaaagcattatcgctataatagagcaaaaacataacaaagttccaaacttcttaaaatctggccagcaaaaca

SEQ ID NO: 1518 - DNA, 561 bp, Gossypium hirsutum
  Clone ID: LIB3825-003-Q1-N6-E7
aggagaaaaacacaatctagaaatctaattcttattcacaatttttaaccaaccaaacatcgtaatatctattccattcagcaaaccaaacatgctgttacatttatagttcatttgtaaaaagttcagtcccaaacacttctatgctcatctaaatgcgtacaaaaggagaaaattgaattctaaatgttgaaatatagtgagaaaagaaatttatatatctcaaaatcacaatacatgcctgtgctggaaaacacagtttgcacttggggatatgcatatattctctctttgtcttcaacatggagaatcctgtcctgcattagcagtccaaagtagagccttggagtgggtgtggaaaattacattacttgtccccaccacctccaaacatccccatcatgtctttggtagaacccatttgcttcatcaagttctgcaacccacccatacccccaatttgctttaacatctgcggaggcaggaccttgctcatgtgctgtgcattcatgttccgagacaacgcactcatttcacccttctttggaattttcagcccct

SEQ ID NO: 1519 - DNA, 524 bp, Gossypium hirsutum
  Clone ID: LIB3825-003-Q1-N6-E8
agaagggaaaaaaggcaatgcattaaaattattactcataatcacaccttttaaaataaaaactttctaaacatgacaaagaaacaactacaagtactattagattgctagtagtatttgtaattttttgtactttgaattttgatccttattgttgtaacatggatatcgcatttcaaggaagaagatgatgttttataattcatgtgtcaacttcaggctttctttttcaaagccgacgttggtccgttggccatggttttggaagcgttgggggattccgaaagcagccctcgcagtatggctaggaacccaaatcctataaaaggcgagtacatcgacgccagtttacctgctgatggtttgtcggatcccagcatgtctcccaccatagctgtcgtggaggtaacaagagcagaaccgaagagaggcaggtggtgttgaaccagggcttggaggtcaacaagccataagtgttaagtatagcaagcggcaatactaaaacaagctccaatttcataagt

SEQ ID NO: 1520 - DNA, 480 bp, Gossypium hirsutum
  Clone ID: LIB3825-003-Q1-N6-F10
gggcaaaaaaaaaaactcattggtgggaagaaaatcctcataatcttcaaactggtagggatagcttcttaagcagtagaaagcttcctagagaaaacaatgtacataggatctgggcgtcctggattaggagatatttcaacagcctgtagacaaaaatgaatttcttttaggctcaaattaatggccaccataaacttggatgcttttaaattggatatattcataatgcacgttttcacatcaatgcaaactggcaacccctagtttccatttggaaactttggggcttatcttaaaatatttgcaacagcgtatatagagttaaaaaattgccggctaatggttgtccaaaaaacacttggggggggaagagccttttatgagacaaaatattaaatactggttacctgaggagggtcaaatccccccgcataatggaaatatgacccaacaatcaaagcatgatcggggtcacca

SEQ ID NO: 1521 - DNA, 480 bp, Gossypium hirsutum
  Clone ID: LIB3825-003-Q1-N6-F11
cataaaaaaaaaccccattaaccataaaaagagggctcctacaaggggcctcaaccccataaccatccataaaaaattaaaccttttgcaaaaggataaatccacgtcctacctagtagagtaaaaccagccaacccagtaaaacaggggttcaggaattaaaaaaaaaattaccaaaacatgaccctactttgacccactgttttaaccagggccagcggtttttttcacatcgacaggaaacctatcctcctgaccacaacctaggtaaaaatcccccatgaaatccaaagggtatcccttctccgaaccttcagggggaccaacaaattaaagtttcaccttccctttcctttaaaaaacacccttttaataacaaccacctggttactattggggtaaccaacaaccagccaccacccttaattttttgctttggggtccctggaaccataaactggcccaacctttgtcttcccc

SEQ ID NO: 1522 - DNA, 464 bp, Gossypium hirsutum
  Clone ID: LIB3825-003-Q1-N6-F12
aataataaaaaaaaaaaaaaaaaaaaaaaagggaaaaaaaaaaaaaaaaaaaaaaaaaaaaaaaaaaaaaaaggaaaaaaaaaaaaaaggaaaaaaaagaaaaaaagggggggggggaagaagggggaggaaaaggaaggggggggggggaaaaaaaggggggggaaaaaaaaaataaaaaaagggggaaaaagggggggaaaaaaaagagggagaggggaagggaaggaagggggggaagggggaaaaaaggggagaaaaaaaaaggggggaaaaaaaaaaaaaaaaaaaaaaagagaaaaaaaatttttaaaaaaaaaaaaagggaaaaagaaggaaaaaggagaaaggggaggggaaaaaaaaaagggaggggggtagggaaaaaaagggggggaaggggggggagggtgggggaaggaggtttttttggggttgggggggggagggtttgaagggggggg

SEQ ID NO: 1523 - DNA, 507 bp, Gossypium hirsutum
  Clone ID: LIB3825-003-Q1-N6-F2
gaacatcgaagttgacgattcataatagcgtccaaagacaaacttaaaatattaaaacaaagatctaatagcagtaacccatgaaagttcgaaaaccacatagctaataataatcccagataagcttccagacacattatttaaaaccaaaaaaaggccaccaacaacggcaaacaatccttacctaaaaaccaccgcgaaggcgaaggacaagatgcagagtagactccttttggatattataatcagccaatgtcctgccatcttcaagttgcttgccagcaaatatgagcctttgctggtctggggggatcccttccttgtcttgaatctttgccttaagattgtcaatggtgtctgaactttcaacctctaaagtgatagtctttccagtaagagtcttaacaaagatctgcatcccaccacgcagccgcaacaccaaatgaaggggagactccttttggatattgtagtcggccaatgtcctaccatcttcgagctgcttgc

SEQ ID NO: 1524 - DNA, 535 bp, Gossypium hirsutum
  Clone ID: LIB3825-003-Q1-N6-F3
ggctaaaaaaatgattgcactaatactacaactgaggctattcaacaaaaccctaaactacatttaaacaaactatcatcatagctgtcttcttcataccccgactacaaaatctattaggctgtctagttctaactaaactaggaaaatcctatttaacatgaaacatgttcacaccacataccgataggtaatataacgaccagcagtctcgctaggcctaattatcttcaccacttgtccacgcttcagcccgtagtatcttgcgatcggatcactcacctggatacgcggcagctgtgtttcctttacagtatatctctgcagcaaagtctttttctcctcggtagtaagcacctgatgctccggaacaagagaatgttcttttacattaacaaggagctccgtttcctggaaaacctccaagtggaatttggaagaaatttcattgatacaagtccgagcaaagggagtcaaattttgttgcacaaccagtatagccctaaatacattctccgatttcatgcggttggta

SEQ ID NO: 1525 - DNA, 572 bp, Gossypium hirsutum
  Clone ID: LIB3825-003-Q1-N6-F4
tcgcgatctattgtggttcaaccttgtgttggtatttggagtgataaatgcacttccaaatatggtagaaggcggccttttatccttgctggagcgctcatgatctctcttgctgtgataataatcgggttttctgcagacattggatacttattaggtgatacgaaggagcagtgcagtacatttaaaggtacacgaacaagggcggcttttgtctttgttatcggcttttggatgttggatcttgctaacaatacagtgcagggaccagctcgtgcccttttggctgatctatctggtcctgatcaacataattcttcaaatgctatattttgctcgtggatggctgttggaaacatcttgggattttcagctggtgctagtgggagttggcacagatggtttccattcttggaaaacagagcttgctgtgaagcctgtgccaatttgaaagcagcatttcttgttgctgtagtctttctcttgttttgtgctgttgtgactgtatgttttgctaaggaggttccgcttccactgccagcagatcagccaactcgtttatcagattctgc

SEQ ID NO: 1526 - DNA, 423 bp, Gossypium hirsutum
  Clone ID: LIB3825-003-Q1-N6-F5
aagggggaaaggaaaaaaaggggaaaaaaaaaaggggggggggaaaaaaaggggggcgcccattttttttcaaagaaaaaaaacttaaaaaggccaaaaaaaattttgggaaaaattgggggaaaagggggggggccccgggggtaaaaaacccccccgtttaaaaaaaaaaaaaacttcccatcctttgggggggggggggggggaaaaaaaaaaaaaaatttattcaaaaaaacccccccggggaaaaaaaagggggttaaaaaacccatttttttaaaaaaaaaaaaaaggggcccccccccccccaaaaaaaaaaaggtgggcccaaaaaaagaaaaaaaaaggggaaaaaaaaccttttttaaaaaaagaaaaaaaattttttggccccgggggggggaccccaaaaattttgggaaa

SEQ ID NO: 1527 - DNA, 522 bp, Gossypium hirsutum
  Clone ID: LIB3825-003-Q1-N6-F6
gattataattatcctattttataatcaaattaaacagccagttcaccacctacatatcaaaagtcaaaacacagatctcctacattaaaacgtcacattaactaacatcgaacttcactacatcccctactagacagttagcagtcccacaatgccagaattcacataaaacagccaccccaacaaccatcgtcaaggccgtgctcttttgttgctgcaagatgggcatttgtactgcttaatatgctccgcccttgctggtgtaatcttaacacactttccatggaaccatttctcacagatatcacagcaaatccagaattcatcagcagcataattctttccacaagccccacataacgtctctccatgctcctcatcgttttcgtcttccatgccatcttcaacctcatcctttgatgctgctgccttcgaatacttgggctgagattcaaaacctcgcttaaagtttgatttaaatttgttgctgctatgatttgaaactgacgatttctcctttgt

SEQ ID NO: 1528 - DNA, 494 bp, Gossypium hirsutum
  unsure (1)..(494): unsure at all n locations; Clone ID: LIB3825-003-Q1-N6-F9
aatactaacaataaaattaaattccataataatggtgtgactaacaattcattaaaccaaatattttaaancctgaaaatccactaaaggaagatctgcaacacaactgtaatgataaaccagaaatgagttcaacagaaagcttttggagagaacttaaaaatttgctggatagttgagagtctaggctgatccagagaggaaagctcttccaggttgacgattagccaaaggaccatgacatccaagaagctttgcattgacaccgtctggcatgatcctgttctcagacttccacttcagataatcagcacggttgtacttggtaaatccccatgttctgcgtatcaacaagatgctttcatgtgccggtgctgataggcttcaaaccggaatgaggggtgcttttggaaaacctcaaggaacatgtgccagagttgacattggtcaggttctgctctctgttcgntgcagggatagcancagccatcatg

SEQ ID NO: 1529 - DNA, 551 bp, Gossypium hirsutum
  Clone ID: LIB3825-003-Q1-N6-G1
aaaagaacgattaaacattgttataaatattatcttattcaaagcttctgaagtgtgaacactaattaatatatttttatagtttgagtgattaaaaaaaaatctatacttgtagaataacacaaaatatacatgcagctgcaagccaatcaatctcagaaaatatttgtctgtaaatcttgtagttgaaggtgtgaaagttgatcttccttgagagctccaggaacatcaagctgaggtggattcatgcagcgcacaagagcccaatttacacctttgaagaacgggtgtcgcttgatttcattcgcaccttcacgccaacctaatctgctttttggatctctatctaataatcgaaatattaactgctttgcatgcagacttacttgtgtgcttcttgggaatttaagatcttttcgaagaacattggcaaaagtcttctgtcttgtccttcccctgaatggtgtatatccatacaacatttcatagacaagaatgccaagtgcccaccagtccactgcactggtatggcctgcaccagtgataatttc

SEQ ID NO: 1530 - DNA, 522 bp, Gossypium hirsutum
  Clone ID: LIB3825-003-Q1-N6-G2
atggagactattattatgcctctcatgcagccaatataaattaccacaagttttcacaaacaaaaatctagcaataaattcactacaaaatctgtcttagaccaatgaaactgcactcaactgatcttaattgaaaaaaaaaaaaaaaccattccgcaaagaacacattgcagaatgttgaatgacaaaactagcaaatcctcgtgattcaggtatcatttcaagatgaattctcctttttcaacttcgcgagttcttgcctgacaaccccagccctcttgatcttagctaacataagcttgaaccgatcaaagtcgttgagagatgctcttctcttctgaacaatcaactttcgaccccatgagctattctcccacttgttcttaacatcggccttctccatagcttcaatcaatgtcttcttctttggaacacggggaaatgtcgattgtgatatctgtcaatgtaagcctcttgaagttcatttggcctctgaccatatctggagcatcaacaagtgct

SEQ ID NO: 1531 - DNA, 517 bp, Gossypium hirsutum
  Clone ID: LIB3825-003-Q1-N6-G3
ggataccaatttttatgataatctttcaaaaccacctagttaattatttctaatttacaaattcacgatcacagacactatttcaatcattggtaaaagatacaaatggatgagtagatttagaagaaagatcatcttgacttgggagaggagtctctcaatctgggaactttaaacgtagaagtgaatagatttggagtttcagaaatacgaatttcatcatcctttttcctcttcgaacttctgcttccccttccattgtccttcagagaatcatgaacatgtggagcggagcttcctttcttcatgtttacgctgcatttgttgccgccgccattctcgtctcccaaaacagttccttccctagctgtacaatgttttattacaggcgtatgagatgaacttctaggcttccttaagaactctacctgcctcgacattttagaaacttcatgaaatctacttgcatcagcctccttttgagataattcggattttaatatctggatcatttcat

SEQ ID NO: 1532 - DNA, 539 bp, Gossypium hirsutum
  Clone ID: LIB3825-003-Q1-N6-G4
ctgaaccaaggaattatttttcttaactaagtgagatacaacaataaattaacagacaagaggggttctctgtttttctccaatgtagaacttttctatgaaaacttaccgcaaaaataaatgtttctccaattttccaacaagggatgggcctttatgctacagcttcacatgaccaatgcctcctctaaatgaaccataaagaggttgagatcttctaaagctgaagatatcatcaatttggatggtatttggtttaactgcttcgcttttctgcgagtggtattcggccaaatgttggttcccatgcacttggacgctaagtgttttctttcgagttgcaccgactttcacattttcattgaagaattctatcagttcttgttgtgtaagtttctttaatgctgcaacctcagcttctctccgatcaaacttgagcgtcccgtcagtgatctctcgccagtaaaaccgagattcttcccttaaattcttgtgcttctcaagcttcatatcaatcaatgcatttacattgctcttaa

SEQ ID NO: 1533 - DNA, 520 bp, Gossypium hirsutum
  Clone ID: LIB3825-003-Q1-N6-G5
aaataaatcttttttattgataattggacatataaatattttctttcattggtacagtaaaatttgttttttgataagaattgataatggtaattacgaagtaatatattttaggatttttcagctggggcaattgcctccgttgcctcatggttaatccgtcttggcagaccgttttacttctgctggtgttcttgtagactgaactcagaatccagcaaacctatacaataatcccactttgccatgcaggatataagccaaagccctgagtggaagccaatcagctctcaagtcttcattttcatctcaaatccctcgagtgcagctactgggaaggcaaatccaaatcatgccgccatttagcagcaacatttttgaggatatgaactgtttctagccttgttgatgcaaattgcacttcaacagatgctgtgaaacatcgctccaaccagggaagtttctaaagtcaggttctattccattgccattgatgtccaaatgatttggtgttacataa

SEQ ID NO: 1534 - DNA, 543 bp, Gossypium hirsutum
  Clone ID: LIB3825-003-Q1-N6-G6
ggaaacactggcataaaacactttcacataaaaacccaaactcaaaacataaacaaccgtcatccaaactccaaaacagtaccatatctgaaatttcaaacaaaatttctagcttaaatgtgctttaacagtcattgatgtcaatataaacgccaaaacaactagtagtatcctattaagccttatcggccttggcagcagtggcagcagcttgtcctctgagcctaccagtcctccttgcagcaataagaccaaccttttgtccaggtggagcatcacgtctaactgtactagcatgaccaatgtgttgatggttaccacctccgtggggatgctcaactgggttcatagccacaccacgaaccttaggccagcagttcctcttcactctatacttgtggaaagcattaccagccttaagcagaggtttctcagtcctaccacctccagcaacctgcccaatcatggcacgacaaccacttggaacaatcttcttcgaaccagatggaagcttgatcctggtggtgtcgttatcagggttga

SEQ ID NO: 1535 - DNA, 554 bp, Gossypium hirsutum
  Clone ID: LIB3825-003-Q1-N6-G7
aataaaccaaaaatttcctgtcattactccttttgtcttttttcaaattcattgttccagttgtgcaggtaaacatttgactatgttttatgattgaataagaaactgacatactacaaccggtaaacggtaaacaacaccgaccaaaactggaaaatcgtatcgtaaaatttacgagtgcattgagtttaataacttaagagcaagttcttcttgttctgccagagaaatggattcggccttgatactcgccgatccagccttatcttcttccttttcaccgtcatcgctatcactatgaaagtatattttcgatcttttccgttttctgttcgcatccggttctccttctgaacctgaaagatcatcctcctcctcttcaccatcctcttcttccctttgccctttcttcaacttcatcttcttcttgatccgtttctccctaagccgttgccgctctagaagtttgtcttccttgtccacctgcttcagctcttccctcattttcttgtagaaatcattctttttgtcttggtcaagcagtatatcgccac

SEQ ID NO: 1536 - DNA, 483 bp, Gossypium hirsutum
  Clone ID: LIB3825-003-Q1-N6-G8
ggcaaaaactataatttttcaaaaagaatgaacaaactatacatcttttagtcttacaggaatggttatatggaccctaaaatattcatccattgccaatggcatctccaacctgctgtaatttcttgctaattcgatacaagatggttctaccaaataaaaaaaaaaaggaacatatgaaacaaagcattatacaacattttgattgcaatgcaacccctaatctaaatttcttaaaaaaaactctttccatcttttctttttccgcctcctaactctgagtttgtccgatcatgtgtatataatataaaaaactcctcaagctccagcagcttttcgacaacttccatattttaccgatatcacatgttcttcgataaaaatcgtaagcggcaataccaggaaactgtcatcagttcaatgagcatcactgtcctatcaatcattatggctcttagccatcaaaataatcatcaggctcaa

SEQ ID NO: 1537 - DNA, 551 bp, Gossypium hirsutum
  Clone ID: LIB3825-003-Q1-N6-G9
aagaaagtcagtaaataaattattgaataaattctttttacttattgacaatttagtcggttaaaaaatatttctttaggtacgattcagagaaaagtatgtgtcaattgctatccgtgttttgattggaaggcgtatcatccgtgttgcaattggaatacacatcatcatcaacttgacccgaatcaggttgacggaaagcccgacccgaacccatcatgctagccaagctagcaaaagcaaaaaccgactgcaaaaattccaaaccattgatctccccaccctcaattcttcgccggccaccattaccctcaccacctcctatttcagccgtctcaggcagcatcaagaatcgacaaaccgggcataacccatggatcaacaaccacttctcaatacaacccgaatgaaacacatgcttacatggcatctcccttccttcttcttcaacttcaaaatcttccaaacaaatacaacaatctttgccactctctttcacttttatcctcggcattgcttctatggaagctttggaagctggcgccggccta

SEQ ID NO: 1538 - DNA, 560 bp, Gossypium hirsutum
  unsure (1)..(560): unsure at all n locations; Clone ID: LIB3825-003-Q1-N6-H1
aattcaacttctagtagattacaaacacggcaaaatgaatacaaaagtaggggctaaagcaaactttttttcttgcttaatcctctcccaagttttttgttccatcattggcatgaataagaacaccaaaaacataccaacatatcataaccaatccgaattcataaacattcggattttacatacactggcaaattgctttatgtaagaaaaggcaaccccccatgcaaaacttctaatgggaactgccttccaaatgggttagataaaacatctacagttgcctggaaccaaaaacaaaagttagtggaatctccaaaatcagctgctttcaggttattcaaacgacacccattgttactgttttcctttctgcatcgctacaatggagatttcagcaacttctttagtgctattactatnttaccaaaagacggccgttgagcgggatcatcggcccaacaagattccatgagggaaaccaatttgggggaggtgttcggaggaatggcaagcttcctattctggaaagctacagaaccaaccacctgggcaggact

SEQ ID NO: 1539 - DNA, 544 bp, Gossypium hirsutum
  Clone ID: LIB3825-003-Q1-N6-H10
atcaccaggcaatgcctgggtagcaatttatttaatagttataacataagaaaataagccgttttaattataataatactcttcctcctcttcccagaggcaactcagagttgatctaggtgatccacatcccccaatgccgttgaagctctggtaaatgatggaaccgcctgaaccaagctcttcgatgctactctcccggcaatggtatccttcaacagccagcagacaggtctgttcaaatgagtgacaatcaacatccacatgcacggcaacagagaaattacttggtttgaagcaaactaaaaccctttgcaccaactgctccagattcaactctttcagatcatagcccacagcttcgaagcttgcataactaaaaccgtcttcgggtgtaacatgaatggtcgaaatagcatcggtttcgattgaattcatagaataaccacaaggttcgaactcaaaatcgcatatctcagagtttggaagtatgttccttatgccagacttcatggtcatcgaagctgccgaggtcgattcgtct

SEQ ID NO: 1540 - DNA, 561 bp, Gossypium hirsutum
  Clone ID: LIB3825-003-Q1-N6-H11
ttttttttttttttttttttttttttttttttttttttttttttttttttttttttttttttttttttttttttttttttttttttttttttttttttttttttttttttttttttggggggggaaaaaaaatgggaaaaaaaggggggggccctttttttattaaaaaaaaaacaaaaaaaaatttaaaaatttttttgggcccccaaaaaaaaaggggggggggcccccgggcccccctgggttattaaggggtttttaaaaaaaaggggtttgggccgggcccccttaattttatggggaaagttttggggtttggaaaacccggaaaaagggggggaaacccaaaaaaccttttttttagcccgggaaaaaaatttttccccggttttttgggccaccgaaaaaaggtttcttcccggttcttctttttttccacccaaaaaaatttcttggggggcccccgaaaattcttgttaaaaaaaaaaaaaaaatcccaaaattttttttgggggggccctttttttttttaccacccaaaaaaaaaaaaaagccccgggg

SEQ ID NO: 1541 - DNA, 489 bp, Gossypium hirsutum
  Clone ID: LIB3825-003-Q1-N6-H2
ggataaacactagtttcagaatttcacctttatttgtttttccaatatttacaatttttccatgccaacctacagtacgtgtgttagccctccatggtcccttaaagcacaggggcataagaccattttcgcgatgccagaaatcgcaatttggacctccaagtgatgatgttacttttgggatgctagattcctaaacaaaattactcctaaaccaccaattgctagagtaaagatcagcggaacaccaatagtatcaacatcaattgctctgtttgatcgatcgttcctttcttggtgacatctttctccccggtattcatgtatcaaattgctcaaattgtctaactgatgcataatctggcgttgtgctcttgcaataactagaacctcttccatgagtggggactctttagccaactgggaagaagatgaagaatgaggctttagtgaaccagttagtgaaccattacccaagccagttaccaa

SEQ ID NO: 1542 - DNA, 557 bp, Gossypium hirsutum
  Clone ID: LIB3825-003-Q1-N6-H5
agagcaaatatatattttttcaaaattttacactcttctggaaaaatgaaaaataaaacagcttttctctgcaagagagttgaattactcgtattaaaagaaaaatagaacaaaattatgcctactgcatcaaatttctgcatagcagcctgattggacacacccagagaactcatcagggacatcgagtttctccaatttactatgttgcccttccttcatttccaccatgtaatacccatgaggtccaccttgataccccgaccccgtaaccaaaacccgccttcccagcgagatcccacatgctccgacccgaaccgctgggctcaactctgcccaattcaccaatttcccatctttccccatccccacgcacgatctcgggcaccgaccaggttcccaaaccccttcgactcgcctccactgccccgattttaacccgtagacgtcggcgctcccatcaaattgaccttggctctccgttctgtacccactcacgacccagaactcgtcttcctcaatctccactccttcacactcgtctcgctcttcactca

SEQ ID NO: 1543 - DNA, 74 bp, Gossypium hirsutum
  Clone ID: LIB3825-003-Q1-N6-H7
acgtagtaccttttggaatatgacagggacagggggaatctcgttaaaccattcatgcccctcactaattaaaa

SEQ ID NO: 1544 - DNA, 354 bp, Gossypium hirsutum
  Clone ID: LIB3825-003-Q1-N6-H8
caaacaacaaaacccaacctggggaaacgggcaaaaaagggctgccggggcgaaaaaactttatgaagtcccgggggcgaaagcttaagaaaccctcccaatcgggggggcccaacaaaaaaactatcccggggccgaccaaaaccccgggaccaaaaaccccgcaattggaagataagtaaaccttaagcctactaatgcccaaagccttctaaggggccgggggaaaaggaattttggacctggctttccaaataggcccagcccaatcttgtagtttctttttcgaaagccagtcttgcatggatcttgcccgctgccttaacaaacaattttaccatatcaggcaactta

SEQ ID NO: 1545 - DNA, 593 bp, Gossypium hirsutum
  Clone ID: LIB3825-004-Q1-K6-A10
cagcagcagcagcagcagcagcagcagcagcagcaagaggagaatctcttgttcctatttcacttcgttctctttcttcttctttttctcgtatcattctaaggattttttcaaacagtcggtggtgttctgcaattatcgagggcaaaaaaggtgtttgtttgtttatttatttgttgtttcctgtcatggtttcgaggtcttattctaatctcttggaccttgcctccggtgattccccgagtttcggtggggagcgaaagaggtttcctcgagtagcgaccgtccccgggctattgtccgaggttgacgatgagacctgcaacagtgttggctctgaggctccttcttctgtttctcaagaacggatgattatagtagggaaccagcttccactgcgagcacatcgaaacgaagacaatggagaatggtgctttagttgggacgaagattcgcttcttttgcaactcaaagacgggctcggggaagatgtagaagtcatctatgtaggttgtttgaaagaacaagttgctctgaacgaacaagacgatgtcgcccaaacattgctcgaaactttcaaatgtgtccctgca

SEQ ID NO: 1546 - DNA, 585 bp, Gossypium hirsutum
  Clone ID: LIB3825-004-Q1-K6-A11
cggccgcgtgggcggacgcgtgggctcaacgctctccttctgtttctggtcaagccaatctcaaaagactccccttttagctcacagctcctctcttgagtactataatgggtaaggagaaggttcacatcaacattgtggtcattggccatgtcgactctgggaagtctacaaccactggtcatttgatctacaagcttggtggtattgacaagcgtgtgattgagaggtttgagaaggaggctgctgagatgaacaaaaggtcatttaagtatgcatgggtgcttgacaagcttaaggccgagcgtgaacgtggtattaccatcgatattgccctctggaagtttgagactaccaaatactactgtactgtcattgatgcccctggacatcgtgacttcatcaagaacatgattactggtacctcacaggctgactgcgctgttctcattatcgactcgaccactggtggtttcgaagctggtatctcaaaggatggtcagacacgtgagcatgctttgcttgcgtttacccttggtgtcaagcagatgatttgctgctgcaacaagatggatgcaacaactc

SEQ ID NO: 1547 - DNA, 596 bp, Gossypium hirsutum
  unsure (1)..(596): unsure at all n locations; Clone ID: LIB3825-004-Q1-K6-A12
cggccgcgtgggcagttatcaataanaaattcagcagttccaatatcttgattcactaaaaggaagagatcctaatgtgctgagagcactggcaaaatacttcgttgaagaagtgaaggacaagagtgggaaggacattggatataagttcttgggaacaagaatttgttgaagatcttcctgcacaggagaatgggttagattgtgggatgtttatgttaaaatatatcgacttctatagcagaggcttaagtctttgtttcgagcaggaacacatgccctattttggtttaaggaccaccaaggaaattctcaaactgaaagctgattgatcgaatgtgtttgccgcctttcatcaactacttttgaatgtcttactaggaattgaaatagtgtgcaaagagattgctccttatgatctgatcttccgatataaatactggacaaagtatggatatttcctacacaaggagaaagcagtatagtgtaaaatgccaaccatgagattgcatggcagtaaaccattgttaaaaaagggttggggtttgactggaaataataggtgaatattggtatatatattttcaatattaaaa

SEQ ID NO: 1548 - DNA, 585 bp, Gossypium hirsutum
  unsure (1)..(585): unsure at all n locations; Clone ID: LIB3825-004-Q1-K6-A8
gttgtgcaagatgaaagccanatggnaggcttaccacacgactgctcaagagtcatggtttgggagctaaatgttgaatcacctaattctttctatcccaaaaaaggtcaatgaagaataatttggacatcattgctccactcgcatgaaactcaatatgtcaaaggagttaattttgatcatcaaggaaagatggccaagaattgtatttaactgccatcgaaggagacttgaaactcaactgatacctaaatcaagtggaagagcattaccaataccttgttgcagtaaaacagagtaatctgcagacaagtgtaaacaaaaccttcgtacggtatctcgttttcccgtttctgcattgcccgttgagagcatttcgtgagactagttgggaaggatggtcaaatggaaagcatccttgtgtaatgctgactgtaatgttattactttgactctcattctcgttttagctaatagctatttttttggaggtaacaaaatgtgattgaccaaaatttgctttcaattttactccatcttcgctttggatcagtgatccaaatagcggggtcgaatataaggaaa

SEQ ID NO: 1549 - DNA, 578 bp, Gossypium hirsutum
  unsure (1)..(578): unsure at all n locations; Clone ID: LIB3825-004-Q1-K6-A9
cttcttcttcttcttcttcttcttcgctcctgtagaagtttatttgctcttcaacaatagaaaaaaataaaaaaagctttcctacagcagcgctcaagtttttatcaatccagagtttgaatttgaattgaacaaatcaatattaagaaagagaaatggctcgctctctctccaacgctaagcttttctctacttttgttgtcgatggaatctctaacgttatctccagacgaggatatgcggcggcatcacaaggaattgtgtcgagtggaataagaggaggagcgggaaggagcgctgctacggtggccaagaaaacaggggaagagatgtctcgcggagctaaagagaaggtttcgtgggttcccgaccctgttaccggatgctacagacccgagaactgtcccaatgagatcgacgtggccgagctcagatccatgctcttgaagaagcactaaataaacaagggtgacctgggtggcttgcttctctttttctttttggtcgacgaaatagaatttaagaattggatgatgtaatattaataataaataataggtcttaaacaattnttaatc

SEQ ID NO: 1550 - DNA, 596 bp, Gossypium hirsutum
  Clone ID: LIB3825-004-Q1-K6-B10
caggcctccatgcagaaaggtggaccaaatgaagacagggaccctaatgagaaagagatggcgagggaaaggaaagaagagagacaagaagatgcagagctgaggaaacaagaggcccgccatcataacgccacggctggccatgctggtggtggtggtattggtggtactggctacaccacagctgggtacaacagaggggatactggtggctatggcggtaccggtggacatgacaaccgtgggtaccccaccgcaggtagtgggtatgatacaggcaggcaagatgacctcagcagtatggggtttggcggagatacagggggtgcttacggtacaacgggaaaccaagacttcccaagtgcggcgcctaacaatgctgggactagaaggagcacccgcggaggtacccaggatgatccttattatcgatcctattaaatgaaaggagcgactttttgtgctctgctactgccttgagtctgtgtttgttgtttgtttgcttctactttttttctttttcaagttcgtactgttgtaccatataaagaaaagtttggtcctgttgtaatgttcagtgttagccagggcagttc

SEQ ID NO: 1551 - DNA, 566 bp, Gossypium hirsutum
  unsure (1)..(566): unsure at all n locations; Clone ID: LIB3825-004-Q1-K6-B11
ttcattttagtgaaggacagnaaaaaaatttaaaaaaaaaaaaaaacctctgcagccatggctgagcatcgccagcaattgcgccaactgatgaatgaagaatttcttcctgaaaaggaccctcaacatcaaaagttcttacggttgccaccctccttcctgttggtggcacccttctcttgcttgctggtttgagccttattggatccctcataggtcttgctattgccgccccacttttcctgattttcagccctgttttggtacctgctgctcttctcattgcgggttccatagccggattcttgacctccggagcatttgggatcactggactgtcatcgctgtcgtggattgctaattatattcgtggaagcaggagctctatgtctcaggggctagacccagtgaagtggcccttgccggacacggcagtgagtatggagcagaagatccagaataggagccaaggaggaggaaggatctctgagggaggcagagaacaggaaggtggcaagagtacgacacaagaaggtggcaagagtaagacacaagaaggtggcaag

SEQ ID NO: 1552 - DNA, 265 bp, Gossypium hirsutum
  unsure (1)..(265): unsure at all n locations; Clone ID: LIB3825-004-Q1-K6-B12
gcgttcgcaaaaccccattattagaaactttttccgaggaacagagaaaatcacctgttagattgttagatatcagaatggcttctgatgggcagcaacagcaggtacctcctcagaaacaggatgcacaaccaggaaaagaacatgtcatgaatcctatccctgagtactacagcaccaactaccagccttccaacaagcttcaagggaaggtggcattagttactggaggggattnngggattggccgagcagtttgccacag

SEQ ID NO: 1553 - DNA, 605 bp, Gossypium hirsutum
  unsure (1)..(605): unsure at all n locations; Clone ID: LIB3825-004-Q1-K6-B7
ccgacttctcttttttncttggaaaaaaaagttttcctagaaaattctgtttagctctagatgataaatatcgaccaagaagaaacaagtagcgttagagaaatcagaccaaaagcagaagaatcatgggaggaggaggaccagatgatgaagatgatgaggatgaggatatgaagtggccgccatggctgagaccattgcttcaaacaagcttctttggtcaatgcaagctgcacccagatgctcataagagtgaatgcaacatgtattgcttggaatgcatgaatggagcgctttgttcactttgccttgcttatcacaaggaccatagaaccattcagataaggagatcatcgtaccatgatgtgataagggtttcagagattcagaaactgatagacataacagggattcaaacatacataataaacagtgcccggatagtgttcttgaatgaaagaccacagcctaggttgggcaaaggtgttacgaatacctgccatgtctgccaccgcagcctccttgattccttcaccttctgctctcttggttgcaaggtggttgggacatcgaagaagttgattaagaaaggaaaattatccaca

SEQ ID NO: 1554 - DNA, 564 bp, Gossypium hirsutum
  unsure (1)..(564): unsure at all n locations; Clone ID: LIB3825-004-Q1-K6-B8
gtttttgttctcgatgtagattgctcattatgaaaaaanagatagatgtaatacgagccaaagacattgcacaaggtgggttgacacaaggccagcaaactcagattgctaggaatgaacaaagaataacacagatactggaggagcttgaaagcttggaagagactttaaatgaaagtatccgtgaaagcataggtgcacgtggtggaacaactcgtggtaagcgaaaaggagggccagacgatgatgaagaagacttttcaagtgatgatgatgaattctatgaccggacaaagaagaaacctactgtgcagaaaattggtgaaacacagtctattgaaactgctgatagtcttcttgataagagagatgccattaccaaagaaattgaagacaaaaaagagttgctgttgactgagaagaacaaaatggcctcagatactggtttagaaactgaagctggagatgcacttgatgcttacatgtctgggctttcatcccagttagtgcttgataggacagtgcaaattgagaaggaactctctgcccttcagtccgagttgg

SEQ ID NO: 1555 - DNA, 584 bp, Gossypium hirsutum
  unsure (1)..(584): unsure at all n locations; Clone ID: LIB3825-004-Q1-K6-B9
ccccgcgtccgcaagtaaccggntcaggagcacatagaagacgaggatgccgcccccgccgaggaagaagacccggagctcaaatcgcccctatcatcaagctcgaggaagtcgccgtcagcaccggcgagggaaaacgaagatccgatactcgatctgaagtcgaagctctaccgatttgataaagaaggcaatcaatggaaagagagaggcgctggtactgtgaagctgttgaagcacaaagagactggaaaagttcgccttgttatgaggcaatctaagactctcaagatctgcgccaatcatttagtgttgccgactatgacggngcaggagcacgcagggaacgacaaatcgtgcctgtggcacgcttctgactacgctgntggtgaatnnaaagatgatctgttctgcattcgttttgcatttgtggaaaaatgcaaaaccttcatgcaaaagttccaagaagttgctgtaatacaaaaaccgaaagaggaaaataaagatgcatctgctggctgctgggactgctggaggaagttggagcgttggatgaaaaagaagaaccgagggataaaagctgg

SEQ ID NO: 1556 - DNA, 602 bp, Gossypium hirsutum
  unsure (1)..(602): unsure at all n locations; Clone ID: LIB3825-004-Q1-K6-C10
ngaacagnaaggcaacaccattccaacatttttattttatctaaaatgataaaatatttatctttccattcttatctacttgttatacttagaaattttggatcccaaaattccaaaagagcaaccagccatgactttcttttctaccttaaagatcaaacagtaacaaagatgaagaaacatgcaatctattacttaaaaatttaagcaaatttggttcctttaggtgttcctgtagatgggttgttgttataaaattttgttttttataacaaaatgaaacagagtcaaaagaaagaaagcgtaaagcactcgaaatcacctttcaataatttggttgcttttttactcagtatgtgtaagttcgacagattacattcgatggctttttatagccggaaaaataagaattaaaattacaaacaatctatttccattttttttttttttgctatttttcccttgtattctgttattgctgcttcttgtgtattctgttgcaggaatgatcgtacggaggaagtcgttcatggcgacgtanaggccgtgcgtgggaaaccgatcgtgggaggcggatcctctggcgctactctagcgtattc

SEQ ID NO: 1557 - DNA, 632 bp, Gossypium hirsutum
  Clone ID: LIB3825-004-Q1-K6-C12
aagctggtcacgctgttacggacaccggccccggatattcccggtccgaccaaccgtcgcgtcggagttgcgtatccttattgaactcaagtgagaagctattaattgcccttcaaccataagatggttatgaatgggctatctggagacacaatgggatctcagctgtgtccctcttgtgccattggtgcaggatcgcatacaaatataaatgacctctcggttgccactaccactctttggtggagaggatacctaactctaggatatttacccaatacgcatccttcatgagcatcaacatagtctggttacattagatgactctgacgtacagaacggtatatgtaccgatgattggatctcactcagcacttggaagccgcgcaagtccatgccatcgggactcgacaactgtgaatggcttgaatccaaggcagcctctaccttccaaagagcgtgctatggacactgtttctctgatgcttgatatgaatgagagtagaaatgggaagtcaagtatgaataagaacatagagcccgtttactcatcttactccgcaaaaaacgggtcagtttctacccaagattgatctcttctctattggacatccggacacccagaaatattg

SEQ ID NO: 1558 - DNA, 595 bp, Gossypium hirsutum
  unsure (1)..(595): unsure at all n locations; Clone ID: LIB3825-004-Q1-K6-C7
caacattcacttaggaggaagcgaanaacaaaatgagaggattaatgaacaagctagtgtcccgctctctctctgtcgccggcaaatggcagcaacagcaactccgccgtctcaacattcacgaatatcagggtgctgacttgatgaacaaatatggaattaacgtgccgaaaggagttgcggtttctactatcgatgaagttaaagaagcagtcaaatctgccttccccaatgaaaatgagttggttgttaaaagtcaaattttggctggtggaagaggcttgggaacattccaaaatggttttaagggtggagttcacatcgttaaggctgaccaagttgaagatattgctgggaagatgcttggccagatacttgttaccaaacaaactggcccccaaggcaaagttgtcggcaaggtttacctgtgtgaaaaattgtcacttgtgaatgagatgtactttgctatcactctggatcgtaaaactgcgggtccggtatgtttccaaactctgtagattaatctttatggctgctggagacgtcatttttgttcacctgattactttntgttaagattaaatgattctcctga

SEQ ID NO: 1559 - DNA, 565 bp, Gossypium hirsutum
  Clone ID: LIB3825-004-Q1-K6-D11
cttctctttttgcccccttgccttctctgtttatttacggatatagcattcaggttatgatagcttttagtgaccggaaacctgagagccgccgcaccgctcccgctctcggtttccctcgcgttaggttcttccgtttccggcgcttgaggcaatcgtcgactccgctccacccgtattcccaacaagaaaaaaaaaacggagaagagaagttcatttattacttttttttttattttcttctttatatttctcgtttgaattattgtataatatgacacttggaatatgccgaattccaaaaataatcgtaaggagcaggagaagaaccggaagggtaagttatctgaaaaggcgtcgtcgtttcacgggaaattcccgacggtggctccgtctgatctgaggcggccgaagacgctgcccgacctattctcagagaggactacttccgtcttaccggatgcgaggccgaagttgacgaagctgctgttgaacgtgaccattcaagggagtctcggagctgtacaagtagtgctgtcgccggaaaacactgtcggtgacttaa

SEQ ID NO: 1560 - DNA, 566 bp, Gossypium hirsutum
  Clone ID: LIB3825-004-Q1-K6-D8
tccaaccccaaccccaatcctgtttctcttttgcatcctttgtttctctcttcatctcctgcactacttgcaaaataacgagctgaagccgtgctacaataacactagtgttttcaacaataaattaatcatagccgcagcttgtttcttttaaactctaaatataaaggaggccaaacatgccgcctcgtagataccaatttgggagggctgatgaggccactcatcccgactccatgagagccaccttggctgaattcctctccactatcattttcgtctttgccggcgaaggctcaattcttgctcttgacaagatgtacaaggatacgagtgcgacgcctgcaagactggtgatgatagcacttgcgcatgggttgtctctgtttgcagctgtggcatccagtgtaaacgtatctggtggccatgtgaatccagcagtcaccttcggtgccttgctctgtggaaggatctctctcgttcgggcgctgtactactggattgctcagctcttaggttccattgtggcttgtctcttgcttcgcctcaccgctggaatgcgaccg

SEQ ID NO: 1561 - DNA, 598 bp, Gossypium hirsutum
  Clone ID: LIB3825-004-Q1-K6-E10
tccgagaaagaaagttttcctttgacctttgaggaaataaatattcttctttcatttcatcatccatcaattgtagatgttaaagaagtagttgtagggagtaaccttgatagcatttttatggtgatggaatacatggaacatgatctgaagggctgatggagacgatgaaacaaccgtttagccaaagtgaagttaaatgcctgatgcttcagctgctggagggtgtcaagtatcttcatgataactgggttctccatcgggacttgaagacatctaatcttcttttaaataaccaaggtgaattgaagatttgtgattttgggttggctcgtcaatatggaagcccattaaaaccatatactcatttggttgttactctttggtacagtgctgattttgcagggcccctgaacttcttttgggagcaagacaatattccactgcaattgacatgtggtctttgggttgtattatggctgaactactatcaaaagaaccacttttcaacgggaaaactgaatttgatcaacttgacaagattttcagaactcttggcatgccaaatgagacaatatggcctggtttttctatgttg

SEQ ID NO: 1562 - DNA, 586 bp, Gossypium hirsutum
  unsure (1)..(586): unsure at all n locations; Clone ID: LIB3825-004-Q1-K6-E11
ggagggtcaacggggngtgaaaaccggccattttggtgcagggnaagcagccatcgggcgtcgtgcgtgccgagggcgcacatgggaggggggtacggcgtgagggtgacctagggtttccattctcctaaacatgagtttaggtcttgggctaacaggcctaatgtgtaatgggttagtggtttaagttaatgggtctgtaaatggggttttggaaaaatgggccgatttaactttgtaactagacatttaatggtcttgggactttatttggttatttttggtttctaacgggccgggccaaaatagggctcttacacatgcaactgtcataccacttaatcggacaattttgtatttgtatgagagacataaaaagaaaaaaagaaagaaaaaaaaagtccaacagagctttgtccgaatctcacaaacaaaaagatacagacagagaaagagaatcaaagtttgagttttccccttttttttatttttttttctgacaaaagttaagattgttgtagaaaaaaaacaagaaaaaagaacccgaaccctgtttttagtttttttttttactctgcttgctctt

SEQ ID NO: 1563 - DNA, 316 bp, Gossypium hirsutum
  Clone ID: LIB3825-004-Q1-K6-E12
ctccgaattgatggcctgcacatctgcaaaggcaactcactccatttcactcaccaatttctcacctttgactcgccctttacgcccatcacgactcggacgcctcaactctttccactgcaaacctttgcttttctctcccctctccacccgctacaagcccctctttcttcctctgaattccgacactatctcgaaccgctgcgtcgctaatgacgaacacacccatactcatgagtctggccatgacaatgatcacttgtcatgacactcacctaccacaccctaccaccaccatctgtgtggttatgttcta

SEQ ID NO: 1564 - DNA, 600 bp, Gossypium hirsutum
  Clone ID: LIB3825-004-Q1-K6-E7
cccccttcctattttcactcttttcagtcctaaccaaagcggcccctcaactctcttctcctttagcaatatctttccccttcactgtttcaactcaaagaatggcggaggagaagaaggctcaatctgctggggtttggcctacggttaaaccttttgtcaatggtggtgcctctggtatgcttgctacctgtgtcatccaacccatcgatatggtcaaggtaagaatccaactgggtcaaggatcggcagcaactgttaccaagaacatgcttagggaggagggtgttggtgccttttacaagggtctatcagcaggactgctcaggcaagctacatacactactgctcgattgggatcattcaaaatgttgacaaacaaagcaattgaagccaatgatgggaagcccttacctctatatcagaaggctttgtgtggtctgactgctggtgctattggagcctgttttggcagcccggctgatttggcacttattcgtatgcaggctgatgctactttgcctgttgctcagcgcagaaattacaccaatgcattccatgcactctatcgtattgttgcggatgaaggggttttggcac

SEQ ID NO: 1565 - DNA, 584 bp, Gossypium hirsutum
  Clone ID: LIB3825-004-Q1-K6-E8
cagactttgagcaaagcagcctcatttctccaagaggctagagggttgaagaacatttgaagaggctcaatgcccccaggcattggatgcttgacaagcttggtggtgcttttgcacccaagccatcgtctggtccccacaagtccagggaatgcttgccattgatccttattttgcgaaaccgattgaagtatgctctcacctatagagaagtcattgctattctcatgcagaggcatgttatggttgatgggaaggttaggacggataagacctatccagctggtttcatggatgttgtgtccattcctaaaacaaatgaggacttccgtctactttatgacaccaaagggcgatttcgtctccatgccatcagtggcgatgaaaccaagttcaagctttgcaaggttcgatctgtccagtttggccagaaaggtattccatacttgaatacatacgatggtcgtactatccgttaccctgatcctttgatcaaggctaatgacaccatcaagctagaccttgaaagcaacaaaattgttgatttcatcaagtttgatgttgggaatgttgtcatggtcact

SEQ ID NO: 1566 - DNA, 276 bp, Gossypium hirsutum
  Clone ID: LIB3825-004-Q1-K6-E9
cgcgcatgaacataattatcacgtttactattactaggtaagattagggtctcatgtagagttaagatataaataacagttgcaatttgtcacgtgagtggttctagataacgtacggttgcaaacgctttttcgttatgagcattgccttactttgatgtttaagctttctctcataataataaaaaatttactctacttcttttaaaaaaaaaaaaaaaaactggctggcctgctatagagctattcaagctaacttactctcacatacgacgt

SEQ ID NO: 1567 - DNA, 577 bp, Gossypium hirsutum
  Clone ID: LIB3825-004-Q1-K6-F10
gccgatgatgcatcgaacgacatttaaagaggcgaatcatacctgttatgaggctgctctaaactgtccgacgatgcctacgtgatacatagaaagaatgcaccaggataaagacgcactgtgcctggttaagcatacttgacttctgacgatgaatctacactgccaggggaagaaaaccagaatcaaatcatggaaaggatatttctgaggagaaataccgactcaagaaatgatcaaaacacagcgggtggagaatatgggagtggaaatggtaaatatgggcagatggatacaaaatatggagagatacatttaaagtctggacaaaacacataatgaaggtggcgaaacgaataacagtgtgcaagcaaaaatcacatgagaactcaagtgagatcagatctgagtcagctgagggtggcaagaacactgatgaagaatgcagtgaatattaataaaacatgttgacaaagaggatattaacgactgaggaaaattacgaagagaatcaggatgagaacttaaaaccaagtgccgctgacaacacagcggaaagcgaggaaaacaatcaaac

SEQ ID NO: 1568 - DNA, 51 bp, Gossypium hirsutum
  unsure (1)..(51): unsure at all n locations; Clone ID: LIB3825-004-Q1-K6-F11
ggnacatttaacccaaaagaggaaaagngatatagttggataagtgtggng

SEQ ID NO: 1569 - DNA, 607 bp, Gossypium hirsutum
  Clone ID: LIB3825-004-Q1-K6-F7
tctgaacctaaaatctttagcttttcgcttcgaaagagaccatgttggtttaccaggatctcatctccggtgacgagcttctttctgactcattcccctacaaggaaatcgagaatgggatgctgtgggaagttgagggaaagtgggttgtgcaaggagctattgatgttgacattggtgccaatccttcagccgaagatgctgatgaggatgaaggtgttgatgaccaatctgtgaaggttgttgacattgttgacactttcaggcttcaggagcaaccccctttcgacaagaagcagtttgtcgtgttcatgaagaagttcatcaagaacttgacaccgaaactggatgcggaaaagcaagagtccttcaagaaaaacattgagggagcaaccaagtttttgctttcaaaattgaaggaccttcaatttttcatcggagagagcatgcacgatgatggatgtttggtatttgcttactacaaggatggtgctgttgacccgacatttttgtactttgcgtatgcattgaaggaggtcaagtgctgaggtttgaagcaaagaaaaaaaaagtggttgctgaagaatttagtcctttttattattgc

SEQ ID NO: 1570 - DNA, 573 bp, Gossypium hirsutum
  unsure (1)..(573): unsure at all n locations; Clone ID: LIB3825-004-Q1-K6-F8
cgacgcaagnagaagagtgcnagataaactttccctaattcattgcaattagcatcagccaaatccctaccttacatccttccctgtcctcccatccaatccctaaatttcacaatngaacaaagnaaaaaattgattaatttttcatcgatcccatgcaatttctttgagaaaatatatctaatacccagaacaaaagaagaagaaatgtatagcaatttcaaagaacaagcgatagagtatgtgaagcaagcggtccaagaagacaatgctgggaactatagcaaagctttccctttatacatgaacgcgctcgagtatttcaagacccatttgaaatacgagaagaaccccaaaattagggaggctattacccagaaattcaccgagtatttacgccgtgccgaggagatccgtaccgttctcgatgaaggtgggcctggaccggctactaatgggggcgctgctgttgccactcgccccaaaagtaagcccaaggatggtagcggcggaggggaaggaggtgatgggggaggatcccgatcaggctaagttgagagctgggcttgattc

SEQ ID NO: 1571 - DNA, 600 bp, Gossypium hirsutum
  unsure (1)..(600): unsure at all n locations; Clone ID: LIB3825-004-Q1-K6-G10
ggaaaacttctgtaagaatatttcgactctcccaccanaaaaaaaagttccatcttttagataagcaaaatgagtgatcatcttgttgtatgcgtggaccgccttacgaaacccgaaagtttgaaatcagtgaatgaacccgaggttgcgggaccttcgggtgaaggttcttctgtagttgctgagccacatgtttgtgctattgatgttgaggaagtggaggaacacggttcgtgtgacgaagaagaaccactcatccagacggttgaatgccgtatctgccaggacgaggacaacattaacaatttggagacaccttgttcttgcagtggcagtttgaagtttgctcacaggaaatgtgttcaacgttggtgcaacgagaaaggagacataacgtgtgagatatgtcatcagccttatcaaccaggatatactgtgccaccacctccccctcagccagaggttgctacaattgatatcagtgagtggacggtcgctggtgcccctttgggtttacacgaccaacggattttagctgtggcagcagaacgccatattttggagcaaggctatgatgaatatgctgagcctgattctagt

SEQ ID NO: 1572 - DNA, 279 bp, Gossypium hirsutum
  Clone ID: LIB3825-004-Q1-K6-G12
taaaacatgttgggatacgaagacaggctaattaatagtgagaaggaacgtgtatgtgtggcatgctttggttggcttttggggaggagtgaaaactgtaggtgctggtatacaacattaaaataaacggttgacctatcactgttcagtttccagtggtgatggaccaccagatatagttaagtatggacaggattactgttcatggcctggaattgattgatcccataagagtgtttaagtataagagagaggatttttcatgcctgggtttcattg

SEQ ID NO: 1573 - DNA, 607 bp, Gossypium hirsutum
  Clone ID: LIB3825-004-Q1-K6-G7
aagaaacctaaaactttgcctgaatttcttctcttttttttccccattttatttttcccaaaccatttctcccctaccccgattccctttattttttcccccagtttccccaaatcgatagccctctacatctccgtcggtagcccgcggctatatctccgtcgacatatgcggtcaagtatattaaaagaggacccaagatagatgaacatgtgcagagggagattatgaaccataggtctttaaagcatccaaatataattagattcaaagagtgactacctgttcaagcttctgcttattggagattctggtgttgaaaaatcttgtcttcttttgagatttgcttgggatactgctggacaagaacggtttaggacaatcactggtagctactaccgtggtgcccgtggcataataatcgtttatgatgtgacagaccaagaaagcttcaacaatgtcaagcagtggctgagtgaaattgatcgctatgctagtgataacgttaacaaactactagttggaaacaagtgtgatcttacagctaataaagttgtatcatacgaaacagccaaggcatttgcaaatgaaattggcataccttttt

SEQ ID NO: 1574 - DNA, 582 bp, Gossypium hirsutum
  Clone ID: LIB3825-004-Q1-K6-G9
gttttcagttgcgatcttgcatcgaccccagatcagaatcagcctcaaaaaagtcgtgaaagtgaagaaaaacttgaagagatagatagtttttgaagaataaatttgtgttttcttggtttgggttttttgagaagatgaaggagcagaaaagtgaaagtggaggagggtttgtaagagcagatcagatagatctgaagagcttagatgagcaacttcaaaggcatcttagtagagcatggacaatggagaagaacaagaacaggaaagaggaaggtgaggacggcggcggtggcggagaacagctcaggtcaagcagcaacactgtgagaagacaagagtgggagattgatccttctaagcttatcatcaaaagtgtaatagctcgtggtacttttggtactgttcaccgtggtatttacgatggccaagatgttgctgttaaacttctcgactggggagaagagggtcacagatcagcggctgaaatagcttcacttcgagcagcttttacacaagaagttgccgtgtggcataagcttgatcatcctaatgtaaccaaattcataggggcgacaatgg

SEQ ID NO: 1575 - DNA, 588 bp, Gossypium hirsutum
  unsure (1)..(588): unsure at all n locations; Clone ID: LIB3825-004-Q1-K6-H10
ctttggctattcagatggggaacactcagtcatttttatgtggcaagcaaattaagtgctcttggggcagcaagcctacaccaccggggacaagttcaaacccacttcccccacctgcagctgcacctttaccgggcctttcagcgattgacctattagcttatgaaaggcaacttgccatgagcaaaatgggtggcgttcatgctctaatgcaccctcagggacagcatcctctgaagcaagcagcaatgggagtgggtgctgctggagcaagccaggctatatatgatggtgggttccagaatgttgctgctgcccagcagctattgtactatcagtaataaagatagagtttgtgtgataatatccttatttcctgcatttgcaggttttatttgagttcttaagcataagatttaggagaggcttttttttagcagtgaagctgcatcctgctttcatctatagcatatggttgcctattgtatccatctttacttatgttttgagattttattgagttttaaacccggctaggaaagctttttaatgtattctctcctatatgttngatacggtacggactgt

SEQ ID NO: 1576 - DNA, 555 bp, Gossypium hirsutum
  Clone ID: LIB3825-004-Q1-K6-H7
aaacctaaaatggatttctctttttggtaaaatgatggcgaccgagacgacccagaacccggcgcccgccaacaaagcttccatggggtgaattatacgaagacgacagggaggatttgaatttcttgttgccgccaatagcaagtaattcggacaccctcgaagaacggggatcaaggaatgtgatagagtacaagttcaactactgaggtgaaacaaagtcaaaattacaacgacgacccggcttctaaaactacttaatgcccggctcagtaaacaagcagaggacctatagtcttatcccaagtattacgatgctgcaagggaatatgtttgtagccgactcactatagtatccactgaagaaatcatccttgaacgacctagagctcctggtacctaagcataagaaccgaatgctaccagagattacttggctcaactaagaaaaggaggtgctgttcttattgtgtgtaggacttgtagtaacaagggtgatcactgaacatatatgtgccacatacaaggacctacttctgccggctgagtaattcg

SEQ ID NO: 1577 - DNA, 529 bp, Gossypium hirsutum
  Clone ID: LIB3825-004-Q1-N6-A1
acaagttcaaaggctgcttcatttgctgttggatcatctctaatgggaatttgtgctgccataccgcccatggcatggacgccgcgtcgatgacaggttcggatgaggagatcggagtaactcctcatgaagtgttgggtcataccaacttgaccccgatccggcaacaaccggtccgggtgaccttggaaggtcttaacgtagctgaaaatataatcccatcggccgcagttgagaccaacagagtgatccctgagctcataaaggatttcatccatttggaagactgctggtagtgtttcgattagaactgttgctcttatgcttcctttctctatgcctgccatcttttctgccttatcaaacacactattccatatctttgcttcccttgaattctccatcttaggaagataaaagaagggtccaaagccttgaccttgagtgttgcggaaattggcataattgtggtaaaaataaaggccaaaatccactagacaaccagttgcaggctccccgtcgatgaaaa

SEQ ID NO: 1578 - DNA, 540 bp, Gossypium hirsutum
  unsure (1)..(540): unsure at all n locations; Clone ID: LIB3825-004-Q1-N6-A10
gacaaaattatctccatttattcgacattacatatggagaaacgaccagaaattcaatcttttcatgctctttgtttttgtttttgttttttttttactaaaaacctctaccatttgataactgcaatgtacagtttgatatgaaaaccatgtaggatgatcgaaagaccggagctggtcactctctgttgataattagtccaccgcaagaagctggggtgggagcggtctttgcagcctgttcagaagcattggctaaagcctgcaacattctcaaaatctcgcttcggtcttccacgtagtatttggccttgctcggtttctggccgacagtgcaagcaaacacctcggcaactggggagagacggggactggtctttgcacgcatgatcacctcgaacatgtcctcgtctgaccggtcgtctccgatacaaagaacgaaatccggaagctttcctttttgtctcattgncgngagaagatgttcagcgacgagacccttgttcacaccctgaggtttaacttctacaacatgctggc

SEQ ID NO: 1579 - DNA, 538 bp, Gossypium hirsutum
  unsure (1)..(538): unsure at all n locations; Clone ID: LIB3825-004-Q1-N6-A11
gaaggaattcaactaaaattgacacgngaaaaagcaaacacacaatccgtatgcagatgacagtctcaaccaaatgaacacacatcaaaattggtctaaaaaactgcaagtaccaaactacaaagataaccaaaatcaaaaggctctgatactatcaaatgcaatctcatttcttcttggcagcagatttggtgaccttagcacccgttgggtccttcttctcaacgctcttgatgacaccaacagccacagtctgacgcatgtccctgacagcaaaccgtccaagtggtgggtactcagagaaagtctccacaaccataggcttggtgggaaccatctttatcatccctgcatcaccattcttcaagaacttgggctccttctcaagctcctttccagatcgcctgtcgatcttggtcagcaattcggaaaatttcacagcaatgtgggaggtatggcagtcaaggactggggcatatccgtttccaatctgcccagggtggttcatgatgatgacctgagaggtgaagctggcagc

SEQ ID NO: 1580 - DNA, 523 bp, Gossypium hirsutum
  Clone ID: LIB3825-004-Q1-N6-A12
attaaagcatcttccattttaccaaagaaggtgaataactcttcaacagaccaataaaaagaaaaaaagaatgggaaaatcttaaaaagccacaacaaaaaccaggcagaactgatatacaaaaagtgaaatgaagatgttagaagaaagaaaagagacattcttatggttactaatatggaaaatatataaacaaaaacacctattacttccagtcaaacacaacccttttttcataatggtctgctgccccgcaatctcatggctggcattttatacttaactgctttcaccttttgtacgaaatatccatactttgtccagtatttatatcgaaaaatcagatcagaagaagcaatctctttgcacactatttcaattcctagtaaggccttcgaaagtagttgatgaaagccggcatacacatccgatcaatcagctttcagtttcaaaatttccttggtggtccttaaacgaaaatagggcatgtgttcctgctcgaaacaaagacttaagcctctgc

SEQ ID NO: 1581 - DNA, 450 bp, Gossypium hirsutum
  Clone ID: LIB3825-004-Q1-N6-A2
gggaaaaagaaaaagaacgggaaaaggggggggattaaaatttcgcccgaggactcccacttatcctccacctaagagggggttcaaaaaagctggaccagggtcaagctcaaccgggtcttttttccccggggatgttgccaagccccttcccttggatggggtttccctggatagtaaacagggacagggggaatttgcttaaaccatttatgccccctactaattacaggacgaggcttttggctacctaaagagagtcataagtcctcccgcctgttacccgcgctgggttgaatctcttcaatttgacattaaaagaactgggcaaaaatcacattgcgggagcctccgcagggaccaacggaatgcttggctttaattaaacagtgggattccccttgtccgtaccagttaaaagtaaagtgttaatcccccgggaaaggcccc

SEQ ID NO: 1582 - DNA, 543 bp, Gossypium hirsutum
  Clone ID: LIB3825-004-Q1-N6-A3
attaatgaaaacttttatttataagttaaagatagacaattatgtttaaaataaaaatacgataaaataataattttaaacaattcaaaattagaatatgaaattgtaaaagcccatttttgcccgggcccactaaacaaaaaataaactaaataaaaattaattacaagtccatttacaaggcccaaatactctacagcccaaaaaccaaaaaatcaaggcagaaaccctagcctctgcttagcgccgcagccaccagcagctactgtacgtccaccacgtgcgcctccgtacgcctcacgctaggtgccaacacacgctccgtacctgcgaaaaaaaacaagcaaacagcagcaacaatagccaatacgaaagcaaaaagaaaaattgtatttttatttgaacattcggctataaagccagggggaatcgattgtaattttttttttgggaggcacactggatatcaaaagaaatcaagacgaaagttattggaaggtgatttccaaatttgttttttttttcgtttcttgtgattagctt

SEQ ID NO: 1583 - DNA, 550 bp, Gossypium hirsutum
  unsure (1)..(550): unsure at all n locations; Clone ID: LIB3825-004-Q1-N6-A4
gatcatagaaatgtatgataagataaaaatttgccattaaatacagcaaaacgatgtagcattacattacattatttattcccttaaaagcacatatacttgacaaaaagcccttcatccatggccagccaatccttatgcatccatgcgaatcatgcacctcaggccctcgccagcaagcatgtactcaaatgccttgttaatctcagagaagggaactgagtgagtgatgaacttgtcaagttcaagttccttgttcatgtatctctcaacgacagcaggantatcagttcgaggtttgtagttgccaaagaaagtacccttgagagtcctttcattcagtagattcactggatgagttttgaatgcatcgtctttgttgggaacccccacaagcactgcaactccccaaccatcgtggacacattcaaatgcagaaatcatggcctggatgctcccggtacattcaacactgcggtcgactcctccacccgtcatctcagcaatgacctcttgaacaggtttgttgtgatctttcggattcacaaac

SEQ ID NO: 1584 - DNA, 527 bp, Gossypium hirsutum
  Clone ID: LIB3825-004-Q1-N6-A5
aatacattccaaacacggttttatcatgttaaaaaccatataactcattatacagaactgatacttatgtattagtaagagtccagtaaccacaaatttatttccattatgttttcattataaaacagtgactaaacaacaagtcagaagatgcatggaagagatcatattacaacttggaagatggtttcttggaaccccgcctagctatgaactcttgcatcttcttaaactgctccggtgtcattccatcgtagtatttatgacccctctccttttccatggcgagaccctcacgaagatccaatttgtacccatcattgatcacagacttgtacctgagaaccaagtcttgactgttcttcataattgctcctgcaagttgtcgagctttattcagcacttcattttggtcaacaacataattgacaaaccccaatttctcagcttcctctgctgacaaaggcatggctgccaacgacacttcgcgagccttgtttggtcctataaagcgtgcaagcttctgg

SEQ ID NO: 1585 - DNA, 517 bp, Gossypium hirsutum
  Clone ID: LIB3825-004-Q1-N6-A6
agcaaactctaagaattagatttgtttgatctctttaaaacattatatatatataaactgtacagtgaaaatgaagaataaaaagaatgttagatgtatgagctatgatttatcctcaaaatcatagtcttccatttgcacaaccatcatcacccatttctatacaaccaacttctttacaagaatctgcaagaagaaaaataaaatcagttatctgatgtgatgaaatgtactaaacaaatgaagtgtggaggtggtttgatgatcattgaaaaagggtagcaagtaaaataaattacctgaaacctaacatggagaccacttttctattatttacttcacgatctttggataccttggaaacccattcttgcaagctgaaattgcttcaatgtcaattttgtagacaaggagttttcttctttctctgcaacttgttctataagccacaattatatgcgcaattgccagagccagtgaacaaatgaaaagagcagtttccatggctgacccttct

SEQ ID NO: 1586 - DNA, 542 bp, Gossypium hirsutum
  Clone ID: LIB3825-004-Q1-N6-A8
cagtgaaaaggtgtaccatgcatacttcatttcccagcacataccaagatttaatacacacaaaaaagggggctatttcagttgacaactaaaccaacctacaaaccagttaaagatcctccgattaaatattctaacagtacgaagaacaaactgaaacagtgttttacagagctagggttgggttgggttgggttgtgttgtgtgctaccaggagccttaaaatgtcccggagccctgcagccatttttatcaatcaaactgcagtcctttttatctccgatcaatctctatccccattgcttattatagctctgcttcatgctctatatctcacttccgattttggatattagagctagcctgagctgctcctgtgtgtaaaatgggttccccatctttacggtggcttgttggatcatcaagtcattcactaccgtcacactagcgtgctgcacatcaagatttaattcctttaaagcagccattaaccttgctgccggatggttctttctcttgcattggattcgaatcattgcgtc

SEQ ID NO: 1587 - DNA, 541 bp, Gossypium hirsutum
  Clone ID: LIB3825-004-Q1-N6-A9
gattaaaaagttaagtactattatttattattaatattacatcatcaaatcttaaaatctatttcgtcgaccaaaagaaaagagagcaagcaaccaggtcacccttgtttatttagtgcttcttcaagagcatggatctgagctcggccacgtcgatctcattgggacagttctcgggtctgtagcatccggtaacagggtcgggaacccacgaaaccttctctttagctccgcgagacatctcttcccctgttttcttggccaccgtagcagcgctccttcccgctcctcctcttattccactcgacacaattccttgtgatgccgccgcatatcctcgtctggagataacgttagagattccatcgacaacaaaagtagagaaaagcttagcgttggagagagagcgagccatttctcttatcttaatattgatttgttcaattcaaattcaaactctggattgataaaaacttgagcgctgctgtaggaaagctttttttattttttttattggtgaagagcaaataaactttctaca

SEQ ID NO: 1588 - DNA, 458 bp, Gossypium hirsutum
  Clone ID: LIB3825-004-Q1-N6-B1
aaagaaaaaaaatcccaaaatcttattaaataattagcaaatggacttagaataggaaacaagggtttttttttccttttcttagcccattaatcaatcaaggggagttgaacaattttcactctttccctaacgggcaattggttcaatagtgaaaatcaacaaattcttccaagaaacaagatttgcgaaaaactcgatttacccaaaaaaaaaattgttcccaaataagaaattccgagccccttttcgcagtgtttaatattacccttaaatcttgcgtgggggcttgcgaattaagctccccgaacctcatgcctacccccatggagggctttaaaaacctttcagaccatcgtgtcacacaggtttcctcttggttgtgcaacgtcttgcgagggaatttcccgatgcaatcggggaagcatctttcaacaagggaattgcacattttcaaa

SEQ ID NO: 1589 - DNA, 510 bp, Gossypium hirsutum
  Clone ID: LIB3825-004-Q1-N6-B10
gaatataaaaggttctctaattattcccaacttttattgatttatagaactgccctggctaacactgaacattacaacaggaccaaacttttctttatatggtacaacagtacgaacttgaaaaagaaaaaagtagaagcaaacaaacaacaaacacagactcaaggcagtagcagagcacaaaaagtcgctcctttcatttaataggatcgataataaggatcatcctgggtacctccgcgggtgctccttctagtcccagcattgttaggcgccgcacttgggaagtcttggtttcccgttgtaccgtaagcaccccctgtatctccgccaaaccccatactgctgaggtcatcttgcctgcctgtatcatacccactacctgcggtggggtacccacggttgtcatgtccaccggtaccgccatagccaccagtatcccctctgttgtacccagctgtggtgtagccagtaccaccaataccaccaccaccagcatggccagccgtg

SEQ ID NO: 1590 - DNA, 546 bp, Gossypium hirsutum
  unsure (1)..(546): unsure at all n locations; Clone ID: LIB3825-004-Q1-N6-B11
gaaaacgaaaagcaaatgaccaggaatttatttgaatacagagagctgcttacaagttacaatatacaaccacatagagcagcacaaggacataagcatagaagcagaacagagcaacaaaattgatagattactttctagcatatcagccgactgctacaacaggaaacttcaacccacagtcttgtttccaccttcttgtgtcctactcttgccaccttcttgtgtcttactcttgccaccttcttgtgtcgtactcttgccaccttcctgttctctgcctccctcagagatccttcctcctccttggctcctattctggatcttctgctccatactcactgccgtgtccggcaagggccacttcactgggtctagcccctgagacatagagctcctgcttccacgaatataattagcaatccacgacagcgatgacagtccagtgatcccaaatgctccggaggtcaagaatccggctatggaacccgcaatgagaagagcagcaggtaccaaanacagggctgaaaatcaggaaaagtgggg

SEQ ID NO: 1591 - DNA, 547 bp, Gossypium hirsutum
  Clone ID: LIB3825-004-Q1-N6-B12
aagtcgtaaaaatggctcctgctttgttccattattatactttcttgcttcttataaaagacccaaagtttcatagttgttttttacacaaaccgcactagttgggcttaggctcctcctagtatccttgagattgccttgcctagagttatacatacagttggaaatagatacgactgtttactattaccactcttgcatgcagcaagactcaaaacacccacaccgtatttatataaacataaaaaggaacgaaaagcagaagctcgagtaaaccctgtatggcgcatatcaaccattcacaacggtaccaccatttggatggagggtttggccagtcatgtaggaggagcagtggttacatgcaaggaacacaaagcatggtgcaacctcgctgggctgcccaggtcttttcattggaacttgagctccaaactgagcggtttcctcttcatcaaatgatgctggtatcaatggagtccatatgggcccgggtgctacggcattcacacgtatgcctcgcttcatcagctgtagtgaaaggcct

SEQ ID NO: 1592 - DNA, 531 bp, Gossypium hirsutum
  Clone ID: LIB3825-004-Q1-N6-B2
ggaggatatttacatgaattcattcctaacgaaaacctacattagtaatgttctttttcaatgattttttacatttgcttcaatggcagaacgaaaacgtagttacctgaagcagtcagatatagataaaccatggcagggtgaaaccataaattgattaattatgcactagctttaacttccccttcattcgaccgaacacgcgtggctggtgctctggacaaaatgaaatttcctttgtgatccgttttgccatactccgcaacacgaggatccatcacgattctgcatgatctccattcttggcacattaaatcaacaccataatagttcaaatggtccatgatgctgttacctgtcaccgacctactacaggttggatcctcaccagaaccatcacaggccttctcaactctataaaccagacttcccagtccaagggaatacagccacacctctctaggaaagtgatggtatgtcttttgagggaaataataatagtatggtggcagatgagggacaatatcatgg

SEQ ID NO: 1593 - DNA, 550 bp, Gossypium hirsutum
  Clone ID: LIB3825-004-Q1-N6-B3
gttgattaaatctaccggggaatcccgagattatatataccgtaagtagtaataatgtaatcaagttcaccaaaattgcgttcaccaaatcattcatactaaacggcactacattagcttctataatggcttaacacatcccatcctacactttagatctaaccaactcttcttaaccgtaatcagcttctgcaactctgaaactgctcacagttcgttgacccgtttttcacaaattctttagccaccgcattgatcatctttggaatcgttcctttaaattcctcagagctaccctttacaattttgttagcatctggaacaccttctttaaccgcaacagagcctactatagcaccctctttatatgcttgacatgccacaaggatgtcttgtgcacggttgcgaaaatgaccagtaacaaagtcctcaaaatgctttggcggtcttcttagtgtgtaaatcattgtctttaatgatagaataaatacttcctcattgtacttcctggacctcctgtcaccttcagccccaacatacgaagtttcat

SEQ ID NO: 1594 - DNA, 511 bp, Gossypium hirsutum
  unsure (1)..(511): unsure at all n locations; Clone ID: LIB3825-004-Q1-N6-B4
aaaacaatgaaaatctaatgtttccatataaanagtaccacactaagaacttaactacagatgcagacaagtctaaaaaattaaaccaaaatcaacaatgaagatatatttataaataagacttcctaaaaagaatttaagaatccaaacgtaaaagaacaaaagcatatattttacgcgagtccttacttgtgtgcgtggtctaaacaatcttgcccctttaggatgcagttggttttgccatggacttcttaatggcctcggcgtaagtccggtattggtaggtaagagtcgattcaagtaagtcccaaagggatgtcttggggttccaaccgagttgtttatttattatggccatgtccgggattctcttgtcgctatcgtcatatccctcaccgtaaaattccttggagctgacatcaatcgatggtgactgcaacataggttctccactaaccttggtatagacctgagtcatcatttcagcaagttgcctaactgtgacttcatt

SEQ ID NO: 1595 - DNA, 503 bp, Gossypium hirsutum
  Clone ID: LIB3825-004-Q1-N6-B7
attatcaactctgcttcatcttaatataaaattatatacaaatatgaatacagtatcaaaaggctgcacatcaacctactcatcttaaaacttttccccttatttatcttcactatttcccttttttcttgtatgtgtgattgggattccaacaccggcctcaaaacacaaaggctcagacgtcgacattacttcctatatcttttctcttttctgtaaaatgtatatacacaatatgtttcacaatactataacaaagagttttgactataatatttatactactatcctataatgagcctcccataggagctcgatgaggtactcccttcctcctcctggccgtaggtggcggcgtcgatggcgtgaagctttgctgtatgttctgtataccctcaatgctaacacttatgtttagcgactcaccttctgagtactccatttctgtggataattttcctttcttaatcaacttcttcgatgtcccaaccaccttgcaacca

SEQ ID NO: 1596 - DNA, 529 bp, Gossypium hirsutum
  Clone ID: LIB3825-004-Q1-N6-B8
gagaataatgagccattgttattcagggcagaatttcaactacaaacgcatatcagaactttctattggacaatgttggcacatattacatctttctgtacatacattaaacttatactacttttatgtgattctctctcctttcttttgtaccaactgtcgctccaatttcggttctttgctactcattttccctatagagagttcccaccaataactcaaggttcttccatggacatcaaaatcatcctgttcaagtcaacagaatcccacatgcagaggtgctgggtaatgccaaccataatttcaatgccatgaatgactcaagcaacaatgttgcacctccaactctaacattataggataagcatgagagtcagtacccatatcgatcattcaacgttgttctcccatcaccggattgcccttcaggaggaacccacgtttcgtactctggatctggattgctatcaagaaatgaaggcttttcaggaccaagcactcgtttcagctttttctctttcttctt

SEQ ID NO: 1597 - DNA, 455 bp, Gossypium hirsutum
  Clone ID: LIB3825-004-Q1-N6-B9
aattaaaaatttttttgtatttttaatattggttaaaatccggtttaatgaccttaaaatatgaatttaacatgcaaacaagacccaggggacaacaaaaaaaaaaacactcggggacattccaaccaaaaaaaaaccgagttccaacccaaaaaaaagaaaatgaaaaatataaaaatatcggggaaaaaacaaggcatggaaaacaaacccaaccccccaaaaaaaaaaagaagctgccccccaaaaaaaattcccgaaaactccctttactgtggccaaaaaaaccttgggggaaaaaaaaaaaaaacctcggttttaatggaaaaaaagcccaaccccttcattttttcaaaaaaagcagatgcagggggaatttcctcttttggttcccgggaaaaaaaaacttctgggaacttttgcaaaaaaggttagcaatttttcacagatgcaaa

SEQ ID NO: 1598 - DNA, 543 bp, Gossypium hirsutum
  unsure (1)..(543): unsure at all n locations; Clone ID: LIB3825-004-Q1-N6-C1
aaacaaaatcatccagacatgatctttttaggtaacaaaaaggaaagagaatccangagccacagggcaaaatagaaccttaactttaatactagcatggggaaaatcaaaaactacaaaagccctgtaaccaaccactcaagcttaaaagattgtttaggacatcgagggctatatcagatggaagtcttctaattgactaaaactagaggttgccaaaaagcatataagtgaggcatatttaagaatctgcaatagtaacctccacctcaacaccaggttcaatggtgatagatgtgatctgcttgaccacatcaggggagctgaaaagatcaataactcgcttgtgaacacggagctcaaatctatcccatgtgtttgttccttcaccacagggagacttccttgttgtgatgtgaagaaccttggtgggcattctcactggccccttaaccctcagtctcttatccttggcaccacgaaccaaatcagcacaaactttctcaaggtttttcacattcttggaggagagagtgatcctga

SEQ ID NO: 1599 - DNA, 548 bp, Gossypium hirsutum
  Clone ID: LIB3825-004-Q1-N6-C10
aaaataaaaaccaataagagttcattagcaaagtccatttacaaatcacttataacccaacaataaaagtccaaataaacccgagacccagactaaaacccaaaccactcacttaaaacccgacccagttatagtggcccaatgctcgaacagcccaaacatacaccaaggctcaaagaccaagaccctaacccaaaatcacattacacccaaagcccctaacctaattcataaacggccgaaaagagcccaatagcctgaaaacaccagaaaccctagaggtttctggaatacgctagagtagcgccagaggatccgcctcccacgatcggtttcccacgcacggcctctacgtcgccatgaacgacttcctccgtacgatcattcctgcaacagaatacacaagaagcagcaataacagaatacaaggggaaaaatagcaaaaaaaaaaaaaatggaaatagattgtttgtaattttaattcttatttttccggctataaaaagccatcgaatgtaatctgtcgaacttacacatactgagtaaaa

SEQ ID NO: 1600 - DNA, 536 bp, Gossypium hirsutum
  Clone ID: LIB3825-004-Q1-N6-C11
aaatcaaactcgtatgaaatttaacaaaaacaccatctagcattcatacaagataaacttatgttcagcagcattaatgtagtatcaaaacaggcaacaatgttcatagaatcatgcaaggaacctcacctatacaagttctatgtaagccattggtgcattgtctcctcgcctaggcaaggttcgaataattcttgtatatccaccatttctctcaccgtacctctccggtacctcagcaaagagcgcgtgaacgatctgtttctcataaatgaagccaagagcttgccttcgtttgtgaagcgaaccatctttcgctaacgtgatcattttgtctacatacttcctcacagcgcttgccctagcccgagtggttttgatccgaccgtatttaaggagctgagtcgtgaggcctcgcaggagtgcacgccgctggtcaggtggtctgttgagcttaggcactcgtctgccatgccgcattgcatagaatcggccaccgttatcaattatggtgaaattttgctcaaagctggtga

SEQ ID NO: 1601 - DNA, 528 bp, Gossypium hirsutum
  Clone ID: LIB3825-004-Q1-N6-C12
atgaaaattgttctttatttagaattacaatgtcgaagagaagccaaataagttacgtgactcaaaaatataaaacctactaatatataaccaacccaatcagaagaggcactttaaatgtctggatgatgaacgttgtttggttgattatccaatggcatgtattgtgccattatagcccgaatctctgaatccatgtatctccggattctgtatttgtaaatggcataccctccagctccagcagcaaccaatccaagaattattacccaaacagagccccagcttacctctgttttaacattcttactgatacatgtgtcatgctctcgcatgtacaatgaaccaccactacagctgcactcataactgccccaggtatttttgcatttgcaaccaggacattggcaggccagcttctccttgcactcatcaacatcttcacagctcttgactccatcacccctgaatccgtatgggcacttgcaaccatgtgaatgatcatcaatacaagcagagtatgtcctt

SEQ ID NO: 1602 - DNA, 548 bp, Gossypium hirsutum
  Clone ID: LIB3825-004-Q1-N6-C2
gatataaacgatgatgaatttcaagtgttttttaagaacagtacaaacagccaaaaaaaacgcatagaatccaaatgtttccaagtacccttctattttgccgagcaagcactaaatttgccaacaatctcataattgatcatagactcacgtagggcaaagaatagcagtcagagcagttgtagaataaaacaaaactaactccacttcttcaagcaactgattgcactgctctttcaaagctgtcttccgcagatgatgcacgtttaacaagaatgtgctctggatgtgtgagtttcaattggcttagataacgtgaagatgatttaccgaggtgaaggccgcatacaaccaggttggccagagtttcaggatcctttgcatccttattaagtgcttcaagtaacagtgtttcagccttgtcaaagtttcccatgtgcatacagcagacagccttcccatttaggatcaaaccagtcattggatatttctcagagaaatcttggaagatcagataagcttcctgtatcttggaaccacccactgct

SEQ ID NO: 1603 - DNA, 533 bp, Gossypium hirsutum
  Clone ID: LIB3825-004-Q1-N6-C3
aaataagtcagaaaatgaagattatggaggtcaaaaacattaacaaagccaattgtctatttgaatacaaaaaaacataacaatcgtgtccattgtaaaaaccatctaagtccaccagtaaacaaaatatagaaggaactaactagcagcattgcataaaatgggtaacgtaacctcttcaattaattattattttgttgcttagcttacagcttgtcctcgtaatcggagagcggggtcatctgctccttcaatcccttcctcttacggatctcagcaacatggttggctgcctgggaaccaggttccaatggatctgatgacatcatatcccagtggtcaaacacgcattgtgggaaagcctgtcctgaagttgcagccctcagggtgcttgagaatccaaatgactcgataacaggaaggtatgctttgatgttgtatagtggagtaccaggcctctgcatctcctcaaacacatgtcctcgcttctggttaagaacactgtaaataccaccaagtgcttgctctggggc

SEQ ID NO: 1604 - DNA, 543 bp, Gossypium hirsutum
  Clone ID: LIB3825-004-Q1-N6-C5
agattcaaacaaaaggatcatggggattaaacaccccggatattatatttatttggtactgtatcagatgaaaagtgtgaaatacaaatagagatacttggcactattcctttttagcgtcaggcccagggtctgtattagcagcagcagcgttggcgggattataggaggatggggttgtagaaactccgttattggcagttgagggcgaagctttagctgcagccccattgtttgcagtggcaccactgcccatagatgtacttagggaagtagactttggaatcagcctttgtgcctccaatgcctcgcgtgccgcttgctctttggctctttttgctctttccaatacctcttcctggaaatcctgcacttgcttttgttgctcagcctgcaaccttccaacaacactcaaaaattccccaattgtggactcgattctctcattcaatgcttcggctacagccttccctaagaaaaaagcatccagcacattcctgctttcattatcacctgaaccaggagcaccaccaggtccagtgc

SEQ ID NO: 1605 - DNA, 533 bp, Gossypium hirsutum
  Clone ID: LIB3825-004-Q1-N6-C6
attggaaaattgttaaattaatatttaatatgaaatcaaggaatatttgccagtaattcatataacatctaattaacaagctctaatattaagaaaaagaaaagaaaatttgggaccacaacaagatcaatctctgcaggagatcattggcaccttgtatgtttgaacattcacacctaaaaactattcttcttctattgccaatttttgttgtgaagtaactctactttgatactctcgggtacgggcagtattactgctcgagctatgaaccaacccgaaatttagagttatcacacctatatatattcagattctcaagcaaggcagagattaaagattatgatttctggaccaagaaatatacgtaaagctattcaaagtacgacttagctccatgtcacatgaagtttttctccacaatctttattaactcccccagcttttcgattatcttcggattcatcaaatctctagcttcccttaagagagtgccttcatggctgaaattataagcatccaccacagctctc

SEQ ID NO: 1606 - DNA, 543 bp, Gossypium hirsutum
  Clone ID: LIB3825-004-Q1-N6-C7
gttatatcaactttgaattatatgccaaatgtggcaaatatataaattttgcaggacaggaaccccctgctgctttatcattaacaagattctatgggcttgatgaaaagaaaaaaaaggaaaaactcatcaatgctgtgaaagatgagaaacaataagaacaaaggactcgtatcttaaatttctcgtttgctggctgccttaactgctttctctgcagctttatccaaatcttctgctgtaattagtgtcattccactttccttcaaaatttgctttccctggtcaacattggtaccttcaagacggaccaccacaggaacttttagggccacctgtttggcagcattgacgatcccacttgcaatcacatcacatttcattattcctccaaatatattcaccaaaatggctttcactttatcatcagaagtcaaaatcttaaatgcctcgaccacctggccttcagaagcatttccacctacatccagaaaattggcaggagttcctccatgaaatttaattatatccattgtagccatc

SEQ ID NO: 1607 - DNA, 543 bp, Gossypium hirsutum
  Clone ID: LIB3825-004-Q1-N6-C8
atatcaacatgtataattttaatatttattcttaaaatatttaattactaatttcataattattcaatcttaatgttataataatataatttatatataaactaacttagaaaaaataaaagtggtaatttagttaattttctgctttagcttaaagttcagcacactacactctttatgcgaaaaaactaccgactattaagataaaagattttgaactcaaaaccaaaacaaaatacaaaggcacccaaacatctgcaaaacattatggctctgctctgctacggtgatcacatgcggtggcaagtttctactgtgatctaaccctgtgattcaacaacatctcccggagctccgccgcatcgatctcagccccacaattctccggccggtaataccccgtaacagggtcaggcgcccaagctgaagaataagcccttgtctccgacgacgacgactctttcatcgcatctcttcgttccactttccccatcgccccaggcctaccaaagctagccgtcactgccgccggcggtgcacccg

SEQ ID NO: 1608 - DNA, 469 bp, Gossypium hirsutum
  Clone ID: LIB3825-004-Q1-N6-C9
caaaaaacaaaaataaaaaaatcggcccaaccggcctggaaaacaattaaaaggcgggttctaattttaagggaaactttcccccaaataaaaaaggggaaaaacgggggggaaagggcaaaaaaaaaaaaaaaagggggcccaggccatcccaaaaatttaacttcaaaaacccaaaacataataaaaggaaaaaaaaggggaaaaaaccccaaaaaaaaaacggaaccacccccccggaaaaaacaaaaattaacgggaacacaccaaaccattgggaaaagttccaaaacttggggaaaccggggggggaaaaaaaagttggaacccaggcttggccagttaactggagggggggggctccccccaaaaaaaaggctcccttttttggaaaagcttttctttttgggcctaaaaacgcggggcctaaccaaaaaaaaacatcctttaaaaagttttggggaagggg

SEQ ID NO: 1609 - DNA, 532 bp, Gossypium hirsutum
  Clone ID: LIB3825-004-Q1-N6-D11
agaaaaaactatacagattttccattaactaatttaaacaaataaacatcattcaacatgcaaatttaccccaatttcgcacgtatatcttgttcataatctaaatacacaactatcttaattatcataattttacaaaaatgaaattcgaaaatgatggaaagcaacaaaaaatttacatttttattttaactagaaattcatgaatttgagccaaggtattattacgctctttgtaaccttctccgcttctttggagcacgacgacgttggattgtcgccgtccttcgacgccgcctttttggtgcacaagaagaaatttcgcgatcccagcgccatcagcttctctcccctttctaaactctctaagctaaattgagaataatggaggtccaacagcgaggcgtccgttgacggtaagatcggacggcgaccttccttcgagtactgacgaacggcggcggttattaagtcaccgacagtgttttccggcgacagcactacttgtacagctccgagactcccttgaatg

SEQ ID NO: 1610 - DNA, 547 bp, Gossypium hirsutum
  Clone ID: LIB3825-004-Q1-N6-D2
agccttaggaaaatatctcaatcgttaacttccttattgtcaagaaacaatcaagaaagagagtgcacatagcctcactgcaattagaaagctacaactcaaaatgaataagcagtgaaatgctaagaaatttatagcagttacttccaaggttcataaatccaggcctgatcaactaaaagcaagtaactaaagagagagtggaatcaaccaacttctccatacaaaaaacaagaagagaagtaaaatactaccacaaagactgggaacttcacggttgtttctcttcctcaggcttggaagcttctttgatctcatcagtgccatcatcctgcatgtctgaggtccacaaagtgaggttatcacggagaagttgcattatcaaagtgctatccttgtatgaatcctctccaagagtatccagctctgcaatggcttcatcaaaagcctgtttcgcaagactgcaagcacgatcaggagagttcaagatctcatagtagaagacagaaaagttcagagccaatcctaaacggataggatgagttgg

SEQ ID NO: 1611 - DNA, 536 bp, Gossypium hirsutum
  Clone ID: LIB3825-004-Q1-N6-D3
gttcctaataatatattctaatattacaaacatggaattttgttgtacacaatatttaaaccaaaaatttgttaacgtctttggaaattgaacatctttatggacacagtaaagattgctccaaagagaactgcaaaactaacaatcacagcagcaactaatcccagataatcatgcctgaaatcataaaaatttctcaagtactgctccactgtctcattgttcccgtcttcaagcatgtgtgttatatctccaaactgtgaaacaaccaatccatacaaggtccaagaaacaggacaaatccagtagtaccacctccaccatattggcatactaggtcgtgggatgatgaatcctgaaaagagattccatactccgtagaatgccgcggaaactatggctgcaatgtaatggtttggtgtgacagcaacagccatcatgccgtagaaggtgaagtaaagtaaggtgaagaacatgaagaagagataccagaagaacttagcaaccgtccattcgaatccgatcatagcatagac

SEQ ID NO: 1612 - DNA, 472 bp, Gossypium hirsutum
  Clone ID: LIB3825-004-Q1-N6-D4
aacaccaacctggggcttaggaatataaaaaaaactggaagagggcaaaactatttttatacttaaaaaaggacggggccttaaattttaaacccaagggataaaaaaaaaaattttttttttaaaaaaaaacctagaagggatcaccattaaggccacaaggcccgggggaaaaaaaaaacaaaaaatttaaggggccccaaatcactataaattatcctaaaaaaccccttttaaaaaaacaaaaaaaacttttggcatagggggaatttcacggggaaaaaacggatcttaaaaccccaaaggtttgcaaaaaaaaaaaaaggggttccattttggaaaaactacccgagcaataatacgtccacggggaatttgtaaattaaaaaaaagggtttaagcccttgaatttgaaacatcgggttcaaatatatgcaagggagccccggccatgggcgggttgggggccacc

SEQ ID NO: 1613 - DNA, 542 bp, Gossypium hirsutum
  unsure (1)..(542): unsure at all n locations; Clone ID: LIB3825-004-Q1-N6-D8
aacaaaagaaaaggaacatgttctacttactgcaccttttttattattttcatgacatcgcttacaaacatacaangaaaacatacaataagtagcaaaaaaagattaagaaagcaacgacaagcatgatggatccctgaaggaccaaattatgtagctaggtacaggtacaggtacaggtacaaaacacaagaaacactgactagtaatcttctggagccaagggctggtgcgttgggtgtgctggctccgctgctgggatcaccatgtactcgtatatcagagccgctaaacctccacctatcagtggacctacccagtagatccagtggtggttccacctccatcctaccaaggctggaccaaatgccctggctggattcatggcggctccatcaaatggtccgcctactaagatgttggcgctcactattaagcctatagccagcggtgctattgtccccacgcttcctcttttgggatcgatccctgttgcataaactgtgtacaccaatccgtatgtcagcactatctccaatatc

SEQ ID NO: 1614 - DNA, 536 bp, Gossypium hirsutum
  Clone ID: LIB3825-004-Q1-N6-D9
gcatgagaaactgcaagttatattatcatgatcttatttctcttattttacattccatcagctgtatcgcatataactatagctgtagcattattccctcatttcatatatgcttgaaaatacctggatcttccttaaagccctacaagggaacattaaattcctttgtagtgtcactcaactgtctgcaaatgaactttttgggagtttgatactgccaagacacagctcaggttgcctcactatgtaaacttgatcgccgaccttaccacttgaatcctggttccgataccatgtccatagagcccaagtctcattcttcacctccaagatcccatgaccaaagctactctctctgaaggcactgtaatcaggttgctggtcccaacagaactttcctgctgctggaccgctagtgaagtttgttgcacaaaagccacccatatcttcgtcatgggtagatgatggctctggacagttagcagcttcatcagcatgttcaattgccattttttcacggtttcccccatctccta

SEQ ID NO: 1615 - DNA, 534 bp, Gossypium hirsutum
  Clone ID: LIB3825-004-Q1-N6-E1
tcgcgatctagaacccgccgcgtgggtaccacccgaataattgcagaccgcctcctggcggcctaccagctcttcttatgaggagtcttataacagctcggcgtaatgatggtcattgctgcctgctgggaaaaattgttctccgataacaataccccacataataccagccggcatcataagagtgagaaggctgtggcgcctaaggagggaacttaataacattagttgcgtgctgattactggctgtttagcaggcaaaaaacctgtgccgcctgctgtattaaagaatccaacaacccgcgagaagaggctggttgattattcgccaccatggtggttttttttttcaccaagaagaccgacaacagatggttgttcttcacctgctgctcctagaagagtagcaagaagcgcaccacgcttggtcgccccaggagaaaaaaatgctgtatgatggtggacaacggcataatataacatcagctgtcttcatcatcgtatcctactactaccataatatccgcaacaacc

SEQ ID NO: 1616 - DNA, 525 bp, Gossypium hirsutum
  Clone ID: LIB3825-004-Q1-N6-E10
aggaagaaatccaatattattttaatattcaaaactagctataaagggagagtttacatcattgttctaataaaaatatgttacacaagtttcagctgaaactgatttctaaaagaagaaagctgatatgccacaccttgcaataccagaggtgtcagatgcatttctatatgaagatcaaagctggaaaacaaattaacctgcgaaacatctggttcacatgaagaggcaaacactatctccaaccaaatcaacaagcaaaggttgcaacttcgttgaatgcaagtccctcacctcaattaaggccatttaacaataatgtgaaaaactaaaacatgaacattaaatggcactgatggatgaactttctctcagccaaacaaaccaccagtcccaaattccccttgctgcaactcctttctacattgctcttccaaaggatctggactcttcaacattcttctcatgcgcctgtcttgagcatgctgagcagggaaagtgggcatgaaagctttggtcttggga

SEQ ID NO: 1617 - DNA, 526 bp, Gossypium hirsutum
  Clone ID: LIB3825-004-Q1-N6-E11
accatgaacatatcgactgcaaaatagcatagaaacagatataacctgtatccaacaacacaatggataactgatacaccaaggaagctcaagcagttatttgaaatctgtgaatcaaatgtgggaaaatagtgcagatgaacgcatacacactcaattacattcccagcttgcattcccaacttttaaaagttcacaactaaggaccttattaacactcaaaacgaccatagaataagtaaaagtcacctctggttcattaaggtccttagttgtgaattttaaaagctgggaatgcaagcttatcgcgaaataagggatttgctccaatcagcatcttaagctctacaagcatgatattccgagcagatttcttgtcactgtagtttgaaagctgcttattttgtctaaagttatcaagagtaagcaactgtgtaatctctttaaaatgttccttgttaagggatgcaaaaaccttcaaatcctttacaagaatttaaacagcctttgctcgatcctgcctgtt

SEQ ID NO: 1618 - DNA, 353 bp, Gossypium hirsutum
  Clone ID: LIB3825-004-Q1-N6-E12
agacgatcaatgttgactcaaatacatttcatcgaaacaataaaaattaacaacacagatggagggcgaagtacattgtaaaaaggcgtctaaaaaaaactgaaatgaccttgcatgataagattgtatgggtgaaggcaccccaaaactactaacaaaaacattaagagacagacaccgaaacaaaactaaattgcagcagaaaatatagcggcagaagctgagttattctcaaccttacagcttgtcctcgtactcagaaagtggggtcatctgctccttcaatcccttcctcttacggatctcagcaacatggcctgctgcctgggaacccggttccaatggatctgatg

SEQ ID NO: 1619 - DNA, 531 bp, Gossypium hirsutum
  Clone ID: LIB3825-004-Q1-N6-E2
gagattccaaacttaaacatatattaccagtagataggaagagttgagtaacatttcggagtagcaagcaacacttgctgcttgtcatttgaaccgatttgccggttctttcttataaaagacaaattccaataccattactctaccttctccattatattacattgtcttctatattaaaatattacatcatatcatccaaaattatcccgacactaatatatatataacaagaatcgcaacacttcttaactttgatacaaaataaattcaattccacccatttaacccttctcgcaagtttctttttgaccgccgtatatttttataaagtttctttcatcgtaatcatcaccatacatcgcgtaggtacctgccgctcatttgcagatttttcaccatgctctcagcctttgagctgtctagtgatccctgctcttggaaaatagtgtgaagagctcgatgaacatctctagccatgcccttggcatcaccacacacatacaggtaacctccctgagaaatcatgtc

SEQ ID NO: 1620 - DNA, 392 bp, Gossypium hirsutum
  Clone ID: LIB3825-004-Q1-N6-E3
aaagtagcattttaaaaacaaccaaacgttctcaatatcctaatacagcttgcaattaatggcagtcaaaatgttactaccctacataatcaatagcttgttagttataataagttaccgtaaaagaccaaaaaataattcaacaataaaaaaaacacaaattgatattaaactggatagcgactgaaactatagaagctagacaagcaaactaaaataaagaaagtttgaaattttactttcagttttcagattttcttcacaatctcaacggtaaaaaagtaaaagatacacagccaaaatccacatctacttcaataaatgaaaactaatacaactaaatcaagaagaaaagaagtaaaagcaagcgtgtcggcagaactggaaaaagg

SEQ ID NO: 1621 - DNA, 502 bp, Gossypium hirsutum
  Clone ID: LIB3825-004-Q1-N6-E4
aattcgagaactcagattccaaacagttaggttcaactgaaaaaatagattttagaaatctaatcttaaagagcaaaatcttaggattcccaaagtactggctttacaataagtgtacatatacgtcacgggcttacaactttgatctagtatgaccgtgtggcaccgtgatatgcttatgcttggtgtgtgtgcatgcatataccattttttttttcttttcatgttggatggttgttctttggttgctcgacactattgaattgcaaagaaaatttttggaaaaaaaatatacctgcttattcctgtgggagaagagcaacctcgatttcttgaagagacttccctttggtctcgattacgttctttttaacaaagactacagccatcatacaaacgcttgcgaacatcgagtataaaagttgcggtccaagttgctcgagcaaacgcaggaagagcaagccaacgaagaaattgattacccagtgtactgacatacaaa

SEQ ID NO: 1622 - DNA, 537 bp, Gossypium hirsutum
  Clone ID: LIB3825-004-Q1-N6-E5
gcgagaatcaaatagcagaatttaaaacattcatatgtttttcagtattcaaacataaacaaattcagacacaatcacttttacagtcactcaaatttaaaatttagtccaaagtccacaaaaaaaacacataaaaaagggtacatactaagaacctctgaaagcagtgcaggcaaggcttatgcatgcatatagcttggtttttacttcaacttcacaacagattttgaccaaattcatgttgctttatttacaaacactagttattatggaaagttcgttcagaaaacaccctccgccatggcagggaaatcatcaaagttccaaagatccatcgggtttccaccatcctgtgttgcatctccattgaggaaggcatcaatagtggcgtcccagtttccttcaataaatggtggcatttggaagtatttcatctggttgtccaaagccaacagctcgtccgacaaggtctttgcggagttctcttcagcatgcataagattgtcagaacttggtttcagcttcttgctagggtta

SEQ ID NO: 1623 - DNA, 555 bp, Gossypium hirsutum
  Clone ID: LIB3825-004-Q1-N6-E6
gctcaaacaactcaaaacagtaccaatatctgataattcaaacacattttcaagcataaaggtcttaaacactcttgaatgtaaaatctgaagaccaaaagaactaaaattacagcaagtaatatcctaagcctaagcctaagcctaagccttgtcagctttggcagctgtagcagcagcttgtcctctgagcctaccagttctcctagcagcaataagaccaactttctgtccaggaggagcatcacgcctaacagtactagcatgaccgatgtgttgatggttaccacctccatggggatgctcaacagggttcatagctacaccacgcaccttaggccagcagttcctcttcactctaaacttgtgataagcattaccagccttgaggagaggtttctcagtcctaccaccacctgcaacttggccaatcatcgcacgacagccacttggaacaatcttcttagaaccagatggaagcttgatcctggtggtatcattatcagggttgtgactaataacaatagcataatccccagaagctctagcgaaaac

SEQ ID NO: 1624 - DNA, 535 bp, Gossypium hirsutum
  Clone ID: LIB3825-004-Q1-N6-E7
gttcaagaagatgaaaaatataaagatttaatgctttgaacttggtttggtacacatttatttttaatcagaagtatgagcaatcaaatcataactctgggatgcaaatggttttcctatctcaccctaaaatatttaatcagaaaaataagacaacattgacttgaaatgtatttcaaaatttgcatgatcagccagaaccagcaaaaaccaggattttatttgacgcaatcaattagtccagcattactccacgtctctgagaagtgaccacgctctacaaccctatttttttctctgccttctgaatctggttgaggaatatccaagtcatcatgacgtgcggagcaatcctaacacaatatacagggaacccggtgtaaaatttgaatggtcctccagccttgagggttttcatggcacagtccaaagagccgctatatggatactttcccgaagcatcaggttgcattttctgaatttgtgttttgacataatcaaaaggcaaactgcaagcagcagcaaagaaacctga

SEQ ID NO: 1625 - DNA, 529 bp, Gossypium hirsutum
  Clone ID: LIB3825-004-Q1-N6-E8
cacctgcgttgcatttgcattactttacaatgaaaatgatgagcatggaaacaaatattgcattagctgggaaggagttcatcccaaagaggcaactctcatttaaccaacaaaagcactaatattcatgaaacagccgagtattcgataatttaaagcctggtggtaaagtaggtaacatcacccgacagaaaaaaaataaattgcaagaagtaaatagttctcaaaattttgctcacaacttcataaataaacaactccagctaatctttagaataaactactgcagcaatacatatctggatgtcttatgctaaagtttaggcagcattttgggcagcaagcctcttcctagcttcctcaatgatggataacttgatacccttacccttaggaagggacacccatggctttgttccttttccgatggtgaagacattgccgagacgagttgcaaactcatgcccagcagcatcttgaacatggattgtctcaaagctgcccttatgcttctccctgttcttaatta

SEQ ID NO: 1626 - DNA, 547 bp, Gossypium hirsutum
  Clone ID: LIB3825-004-Q1-N6-E9
ggaatcaaatcagtatactcacttttatataatttagttccataaagcaactagtaacatcagagcattcagcatcagtaactgacacgacctctggtgggcaagtgtaagtgataattctaccacgaacccaattgtgttggattcgcgtacgatatcgaagacggatttgagactaaacctacggaacttgaatttttggattataaagatcgccataaaatttttaactacactaattgcatggtttacttgattaaaaaagctaccttgaggaattaagataaagacaattacaaggcaaaacccttcaagaaatcacattcacgcttggctttctcctgaaatttcttaaaccatctatccaaaatgtccatagggactaccaacttatacccattttcaccacagaacgactgcttaaagttgaacaagttttccccaactttcaacgccatgcgttagatcttcttctaagcagccacatctaaggacggcaacgcaaccagatcctccaccgacacaccaatcttggacagaaggcgcg

SEQ ID NO: 1627 - DNA, 430 bp, Gossypium hirsutum
  Clone ID: LIB3825-004-Q1-N6-F10
ggttaagaaactacactctttaataactaaactggacacacgggacaactactgaaccctattctaacgtcacctaatatataatccgacactggtccaacaaggatggcatacaatatacaagctacgctattctaagaaaaaaggtaaaacttgattcctaaaggtggaaaagacggattccgtcaatacacctgtaaaaacaatggtagcctttataagatttttcacggggggacaggagaagctttcgctaacacagagcatgactcagaccgtactatcaaataaatactctatactgccaaagttaagatttatcattgctctgcaccgaacttataacctctgatccgtctcatacaatacaacttgccttctgactctgaggatccgaacaacatttgcattaaccgaaaccaactaaaac

SEQ ID NO: 1628 - DNA, 62 bp, Gossypium hirsutum
  Clone ID: LIB3825-004-Q1-N6-F11
cccacacttatccaactatattcctttttcctaatttggggtaaaaggtccccggcacccgg

SEQ ID NO: 1629 - DNA, 524 bp, Gossypium hirsutum
  Clone ID: LIB3825-004-Q1-N6-F12
cacccagaaaaaaagaaaattgcaagaagtaaatagttctcaaaattttggtcacaacttcataaataaacaactccagctaatctttaaaaaaaactactgcagcaatacatatctggatgtcttatgctaaagtttaggcagcattttgggcagcaagcctcttcctagcttcctcaatgatggataacttgatacccttacccttaggaagggacacccatggctttgttccttttccgatggtgaagacattgccgagacgagttgcaaactcatgcccagcagcatcttgaacatggattgtctcaaagctgcccttatgcttctccctattcttaattactccaactcgccctctgttcctccctccagtgaccatgacaacattcccaacatcaaacttgatgaaatcaacaattttgttgctttcaaggtctagcttgatggtgtcattagccttgatcaaaggatcagggtaacggatagtacgaccatcatatgtattcaagtatggaataccg

SEQ ID NO: 1630 - DNA, 502 bp, Gossypium hirsutum
  Clone ID: LIB3825-004-Q1-N6-F4
ggagccaacaaaaaacattttaataaaatcataatatccctacattaaatgtcataccgcattatcaaagaaaataaaataaaatccatcatgatacttatatatctctgcttgttcgggcaactcaataatgtcgaattttaaatagcaaaaatgcagtttttctaagggaaaacaagaaatgaaataagaccagaaagatgtcacaacacttgtaaaaggacttatctatgcctctgtaacagggaactcgaacacaacatccttcccagcaagcttccggtaaactgcagaaaaggtctcaagcttatactcagtgttgtttcgttctttggggtccaaaaacaccttcattaacttagatccatcaattgcatatctagtgcgcttcccaacaatctcggcgggcaagacaatatcttctagcattgcctcgtgtacagaagtcaatgtgcggctgcgaggcctctgaacggcagaacctttctttgggggcctcaat

SEQ ID NO: 1631 - DNA, 535 bp, Gossypium hirsutum
  unsure (1)..(535): unsure at all n locations; Clone ID: LIB3825-004-Q1-N6-F5
gttaaacctaatgtagttatatataatactttgttggatgccatgggngagagccaagaggccttggcaagccaagagtatttacaaagagatgctttctaatggattttcaccaaattgggcaacgtatgctgcacttttacgagcttatggaagagctcgatatggtgaagatgctctaaatgtgtataaagagatgaaagataatggattggagttgactgttgttctttacaatacccttttagcaatgtgtgctgatgttggttttgcagatgaagctgctgaaatttttgaagacatgaaaaattccggggcttgcaaacctgacagttggacgttttcatctttgatcacgatatattcttgtagtgggaaagtttcggaggctgaggggattttgaacgtgatgcttgaagctggctttgagcccaacatttttgttctgacatcccttatccaatgctacgggaaagctcagcgtaccgacgatgttgtaaggatgtttaaccgagtttacgaattgggaattact

SEQ ID NO: 1632 - DNA, 536 bp, Gossypium hirsutum
  Clone ID: LIB3825-004-Q1-N6-F6
agaaagaaaactagcagcagttagtatagaaagagaaaaaataaaagaagtttgtattgtattttatttgtatgtaaataaattagtatttgaattatctttattattacgcttacaacactaggttgacggctcaggagacaaatcacaaaaaaagaacacagcaaaactctaatgcaaaaagattctaaaactaaacgagaattacaccgacgaagaaacctacgaatataactagttcacacaatatcaagcaatcgaaacaataaggaaacaagcacaagaacaatcaaagcaatatcaaaagggagataaacaatacagaaataatctccacgagaaggacccgagcaaagacccccacaaaccaggccgaagcagcgacaatccaggagccccagcaaacgataaaagaacaaccccgaacgaagacagatcgaagccaaaggaaagtacagagaaaaggaagaaaagccacgtcaagaacttaaggcattccctaaaacagtcctgaagccaagggacgtggaagcacc

SEQ ID NO: 1633 - DNA, 497 bp, Gossypium hirsutum
  Clone ID: LIB3825-004-Q1-N6-F7
gataaaacaacaaacaattaaatcaaaaacatcaaaaaccataaataatttatgtctttagcagagtactgaaaataagagacaaaagcaataataaaaaggactaaattcttcagcaaccactttttttttctttgcttcaaacctcagcacttgacctccttcaatgcatacgcaaagtacaaaaatgtcgggtcaacagcaccatccttgtagtaagcaaataccaaacatccatcatcgggcatgctctttccgatgaaaaattgaaggtccttcaattttgaaagcaaaaacttggttgctccctcaatgtttttcttgaaggactcttgcttttccgcatccagtttcggggtcaagttcttgatgaacttcttcatgaacacgacaaactgctttttgtcaaaagggggttgctcctgaagcctgaaagtgtcaacaatgtcaacaaccttcacagattggtcatcaacaccttcatcctcatcagcata

SEQ ID NO: 1634 - DNA, 508 bp, Gossypium hirsutum
  Clone ID: LIB3825-004-Q1-N6-F8
aagccaaattccttataatcttatttacactgtataaacaggagattcagattgggtcgaacattcattcgatgatccagaagttataaataaaatacagtgtttgcacttacaactagtgtagatcaatgtgaaaagttacattaaatctatcaaccttcctctccgaactcatttgtaaatctttcatggacctcaagatcagctttgctcactgttggcctctgtcttgcaagcaccttgtcaaaatctgatcttgaaataggagggggaagaatctgtgccgcaagtcctttggcagccaattcctgcatagtaatttggacagcacctggttgctttggtccacatggcatccacatatcatcaggtgtcttgaaaaaaaacatggcatcttgggttttacgaacaggttcaaaaagaacatcctttacacaaacagatatgttctgaccctgaaaacccatccgtccgatgagctaagctttcaaaatcattttcagtcaag

SEQ ID NO: 1635 - DNA, 538 bp, Gossypium hirsutum
  Clone ID: LIB3825-004-Q1-N6-F9
ggaatcaaatcagtatactcacttttatagaatttagtccataaagcaactagtaacatcgaagcattcagcaacagtaactgagacgacctctcgtgggaagtcataagtgataattctaccaccaacccaattgtgttggattcgcgtacgatatcgaagacagatttgagactaaacctaggaaacttgaatatttcgattttaaagatcgccataaaatttttaactacactaattgcatggtttacttgattaaaaaagctaccttgaggaagaaagataaagacaattacaaggcaaaacccttcaagaaatcagaatcacgcttggctttctcctgaaatttcttaaaccatctatccaaaatgtccatagggactaccaacttagacccatcaacaccacagaacgactgcataaagttgaacaagttttccccaactttcaacgccatgcgttcgatcttcttctcagcagccacatctaaggacggcaacgcaaccagatcctccaccgacacaccaatcttggcgga

SEQ ID NO: 1636 - DNA, 78 bp, Gossypium hirsutum
  unsure (1)..(78): unsure at all n locations; Clone ID: LIB3825-004-Q1-N6-G1
gtatctattaactcgggcgacatgaggatctgtacccgagagaagattctctgnactcggttccactggcaggacgtc

SEQ ID NO: 1637 - DNA, 512 bp, Gossypium hirsutum
  unsure (1)..(512): unsure at all n locations; Clone ID: LIB3825-004-Q1-N6-G10
atataggagaatgatccttcnatatatatgaaaaaaacttttacaaagnaaaattgaatacggttagacaagtattatccggagtctggaaaaatagtctttgtcaccattgaagtctcttgccagtgaaaactaccgtcacactattgaactgctggctcctgttgagtagtcgcggaaggtcccggtgctgttatactgtaatgtatggtaagaggttggtcctgttgaggagtcatggaaggtcctgatgctgctacactgtaatgcatggcctgaggttgttcctgttgaggaattgccgaaggtcccggtgctgctatactgtaatgtatggtcagaggttgctctggttgaggagccgtggaaggtcccggagctacgctgtagtgtatggactgaggttgctcttgttggtgagtcactgaaggtcccgctgctatactgtaatgtatggaccgaggtcgtgttgcctgtatcattactgcaacatcagccgctgtgatagctga

SEQ ID NO: 1638 - DNA, 537 bp, Gossypium hirsutum
  unsure (1)..(537): unsure at all n locations; Clone ID: LIB3825-004-Q1-N6-G3
agcttccaaaccacaattaatattaaatgctttcagcactagnnaatcctgaaaaatgaatgtgtttcatcaccaactgtctgtatccaaatccttcagcaataacaaagtttatgctacatcaatattttaaagtagcaacaatggccatttcatccatcagtgcatgccattcaagctttggtgaaactggcggatgcataccatgctcaagtgtggcagctataaaacactggagtgttctaaagcacaagtactcctccccaaatgattgctcaatagtttctggtggttgagataatatagcaagatgagttggaccacctcctcttccaacattcccaccacaacatggaatattgttagcctcattccaaattgcttagcaacctttataagctcatcctgagctttgtataatttccaggcagtagagagatgcccaacatctttacctgaatctgaatacccaatcataacttcttgctttctattgatccgatttttgtaccaatctactgagaatagccgtgccaa

SEQ ID NO: 1639 - DNA, 540 bp, Gossypium hirsutum
  Clone ID: LIB3825-004-Q1-N6-G5
aaaagcttcttcaatataacatcgtcactcaactccttactcaccttgtcgctgtttgtatgtgaaacaattgagagtccattatgtggacttctatctacagtggtgcatactgactttgagtttggactctttctcaattttgctttcaatctctttggtgtccgtaccaaagttgcttctgacatatcttccaatgccatgatttcagtatccttcctctttggagcttccacttcaggctccttggagactctaggagaagagctctgaagatgatctgctctctctacctttctgctttttagtgccaagtagcgggcattcttgaaccatttatttaccttttcaggctcaaggcctaattcctttgaaaggttctccctgacgaatctagatggaagttcattctcagcaaatacctctcggagtttctctactgcagtgggaggaattctgaaaaaggtcgcctgctcttcaggtctgaaggtagctgtcttttcacttctgtggtttcaatgttaagaaattttgtctcac

SEQ ID NO: 1640 - DNA, 511 bp, Gossypium hirsutum
  Clone ID: LIB3825-004-Q1-N6-G7
aaaaaaaaataaaattatctaatacttgtggatgtaaaaataggttaaaattttacatcaatgaatcaaataattccacttctatgccgtgatcatgtcaattattcatggatattgcactgctgtaagtaagggtggtcatactgcatatgtttgctccaacagcctttatatttagcaattcctatttccaaccagggtttcatgactccatcatagtgtataaccgctgcccgctcgatatcagcccgccgaagacctgagtgatagccaagccctagcgcatgccatctcctttctaaagccacagtccatgaaagcttgttcaacatttgtggcatcttttgcactggtttccaaaaaagtatgccaatttcatttgcaaatgccttggctgtttcgtatgatacaactttattagctgtaagatcacacttgtttccaactagtagtttgttaacgttatcactagcatagcgatcaatttcactcagccactgcttgacattgt

SEQ ID NO: 1641 - DNA, 507 bp, Gossypium hirsutum
  Clone ID: LIB3825-004-Q1-N6-G8
gataaggaattattctacgtaattgacaatatacactgtaaaggcccaagtttgtctggcccaaaaataaaatccatttaaaaattaattaaaaaaccaaagcccattaacccaaagcctaatagcccccacccgaggttacccaccccctaagactgcactctgccaccatttcaccaaaatggcatgtggcgccactctcaccgacattgactgaaagtctccttgccaacaccacaaaagtaccttttggattgagagcacaaaatatactagcctgagttgccttcatttggcttcggaattcttttgtaatcatagttgtttatatcaaccttctgttgcaaagcctttaattcttcctctaatgaaatcttttttggcttatatgcatcaatgggtcctgttcttgataatgctttcctcgtctcgataatttcccattcttgatcatctttcacctttgctatatccttgctgccctgcaagaggtgaccaaggccgact

SEQ ID NO: 1642 - DNA, 505 bp, Gossypium hirsutum
  Clone ID: LIB3825-004-Q1-N6-H1
aaccattaatttataacgtaaaaagagcaaaaaaacaatagacgggtgatggaggaaggctttagggccttcacagatatagctaaagatgtttgtttaggagaaagtttggtaacagcctaagctgtgtaataagcattacatataagaactgcagtaaaaaactgaagataataaactaatgccaggtaaggcgcacatgaaacaaaatggaggagggtacttgtgaacataattgggttttccatccatgagttaagaggaagcgtgagtttgattcctggctttctccttctccttcacttcactcccctgcgtcttgtcataagctgggtgactttcatgaacctccttgtgttttttatgtcagatatactctcgttctctccataaatccctccaaacccttcttcatctgatctcgtagcatatccctctccgaatgactcagacatcacatccccaggtttttgttcaggcttttcgtctttctgctccatgcttt

SEQ ID NO: 1643 - DNA, 521 bp, Gossypium hirsutum
  Clone ID: LIB3825-004-Q1-N6-H10
agctataaatatgctttatatatatccaatgaaacagtccgtaccgtatcaaacatataggagagaatacattacaaaagctttcctagccgggtttaaaactcaataaaatctcaaaacataagtaaagatggatacaataggcaaccatatgctatagatgaaagcaggatgcagcttcactgctaaaaaaagcctctcctaaatcttatgcttaagaactcaaataaaacctgcaaatgcaggaaataaggatattatcacacaaactctatctttattactgatagtacaatagctgctgggcagcagcaacattctggaacccaccatcatatatagcctggcttgctccagcagcacccactcccattgctgcttgcttcagaggatgctgtccctgagggtgcattagagcatgaacgccacccattttgctcatggcaagttgcctttcataagctaataggtcaatcgctgaaaggcccggtaaaggtgcagctgcaggtgggggaagtggg

SEQ ID NO: 1644 - DNA, 518 bp, Gossypium hirsutum
  Clone ID: LIB3825-004-Q1-N6-H12
gaggataaggacttaaaaggcaacataatattataaaattgattgagtttcaggcaatatgcttctagtaaatttgataatacaaagataaactcaacaaattctcagcctactcatttgaattccatcaaaaggccttcatttgtggctcaaactggtcattttgccccactttttcttgtcaaaattcatatcaaaagaatcagagcaagtggcaaactaggcccaaaagttattttggcaaattatctactgcttctctgatgtcaacttgaaaatctctgttgagatctcctatggacattagtagaagcatttagtggttgtggaactttgggtttagtcctactatgccttcttcccattgccctttcaccttcaccatcacccaaatgagttttcaagtccccattcttcctcttacttcttggtgttgttcttctactaactgcaacagcttcacgagaaccacgccggccgctatcaccattctcagtttctgaaccagaaaaagtaac

SEQ ID NO: 1645 - DNA, 529 bp, Gossypium hirsutum
  unsure (1)..(529): unsure at all n locations; Clone ID: LIB3825-004-Q1-N6-H2
aaaaaacattgatgtattaattatttaaaacataaactttagtgccaccattacaagtacataacagcagacataattctcacccacaaatacaaactagnaaaaccaaacaaataacatgtaatagaacagtctatcagttacaagcctgaatggttctaccgtggctatgagcaaatcctgttgaagtatgatgccttaaatgagtttcacatttagttataggcaatggtaagactgtttcaaaagcttcaacaagtaatgccactttcttttttttagctggtccaagcttggttactgcttgttgaagtgcatgatctaacatccattcctctgcatttctcctttcttccatcatttcatgccttagatcaactttttctttatctgcctctggaacaacagataggaaattcggttctctcgggttgaatgtcttcaattcgtcgttgttctcgtcgtgtcttccatgtccaatcgtccatttcgtggtgtgcttttcatgtagtgcttcatttgcaatagc

SEQ ID NO: 1646 - DNA, 532 bp, Gossypium hirsutum
  Clone ID: LIB3825-004-Q1-N6-H3
atcaaaccacgttaacacttaattttcaatatatcaaataatttttataatacaaattcaatgctgataaatttaatacttaatttttcaacatttaacttatttcgacctgtaaactaaccaaatataaatacaaatacatgaccttatctaccattttagatttgaaccgacttgaactagcagtaacccttaacgcaatccatgttatttgcttgcaggctactctatgaagattattatgttgagtttggtgaacatgatgttatcagtaagcaaaagctatatcggtggaacggtaatcgtaacgtgtaatatcggaatatggtaaagattggcttcaacttccaaacgaatttctactgagagaaggcgatgagttcaacatctcttgaccgagctcctttatcttgttcagtagaagcatctgctcggtttcgagctgtaccatgtattcgtcttgtatatcttgaagagcttcgagttcactgagtggagttgaaatcccttcgaggttgccattatcgattaa

SEQ ID NO: 1647 - DNA, 511 bp, Gossypium hirsutum
  Clone ID: LIB3825-004-Q1-N6-H4
gtaagaactgtaatatatccgaatctgaaatacaataaacaaacattaagaagaagaatgccagatttaaatgatgttaattaaacaaacattactttctgaaaaaaacagggattatagtaagagttctaatctatttctttatgcacatctctgacctaaatttattctctcttgctactaatatttttaaagggtttggtacaaaaatcttccttacatttgctttttcttcatagcttgtttactgttgtgcatccaaactttaaaaacctgtctcttaactcccacttgagcacaaaattgctgcacttctggttcatcttgtttctggattctccaacccaatttctcagcaaattccatcatcttatccttttgatctcggctgaactttgttcgaaacctcttctttgatgactgtggatatgatggttgtcgacctcctgcttcattagaatgaaacatgttcagttcttcacttgatgactccgccgggccgccacggaag

SEQ ID NO: 1648 - DNA, 511 bp, Gossypium hirsutum
  Clone ID: LIB3825-004-Q1-N6-H6
aactacgaatttgaatgatattaaagttgcagaattaatagattcaagtagtagaacatgggaaaaaggagttgatagcgtctacctttcaggaggaggttgccgagaagatattagtattccgctggctgaagaaccacatgaagatttccaagtctggagtgctgaagcgtcgggcgagtacacagtacgtagtgcctacaaactttttgaatctgtttttgcattttattgaagcgaaagccaaatttatagtttcgaaggtgcgggttcggaagttgaaagctcaacatacatgttggctatggctttcgcaaagtactccttggcttgagatcgcttgatcttgaatgttggagtgagaagtccattttccaaggtgaattgttcaggcaccaaagttacagctttagcaaattcaaagcctcttaactgtgcttcccttcccacatcatccatctcagcgagaacagcattccttgctcttggatcattgcacagctgtcgtaaa

SEQ ID NO: 1649 - DNA, 539 bp, Gossypium hirsutum
  Clone ID: LIB3825-004-Q1-N6-H7
gactaaatgctacccatattacatatgacaagtaagaatacacgacaagtcagtaactcttctaagagtcaactataatagcaagacaaaatctaatcagccatggtatagatatatataacgacatttaaaaggtggtcctcaaaccttttatgcaagcaatacaaccctaaactaaaacacacaatctagttcgttcttggtgtagccgattcaactcgcaggatgagattatcataaccatacgccagagcgcttgatgatagactgtgtgggcatcagccttgtccacaaaattaacgaaaccgaaaccccgacttatgccagtcttctggacgatggcaacataaactcgacttactgcaccaaatgggcggaaaagctcgtgcaagtgagcttaccgggggttctacgaaagattagtgacccggtacagaggtctcggcccttctgcgtctaatatcagatacggtgctatgagctccgggtctaatacctggaggaacataagtcttttttcctgagccagcagcagcagt

SEQ ID NO: 1650 - DNA, 352 bp, Gossypium hirsutum
  Clone ID: LIB3825-004-Q1-N6-H8
gaaataaattactatagaaaatattattagtgataaaaaataacctttttacagggaataagctccctctctcacacaccggcctttcactcgagtaacactaaaggccctcaacacattgatgaaccatgcatgagcgagaaacaaaacaaccactctggtgatcaattggaaccaggatcctgtaggggaaaatagattcccggaatctgctagcctcaaatacaaaatggctagcgtcgcccttcaactttgtcaaacccttgaaggactcctcagacctcttctgtcccggtggaacccgaagactcctggacacgaaatctggtgatggcagctgaataaatccgac

SEQ ID NO: 1651 - DNA, 518 bp, Gossypium hirsutum
  Clone ID: LIB3825-004-Q1-N6-H9
aaaccaacaaaaattttgtctgatttcgcttctttttttttcaagtctatagtcagacagacccaccttctctaagccaacatctcctaaatttacaccaaaatccctgaaatcaacactatatgccttggctgcaaaaaggatgtcatgcgattcataccaatccattatacttctgaagcttccccttgagaatttctttttaacatgacaccagggagcatatgataaaaatgcatgctagagatggatgctttggttatatcctttctatcaatacctgcacgtgtgctggtcaccgctggggaggttctgaaccagttacacctgatgtggtacttggtccagcaccattttcagctggaggagaggtgccccattttccttccgactccaatggctccacaatttggactccaccatctgttaatcccaaagcaaattgatttgggtcggatgggtgtgccgcaatgacaagtggaaaaactctcaagcttggatttggaggtaaatatgct

SEQ ID NO: 1652 - DNA, 606 bp, Gossypium hirsutum
  Clone ID: LIB3825-005-Q1-K6-A10
ctttacccttctcccttcctcacgtctggaaccttttttttttctttctttttcccatttccttcctgcctcttcactaactttacccttcctcacatctgaagctctatcaacgccttcgccctcgacgctttcgccttctcaggttagggtcatattccatttttttaattattattttgatcatcttccaacagatcgacttcagatgggtggggtagtctctacaattccaacttcgatgcgccatttttttgaactcttttttggagcgattgggtttaatgtaaagactgtacaatacaacaacatcaagtttcaagtatgagatttaggtggtcagataagcatcagggcatattggagatgctatttcccaaatacacaagcaataatttatgttgttgattcaagtgacacaagaaattattcgctctgctattgactttaagagggacccatggcctaaggtttcggacaatgcaaaggaccttgtaaagaaaatgcttaatcctgatccaaagcagcatcttacagtacaggaagtgcttgaacatccatggctacaaaatgccaagaaagcacccaacgttctgttgggtgaga

SEQ ID NO: 1653 - DNA, 586 bp, Gossypium hirsutum
  unsure (1)..(586): unsure at all n locations; Clone ID: LIB3825-005-Q1-K6-A11
caaatacctatttcaanagggagtttgctatgcaaagaaggattacaatcttgcaaagcaccccgagatcgatgtacccaatttgcaggtcattaaactgatgcagagcttcaagtccaaggaatatgtccgcgagacttttgcttggatgcactactactggtaccttactaatgatggaattgagtttctcagaacttaccttaatcttccatccgaaattgttcctgctactttaaagaaatctgcaaggccaccgggtaggctaggcggcccacctggtgatcgcgctcggggtcctcctcgctttgaaggagaccgaccaaggtttggtgacagagatgggtaccgtggaggtcctcgtgggggtgactttgttggtgataagggaggtgccccagcagatttccaaccatcattcaggggccctggtggaaggcctgcctttggtcgtggaggtggaggttacagtgcagctccatctggttcgggttcgggttttgcttgaagccaatgcttatctttgcctggttctttttaaagcatagtatttaaaaatcttagagctaattcctattttgtagcc

SEQ ID NO: 1654 - DNA, 549 bp, Gossypium hirsutum
  Clone ID: LIB3825-005-Q1-K6-A12
gccccatcagcgccgccctcaactctctctgctcgaaccctaaaccaggcgatcgacaaaaacgaacccagcaagctccgttggggagagcttgaggaagacgacgacctggactttttgttacccccaaaagaagtgatcggcccagacgaaaacgggataaaaaagtgatagaatacaggtttaacgatgaaggtaacaagggtgaaaataacaacgacgacccgagttcgaaagctggcgaaagcccggttgagtaaacgggcattggaaagaaggaattgggacaagttcggggacgccgtgcgtgaagatgttgggagtcggctcactatggtttctactgaagagatccttcttgaacgacctagagcccctggtaccaaaccggaagaagcaaaggcttccggtgacggcttggctcagcttagcaaaggaggtgctgttctcatggtgtgccgaacatgcggtaagaaaggtgatcactggacctccaaatgtccttacaaggatcttgctgctccagtcgaaatcctttgttgataaacc

SEQ ID NO: 1655 - DNA, 330 bp, Gossypium hirsutum
  Clone ID: LIB3825-005-Q1-K6-A7
aggaaacagcttcacatctggtgaacgtgaacttgccgaggagttgcttgtttacttcattgaacaggtactgaactcattccaaattacataaaaatatatatatgctgactgattatctgtttggactttggaggtagaaagcaatacacctttttggccaattgctactcctaattatgttattgtgctctcttccacttgttcctttccggtgcaaatatgagttatgcttttctactctttcttcttgaaatatctgtgtctgacacttatttccagcgcatatttggacacggttaatgggatatgaccttccaaggactgttc

SEQ ID NO: 1656 - DNA, 591 bp, Gossypium hirsutum
  Clone ID: LIB3825-005-Q1-K6-A8
gttctgctaggcaatgggaaagtacaaattaattaaggaagttggtgatggaacatttggtactgtttggcgagctattaataggctctctggtgaagttgttgcaattaagaaaatgaagaagaaatattactcatgggaagagtgtgttgaatctgagtagaagttaagtcactgcggagaatgaatcatcccaatattgtgaagcttaaggaggtcattagggaaaatgacattctatactttgtgtttgaatatatggaatgcaacctataccaacttatgaaagacagggaaaagcttttttcagaagttgacattagaaattggtgcttccaagtctttcaaggtcttgcatacatgcaccagcgtggttattttcatcgtgacctaaagcctgagaatttgttggttactaaagatataatcaaaatagctgattttggtcttgctcgtgaaataagctcacgtccaccgtacaccgagtatgtctcaacacgctggtatcgtgcccctgaagtacttcttcaatcatacctatacacttcaaaagttgatatgtgggcgatgggtgcaatcatggctgagttg

SEQ ID NO: 1657 - DNA, 571 bp, Gossypium hirsutum
  Clone ID: LIB3825-005-Q1-K6-A9
agattagcactgaaaatttgttgagaggaaggccgagaactgtacgaagaattttaaaaaatgatgaatctatcctccacaatgaatgcctatggatgccgctattgcgtgtcaccattaaagcaactcttacacaccactaatcaccatctccgttttcgaccatgctctccttccttattctcttcttcatttaacaatcttaagctccccaactttaatcttcttctcacttctaactctttcttcttcaccatggagcacttgtgggatcgaagtgggatgaacactaacaagaaaatggtggagcatttgcagcagtatggggtgatttcatccgagaaagttgctcgagtaatggagactatcgatagggcgttatttgtaccagataagaccccagcttatgctgactgtccgcaggaaataggttacaatgctaccatttctgcacctcatatgcatgctacctgccttcaattattggaggaaaaattgcagcctggcatgcatgctctagatgttggctcaggaactggctacttgactgcttgctttgcaatgatggttg

SEQ ID NO: 1658 - DNA, 602 bp, Gossypium hirsutum
  Clone ID: LIB3825-005-Q1-K6-B10
ctcgatgtcaaccggttacaatatactgacccgagagtactccaatctgtaaacttgcagataaatgtgtcatggcatcctcaggatttcaagctgacgtgagggctttacaaaagcaactggcagctaggcacttgatttatcagcatcagcacaacaagcaaatgagctgccctgcaatggctcaattgctttccaacacactttattacaagcgtttctttccttattattcttttaatgttttgggtggccttgataacgaaggaaagggttgtgtcttcacatatgatgctgttggttcctatgagaaggttggatacagttctcaaggttctggttcaacgctcatcatgcctttcttggataaccaactgaaatctcccagtcctcttctattgcctgcccaggatgctgttactccgcttgtggaagctgaagctattgatttggtaaaaactgtttttgcatctgcatccgagagagatatatacactggagacaaactcgaacttgttatcataaatgcagctggtatccgccgggaatacatggaacttaggaaagattgattaatctccattctccaaactgggttacca

SEQ ID NO: 1659 - DNA, 409 bp, Gossypium hirsutum
  Clone ID: LIB3825-005-Q1-K6-B12
gcgcatcaacctagtgtgcctcctgacctacaggctgaatcacctgccataagaacatgtcctgactcctatcccttctcttctactaccccatactaccagacttcgaccaagcctttagtgaaggcggcatcttttattggaggtgtattcggggattgtttgagcagtttgccaacaactttgccctctagggagcaaccgtgagccttcacgtacgtgaagtctcaagaggagaaggatgcacatgacagtcacgagatcctgaggaaggctaacacctcacgcgcctaggacccgctggctgtatctcgctgattcggggtacgataagaactgcaaataattcatagctgaggttttaaaagcatttggtcagatcgatatattggcatacaatgcagttgac

SEQ ID NO: 1660 - DNA, 554 bp, Gossypium hirsutum
  unsure (1)..(554): unsure at all n locations; Clone ID: LIB3825-005-Q1-K6-B8
ctgcaaacatcagtgcgcagtcaattgggngaatttcggcccttcaggcaaggggtttggtgttagtgggtctcttggtctggatggaaccggtgggttgcaattgttggatataaaaaacaatggtgatgatgttgatggattaatgggtttgtctctaactcttgatgaatggatgagacttgattccggtgaactcaatgatgatgaagatcaaataagtgagcggacttctagaatccttgctgctcatcatgctatatcattggacttgattcgcagagggtcaaaaggagagaaaaggcgggttaaaaagtgtggtttgttaggaaataactttacggtggcattgatggtgcaacttcgtgatcctttaagaaactatgagccagtcggtacacccatgcttgcacttattcaggtggagagagtatttgtgccaccaaagccaaagatatatactacagtgtcagcttctaggaatgacaatcaagaggatgatgactcagactctgcggtgaacgaggtgaatgaggaggagataaaagaagaaa

SEQ ID NO: 1661 - DNA, 591 bp, Gossypium hirsutum
  Clone ID: LIB3825-005-Q1-K6-B9
gttttcagttgagatttttgatagagacccaaaatcaggaatagctcaaaaagtaagtgcgagtggaaaaaaacttggagactaatagtttttgtaagaataaatttgtgtgtacttggtttgggttttgtggaagaatacaagaacacaaaactgaaagtgaagagggttctgtacagcatatcaaatgaatgtgtaaatcttaaatagagcagtgctgaagcttgtaagctgatcatagccaatgagacaggacaagttcacctagtaatgaggcaatctcaagactctcaagatctgaacaaatcatttagtgctgcccactatgacgagggcaagagcacgcaatgaacccctatatcgctcttatggcacgcttctgactacgctgatcgtgaattgcaagataacctgttctgccttcgttccgcatctgtgtaaaattgcaaaacctctgatgcagaagatgcacacaagtcactgaattacaataaactcgacttaggagcaataaagtagcctctagctgctgcttggactgattggcataagttcatgccttttgatgaaaaagaaagcatcgagggataa

SEQ ID NO: 1662 - DNA, 605 bp, Gossypium hirsutum
  Clone ID: LIB3825-005-Q1-K6-C10
gttctgttaatataagggaagtacctttgctcaactctttctctatcccttttgttgcaggtcaagctgaagaatctcttagtagggacgtagtactttttgggttcaatagaagataaagtccattccaagcgcatgccatcaaaatcatccttgatcctgcaatcaacagggatgctacgttttggtggtgtggtgggatcactggactcatcgaaacctacgagaaggctatcgctggagggtccaattatggtgggcaagtagatctccgcagctcgaaacaattggttatcgccagcgtgccatcggttttcgattatgaaggtaaagtcggatgagaagtaagcagaagtaaagtcgtaaatcatagagaagatgtagtttgtcatcctttcagggagcatttcatttaagatggttcggattaacatagccatggctgaaatagaagcataagcggagagaatagtagacaaagaaggtaactctttcaacattgtacccaattttgtattcttcctttgttttgcttcttctgtgtggaaaacacagaaaaaaaacaattcaatggagcagttgagtgaagggtgaggaacactcaa

SEQ ID NO: 1663 - DNA, 577 bp, Gossypium hirsutum
  Clone ID: LIB3825-005-Q1-K6-C11
ctctccagcagcgtctccaagctcttatcgaaggaaccctagctgtctcaagtccctactaactgtttgctacttcgttcccattcgcattcccacttccacacactcatttcgatgaaagattgacaaacccacccgcaaattttcgactgtcgaagaattgttgaataaaaacaaaatgcatggttagcattccattcaattcttttatttgtattactgtttcaggtttattcccctcgcttggattcacctccaccaagatgggttcattttgcacacgggttgcttctatttttgtatcagacttttgatgctgttgatgggaaacaagctagacaaacaaactcctcgagtccacttggagaactttttgaccatgggtgtgatgcacttgcgtgtgcggcatgtatttaacttgtttcattacataacaatgtctaataaaattctgccattatacaatattgattctttttaagttcgaaaccatggcttttgggagcactgccatgtgcagaggggacagtttctggttttgggtaatttcatctataccattttatggagctacatg

SEQ ID NO: 1664 - DNA, 595 bp, Gossypium hirsutum
  Clone ID: LIB3825-005-Q1-K6-C7
cggccgcgtgggttttgatgatcaaagcaaaacagcaagataattaagaagttgaagaagataatgatggagaggaagcatctttcttctatcgccaaccatgtccttcaacgaagcgcagaggaacttggttcttcagtagatcatttggtaaaagaatttgaagctaaatggacacccgaagtaggcgattattcgaagaaattagtggaattttgcagttcaaaggccctcattaaattttgtcaaaatataaatgaaaagataagcgatggatcatatagccgcttcacatatgacatgatgcttgcctgggacaaccccagagctgtggacgaagagtcttcaactgcgagaatatattaacttctctcaatcatagtcaaagcttggaatttacttcaattctgaattgcaatcttttggctgaatagtcacatttcgatgaaatatttagtgaatcctcgtaacatttgccttacaagtttgtcagaatttatgtgttgatgactttctccacatacattgttactgattctatcatttgagttaggaggagagcattgggaaggagaaagaagatagaaaatacaag

SEQ ID NO: 1665 - DNA, 541 bp, Gossypium hirsutum
  Clone ID: LIB3825-005-Q1-K6-C8
caaaaggtgcatgtttttagctggttaatgacggtctggtttttgggttgaacaaggatctttatacactatgttcttcttctcttaaaccttttctttttttgggatctgggttttgcgggttgtagttatactacggcttcagttgtttagcctttgactcgtgaatctcttcattgggttccctcccaagtttttgtcttttttgtactttttccttcaaggaaaaatgggcttttgactttttctgtacttccaattctatgttcttgtctgtgtgttgtgcaccagaatattttttttggtcctgtcatcggtttcttttctcaggttggagcctgagattttttatttttttttggaatttccttcctcttaaacttttttggttccttatgagttgctcctctcttaatcgaatcctttttagctgaatttagggcttttctgatcttgtacaagattcctcccttttgctttgagccttaggttttgaaaattgaacccatctggtagaaaaaaaaaatggtgtggggagggg

SEQ ID NO: 1666 - DNA, 356 bp, Gossypium hirsutum
  Clone ID: LIB3825-005-Q1-K6-C9
ctctttctttgctaccttctatagcgaacagacaactcctcattcattgcaatccggtggtctctagccaaagcctctcctctacaagagaccatcttgttcaacgcatgccagaccactcctgggattgccctgtgcaggcaaaagctttctgcactctcgagagccttcgttgaagatagtaagcgaaaagctattaaactctaggaacgaccaaagacccaacctttaggtaactacgctcattgctctacatatgtcagcctatcgctgctatcaccgggctatcaatacgtacaatttatgaactgctgggtacccggagttcagtctcccataactcgcagcttgctagc

SEQ ID NO: 1667 - DNA, 601 bp, Gossypium hirsutum
  unsure (1)..(601): unsure at all n locations; Clone ID: LIB3825-005-Q1-K6-D10
gtngcacctgatcccgacaanattttagctctggctatgagggggaaagatgtagttattgaaaatttgagacagctatgtgttttcaaagtggcaaatgagaaccaataagccttggttgtggtgnggacttatgtgacagnnattttcagnataagaatgnnccccatgaagggagaaaaaatataacaaggaatgcgcagatgttgttatcagagctctcgggcttgatggtaaaaagattgagaagtgcatgggagaccctaatgctgatgaagataatcctgttctgaaagaagagcaagaagcccaagtgggaaaaggatctaggggtgatgttaccatactgcctacgcttgttgttaacgatcgccaatatcgaggaaagctggccaaaggtgctgttctgaaggccatctgtgctggtttcgaggagactactgaaccagccgtttgcttgagcggtgatgtggagacaaatgaatgcttggataacaacggtggttgttggcaagataaagcaaccaatctcacagcctgcaaggatacatttcgcgggagagtctgtgaatgtcccttggttgatggtgtacaatttaaa

SEQ ID NO: 1668 - DNA, 600 bp, Gossypium hirsutum
  unsure (1)..(600): unsure at all n locations; Clone ID: LIB3825-005-Q1-K6-D7
ggccgccgttgtcgtccctgcagcagaacagcaaaanaagcaaagcaatggcaaggatcaaggttcatgagttgcgacagaaatcaaaaaccgatcttttggctcagttgaaagatctcaaagctgaacttgctcttcttcgcgttgctaaagttaccggtggtgcacctaacaagctttctaagataaaggtggtgaggctgtccattgctcaagttctgactgtaatctcacagaagcagaagtctgcattgagggaggcatacaagaagaagaaattcttgcctctcgatctccgtcccaagaagacccgagctatccgcagaaggcttaccaagcaccaggcatctttgaagaccgaaagggagaagaagaaggaaatgtacttcccaatgaggaagtatgccattaaggtgtagggtaggatctctcacattctatttacatatcgattcgctctttactttctagcatcgtcttccgtaaaacccgagttgtgattttgtttcaatcttcatgtttggaaactctgttttgtccccttgttaaaaaccaagattctggtctttttgattgaatggtaatttatggattttttgc

SEQ ID NO: 1669 - DNA, 601 bp, Gossypium hirsutum
  Clone ID: LIB3825-005-Q1-K6-E10
atttttagcaaccgattggctagggtgcgcctagttgtagataccaattttgtttgtcattaagtaaatgtgattcaatggttgtttcaattggcccttctaatttttacgcttttaattttggctatgaacacatggttccacttaattgatattgagaggaagaatataaaacttggatctttctggcaggctgttttaactcggacctacactgcaaagttttcaaatttctacatttctcgttttctgaatttttattcaaataatttcatggctgtttactctttacattggaaaatgatgagcacatggagttggtcagagtcagagtttaagtgctgtatttctgccaagtgacatcagaagaataagatggtctgctgatggtgaccatttctattacgtttgtttgttgcagaagcctattccacaaatgtcaggtggtgactgtcgcagcaaacatctacggcatcgatcagagaggacctccccagaacgttccttacaggaccatgaagcacctccccaccctgcaaagaggaaagctgaccagcatcatgaccttgaacgtgattatgactatgatgatcgtgaccat

SEQ ID NO: 1670 - DNA, 580 bp, Gossypium hirsutum
  unsure (1)..(580): unsure at all n locations; Clone ID: LIB3825-005-Q1-K6-E12
ccggntgttgcagnaaccttagttgatctgcagcgaagttctctcaattgcccttcgacaattaatggttatccattggctcctgagacaacaatgggatctacagctctagtccctacttgttccattggtcaggttgatacaaatctaaatgacagcttggttgacactaccctctttggtggagaggatccctcacttcagatatttcttccaacgcatccttcaggtgcatcagcagagtctggtttcagagatgaagctgacgtatcgaacggcatctgtaccgatgattggatctcacttagtcttggaggtggtgcaagtgtcggccatggggactcgacaactgtgaatggattgaattcaaggcagccaataccttccaaagagcgtgctatggacactgcttctctgttgcttggtatgaatgagagtagaaatgggaagtcaagtaggcaaagaacagagagccctttcttatttcctcggcaaaaacggtcagttcgaccaagattatatctctctattgactccgacaccgagtaattgtgttcgcataaatttaacggctacttgt

SEQ ID NO: 1671 - DNA, 538 bp, Gossypium hirsutum
  unsure (1)..(538): unsure at all n locations; Clone ID: LIB3825-005-Q1-K6-E7
tccgcccaagnaagacagcccaagctgccatgtagccaccgccacggtggccgacggagggtggtccattcggattctaaccccgttcagacttgcgatcaagaatctaacctctatgatagcaaggaatcaaaaagatagtatcaccctctttattagatttggtttcaacagagaagaaactccgatatataccaacggtctacgattcaggtgccatgcgacgcgtggaagaggcgacagtcaggggcgtggtggccgaggcggcatgcgtgggaaagccaatggtggaagcggtggctgaagaagggggagcggctggaggcttggggcttgctaaaaatttttaagattagctgggttagggtttagttttaggcctattgggtttgggcttgtaaaattatttgctgggctattatattttatttgtttatgggcccgggcaacattgggcttgtacaataccctcatcgagtctatgtaactccgtaacctgaaatatttcatttgggcacgagtgacacactgcagacat

SEQ ID NO: 1672 - DNA, 587 bp, Gossypium hirsutum
  unsure (1)..(587): unsure at all n locations; Clone ID: LIB3825-005-Q1-K6-E8
gtttgatttcttaggtaatcacatcgtttgacttaaattttaggagtttcagcaagagattataaactgcaagtctcggattggccaatatggagaaaaacgattaagnaatantttgaagggcganntgcttccgaaatcacaacgttgattcaggccgactaccacgagcagatcctggaggaaacactgaaacaagtgcgcttacacaagcaagttttagaggaaaaatatacttctcctggtcctccgccaactacaaaggtaaaacttccaccaaatgctggagatgtaaatggctttgttacagcaagttccagcagtatctccaaccatttcttgaactttttggattcaaatggtcttcttcctccaggagatgaggcaccagctatagctgaaatcttaccaccacattccactgatctcctgaatgaagaagaaataaatgttgaggagcatttaagtctcacaagaggtttagagaaccacaataaagtacaacatcctgaatttggacaagttaatgatgtcatgttcccttggactcaactctatccaacaggtagtacttggggaccaaacaa

SEQ ID NO: 1673 - DNA, 548 bp, Gossypium hirsutum
  Clone ID: LIB3825-005-Q1-K6-F10
cggacgcgctatgtgagtgagcaagaggcggatgaggacaagccaatgctcacggcctcagtgattgatggaacgatgagatgcccaagcgtgtatgttagctcatgcacttctacaggcggggactcgaagcttggtactcagcttatataaaacaaagcggcactactagaaaaagattcttgaatcagtctaacgcttgcctataactcagtgaccttactaattcatagcataatactttatacatgatgtgctcatatccatgcatgtaaccatacaaacttgtaactgatacactgttctattacaagcaatattctttagttgatgaggcctattttgatggcgagaatcaattgtgaacttttgtacttatagtgcatgatctaaatcccataaagctaacttcaagtgcattaatgttgtttactcgtctttttggcccaaaattggagatctctatcatgactacagattcatacacacaggctgggtagcgggctaatgagcacattctggctggagatattttccatattgcatta

SEQ ID NO: 1674 - DNA, 216 bp, Gossypium hirsutum
  unsure (1)..(216): unsure at all n locations; Clone ID: LIB3825-005-Q1-K6-F11
aaaccagnaagtctccgtttcgagtttggttttttaatatttgtttcactttttcagtttcgtccttgtgtctcccctcctttcggtttctctccgccccccccccaataaaaacgaaattcagggaattaaattccctataaaatcgtttctcgtaaatttccttttcgttttaaatcaaacccgatttcctggtttctttttcttcatcgatcg

SEQ ID NO: 1675 - DNA, 617 bp, Gossypium hirsutum
  Clone ID: LIB3825-005-Q1-K6-F7
attctcttctcgaaggctgcacttgactttattgtttgtgatgagagtgatgtgtttgtcaccaacaacaatggtaacatggctaggatattagctggacgaaggaaatattttggacataagcctactattcgtccaaatgctaaaaaactatatcggttattcttgagcagaagcaacatgacatgggaagcatttgcctctagagttcgtacattccagagaggctttatgggggaaccaaaggaggtcaggccaggaaggggtgagtttcacgagaatccatccgcttgtatatgtgaagattcagaagccagggaaaaggcaactacatattcaagaggcaagaaaaatgggaaattggatgattcatcacgaaaaaaagaggttatagtaagtgatgatcagaatgattatgatgataatgatgaaccaagatggcctgatctggacgatgatgagaatcaagtttggcctcaagagaagctccattataatggaacaggttcggattatgatgcagtcatctctgatgaacctgagttggaagagatgctttcagactgaacagaatgagttccttcttgaaatttctcgccctctctcttggccatctg

SEQ ID NO: 1676 - DNA, 568 bp, Gossypium hirsutum
  Clone ID: LIB3825-005-Q1-K6-F8
atccttttaaaaacaggcattcatatgcaggagaccaataattctcgagtcaaccaacgaattgcaacaatctcggctcatctcaacccacccagtttttcccacatggagggtagttcgggtttgggtcgagctgactgccgagccgaaggtgggtcaactggtttcaaggtggcgattttgggagcggcaggtgggatagggcaaccgttatcattgttgatgaagatgaaccctttggtttctgttcttcatctttatgatgtggttaacactcctggtgttactgctgatattagccacatggatactggagctgtggttcgtggatttctggggcaacagcaattggaggaggctctaacaggaatggaccttgtaattattccagctggagttcctaggaaacctggaatgacaagggatgatcttttcaacatcaatgctggaattgttaagacactgtgtgagggaatagctaagtgctgtcccaatgctattatcaatttgattagtaatcctgttaattccaccgttccgatcgccgcagaagttttcaagaaagctg

SEQ ID NO: 1677 - DNA, 590 bp, Gossypium hirsutum
  Clone ID: LIB3825-005-Q1-K6-G10
caaaaatagttgattgttgataatttgaaactgagacgaagacttcaatggcgtttccagtagtcgataccgagtatctcaaggagatcgataaagctcgtcgagacgttcgcgctctcatcgccttgaagaattgcgctcctatcatgcttcgcttagcgtggcacgatgctgggacgtatgatgtgagcactaaaaccggaggtccaaatggctctataaggaatgaagaagagttcactcatggcgccaatagcggcttgaaaatcgctattgatttttgtgaggaagtgaaggctaaacatcctaaaattacgtatgcagacctataccagcttgctggtgttgttgctgttgaagtcactggaggtcctaccattgactttgtacctggaagaaaggattcaaacatttgccccagggaaggccgacttccagatgctaaaagaggtgcacctcatctgagggacatcttctatcgaatgggtctttctgacaaagatattgtggcattatctgggggtcacactctgggaagggctcatcctgagagatcaggttttgatggcccttggaccaatgaacccctg

SEQ ID NO: 1678 - DNA, 581 bp, Gossypium hirsutum
  unsure (1)..(581): unsure at all n locations; Clone ID: LIB3825-005-Q1-K6-G11
gnatttcagaggatggtgattggtaatcagcaagtgagaactcaacagatacatnngaaatgaaaaagaaggaaaaggagtacataaagttgcaggagaggctgaaccaagtcttaatggaaaagaagaaggaatcaagatcaggaatggaaataatgaatttgcttcagaaagaagggcggcaacgtgggacctggaatgggaagaaagcagacaatgatttctataaaaagattgtggatgcttatgaggcaaaaaatcaagaactgaaagcagaaaatgctgatttaagagcattactgcgctcaatgcaggtagatatgcgtgatttctttaatgctcctaatgggttgccaaagcaatctttgcctgttagcgaaagacatgaaaatgatccatcacaatcgccacttggtgggaggacggatgtctttgatcttccttttcacatggctagggatcaaatagaagaaagtcttcgcactaagatggcttctgtaaaagagcggatggttcaattacaggatgcgcaaaaaggtgctgaagtcacttctgaagcaacagagagggagcttgagctt

SEQ ID NO: 1679 - DNA, 52 bp, Gossypium hirsutum
  unsure (1)..(52): unsure at all n locations; Clone ID: LIB3825-005-Q1-K6-G12
cccgggtgcggaccccacgccgtccggctaatatattagnatttgctggtat

SEQ ID NO: 1680 - DNA, 599 bp, Gossypium hirsutum
  Clone ID: LIB3825-005-Q1-K6-G7
gtttttcgatcttaccaaagaccacagggattgatctatggaattcccttatgagagatggaagaaaattacaggaggttgaaggagataaacaagaagatgagaagggagattagagaatgggggagacttgaatgaacttaacattaaggaactgcaagctcttaaagctaaaatggattcttctttgctagctatacgtgagaggaagcctccattgaaaagactcctgacaatgtttctaaggtaccatatcatcaaaactcgaacagacaagcacaagaataaggtaaggaatttggaggaaagacatgcaaatcttgtcatggacttgagaatgtgaagaaaaattgcagcttctgaactcacctgatgaacggcaccgtaggctacatgaaattcttggcatacaccgtgatccaaataggaatctattttctgatgatgcttctggagagttggatgagaagaaaaaaggaatggagctatctgtaaagagtgtcgaggcagataaaatatggcactatcaagacccacttgggaaaatccaagggccatttgctatggcaattttacgcggatggagcagtagtggtcat

SEQ ID NO: 1681 - DNA, 576 bp, Gossypium hirsutum
  Clone ID: LIB3825-005-Q1-K6-G8
cggccgcgtggggtactgccttgttcaataatggagcttcatgcggacaatgctataagatcatgtgtgactatcagacagatcccagatggtgcataaaaggaacatccgtgaccattacagcaacaaacttttgtcctcctaactttgctctcccaaacaatgccggaggctggtgcaatccacccctccagcacttcgacatggctcagcctgcctgggaaaagattggtatctacagaggcggaattgtgcccgttttgttccaaagggttccttgcaagaagcatggtggagtgaggttcacgatcaatggaagagactatttcgagcttgttatgattagcaatgttggtggcgcaggatctatccagtctgtgtccatcaagggctccaaaactgggtggatggcaatgtcaaggaactggggagctaactggcaatccaatgcctatctcaatggccaatcattgtcgttcagggtcaccactactgatggtgtgactcgtctatttcctgacatcgtgcctgcaaattggggttttggccagactttctctagcaaactacaattct

SEQ ID NO: 1682 - DNA, 579 bp, Gossypium hirsutum
  Clone ID: LIB3825-005-Q1-K6-H10
gtcactgtcttctctgatccctttccccatctctccctcttatttcatggcgatcgccgctgcttcttccttctccgtgggttcttcccaggggcatttatgtcaagtagcaaggggctgattactcaccattagttggggtcaacaatggttcggatcacacatacatttgatggctgcaaagcgacagactcgcccggcataagtgtcagatgcacgaacctgttttttggatcaacacaatttcattggttgactatgggacgtgatctttccctttcaaaagttttagatgccgcggattattctgattctgttcctaatccatcgagttatgaaagcaaccaaggttatcaccctcttgaacaacttaaaggttccaaaaggatccaggagatacaactgtcatcagctgaaatagcaaagacaaccgtcgaggctaacagcagcgctttgctagtctttcctgggacagtacattctgaacctcatgaacagatttcatgggctgagtttccatatgttgcagatgattatggaaatatcttttttgaaattaccgatgatgagaacatctta

SEQ ID NO: 1683 - DNA, 580 bp, Gossypium hirsutum
  Clone ID: LIB3825-005-Q1-K6-H11
tctggttgtagcacatttcagccaaattgctagtgttgtaggcacatttggtcgagttttggaatgttgggacggtcaaaatcgagagtatgttgcaattaaagtagtcagaagcatccgttgatgcagcaatgattgaagttgatgttcttgaacatctggctaagaatgataaaggcacctcacactttgtgcagattcgcaattggtttgattactgcaatcacatttgtatagtatttgagaggcttggaccaagtttatttgattttctaaagagaaataaatactgcccatttcctgtggatcttgtagcatatatgcatgatttacgcttaatccacactgacctgaagccagaaaatattcttcttgtatcttctgaatatgtaaagcttcctggctgcaagaggagttcttcagatgaaacacatttcaggtgcttgccaaagtcaagtgccattaagctgattgattttggtagtactgcatttgataatcagaatcatagctccattgtttctacgaggcattacagagcccctgagattattctaggtctaggttggagttatccatg

SEQ ID NO: 1684 - DNA, 601 bp, Gossypium hirsutum
  Clone ID: LIB3825-005-Q1-K6-H7
cggccgcgtggggtactgccttgttcaataatggagcttcatgcggacaatgctataagatcatgtgtgactatcagacagatcccagatggtgcataaaaggaacatccgtgaccattacagcaacaaacttttgtcctcctaactttgctctcccaaacaatgccggaggctggtgcaatccacccctccagcacttcgacatggctcagcctgcctgggaaaagattggtatctacagaggcggaattgtgcccgttttgttccaaagggttccttgcaagaagcatggtggagtgaggttcacgatcaatggaagagactatttcgagcttgttatgattagcaatgttggtggcgcaggatctatccagtctgtgtccatcaagggctccaaaactgggtggatggcaatgtcaaggaactggggagctaactggcaatccaatgcctatctcaatggccaatcattgtcgttcagggtcaccactactgatggtgtgactcgtctatttcctgacatcgtgcctgcaaattggggttttggccagactttctctagcaaactacaattctaagattagtatttaaagttcagggt

SEQ ID NO: 1685 - DNA, 586 bp, Gossypium hirsutum
  Clone ID: LIB3825-005-Q1-K6-H8
ctcaatccgtgtataacgaaataggcctggcctcaccattggcaaacacagggccacatccttgtaacttgtaaccacccacggtaacattaatccttcatgactacttcaacaatgggtggaccatcataatctttcattcttctaatgttcactcctgggtgtcaacggaactggcgaagatggcggtttacctgcctagagtgtgaaaaactagggattaagctcataggttcctcttgcgacgatgtgcattcacacacggagtggatcaaagatgttgaagcctacacgcctgggtgcaaggtggcatacccaatcgtggcagatcccataagagagatcattaagcaacttaacatggtggacccaaatgaaagagactcttcagggagcgagctcccatccagagctctgcatatcgtgggctctgataacaagcaaccacagggcgaaacatggatgaagtgatgcgggcagtggactcactgcagaagacatcgcagtacaaagtggcgacaccggcgaactggaaacaggggagccggtagtgatttcgccatcggtgcccaacgaggaagccaaa

SEQ ID NO: 1686 - DNA, 115 bp, Gossypium hirsutum
  Clone ID: LIB3825-005-Q1-N6-A1
tcgcgatctagacccacacgcgtgtctacccccgaatatcccaccccgacccctgcgcgcgccccatctccctatatagagagtcattttagctcggggtgttcatatgcatata

SEQ ID NO: 1687 - DNA, 249 bp, Gossypium hirsutum
  unsure (1)..(249): unsure at all n locations; Clone ID: LIB3825-005-Q1-N6-A10
gcagtgtagaaagacattagctactggtcaaatacaaaatataatgacagttttggtcaaatagtcatagcccaaatacaaaatacaaaataatactaattatcaccataggatctttagcagcagaaagatcattatctactgngacctttttgtttagctaaacttctagaatttgcaatcaggccagaatgcctcctgtgtgtaggatctgctgaagaccaaccagaaggtctggtctcttcaccc

SEQ ID NO: 1688 - DNA, 488 bp, Gossypium hirsutum
  Clone ID: LIB3825-005-Q1-N6-A11
gaacaagggtcacaatatctatttaatagctaaattaacggaaaaaagggggcaacaagggttccatttccacaaaactccaagcaaaattatagatttcacaagcccaacattgaacccgggtacaaaaaaggaattagctctaaaatttttaaaaactatgctttaaaaagaaccaggcaaagataagcattgggtttaagcaaaacccgaaccccaaccaaagggggctgcactggaacctccacctccacgaccaaagggaggccttccaccagggcccctgaatgagggggggaaaactggtggggcaccccccttatcaccaacaaaggcacccccacgaggacccccacgggacccatttttgtcaccaaaccttgggggggctccttcaaagggagggggaccccgagcgcgatcaccaggggggccccctagcctacccggggagcttgcaaatttttttaaaggagcggggaacaatt

SEQ ID NO: 1689 - DNA, 523 bp, Gossypium hirsutum
  Clone ID: LIB3825-005-Q1-N6-A12
aaccaagaattcaacttaaatcaataagatctcgagtataacagtcatgcacgaacgtaaattaaaattgaaagaaaaaaggggaaaaaggccaaaatctgcacttcaaacagtgaattgcaactgttaacaatgtttgagaaaagctaaacaccatgaagatgacaatgttctagtttgttcttggtgtggcccattcgactcgcaggatgagattgtcataaccatttccgttcagcttgttaatagctctttgtgcatcctctctgttcacaaagttgacaaaaccaaaccctctacttgtgcctgtcttctgatccatagcaacatacacacgcgtcacagcaccgaacgatcggaaaagttcgtgcaagtcagcctcccgagtgtcctcagataagtttgttaccctcacagagttttcgtcgttcctacgtctcatatctgatccggttgttctctctgcattggctctcatgcttggtggaacgtaggctccctttccagctccaggagcagctgc

SEQ ID NO: 1690 - DNA, 494 bp, Gossypium hirsutum
  Clone ID: LIB3825-005-Q1-N6-A2
aggcaaaaaactggcactacttgtattattaaaaaaaatactaataactaaatgggaccactggaacaagagttcctaacggaacacaaaaaaactagtttagatcacatgttttgccaaccagcactcaaaaacaaacattttaaaggagcaaatcaagagaagtggctgtaaaagcccagctaatgcattcatcaagccagagtatatatagtctgcattcaggcaatcaccagaaccacaaaaagcatttgcgcccaacaagctgtcataaacctcagtaaaacgggggcccattgggatacattgcaccgggtggaactcttggcgcaggggatgtcccggccccttggtgaagctgactagggaaagcagcccaggaaaacaagctataatgagcagtctctggatagccaccagttggcatcccaacaaaactcgggggcattttatacaatgaaaaccctccacttggagcacccaacccaccccct

SEQ ID NO: 1691 - DNA, 481 bp, Gossypium hirsutum
  Clone ID: LIB3825-005-Q1-N6-A3
ccccccaaaaggcccccaataaaaatcccaaacccaaaaaaaataaaaagaaaagagggaaaacccaagttcagccacaactttacccccaaaaaagggacagtttttttaaagtcccaaaacagtcctgaataaaaaaaaaaaaccccagtttttatcctttaaaccaacccaactaatttttaccacattataggccaacacttctaccaactaataaaaaagggtttttattaaaaaacaataaacccagttgatcaacacccccaccagcttgctgttgtggctggccaacagccctaaaaacttccattgttttggaaactttggctttaaaacctttggggaacccaaccaagtgaaaaacccccgttgggcccatctcaaaaaacacccctgtaacttgggctgctgcatcgggtcccacctccccaaaaagggaaaaaaaattcccccccaccatcgttttttggtgttcgga

SEQ ID NO: 1692 - DNA, 526 bp, Gossypium hirsutum
  Clone ID: LIB3825-005-Q1-N6-A4
agacaacagcaattaatcgaataataatcattaaaatgagggtttcaatcgatgaatattgcacaactgaaccaacaaagcaggcatggctaagtgtttgcctaaattatcctttaaacatcataaaatcactgaaacaaaaaagagaaagtttagcgtttcccactgtttggatttgatttggtgcagaggaccttccggcccttagcacgtctacgtttcaatacagctctcccactagtggttctcattcttctacggaacccatgagttcgagccaatgatttccgagacctattcctctttgtttgacaaagtgcagcctttcctgccctaaccaccaggcatctccttctctcattcttcaccccattatttgaaccaaaatcagtccccaaagataaccctgaaaaggaagaagggaaagagagagaagatgatgaagaagggagaaaggagcagtgaagaagggaagacttgtttgccgcattggaagagacggaaattcttctccttgaacctgtta

SEQ ID NO: 1693 - DNA, 509 bp, Gossypium hirsutum
  unsure (1)..(509): unsure at all n locations; Clone ID: LIB3825-005-Q1-N6-A5
caaaatctagttataaaatacaccaacaagctaaaaccacgaaacaagggatgaaaaagtattcggaaacaacgcaaaattgcagccaaaatgattgtgaaagttgtgtanaaaaagctcacttcctgccatggatcctcgatgcttgtctgttcctcttcttgacaccggatttggcaaccttcagacttcggttcacagcactcaaccttgctagggcagcttttgttaaatccggcctgtagtagttgtctgtcacctggtttttgactgccttggccatcctagggaactcctttttcatgacagacttatggagcaagctcgaaggcttgttctgtttcttagacttggttgtggctaagagtacagactggtctttgcctgcaggttgaatggtgacagttttcttgtttgccaaaccagagtgtttgtaagagttgacattgtagagattgttgggctctttgctgaatcgaacgccagcagttcctcttccaaattgttta

SEQ ID NO: 1694 - DNA, 331 bp, Gossypium hirsutum
  Clone ID: LIB3825-005-Q1-N6-A7
gaacagtccttggaaggtcatatcccattaaccgtgtccaaatatgcgctggaaataagtgtcagacacagatatttcaagaagaagagtagaaaagcataactcatatttgcaccggaaaggaacaagtggaagagagcacaataacataattaggagtagcaattggccaaaaaggtgtattgctttctacctccaaagtccaaacagataatcagtcagcatatatatatttttatgtaatttggaatgagttcagtacctgttcaatgaagtaaacaagcaactcctcggcaagttcacgttcaccagactgtgaagctgtttccat

SEQ ID NO: 1695 - DNA, 489 bp, Gossypium hirsutum
  Clone ID: LIB3825-005-Q1-N6-A8
aacgcgaaacagaaaaaccaagttttattttaccacgaaagccctcaaacagggttcatttccataaaaaaaaatattgggactccgattacccatacataacaataaaccaaggaggcggggccaccacccatttaaccccactactttttggggaaaacttcttccaaactggatttggggggggggtctaaaaaacatggcattcttagatggggcaggccactggaccccagctttaattgggggtggcctttgcctgcgattaacaaggggcacatttgccaacttttccactacatccgaagctccaacagtagttctatgcttgccgatggacattggacttttttttccaggggggcgaaaccttggttgtttcacagggttcttcaaggatttaagatcactctgataaaccatctccagcttgcgttgcacacctgggatggggcccatagaagcatttgacttcaaaaaaaaatgcca

SEQ ID NO: 1696 - DNA, 476 bp, Gossypium hirsutum
  Clone ID: LIB3825-005-Q1-N6-A9
cgggggaggttattaaaatatttatttcccccccaaaaaaaactaaaaaaggaaaccggaaacctcccccccccataagggggatatattcccagccttctggaaaatgaacccttaaaccccaagccttctgcagcccaagggataaagtttcaaacaagctttaagccaattggggcctttcccgaattccattaactctgcaactgagcctcaccactcggcaaaggaacataccggacaaaaccctcgcttcggatgctaatcgacccctccggatttttggcaaccactttcaaaacttggaatatatttcccacaggaaacaccatcctgccccccggttttaattgaaccaggagggcccgaggcatttcaggggctgctgcccccacatgtatagcatcaagagggggcccattttggccaaccttcccttccattgccaacatggcgtagaaaaaaagccttttttc

SEQ ID NO: 1697 - DNA, 287 bp, Gossypium hirsutum
  unsure (1)..(287): unsure at all n locations; Clone ID: LIB3825-005-Q1-N6-B1
cttcaatagctttaaagcgcatacatccttttatattcattattcaggatctcagaatccgaagccacagacatagagaaagaccgggaacgactctcagctttccttatgctccttaactttgactcctccattctatgtaaaatgacaaaatagcacatcgagccaattgtagtaagcatgattgtgctgccaattacagttgcacacacagcaagccatctagactcttttcccnaccaccacgtaagtcagcgnaaataaatgcaactgaaatgaaaaggcat

SEQ ID NO: 1698 - DNA, 534 bp, Gossypium hirsutum
  unsure (1)..(534): unsure at all n locations; Clone ID: LIB3825-005-Q1-N6-B12
aaaataagtgcttgaagttgagcaagtaaaggattatattgggaattaaaatacaattcagagtctaaacctaataaatattagaattaacaaaaagggactagattgaaaatcgaatggcatgtaacggtgcaaaagtctaaataaagtgaactagggagaccatacttgcaatgtcgaccaatagaaatggaagtggaccacaagnacaaaatatccctaccatccaaaacgttgtactttacgcgggactaaattgaaggcgcaaattaaaaataaaaagaaacttaattactaactaattaaaaagtagaagggctgaaagtgcaattatcccttacactaaaaacacgtggaccttggctaaccaagtcgggtcttgggtcgtcctcccttaaacgacactgttttggcacttaaatggccaaaatgaaacggcgtcggttcaccctattataaaagccaaatttattttaaaaaatatttcatttctactcttcttgaacaaaaaaataaaaaccaaccctcttaaat

SEQ ID NO: 1699 - DNA, 530 bp, Gossypium hirsutum
  Clone ID: LIB3825-005-Q1-N6-B3
aaccacagtacattccatcgccaaaaaccaccgtctgtgtctcggacattcggcttttttatcattgctgagcgcattgtactctctgcgcaccaccatgcatgtcctcatcttcctcataagcttcttgttgagcttgagcctgtttcctacgcatctcttcctcaatgttaacatcatgcatggttgtttcctcgcactcatccagctccatgtcagtcagctgaaccgatgccttgggaggaagcacagcctccagtgccttgcattggtctggggtcaacgagtcagggaagtcaacagtgaagtgaatgaaaagtttacctctcataaatggcctctgataaatcggcattccttcatcgtttattgctttgaattgatcaggcttaacgacttccccaggttgggttttaatgagaagttgtctgccatctaagtgagtcagtatgaactgaaagccacaaagggcctcagtaagtgccaatgtatgctctacaaataagtcatcaccctttcgtttaaattta

SEQ ID NO: 1700 - DNA, 528 bp, Gossypium hirsutum
  Clone ID: LIB3825-005-Q1-N6-B4
ggcgcctttttttttttttactgaaaatgtgacatttttattgaaatagagggactttgtattcgtgccatgtcaattgggctgggcattggcagaaaatataaaagctttactgcttcctagacggttcaagcaccgatataattcattggaaatcaaattataagaaactaaacagttttttctttgttttagcatcaagggttgggggggcaaaaaaaatttctttgttatcggatctttcatcacaatcttatgatataaaagcaatatattacgtgccccccaaaactatgctagaaccaggcaaaaatgatcatttatgactaacctatcatatcttcatcattttcatttcaccatctcaaaaaagtacggacatgcagtaattcatgttagcgaaacattggcatgcaggcgagctcagagatcaaatcccgtgttaccgaaacaagttacagtacagcaccaatatcttcttccaacttagaaccataaacaagccaatgatgtcctagtttgcttaaa

SEQ ID NO: 1701 - DNA, 543 bp, Gossypium hirsutum
  Clone ID: LIB3825-005-Q1-N6-B5
atcaaacttgcattgcaatatagctcattttgctactatttaaggtcataatttagaaccaaacctcaactgaaaccccccttaaagaacaaaacaaaacactgagatagatctatacacagacaaaacagtacattgtgtactcatatatagcctgtcttcgtcaagcttcaatggtatatatcaaccttcatttgtcagctttccgacagtgccacgcacaacatagcaaaagaataacaaaatgcatggaaatctttgtccccaacacgtccaaaccttttcaagctctgaagattgtatcgatggctgctttagttcctgagtttatggtgcttaattggtttagtggtgttttggatacaaaaaagcaagctccaataactatgtagagcaatagaagaaccagtcctttcatgtagtgagaagtgccgtcttgtaacgcgaaggccacgacgatgattgatagggcaagagagccggtttcgaggagattgaaattaagatccatcttaatacccataatccaagccgtaataacac

SEQ ID NO: 1702 - DNA, 547 bp, Gossypium hirsutum
  Clone ID: LIB3825-005-Q1-N6-B6
tcgcgatctagaacgaccgccttggttacgaccgtcctagcaaagctgtggattggcttatcaaaaaagccaaatccgccattgacgagctcgctgaactacctccttggaacccacaaaccttgcaaaacaacgacttcaaccacgaaacagaataatcaacacgatcaaaacataatcacagcagtagacaatgaaaagcccagaagaacggctacattaatggggaaatcaagttcaaattcttcagcaacaaggaacgggagataacccgaatagtaattcgggttttcttccatcttctttagtttctgatgagattgcagatactatgaagtcttcttttccattgggagcttccagtgaggcaccgacttcttctattcagtttcagaattatccaccggattttttgtccaaaaccagcagccacagtcaagatctgaggctttcgcttcagtcatttccggagccggttcttctccaccaccatcaccaagctgctgcagctcatgcacatcaaactgaatctgttttgttctctgca

SEQ ID NO: 1703 - DNA, 530 bp, Gossypium hirsutum
  Clone ID: LIB3825-005-Q1-N6-B8
gccacaaaatttccttacttggccgtcttttgcaaaacacaattgcattaagtgagacataaattacatcaagcacttatgatcattggaaacatataatttacaagacccaaacgagaaatgtaaccacaccttttgcttttgacttgaatttgcatgaacgaacacattcaacataaacacaagaggatctccacaggcggaacccatcaaccttgtttgatctcaaatctgtataatgtggttctccatcagtcatgtcatctaatttaggagcttaaccctttcaacaagattccaatgcatgtgcatctcatttcaacctgatggtttcattggggaatataacattgggatttcgaatatggggattaagggctgccaattctttccatttggctccggtaccatgaatacgagacgagatgctccacagagtgtcacctggttgaacctttgctgttgaaggggttgaagttttgggagcagtcttggagtaggacttcaacaatggatgtttattgctctta

SEQ ID NO: 1704 - DNA, 526 bp, Gossypium hirsutum
  Clone ID: LIB3825-005-Q1-N6-B9
acaaaaggtcagtttaaaatagcagaaattgtgaaacattttcttagtcaataaactccacaattttggatcttacattgcattcccatctttccattttcaattcaatatgaatcaattggaaccctaatccctgaatacatatctttaggtcacggtccccgatatctccgaaaacataaacaaccttgagcttgatcatgtgggatcattcctccacctttcgatgtatctatcgcctccatcatcgacaccacttcgtccatctccggtcttttgtccgggttggcatcccagcatcgcttcattacgtttgcaagtgaactcggacagcaacgaggtatttccggccttagattctggcggacgacagctgacgtcacttccgagaagctgagatcgggatatggcatgtcacagcagtatatttcccataaacagataccaaaactgtacacatcgcactttctattgtagggattgccgttaaggacctcgggtgccatgtaaccaagtgttccggtct

SEQ ID NO: 1705 - DNA, 497 bp, Gossypium hirsutum
  Clone ID: LIB3825-005-Q1-N6-C1
gggaaaaaaagcaaaccgaactagtttgctgattttttattatccaaaataaatcaacaaataaaaggaattaccttttaaaccgggtactggctaacactaattttggtgatgggtgcttcaaatgggtagaccaaagttgagcaagatgatgttgaagggtcatttaaagcaggaagcaaggttttccttccattggtaccatgagcattgtagctagcgccagttgtagggtctacaagtaggtttcctgcatagcctggataagcccctttaccataaattccaggacaagccgatgaagcctccaacggggcctcgggtgggccttggaagtaaccatttccgaagggttcgtgacggtcccggcaaaaaggctagccaagtttatgaccatgccatcaagacccacgttgttgtttggggcaatcaaaggcgccctttgggggccctaaattggctggtggaacggccaggcacattgaccggggcactgg

SEQ ID NO: 1706 - DNA, 544 bp, Gossypium hirsutum
  Clone ID: LIB3825-005-Q1-N6-C11
aactcaaatactactttctgcactttaaattttattatatttactactaatatataataaaaggctgcattctgtaataaccctttgaatatttaggatccacttcaattgccttagtagcatcctgtatggcactaccatactcttccaatttggtgcgagagcaagtgagcgattggcccagtacactgcattctgattatttagctctatcgcctacgtgtacaagtcaatagcctgaccatatttgtgtgttgcaagccactgtaggtaaaatagcaattggtgtcaacaaatacacagcagctttatatgttggaagttcattaacataaggtatccaactcaagaagggtatcgattgctgaaatggctgagcccaccactgggcaccaacaattgttgtcataaagtgcaatccatatatcagcgcaagaccctcagtcggcccattgacaacaggaaggataagtgcattggtgaaatagtgttcccatgtagctccataaaatggtatagatgaaattacccaaaaccagaaact

SEQ ID NO: 1707 - DNA, 541 bp, Gossypium hirsutum
  Clone ID: LIB3825-005-Q1-N6-C2
aacaattctaatcatattatatgcattaagttacataattttttacataaataacttggagcaaatgacatatttaaccataactttcaagataaaacatgctacattttaatacattttaagagtaataataaaagagtgaagatatacatgtatgggggcagcttaatgaaagaaagcctcagtggaagtgtcaagtgtccatcaaatgcaagttgtgagctctggggattagtagttagctttcaatatatcactgatcatcggggttaccagatgtgggccagatctgaccgcctttcttgtcttcagcacttgatccggttccatttcggcttgtggaagccaactcttttgcttctgatgtgcgcggagtcatctcatcatcgataggtagtgttctcttcgagccctctaatgcaacaccgagaactatgttttcctctaaggcagagactggcaacttctcgccttccggttttgattgaaacggttctcgtaatccacctgctttgtcaatcccactttccgttgtggaaac

SEQ ID NO: 1708 - DNA, 548 bp, Gossypium hirsutum
  Clone ID: LIB3825-005-Q1-N6-C3
catcaaagtttttataattcattaaactcctacatcataagcatcacccctagtaccatttgcaatgaaacatgccagtcatcagtaaaaaaaacaaaatacaccaacctctccaatcaaatcatggattgaaaccagtattcatttcatttcccaatccttcaacttcttgcttcctttaggtttcgctatcggtacattcacagcagccatttttgcattgtattttgcccgaaggggatcgttgtatgtccatggattgttccaatcagttgtatcctcgttgacaagatgagtccatttggttctgccactacgaccaaaatgcttgacttgcatgaccttgggcaatattgtcttgtccatcttgtcgtcacccgtcggggcagagaaatcgcggtgataaatattttgggctccagcagttgcagcaggatcatcagcatctgtctggaagaaagcacccttgtgatagtatttctgcataaacctccatttctgtttaggcggtggagcaggtttcggattcttcctctcccattcccgtc

SEQ ID NO: 1709 - DNA, 527 bp, Gossypium hirsutum
  Clone ID: LIB3825-005-Q1-N6-C4
gcaagacaagctgcaacagttaaccactagaatttatgactaacatttagttgtacaaaggacttgttttcattacatccctgaaaggacattctcatcaaattaagtgctaatcctgagtatgccaaagatgaaatgtaaataacagctatccttcggttaacatctccatgcacaagaagcaattatagctcgatccatccagccgagataaagaacgccatctctctcttcaagagtatacttatcgcaatagctttgcagcagagttttgatggtagcatttacaaatggacttaatggagagggtgtaaagccagccataataaaccttgatctccatttcccaaaaagttcataacgttccactctctcttgcccttcacatgctataatgttgacaatctcccgggccagacagtgctgttcaacgttgattcgctccttgtgttctcttggcaggctaacatcaatcgattcaaagatagacgaaaaataacccattgtctctaggaaacggggaatga

SEQ ID NO: 1710 - DNA, 547 bp, Gossypium hirsutum
  Clone ID: LIB3825-005-Q1-N6-C5
cgagaagaaggcaattttattttaagagaaagtagctacaacacagtagaggaccccaattccgtattaccactagactagactagaaagccatgaaatctccctccatacaataatgacttttaatatgatggcctaatataataacctgaagctaaacttagacttgaatttctacgtgccatctgtacatctcctccgatggcactggcaatgtaagtgtcaccaatccggtggctgagtcatagttgaagtgagtgtcgacattgtccacacagcacttcaacggacgctgagatgagtatccaccaaacctcccacagccccggactttaagactgatcgttgctgttggattccggttggtgctgagtgaagttgtcaactccgaggaaacctcgccatcaaagaactgcagtttctcatcggatgtcgtttgtacttcgaacttctcaacggcaccgctgctgttgaacatgtcaagaaggcctattggtgcaaatgaaatggtgtgggaaatttccttgacgggacagaagtggaacgg

SEQ ID NO: 1711 - DNA, 544 bp, Gossypium hirsutum
  Clone ID: LIB3825-005-Q1-N6-C6
cataatcatttctttaatatcatattgatcaatttacatatatgtcactttcttcataatcagttcttcaatagaaaatcatatatgttgattaatttaatttagaaatgttactttttatcactaggaaatataattgaaaattcctatactaaacaaaatgaaaacgataatttcagtagacttgggttgccaccgctgagaccattgtgttgattccacacatggaatgacctcgacaaaggcgataatagccatgttctccccaccgtttgccccatgagttctttatgatccaatagggttgattcccaagtcttagaattgaaaacccttttgccccataacccactagtaatactccatggttgatccacctcttcccacatattattgggcatgacacccctcctatgtaggtttgcatgaagatagcattcaacccaacggctaaagggccacgaagtactaaatttgcggcgatttgattttcatcgatggggatgttagtgaaattcacaacttcaacagctactttctctgg

SEQ ID NO: 1712 - DNA, 544 bp, Gossypium hirsutum
  Clone ID: LIB3825-005-Q1-N6-C7
cattcaattgtgttttttttcaatttatttattatttattctgttataaatatacatacatgtaccatgcgcagtgcccatcatggtaaaacaaaatctaacctgttcaaacaaacattcagctatagttttggcaaacaagtgtaaaaaccagatagatagatagaccagattctgagcattttacaccaaaaatgcacgactatttcggactgacaggggcttcgttaataacccgaataggggtaggcgggatcgattcccaccactctttcaatcgtcgatcacgatctcctccttggttgtttaccatatgctttgctagcggtgatgttgtgatcatggaatgaaacacaacagcaattatgagatacttgaaaggaatcactgcaaatattattgccaatccgatcattgcgagcattaccgtgtttgcatgcttgtgtgcccttgaaaccagaaccgaatgcaatttcagtattgttacattcgcttcctttattatctcacgaaccgtcaaaaatccatattgagctgaaactat

SEQ ID NO: 1713 - DNA, 549 bp, Gossypium hirsutum
  Clone ID: LIB3825-005-Q1-N6-C8
ccaaaatagtacaaatatatttctaaaactaaaaccaactctacaagaacccaaaatgagaaaaagaaaacttcaagcaacaataaatatgaattaacaaattcaccctgttgcatccaaaagtcttaaggaagagcacaccatgcatataatggtaccaccaaatcctctcaggatcttctttagcttccactcagactctgggattatttttgcaaatgattttcaattgctcaattgcagaagttaagtctcagattcttcctccgcaacggtcggaagtgtaccctccctgatgaatgaagggttaaggaactttgccacaaatgcccacaacttatagacatcctgaaaatttgtcaggaagctaagagaagctgtaacaacctcaactcttatgaacccacttttcctgtcttgttgcccgctttccgtaggtctgcatagggtagcatcttcaaagttcaaagcccttcgctgttgtcgtggaccatctaatattcgtatgtgactgaggaaaccaataccgacagagataccttctctttc

SEQ ID NO: 1714 - DNA, 532 bp, Gossypium hirsutum
  Clone ID: LIB3825-005-Q1-N6-C9
caaaataaactcatggcaatgtttaaattatgaaaaatcaacattcttttttagtacaaatacagaacagggggttaggggtgacgttacaatgatccttcgagttagaagagctaatgatcttaagcggtatctagggttgcctagcttggtggggaaacagaaaaagtcatcttttcaaagtttgaaggatagactcaaaggattgacaattggagtattacgtttctctcccaagggggaaagaatgtttatctaagcggttctacaaaccattccaacttattcaatgagttgttttcttctccctaagaccttttgcgcagatttggaaagaattgttgctaatttctggtggaggaagagaatgaataggaaaagtatacattggctcacttgggagaatttatgtttgttaaaagaagatggaggttttggttttcgtaattttgcgaaatttaatattgcattattagcgaagcaaggttggcgtcttgttaattgtccaaattcattattggcacgtgttttg

SEQ ID NO: 1715 - DNA, 522 bp, Gossypium hirsutum
  Clone ID: LIB3825-005-Q1-N6-D1
aagccaagtgaatcattttgaatgaaaaaaatatcaaaaacataaaattcagactcgtaaataaattgacaaaaaaatctaaaactaagagtataacaaaccctaaaatatttaatccaataacaattaaacccggttcaacctcaaacctatcctagtatacctaacttcaaaaactcggaaccaaccgggttgactcgactgaatcgttcactgccagttctttccttttcctcatttccaaaactttcctatggctattggagtgcaaatcaccggaaaatgtgggactacaagccggtctatattcaggaaaaagtcgaccggacttgtaacgaaccccacaagcgttgcacaaggttttggcaccaagaggaccggttcgccactgtggagtcttctgaacttggcaatgactgcatcgccgttggaaagggttcccacttgacaacccactaccttgaaccgccaccggttttttcttctgtttctttgtcggcggtactccgaaaccattagcca

SEQ ID NO: 1716 - DNA, 499 bp, Gossypium hirsutum
  Clone ID: LIB3825-005-Q1-N6-D10
ttttttttttttttttttttttttttttttttttttttttttttttttttttttttttttttttttttttttttttttttttttttttttttttttttttttttttttttttttttttttttttttttttttttttttttttttaaaaaaaaaaaaaaaggggggtaaaaaaaatttttaaaaagaaaaaaaaaaaaagagggggggtaaaaaaaaaaaaaaaaaaaaaaaaaaaaaaaaaaaaaaaacaaaaaaaaaaaggggggaaaaaaaaaaatgggaaaaaaaaaaaaggggttttaaaaaaaaaaaaaaaaaagccctttttttttggggtttcttttggggcccaaaatattaaaaaaaaaaaaaaaaccctggccaaaaaaaaaaaaaaaaaaagggaaaaaaaaaaaacccaaaaccctttcccgaaaaaaaaagggggtttttttgttttaggcccaaacaatttaaaaaaggggggggaccccccggg

SEQ ID NO: 1717 - DNA, 553 bp, Gossypium hirsutum
  Clone ID: LIB3825-005-Q1-N6-D12
ctcttacaaaatttattcacttttcattttatacaaacgttatacacttttcaacatagtagctgggctggctacaacagcatgtaactgatacttacaggaatgtaaataattataaataaaaaagtagaaaatataaaaagacactgccatgaaaaacccagaaaaaccatgtggttttcatggctattagctattgaatgtatagaaagactatggaacggctttcacatgttcgacgcagctagcaaagagctgatttagatttacatgcaccacggggtttgcaaggcatcccatcctgttgtatcgacaagactggtaccgaaaatgcttggatcatccatcactggaaaatccaatgacataacagcttctgcccaaatggagtcatctaaaacaggcaagttcatcgtcatattctcccaaaacccaccattttcttcttggttttgtccaaatttggcattgttcgccatcatgttcccttgagacatatctgattcactgttgctcactggtgttacttcatcgaccctgataataattggga

SEQ ID NO: 1718 - DNA, 532 bp, Gossypium hirsutum
  Clone ID: LIB3825-005-Q1-N6-D3
aaccgaaataatgattcatcattaaatacggaattggaaacggaaaaaaaaaccaatttcacagtttttatggcactagttttcccacataaaataaagagaaaatatataatactaaaaacttacctgaagagaacagtatcatctgctgtaaacctttttatctgcaccgacagtcaagagtacaagtatgcggattgaggaatgcagctttgctttaccagtcagcatcaagggatggaacatacgatctatgcacagtgcaccaaaagcttatttggctccaaaacaaaacatcttctgcccacagttttgcatcactaagaaacgacacagtaaggatttgttatcaacgattctgctcaaacatgtttgcattctcacgaccaggattgcccacagtttcttattctattttatgggacaccccagtcctccagttcatgttttgtacacagcttgaacaagaggaccaaacaattagactttaagtttgtacactcggaacagcaagatggacaggactagtaat

SEQ ID NO: 1719 - DNA, 515 bp, Gossypium hirsutum
  Clone ID: LIB3825-005-Q1-N6-D4
acatcaacaaaacacatcataccactgcagagcactggtgtatacatttatttaaaaaagaagtaagaaaaacacatctttgtgttattacatgtaggagcatacgtgtgtgtatatatatatattacatcttactatataagacatgtaaaaggagatagcggtaggttggtaggtagggaagggtagctaaatgaagcaaggtaggcctaggctgtgccagtaacgcccaaatctgggttgtcatcgttgttgggagagggagagccaaagatagggccaccttcgccagtaggatctttcaccttgtcctccagcctatcaacctgattgccaccctcatcctccttggacctcagctccgttttgctcttattctctcctccttgtactgattcatatatcgttgccgtcttcgactccttgggcaatgctccttgtgccctgacattgtttatttaccttttactttctccttttctcctcttcttcttcttcttcttcttcttcttctt

SEQ ID NO: 1720 - DNA, 58 bp, Gossypium hirsutum
  Clone ID: LIB3825-005-Q1-N6-D5
tcgcgatctagcaactagcggacgcgtggccggacacgtgggtaccaccccctgaatg

SEQ ID NO: 1721 - DNA, 513 bp, Gossypium hirsutum
  Clone ID: LIB3825-005-Q1-N6-D6
aaaaggggaaaattaacgaattttatgctttagcttaaagttaagcgacacttcactctttataagaaatactaccgttttttaagataaaagattttgcactcaaaacccaaccaaaatacaaaggcccccaaacatctgcaaaacattctggctctgctctgctacggggaacacatgcgggggcaagtgttctactgggatctaaccctgtgattcaacatcatctcccggagatccgccggatcgatctcacccccacagttctccggccggtaataccccgtaacaaggtcaggcgcccaaactgaaaaataagcccttgtttccgacgaccaacactttttcattgaatatcttccgacccctttccccattgatccaggcctaccaaagctagccccaactgccgacaggggtgcacctgagtaacctttccttgatatggggacataaagagcgtcaaaaacagaagccccgaggtaacttaaaggaaaaaacaaagcgagccat

SEQ ID NO: 1722 - DNA, 476 bp, Gossypium hirsutum
  Clone ID: LIB3825-005-Q1-N6-D7
ggcaaaaaatccataaattaccattcaatcaaaaagaccgaatcttggtttttaacaaggggacaaaaagggtttccaaacatgaagattgaaacaaaatcacaactcgggttttacggaagacgatgctagaaagtaaagagcgaatcgatttgtaaatagaaggggagagatcctaccctacaccttaaggggatacttcctcatggggaaggacatttccttcttcttctccctttcgggcttaaaagatgcctggggcttggaaagccttttggggatagctcgggtctttttgggacggaaatcgagaggcaagaatttcttttttttggatgcctccctaaatgcaaacttttgcttttgggaaattacagtcaaaacttgagcaatggacagcctcaccacctttattttaaaaagcttgttaggggcaccaccggtaactttagcaacccgaaaaaaaacaagttcaa

SEQ ID NO: 1723 - DNA, 535 bp, Gossypium hirsutum
  Clone ID: LIB3825-005-Q1-N6-D8
cagtgatacgagttagcatgatttcatatatgaatatagctgatcagcaattactagaacatcaacacagctatctaaaactataacttcgtatttagaaaatataaaagattatgctagagtacccttgctagaagaattagattcggatgctttcctcatcaaaatttggtgatcagcaataactgtcttctcttctttctagtataaataaaatcaaaatcaccttatgagtaaaaagggttttttttttccttgaatgtagaagtttccgtgaacaatctcgagcaagcaatgtgatagagctttcctatcttctgcgtttatgctctttccgcatttctgataagtagctatctaagttggactttatccataaccgtctctggagaaggtcctcctttgttgattcatcaatgtttagccacgcatcaagaggcactctgagggagtttctcgtcaggtaagctgcgtcttcccaaaaattggagcttgtttgactttgtatctccagaaccaacagccataccacaac

SEQ ID NO: 1724 - DNA, 506 bp, Gossypium hirsutum
  Clone ID: LIB3825-005-Q1-N6-D9
gaaatgaaaaaccaactgcaatacccaaatcaatgcaaaatactaaatgctacccatattacatatgacaaagaagaatacacacaagccagatactatttaagagtcaactaaatagaagacaaaatctcatcagccatggatttatatacacatacatatataagcatttaaaagggggcctaaccttttatttaagtaataaaccctaaactaaaacacacaatctagtttgttcttggggtagcccattcaactttcaggatgagattatcataaccatagccattgagtttgtttatagctttttgcgcatcatccttgttcacaaagttaacgaaaccaaaaccccgactcatgccagttttttggtcaatggcaacataaactcgacttactgcaccaaatggccggaaaagctcgtgcaagtcagcttcccgggtgtcctccgaaaaatagtgacccggacagagttctcgtcgtttctgcgtctcatatcagttccg

SEQ ID NO: 1725 - DNA, 534 bp, Gossypium hirsutum
  Clone ID: LIB3825-005-Q1-N6-E1
aaaaagtgaaaaagtaaattttttattattaaaaaaaaagctgaaacaacaaagtaagacaatgctcataacaacgaagcgtttgcaaccgtacgttatctaaaaccactcacgtacaaattgcaactgttattaatatcttaactctacatgctaccctaatccttcctagtaatagtagccggataattatgttcatcctcatcggcatccgccattccaaaggtatgtttcaccgcatcagtcgcaccttgtgccgcgttcctcactttctcccccgcctgctgcagtatccctccgcttgtctccgtctccttagtttcctccgccttccctctagcagctcccgccgtctgttttgtcttgtcgttggttgtctcggcggctcctctggtcttctgcttcgctgcttctgttgtctccattgtcttctgcttcgctgcttctgcggtctccattgtcttctgcttcgctgcttctgcggtctccattgtcttctgcttcgctgcttctgctttctccttcatgctctcc

SEQ ID NO: 1726 - DNA, 512 bp, Gossypium hirsutum
  Clone ID: LIB3825-005-Q1-N6-E10
cattattaaagacactagcaaagtacaaagccaaaaaaaatgtatcattttccccacaaatccctccattaggacttaaaaagagtatcataacggtgcaaaggtagtgcatactatctatgtttactatagctgctacgctcccgttcccttgatcctcttgagtgcctccgttcttcttcccactcggccgatggcggcggtgatgactcgtacctcgatggtttccttttgaaatgtctatcatcatcactcgactcatagtctacagcattgctactgctgctctttctcccgccaccactacttgtagcagaaactggcttggcagaggaagatgtcttgtaatcatatccattggaggatggcttgtgatggccagaagatgcaggtgcatcagaagatatcttccttttcttcttgctaatttcttcttcaggaaagctaatgcgagaaaacacacttgcctttggcttcttatcagttcctgcagtagcagtcgaggaagtggc

SEQ ID NO: 1727 - DNA, 529 bp, Gossypium hirsutum
  Clone ID: LIB3825-005-Q1-N6-E12
tttttttttttttttttttttttttttttttttttttttttttttttttttttttttttttttttttttttttttttttttttttttttttttttttttttttttttttttttttttttaaaaaaaaaaaaaggggggtttttttggaattaaaggaaattaaaaaaatttttggcccccaacgggtttttaaacaaaaaagggggaaaagggggggaattttttgggggtaatttacccccccccaaaggggggggatttccttttcccaaaaaaccaaaaaaaaggggcctttttaaaaaaaaaaaacccccccaaagggttttaaacttaggggaaaaaacgggtggttttttgcccccccccccaaaaaaaaaaattttaaaaaaggggggggcaaacccccacagaaaaggagggccccttttcccccccccccccggaaaaagtcatcaccccccccccggggaggggccccccttttttttaattggggggccctttcttttaaaaaaaaaaattcggggtt

SEQ ID NO: 1728 - DNA, 521 bp, Gossypium hirsutum
  Clone ID: LIB3825-005-Q1-N6-E2
aaacactattttctgactataatttcacttaaaaacaagggtacaaaatctgttacatgtaaaatgttgtaacgtacaagtcaagcaaggaactcatcaatatcaaaaaactcacaattatcccacacactattattccctacataatccattggaatgtcatcgaagaactgcaacgattccaatccttcaagccagctataatctgtatcatcccctcttctatcaacctcaccaccttcacctttcatatccattgcaccacttgtcgacggcgcttcagaatcaacaggaccatccatagcggactcagagccaccgcaagtggccgttgttgttgttgtagttgtagcctgagaaaacccatgtgaaggagtggcgactgagtccgaatcggaaccctgaggcaagttaaggatcgctttgtcaccgtacatggctttggcggcttcgtcgtaagcagaagcggcttcgacggcagtagggaaaagtgccgagccagagacgtttccctttattcg

SEQ ID NO: 1729 - DNA, 554 bp, Gossypium hirsutum
  Clone ID: LIB3825-005-Q1-N6-E3
gaatataaaaaggttctctaattattcccaacttttattgatttatagaactgccctggctaacactgaacattacaacaggaccaaacttttctttatatggtacaacagtacgaacttgaaaaagaaaaaagtagaagcaaacaaacaacaaacacagactcaaggcagtagcagagcacaaaaagtcgctcctttcatttaataggatcgataataaggatcatcctgggtacctccgcgggtgctccttctagtcccagcattgttaggcgccgcacttgggaagtcttggtttcccgttgtaccgtaagcaccccctgtatctccgccaaaccccatacagctgaggtcatcttgcctgcctgtatcatacccactacctgcggtggggtacccacggttgtcatgtccaccggtacagccatagccaccagtatcccctctgttgtacccagctgtggtgtagccagtaccaccaataccaccaccaccagcatggccagccgtggcgttatgatggcgggcctcttgtttcctcagctctgcatctt

SEQ ID NO: 1730 - DNA, 531 bp, Gossypium hirsutum
  Clone ID: LIB3825-005-Q1-N6-E4
cctagtgattaattatactaaaactaatgcaaactatgaatggtgtagtaagctctgaagacgctccttggaacagggacttgaaccttccctttcttgcagttcctccgtccaacacaaagccaaactcagagcagatgagggcactgagattagcattttcgatgcccagagatacttcaacgaaaccaacagcgatatcagagtgtgcaagagggtttccccgcttaacatgcccaacctggaattagatcctatttcatcagcgccccagcgtgatgtttcctccacctcttgtgccgacggctatggctatggctatggctatggcatgacctaccgagttcgttctttccatgcaactccaacggcttcatcagaggctagctggaatagccagactggtcttttgtcgaatcctcctggcgccattgcggtgtctatgaccatgaaaaatcctaccactgatcacaagagaaaagggtgtggtaaattgaaatggctttggggccgaagctgtccctgctccgg

SEQ ID NO: 1731 - DNA, 521 bp, Gossypium hirsutum
  Clone ID: LIB3825-005-Q1-N6-E5
gcatcaaaacatcatatccatatcatcattgtaatgcccaaatttgcccggcccgatacaaatattagaacccaaataaaaaaataaaataaaccaaataaatgtccagtttattacaacaagcccaaacccgattacaaaacccaaaattcccaagcctaaactgttaactcaatacttaaccctccaggcccaaatcactcagcccaaattagcctaacatggggaaatcagaaaccctaggcagcagttaccgtgccgtaatagagcacgagccccctttcgtgtgtgtgcgcgagcctccgtacgagcacgcccctcccacacatagccccccgtacatgctggccctcgttcgaccatgtacctgcaaaggaccaacaaacgagcaaaaacagaaggcaacaatggcaaaaagagaatagcagagaaaaaaagcagatttttttagaaaaaaattcttgtaaatcttgattttatttccggctatataaaagccgctttgggaatttgtaaaggat

SEQ ID NO: 1732 - DNA, 540 bp, Gossypium hirsutum
  Clone ID: LIB3825-005-Q1-N6-E7
atgtctgcagtgtgtcactcgtgcccaaatgaaatatttcaggttacggagttacatagactcgatgagggtattgtacaagcccaatgttgcccgggcccataaacaaataaaatataatagcccagcaaataattttacaagcccaaacccaataggcctaaaactaaaccctaacccagctaatcttaaaaatttttagcaagccccaagcctccagccgctcccccttcttcagccaccgcttccaccattggctttcccacgcatgccgcctcggccaccacgcccctgactgtcgcctcttccacgcgtcgcatggcacctgaatcgtagaccgttggtatatatcggagtttcttctctgttgaaaccaaatctaataaagagggtgatactatctttttgattccttgctatcatagaggttagattcttgatcgcaagtctgaacggggttagaatccgaatggaccaccctccgtcggccaccgttggcggtggctacatggcagcttgggcttgtcttctttgggcgga

SEQ ID NO: 1733 - DNA, 530 bp, Gossypium hirsutum
  Clone ID: LIB3825-005-Q1-N6-E8
aaaaagaaataaaagtaatgtctattgctaaaaaacattatcgtattgtatataaagtacaatataacaatgatccatttttttgttattttttgtttcatttccatgtataaaatatcaaaatctccattctaattctagattttatatattaccccatatcctttaatatggagaattgtccgggccataagtttgtaagagaagtaggacaattaagcttcaaaagcccaaccacgaactagtttgtttggtccccaagtactacctgttggatagagttgagtccaagggaacatgacatcattaacttgtccaaattcaggatgttgtactttattgtggttctctaaacctcttgtgagacttaaatgctcctcaacatttatttcttcttcattcaggagatcagtggaatgtggtggtaagatttcagctatagctggtgcctcatctcctggaggaagaagaccatttgaatccaaaaagttcaagaaatggttggagatactgctggaacttgctgtaac

SEQ ID NO: 1734 - DNA, 522 bp, Gossypium hirsutum
  Clone ID: LIB3825-005-Q1-N6-F10
aaaaaacaaccagctttaaagatttaaaacataaacttcactgccaccactacaagctcataacaaaaggcataatggtcacccgcaaatgcaatcctaaaaaccaaactcctcccttgttacaaaaacagcaccatccagtgcaaacttggacggaccctccatggctaagagctagatcctgacataattattaagccttagatgactttgacatatcgttgtcgccgacgggaacactggttcaaaagctacaacatgctatgccatttatcttggtacactagctggaacaatctcggctcctgcttgcaggagagcatcacctaacttgacatctcgctcgcttttttctttattacatattgtgatacctgagaccactttgaaaaacaatggtctttagagcaagggcaatataactatcacccgcgaatgaaaagcctgcaaacccaccactatatcgtgcccgcctaccaacttttaattgatcaatcaacttcatagcttgtacctttgggg

SEQ ID NO: 1735 - DNA, 541 bp, Gossypium hirsutum
  Clone ID: LIB3825-005-Q1-N6-F11
aaaatgaaaactagaaacattcattgatccatttttcaatcacccttaaaacatccccctccccctcccaaatcatatcccacaaccccaaccccaaccccaacaaaaacaccagtaacaacataaatcagtaaatcaccccacaatatttccattgaccctaaatctaactgctctctcgataaccccgagataggcagtaagaaaagggaagaaacacattcatccaacaaacaactcccccacctttcagaacctctccaccttatcagctttaacaacgggatttgccttagcaatggcatcacgtccaatacccttgaaatcaaatgaacactcgtgtttttctgggtaccgatgctccccacagaatgtattctcgcacctgcacttaaacccagttaacccaacctttttcctacaaataaaacacctgttcgccgcctttggttccggttgttgattaacggcaacaacagccggttgttgttgctcaatcgatgtagacgaagaacccacatgaggcttaaaagtctccaca

SEQ ID NO: 1736 - DNA, 537 bp, Gossypium hirsutum
  Clone ID: LIB3825-005-Q1-N6-F2
tttttttttttttttttttttttttttttttttttttttttttttttttttttttttttttttatttaattaattttttgaaatttaaattttaaaaagggtaaattaaaaaaaagaaaaaaaaaaaaagcaaacaaaaaaaagggaaaaaaaaaaaaaaaaaaaaaaaaaggaaaaaaacgaaaaaaaaaaaagggggggggaaggggaaaaaaaaaaacaaaaagggggggggggaaggggggggggcaggggagggggtggggggggagggggggggactgaaaaaagggaaaaagggaaggggggggaaggggggggggggggggggggggggggggggggggaaaggggacggggagagggaggaggggggttgggggaaaaggaggagggggggggggggggggaaaaagccaccggggaagggaacaccgaagggacaagggggggaggttcgggctgggggggggggggggaaaagggcctagaagacggggaagggggtttttgagcctaaggagggggggggggggc

SEQ ID NO: 1737 - DNA, 504 bp, Gossypium hirsutum
  Clone ID: LIB3825-005-Q1-N6-F4
atgaaatatcagggtaacaatagattataattatatagtgatatgtgcataaatgccacctaaaaagaacaaaattacttgtcaaatagaaacttaccttatgacaaaaaaaataaacatctgcaaacatgggggaaacaaaaggaagaaaaagaaaataaaagagaaactgaaaatacttgaaaagaatctcattgatgccactgattatcggaatataggaagatcatattttgtttgtcggtcaaaacttgaagccgcttcactgactgcaacagtggtattcgaggttccctttccgacatcttttaccatttttagaaagtaactatgccatctcgtatctgcagtcaactcagggtggaaagcagtccccagcaagtttccttgctttatggcaactatcactttcttttcaggcacagcaaactcctcttgaatttcaacagctgaacttgaatataaaactttttttgatgggataggataatcagcaagcacttc

SEQ ID NO: 1738 - DNA, 451 bp, Gossypium hirsutum
  Clone ID: LIB3825-005-Q1-N6-F5
cttaaataatcccaaactttaatggataaaaaaaacggcccgggctaaccctaaaaaataaaaacgggaccaaacttttttttataggggaaaacaggccgatcttaaaaaaaaaaaagggaaagcaaaaaaacaaaaaacacagactaagggggggagcaaagaaaaaaaacccgctcctttaattaaaagggaccaaaaaaaaggaccacccggggaacccccgggggggttcctttaagcccaaaaattgtaaaacccccaattgggaaagtttgggtcccccggggaaccgaaagaaccctttgtttttccgcaaaacccaaaacgggggggggaatttggccggccggaaaaaaacccaaaaccggggggggggaacccaggggggtaatggcaaccgggcccgcaaaagccacaaggggcgcctatggggaccccagtggggggg

SEQ ID NO: 1739 - DNA, 533 bp, Gossypium hirsutum
  Clone ID: LIB3825-005-Q1-N6-F6
aagcaaaaaacagttgtacatatatttcataatcattaaatatcatgtcactaacaggctaaatatactttcatttacagtttccctgcattttacagcatcaatttacaaatccatataagccatgacatcaacagtttgagcaataaaaaagcaccattaagggccacaactttaattaagttattattacttttaatataaagcaaaatgtctccaacatataatcttcaagttgttccttccattttcttttttccagtttgttcttccttccgaatttactaattacagcatatgccaagcatttaagcaccacactgactttaagggaaaggaaaccccatatgacaaccacagccaaaaagccaggtaacggtccgatgtatccaactcccctcctttactttgccaatctctattcattgtatattcatacttgaaatccaactcctgaacatggcagaggaaaacctaatatccacaaacaagtcgaggaaggttgtgttttgccaccaaattatatctgaaaa

SEQ ID NO: 1740 - DNA, 457 bp, Gossypium hirsutum
  Clone ID: LIB3825-005-Q1-N6-F7
ggagggaagagggccaagccccaagctttaaacaaaggggttccgggggtaataaaaattaaagggtggaaaattacatacatccgccgcctataactttgggttttggatgggaaacaactatggcaaaattaacaaaagctttgtctaaaaaccaaaaggttgggtctcagtaaaaattaaaaaaagggaaacctaaaaatgaaaaaccaaccccgtttcagtaacaaccacaggtgtttttaaaccttttttttttcccatgccatggtatttggatggaggaccctttgttatgctataaaacatcccctaaaggggaaaaagttccattttttgacccgctggcaattggatgcccaaatataaggggaaggccccccaaatttaaaactcaagtaaacacacacccccacacccaaccattgaaaaccgggggtttaaaaaaacagggttt

SEQ ID NO: 1741 - DNA, 515 bp, Gossypium hirsutum
  Clone ID: LIB3825-005-Q1-N6-F8
acaaaccatttcttctatttattacatgaatcttttaccatggtccatatttgccatgttgggtcacatctaggaaccccatgactaagggtttatgtagaacaaaagaggagagttaccccttattcttacaaactttggttatcaaaaaaaaggtagatttgggggtattggagtacctattcatttcttgacaaaggcaacccccttctcaatgctagtttctagttctttcttcgccttctccaagccaaccctttcatactcatttagtgggccaagagggtatatttcctcaactccgcaacgaccgagtcttaccttggatgcgaaaaagggcaattcagtcacatgagaagccacaaatgcacatcgaacaatgtcagcatctccttttaagccccgaagacatgcatcggcaaattgaactgcagcatatgccatcgataatgttgcaaacccagcaccagcctttgcctcaacgacttctgtaccaccattctgaatgcggtttg

SEQ ID NO: 1742 - DNA, 551 bp, Gossypium hirsutum
  Clone ID: LIB3825-005-Q1-N6-F9
ggagtaaaacaattatcagtaggaatttccatgaactagtagggttcataattagcagttctatcaagactatttttcgggttgttcccatattttacaaacaagccatagtcactagctaaagaaaattccgacaacgaatcactaacctgttccaggttctcatgaaacctaaactcgggttgcatagatgagtacgaatcgtaaacataacctgtctcctctaacgcaaatcgagtatagggtctactagtagaaaacattctacaagaaaccgtgttgtacgaggaggattccggtgttgataagttattgaagattgagaacgtatctccattgcttgcatcggcataatctacggtactgaatgagtctctagcactctccgttgtgaaagatgcctcgtctgagcttgtgaaaagggaccaatcacttgatgtagcatccgagaactccatgttaataggttcagcaatgttaccatttgtgctctgcctaagaatgtcattaccattgcggttgtaacaactggcagcagttctgggactgaa

SEQ ID NO: 1743 - DNA, 538 bp, Gossypium hirsutum
  Clone ID: LIB3825-005-Q1-N6-G11
caatacacaagaggcgtgttcttctacttaaaacaagaatgggatacaaatagataaagaaatctcagtgagcctataatttacaaatacaaccgaagattcctaaaaactaattacttttacactacagcttcaggatagatccttaatttagttactacaatctgaataccatattggactccacaatttactagctagcttactgctgcacaccttttcaaaagaaccaacttcagttgatttgcagacacggaccttaggcttcttatgttataccccctcagctggcgatggaataatagattcccttggtctgtctgccgtggcaagatgtttggacatgatggatgcctgctcctggattatgctccttgcttcaacaagttgagcttcaagctcaagctccctctctgttgcttcagaagtgacttcagcacctttttgcgcatcctgtaattgaaccatccgctcttttacagaagccatcttagtgcgaagactttcttctatttgatccctagccatgtgaaaagga

SEQ ID NO: 1744 - DNA, 540 bp, Gossypium hirsutum
  Clone ID: LIB3825-005-Q1-N6-G12
aacaaccaaatattattcattgattcattgatgtatcaactttttacagttttggactcttgcttataaacaacaatatgagaatgagccatctcttaactacaaaaaaagaatttaaggaaaaatttctcaccaagtctaagctaagtattagtttacaaaggtgcagtctggatggggcttgaagtggcgttatgtctcaataatgcaagttttgatttgagtttacctatcaaattccttagatcctgcccccaggaccatgacgggtcatttagtgcacggatagagttgaggcaaacaagaagagtacccccttcgtgcaggagaaccgtcagccaaagcggaagaaaccccaagactgatgggagagaggccaagattatacaagttaaggcaagggccacattttgcttgaccagtgaagttgtttggcgagccttggctatactgaatggaacaccagaaatgttgtcctgaagcaataggacatctgcaactgctatagcagttgcactagcacgatgtgctaatacaatt

SEQ ID NO: 1745 - DNA, 537 bp, Gossypium hirsutum
  Clone ID: LIB3825-005-Q1-N6-G2
aaaagaaatttaataacatatttctcaaaagcttagtacggtttgaagtttgaacagaacagaatgtctagaagtagacaaccaatatttgactacatgaaacagataagaactgtgcatagaaatagaggttgccattaaaatggagacctgaagtaaccattgaaatccttagtcgagcaaatcagacactgaagtcctcctgaatgcatcaacttgaggcaacagagcagctaaggacttattagggaatatgttatctgctttcattctctccctgatcccataagctggagctttggcatttatatacgctctgactagagtttggaactgactaactcgagctacatatccggcctgtctcattctatgtaacattttttcggcgttatggatatcacccttcctagcatactgctccatcacaaccatgaaagtagtaaacatgggcttaatttcattttgctggcatgccttctgcaagattgagtcagccttttccacatcccctgcttccacatgaagcttcacaag

SEQ ID NO: 1746 - DNA, 511 bp, Gossypium hirsutum
  Clone ID: LIB3825-005-Q1-N6-G3
aagagagaaattgtgaactttataataacttaaatcatgattgctacacattctgtggtttaaaacaaagaaaaatcctaaatcccccgatcaataaaaaactaagaatgacttctgtcgatttagtggtctaggcatttgcttttcctaagagttgggaggtaacaattacatttggtatttcccctctctcaaacagcataagcaaataaataggtaacccaaacaattccaacttccaaatcatccagaagcattgatatcctgaatagcggatctcaggacctcatccccagcaacccgccgtaatttctttataaaagcatccttggccatcattccagccctatatgtgctgtatatcatcaatatttcttggactttgccaggaggtagagagctcttaatcttcgaaaataatttttcaagggaatacttgacaccagcaactgccctcagtatagcttgaccttgcatgttactaggtctgaaactcacaacagactcggga

SEQ ID NO: 1747 - DNA, 309 bp, Gossypium hirsutum
  Clone ID: LIB3825-005-Q1-N6-G4
ggataaactttatgtatcatttttagaacacatataattaaatggtcaaatatcttaaagaacattcaacttaaaatgcttaaaagggaaaaccaaaaaagaaaaaaagagcacacttaattgaacattcaaacaatgaaagcgctcgcctctgacaaccttctataaaacgtaatctcatcaaaggagaatccgcgacattacgatggcagctcctcgatgacaacattgtatgaacttctggatatcaaacagcattctttcatcatctacagtcacaaagtttatggcaacaccttttctcccgaa

SEQ ID NO: 1748 - DNA, 537 bp, Gossypium hirsutum
  unsure (1)..(537): unsure at all n locations; Clone ID: LIB3825-005-Q1-N6-G6
aaatagaaaccaanaatctccaaacttctaagtcttaagcaccccattgtgaagtaaacaaaactgttctcattacagagacaacaaaaagaaattgtaaaagcttccgactaacaatccatcactcagcagtttaaactgaagcaccctttgatttcctcggagccaactgagtctccggctcttttttgacggcttcctctttctcagacaggatcagttcaatgtgacacggtgaagacatgtaggggttaattcttccatgtgcacgatatgttcggcgcctttgcttctgtgcttggtttacttggatgtgagatacgataagtgaatctacatccaagcctttcacctcagcattgctctcggcattcttgagcaaatcgagaatgaattttgctgatttcacaggccaacggccttgtccattagaatggcgattcttagcctgtgcggttcgcccaactccaccacagaagcgcctgaatggaattgcttgcttgtgggcaataacatcttcgaagtacctttttgcct

SEQ ID NO: 1749 - DNA, 531 bp, Gossypium hirsutum
  Clone ID: LIB3825-005-Q1-N6-G7
caacgaaggaaatataatataaattgataactgaagtataattcaaaatattcttacaataatattaaaagttacaatgttaaaaatattcttacaataagaaaacaaatatctaagatggcaaactaaaaaatagcttttgcctactctgttttagctaatgatctttcaaactcagcatatttgctccatgcattgcaattctcaggtgcccactctagatacttctcatacagtttttggcaacagtcaatattaccaagttgcagctcaatttcaatatacttcttaaagatctttaggtgcctttccaatagtaattcccaaaatttgccgcgcacccttgagattgagctgtcttatttcaaactgtgcagtaagaagccagacctttgcaaaagaaaacttatcgtgtggaataagcttaaggcactccttggaaaatttttaaattaatgaggaaccatttcaatgtctattataaccaaccacaaatatgaatggtgaaaaacacccaaaaactgaatgatt

SEQ ID NO: 1750 - DNA, 538 bp, Gossypium hirsutum
  Clone ID: LIB3825-005-Q1-N6-G8
acaaaatggtgaagctgcaatgttttgcttgggcttcttattgacagttaattacgatcacttaaaatagttttaaacttggttccaatttcgtatatgaaaagcataaaaaggtaatgtaagagttcaaggattcattcacttcatctcatacgatatggcgggcagcttttgtaaaatagtaagcacacctctgccggaaactaaaccccaaaccctgaactttaaatactaatcttagaattgtagtttgctagagaaagtctggccaaaaccccaatttgcaggcacgatgtcaggaaatagacgagtcacaccatcagtagtggtgaccctgaacgacaatgattggccattgagataggcattggattgccagttagctccccagttccttgacattgccatccacccagttttggagcccttgatggacacagactggatagatcctgcgccaccaacattgctaatcataacaagctcgaaatagtctcttccattgatcgtgaacctcactccaccatgcttcttgcaa

SEQ ID NO: 1751 - DNA, 200 bp, Gossypium hirsutum
  Clone ID: LIB3825-005-Q1-N6-G9
aaaagtgaaaaagtaaattttttattattaaaaaaaaagctgaaacaacaaagtaagacaatgctcataacaacgaagcgtttgcaaccgtacgttatctaaaaccactcacgtacaaattgcaactgttattaatatcttaactctacatgctaccctaatccttcctagtaatagtagccggataattatgttcatcc

SEQ ID NO: 1752 - DNA, 411 bp, Gossypium hirsutum
  Clone ID: LIB3825-005-Q1-N6-H1
ccaaaaaaaaaaaaggggttgggtttttaaaaaaaacggaaaaaaaaaagtttttttttttgaaaaaaaggaaaaaaaaaaagaagtaaaaaaaagaaagggaaaagaaaaattccccccctaaaaaaaagggggggggaagggaaaaaaaaaatttgggtttgggggggagaaaaaaaaaaaaaccttttctccaaaaggggaaaaaaattttgggagggtcgaaaaggaaataaaagggtaaaaaaaaggggcccggggggggatttcaaaaactaaaaaataaagggttggaaaaaccttagaaaaggggggggtaacaaataaaaaaaaaaaagtttccttttccctaaaaaaccttaaaagttaacatttaaatcatttggtaaaaggaaataggaaaacttaaaa

SEQ ID NO: 1753 - DNA, 524 bp, Gossypium hirsutum
  Clone ID: LIB3825-005-Q1-N6-H10
atctgaatccgcactatccattaccatatatcaatctaaaaatgtacaagatgccacatctaaccacccattaattacaacatcaacctaaattgttgagctaccaagcttaaaagaaatgcctacctagccactcatttattacaacttcaatctaaatggttaaacttcctgccttaaaaggcaatgcctgtctacgatacaaggacccttcatttttcttaaaatactcataacaccaatggataatacgtttgaacatggatatcgagatacgaaaatgattacttttgctgaatgtgcatttgtatccgacgctcattttttgactccggatgacattgataccctctttgaataaagccacaaaaatggttgattggctacaaagggtaaaaactaagaacctgggtctctaagttcatacccatgagactggaatttcttccggcgagaccgggggaagagtagttgtcggattttcttttcagctgcagcttcagacatagcccgaattttgaatg

SEQ ID NO: 1754 - DNA, 406 bp, Gossypium hirsutum
  Clone ID: LIB3825-005-Q1-N6-H11
ggggggggggggaaaaaaaccctttaaaccccaaaaaaaaatccccttttaaaaaaaaaaaaaaaaaaaccccaaacccaaaaaaccaaaaaaaggaaaaaaggcgggggcccaaaaaaaaaaatttttttaaaaaaaaaaaaagggggggaaaagccccccccaaccgggggggggggcccggcctggaaaaaaaaaaaaaggggaaaaaaaagggggggccccaaaaaccccccggggaggaaaaaaaaaaaaaaaaacccccaaaaagggggggaaaaaaaaaattggggcccctaaaaaagggggaaacaaaatttttaaacaaaaaaaatttcaaaaaaagtaaaaaaccccccaaaaaaacgggccccaaaagaaaaaaaaatttggacccccccaaaaa

SEQ ID NO: 1755 - DNA, 523 bp, Gossypium hirsutum
  Clone ID: LIB3825-005-Q1-N6-H2
aaaccaaatgagtaactaaactaaattcatagaaaaaaaaacattaataaaaagcaaatccgtaaaaccctacagaagctaggacaggaccagccagcattcatccaacaagtctttcgacaaaaaaaaaaactctagatatgataggtttaagcagcagcctgagcagcaagcctcttcctcgcttcctcaatgatcgacaacttgatacccttgcccttgggaagcgaaatccatggctttgttcctttaccgattgtgaagacattgcctagacgagttgcaaactcgtgtccagcagcatcttgtacatggattgtctcgaagctacccttatgcttctccctgttcttaatcactccaacacgtcccctgttccttccaccagtgaccatgacaacattcccaacatcaaacttgatgaaatcaacaattttgttgctctctaagtcaagcttgatggtgtcgttggctttgatcaaagggtctgggtaacggattgtgcgtccatcgtaggtattca

SEQ ID NO: 1756 - DNA, 302 bp, Gossypium hirsutum
  unsure (1)..(302): unsure at all n locations; Clone ID: LIB3825-005-Q1-N6-H3
acaacagnaatggtacaaaaagcaccatatttctttatttaagttaataatccattaagcttagcatacgagcgcagcaaatattttagcaggcacacaccaaatgttaaaagaatccggcaaacatatagcttaataaagacaaggaaaagataacaaggttaattatcataacttcttgattgttgataacactattattatcgacgcgcttattcctcttcttcggcttcctccagccaattcacgaagggctccagggccttcacgaaggtttgcctgccctttggatttgatccttt

SEQ ID NO: 1757 - DNA, 447 bp, Gossypium hirsutum
  Clone ID: LIB3825-005-Q1-N6-H4
aaaccaaaaattaagataattgataacaatatcacataatatctagcaaacaaaatggtagttcaatccaatccttggaaaccagtatcataaaaacatttatcaaagagaaaacaaagacttaaaatccatcaaagctttcaacaaggcttcttgccttctttcacctacatagatctcttacttctcagatgagttaggtcccctctttttgccaaatccaaccactgcggtgacgaagcggcggttgtattgcatccgcttgtaagcgcggccacggggcttcttcttcttgtcttgcttggccactttaggagtttggcctctcaccttaccagcacgagctagagatccgtgaaccttacccatggcgaataattgtcaaacgactgctcttttagctgcagcgctgctggcttttgacccacgcgtccgcccacgcgtccg

SEQ ID NO: 1758 - DNA, 474 bp, Gossypium hirsutum
  Clone ID: LIB3825-005-Q1-N6-H6
gaaaaaaaacccgccgcaaaaaagagctttttggaaattccgataggggaaaaaattgatctaaaaggggaaccgcttcaaagctaatctttgggggtgcttggcaagggtatccaaaaataggcgggtctcaggtatctgtatgtctcccagacaaaaaaacaaagagaatgggccgaatgtcaacaaaaacatggcccaaataaccccaaaaaaggggtcatcccaggtggaggcttaaccaaaaaaggggaaaaagccggtgatgggctccaatggaacactatacagcagcgatttttttaagctcaggatgggtaaaatcgtttcgagggaagacttttagttgacccctgccaggacccttttgaaaaatccaacccctgttggccgcccggggttcaagggattcgtccaaggttagaccttccgtgttaatagccccaacaaggacaggtctgggaattttttgga

SEQ ID NO: 1759 - DNA, 521 bp, Gossypium hirsutum
  Clone ID: LIB3825-005-Q1-N6-H7
acaaaatggtggaagctgcaatgttttgcttgggcttcttattgacagttaattacgatcacttaaaatagttttaaacttggttccaatttcgtatatgaaaagcataaaaaggtaatgtaagagttcaaggattcattcacttcatctcatacgatatggcgggcagcttttgtaaaatagtaagcacacctctgccggaaactaaaccccaaaccctgaactttaaatactaatcttagaattgtagtttgctagagaaagtctggccaaaaccccaatttgcaggcacgatgtcaggaaatagacgagtcacaccatcagtagtggtgaccctgaacgacaatgattggccattgagataggcattggattgccagttagctccccagttccttgacattgccatccacccagttttggagcccttgatggacacagactggatagatcctgcgccaccaacattgctaatcataacaagctcgaaatagtctcttccattgatcgtgaacctcact

SEQ ID NO: 1760 - DNA, 537 bp, Gossypium hirsutum
  Clone ID: LIB3825-005-Q1-N6-H8
attcaagtcaacttttttattattatttaaccgaaattgcaagcggtgcttacatggtaaaaacttgtaaagacaagagttggagtgcaaaagtttttaaccatgacatatgtaattcagagttagtgaagcgcaggtaatccttccatgatggaaggtttttggtctaaaaacctggagggaacatttttttggcttcctagttgggcaccgatggtgaaatcactaccggctccccttgtttccagttcgccggtgtcgtcactttgtactgcgatgtcttctgcagaggagtccactgcccgcatcacttcatccatgtttcgccctgtggttgcttgttatcagagcccacgatatgcaaagctctggatgggagctagctccctgaagagtctctttcatttgggtccaccatgttaagttgcttaatgatctctctcctgggatctgacacaattgggtatgccaccttgcacccaggcgtgtaggcttcaacatctttgatccactccttgtgtgactgcacatcgtcgc

SEQ ID NO: 1761 - DNA, 592 bp, Gossypium hirsutum
  unsure (1)..(592): unsure at all n locations; Clone ID: LIB3825-006-Q1-K6-A10
ggntaatgtggatatgttgaaattgatccagttgggtctcactttttcggatgccaacgggaatcttcccacttgtggaaccgacaacttttgcatttggcaattcaatttccgcgagtttaatatcagtgaagatatcttcgttagtgattccatcgagttgttgcgtcaatgtggggttgattttaagaagaacaatgaaaaaggtattgatgtgaaacggttcggtgagcttttgatgtcgtccgggattgtgttgaatgatgatgtgcattgggtcacttttcatagcggatatgatttcggatatttgcttaaacttttgacctgcaggagtttgcccgatactcaaactggcttcttcaatttgatcaaaatgtattttccgatggtatacgatatcaaacatatgatgaagttctgcaatggcctacatggtggtttaaacaagctggccgagttgttagaagtggaaagagttggtgtatgccatcaagctggttcggatagtttgctcacatcatgcacgtttaggaagttgagggataactttttcaaatcagtacagaaatatgcaggtgtactgtatggc

SEQ ID NO: 1762 - DNA, 364 bp, Gossypium hirsutum
  Clone ID: LIB3825-006-Q1-K6-A11
ggtccatgtaacttaaaagcctatagagtcatggttttcaactgattttccaagagaagaatggactcttcggctttaaacatttggatagtgctcttctgttcctcatctcctatctgcagatcacgagatgattcttgtattgtatttgtatccagtgacaatcttttgtgcagcaatgggttcatgccagatcaacaattccctattcgccttcgtccataatcagatgcttggtctgctcacctgtagttcctgccggtttgtctatgggtgtgattgatatttagtcctagtcctagttctgtacatagacggatatttttggtagtattatgttagagactgccacaagttttagcac

SEQ ID NO: 1763 - DNA, 404 bp, Gossypium hirsutum
  unsure (1)..(404): unsure at all n locations; Clone ID: LIB3825-006-Q1-K6-A12
tgaaaaaaggtcactcaaataaaatagggtaaaggccagcttgagcttacccaaagttttataaccaaanagaagtgtcaaaggcagcagcagacagcagtgtatcaaagaagttgcttgctttgggagccaaaattaaaaagaaaagaacccatcttttcttacatataaatatataaacacttgtatgtatatatagagagagatagagggaagagagagagagagagagggggagggagagagatggtgggctcaggttcagcagataggagcaaagaagctgttgggatgatggcccttcatgaggcacttagaagcgtctgtctcaactcagactggacttactctgttttctggaccatccgtcctcgcctgagactgaggggtgctaatggttgtaa

SEQ ID NO: 1764 - DNA, 609 bp, Gossypium hirsutum
  Clone ID: LIB3825-006-Q1-K6-A7
aaaaataaagtgacgaaagcgtggcaaaattttctattctttttcttttttttcgtgtctagacactcatcgtcttctctgagaatcgatttcgtttgtcagatggcactgcgaggagtttggcaacttaaaaagctgattgtaagctattgtgattggggaggtagtagccggggcatcagggcatttatggagtcagagttaccaacttttaaagagaaaaaccctcagctggaggtggttcctgaactcattcgtgggcagcatccacatttgaaaggcttttacaagaacaaaaacgagcgggtggtatgtgtgaagaatatgactcctgaagatatccttctttatgcaaccaggctaagaaacgcattgggaagaaaggtggtgaaattgaagacaaggcatgtaactaaacaccctagtgtgcaaggtacatggacaactgatgtgaaattttgagacacaatagtaccaagttcttcacaattttgtctggatgtttctttattgttctatgtagtcatgatggcaactttgctgaaacattcactctttggaggtgaatgaaactgttgtgtaatgaacaaaggcaaatgatgtcgtaat

SEQ ID NO: 1765 - DNA, 476 bp, Gossypium hirsutum
  unsure (1)..(476): unsure at all n locations; Clone ID: LIB3825-006-Q1-K6-A9
gngggagctgagcaaccgcttctttcctctcggctagttggcggggatgaacagttactttctagaccatcaaacatcaccttcaccgccggcaccgatgacatcccaccaatcaacagcgtccgtgacttcttcagagaatacctgattgagtccaagaagctgtggttcctggctggccccgccatcttcaccagcgtctgtcaatactccctcggcgctatcactcaagtattttccggccaagttggcactctggccctcgctgccgtctccgtggagaattcggtcattgccggtttctgcttcggcatcatgcttgggatgggaagtgcacttgaaactttatgcggccaagcatatggagcagggcaacttgatatgctaggggtatacatgcaaagatcatgtgtcatcctcaccgcaacggctttgaatgtaagcttggtatacatatttcgcgtccaacttttgac

SEQ ID NO: 1766 - DNA, 612 bp, Gossypium hirsutum
  Clone ID: LIB3825-006-Q1-K6-B10
cttttctttttctctcccacagttgcagttgcagagcttcgccattgttgtcttccttcaagctttttcagtttcttattcactcttcttcaacacccttttgatttttgctcttcaaccatggctgctttagtgcttccgctgctcatcctggctgccattactggccgctcaagtggcaactggtgtatatgcaaagatggtgtaagtgatacagtattgcagaagacactggactatgcatgtggtgcaggcgccgactgtaaccctatccacttgaagggatcctgttttaaccccgacactgttaaggctcattgcagttacgccgttaacagttacttccaaagaaaaggccaagctcaaggctcttgtgatttttccggcactgccaccgttactaccgctgaccccagctatactggttgtgctttcccatctagtgccagtaccgcaggcaccaccacaacaccaacaactacaccgtcatccaccacaccctcgtccgtgaacccaatcaacaacaccccaacaagcacaacaccattcggttcgacaacacctactggaatattgggaggagttggcaacggcttaggcccgtccggaact

SEQ ID NO: 1767 - DNA, 468 bp, Gossypium hirsutum
  Clone ID: LIB3825-006-Q1-K6-B12
tttattttttttaagacaaactcaggccatgtaacctgagaatactgtaaaatgacagaattgttaataaactttttttttttcacttcatatggtgttgaaagctggactgcaatgcaacatggagccagatgcttgctactgtcgagaccagcagctatcgagctcagctcattttgcttggtgcgcacgaatggtttttgaaccgaatgaagcaaccaactttgctgttttattttgatgtaatttggttcggttcaattttagtttgattgtaatactagttaaacttaagttagtgataagatcttttgatgtaatggctgattggtcagctatatttgattatttttggctagtgattaggtttgtattagttggggcagttaaatacattaggtaactgtcaatgtacattgtaactcttttatatttcaaatttgaatgaaaaatgatgaatgttcagtt

SEQ ID NO: 1768 - DNA, 616 bp, Gossypium hirsutum
  unsure (1)..(616): unsure at all n locations; Clone ID: LIB3825-006-Q1-K6-B7
ctttgcggttaccacctcatcttcttcaccttcctgttgatgaggctattaagtcagagttggaaacccttttcttagataaggttattgcaaaattaggactctgtatttcagtatatgatatcaggtcaattaaaggtggctttatctttcccggggatggtgcttctacttatacggttgagttcagattgattgtgtttcgtccatttattggtgagattattgttgccaaacttaaagaatctgatgctagcggcttgcgcttgtcacttggattttttgatgacatttacatacctgtccaccttttgccgaccccgtcccgctttgaagctatccctaatactagaaatcaaggcagatggatatgggacttcggagatgcagaagaagcacagtccgaagaaccacgatttgttattgatgggtcagatccgattaaatttcgagttgatagtgttatttatccttcgattccccttgaacaaccagagaattcgaaaccatttgccccgatggtgattactggaacaataaactacgatggtttggggccggtttcgtggtgggaggaagctgaaatgattcangaggatgaataggctcgctaaca

SEQ ID NO: 1769 - DNA, 606 bp, Gossypium hirsutum
  unsure (1)..(606): unsure at all n locations; Clone ID: LIB3825-006-Q1-K6-B8
ctctgaaactccaacatggcgactgccccttacagcaacaagtacgaagacatcgacaacaattacttcgatacatgngaagaaaggcaagcgttcaaagcgacaacgcgacgacgagtcttcttcttctccgccgccgccaccaccgccgacgaatgaagaagagtaccttgctctttgtctcatcatgctagctcgtggtggttccaccactgaaaacgccgtgacagacggtggaaacgatgaccatcgtctgtcttcttcttcttcagcaccggcaccagcggctttgaagttgtcttacaagtgcagtgtttgtaacaaggctttcccttcttaccaagctctaggtggacataaagccagccaccgtaaatcctccaccgatgctaaacccgataatcagtccatcaccaccagcagtaccaccgccagcggggaagccggcggtaacggtaaagcccataagtgttcgatctgccataagtctttccctacaggccaagctttgggaggtcacaaacgctgtcactacgaaggcggaaacaccaccaccaccaccaccaccaccgncgccatcaccaacaacaagagcagtagcgtcag

SEQ ID NO: 1770 - DNA, 581 bp, Gossypium hirsutum
  unsure (1)..(581): unsure at all n locations; Clone ID: LIB3825-006-Q1-K6-B9
ttttcctgcattttctccctcgccaaacanaaatcttagatcatttctagacgcagcgaacgatggagaaagcgatcaaccgacagcaagttttgcttcaacaccttaatccttcagcttcttctttttcgtcgcaccaaaacaactctgccctctctgcatcggcttgtttagctggagatagcgctgcttatctaagaactaatgtatttggagatgatgtggtgatagtagcagcatataggaccgcgctttgcaaatccaagcgagggggtttcaaggatacttatcctgatgatttacttgcacctgttttaacggcagtgatagagaaaacaaatttgaatcctagtgaagttggggatattgttgtgggaacggtattggcaccaggatctcaacgagctagcgaatgtcggatggctgcattctatgctgagttccctgaaactgtgcctgttagaactgtgaacaggcaatgctcatccgggcttcaggcagttgctgatgtagccgcagcgataaaagcagggttttatgaaattggcattggagctgggttggaatctatgactactaat

SEQ ID NO: 1771 - DNA, 606 bp, Gossypium hirsutum
  unsure (1)..(606): unsure at all n locations; Clone ID: LIB3825-006-Q1-K6-C10
gaattctcgaccttgcgaggcaactttgctgagnatcatgagtctgacactgctngaaaagtcggtgatatggcgacctacggtagatgacgagaagattgatgtggttcacacttcaagaagatttgggtcagagaattggatgtcttctgggaggcacgaaccagcagcatacacagatctgctctcaggttttaggtcaaatgctgattcctcccttgggtattgtccaccgatggttgatcaaacttcattagctagtaatccaaagagaagacaattactagatcaagaagggaagcttggctcttggtccctcatgtcctctggtctctcactcaagttggttgacagtaatgctaagccttctgtgcaaggttctgaggttccttatcaagctcgaggaaatggtagatttagtggttttggtgagtatcctgtgcttcaaggtcataggatcgagcacccacatggaaactggttgatgcctcccccaacgtcatctaattacgagaatcctatccaatcaagagatttaatgcccaaagcttcattgggacaagatcatgagaacggaaaatctagagaaggaagttgcaagctctt

SEQ ID NO: 1772 - DNA, 594 bp, Gossypium hirsutum
  unsure (1)..(594): unsure at all n locations; Clone ID: LIB3825-006-Q1-K6-C11
gtggaaaactatcgaactgaagacaggaagcctcctgtggctactcttgaagtttgtctgctgctccaaatttaaccctaacaccggaattgattaatttagctggagctaatcaaaatgttatggacgatgatttttggtctgtactttactcaggtcatgggtctggcacctctacttctaggacagatacccaagttggtggcactgagtctacgcngaaattttacagtatcaccagtattttctgatgctgtctctccagcactcaatcgagctgatgctcatggtaatgctaatcttgcaacacctgggattcaaaatcaagttgctactacaaataatttgccgttacatccttcacaagtgacaaattcaatgtcaaatcatgaatatggaagtttgcagaacatacctagacatgtaagcagatcatcaattgcagttcaggccctcccagcaatgtctcagactcagacaccaacacaacagagatcaagtaatagtgtgaatactaagaacacaaccagctctgcgcgtattccacatcagatgcagagtangattcagcaagaacgatcatttgttcctgcc

SEQ ID NO: 1773 - DNA, 572 bp, Gossypium hirsutum
  unsure (1)..(572): unsure at all n locations; Clone ID: LIB3825-006-Q1-K6-C12
gcgttcgctcaaanaacctcaagcttggtatccatgaggactctcagaacagactaaaattgccgaattgctccgctaccactccaccaagagtggtgatgagctgaccagcttgaaggactatgtgaccagaatgaaggagggtcagaatgatatctactacatcactggtgagagtaaaaaggcagttgagaactctcccttccttgagaagctgaagaagaagggttatgaggtcctttacatggttgatgctattgatgagtatgctgtcggacagctcaaagaatttgagggcaaaaagcttgtgtcagctaccaaggaaggtcttaaacttgatgagagtgaggatgagaagaagaagaaggaagctttgaaggaaaagtttgagggtctttgcaaggtcatcaaggatgtgctgggtgacaaggttgaaaaggttgtggtttctgatcgtgtggttgactcaccttgctgtttagtgactggcgagtatggttggactgcaaacatggagagaatcatgaaggcccaggctttgagggataacagcatggctggttacatgtcaa

SEQ ID NO: 1774 - DNA, 601 bp, Gossypium hirsutum
  unsure (1)..(601): unsure at all n locations; Clone ID: LIB3825-006-Q1-K6-C7
cgcggtcttcggcttcctagacctggnagaaacttcgaggagcttgctcacaatagggaagtagcatttatttatttgggttaattgttgtcttcagatttaaaacatttatatttttttgaattttaggttctgggtttccatcaagtttgctatggctgcaggtttaatcggaggggctgctttaggggcaggtttcggggagctgcttagagtcattgtagaagcgagtaaaacagctgccatgtttcgtgataacttggaggaactggcgtccatgctatcacctattgaacctgtaatcaaagaaatacaatcattcaacaaagcgtttgataaagagtacgaaacagagcagctcgtcgagatcgtcaagagagggaagaaacttgtcacgaagtgctgtaaaattcgcaggtgggacatcatcaaaaagccttattactcgcacaaacttcttggattgaagaaatcgcttgagagattctgtcagattgttatgcaaacacatcaagcgagggacatcaaagaggtgttgtttgaaactaaagagattagtgtggggaattagaaaattaagtttgaaagaggggagtagcaa

SEQ ID NO: 1775 - DNA, 451 bp, Gossypium hirsutum
  unsure (1)..(451): unsure at all n locations; Clone ID: LIB3825-006-Q1-K6-C9
gntaataatgnaaattacaagtggattcagtgttgcagaattggttcatgcgagttccaagtcatccatttgattttgttgcatcaatttcaaaggatgaagattttcatgcatctgagatggtcgcaagatgagttggtttttcatactattaatttttatctatcgctttggtctgcatccttatgttattttaaaatcattattatatttttgtaggtatttagtccagttttgtttctttataattgttctttgtattattgtataatactaggatcttattggcttctacacattccttttatatatcgagttttatgccttatgaaaaaaaaaaaaaaaaaaaaaaaaaaaaaaaaaaaaaaaaaaaaaaaaaaaaaaaaaaaaaaaaaaaaaaaaaaaaaaaaaaaaaataaataaaaaaaaaaaaaaaagggcgggtcttttt

SEQ ID NO: 1776 - DNA, 606 bp, Gossypium hirsutum
  Clone ID: LIB3825-006-Q1-K6-D10
gctgttgttgcagaggaggagtaagaatagaggaacccaaggcttttgtttgattaaattgaaagcatttccatttttttctttgcgtgtagttttgagagtgggagggaaaaaatggagaggagcactccagttaggaagccacatacttctacagcagatctgctcacttggtctgagactcctcagccggaccccgacacctccgccgctcgctccgtccgacctcaccagccgtcggatgggatcagaaaagtggtgtttggaggtcaagtaactgatgaagaatttgaaagcttaaacaaacggaaacctccttctggatataaaatgaaggagatgactggtagtggtatttttgcagccaatgtagaaaatgatgagtccgaaccaggcagtgccaatcctgcttcaaacaacaagacaggatcacgaatgtaccagcaagcactagctggaattagtcacatttcttttgctgaggaagagactatttctcctaagaagccaactactcttcctgaggtggcaaagcagcgtgagttaagtggaacgctagaaagcgaagattcaaagttgaagaagcagctctcagatgcaaagtgc

SEQ ID NO: 1777 - DNA, 588 bp, Gossypium hirsutum
  Clone ID: LIB3825-006-Q1-K6-D11
ccttgtttctcttcaggttattgtaagcacggtaatgacagattattgatttactcttatatggagaatggaagcttggattattggttgcatgagagtgttgatgggtcgtcggttctcaaatgggacgtgagactcaagatagctcaaggagcagctcgtgggttggcatatttgcacaaggtttgcgaaccacacatagttcatagagacgtaaaatctagcaacatacttttggatgaaaaattcgaagcacatttagcagattttggtctctcgaggctacttcgcccgtacgatacccatgtcacaacagacttggtcggaacattgggttatattcctccagagtacagccagacactaaccgcaacctgcagaggtgatgtttacagttttggggttgttcttctcgagcttcttactggtagaagacccgtggaagtatgcaaaggaaaaaattgccgggatttggtgtcgtgggttttccaaatgaaattcgagaaacgagagtccgagattatagattcatcactatgggacaaggagctagaaaagcagctgttggacatgctcgaaatcgcctgc

SEQ ID NO: 1778 - DNA, 582 bp, Gossypium hirsutum
  Clone ID: LIB3825-006-Q1-K6-D12
ctctgtcaacaacttgccgttgttttttattttcttgcttaaacaaggttaacaagagatggcggatgaggatattcaacctcttgtgtgtgacaatggaactggaatggtcaaggctggttttgctggtgatgatgcccctagggcagtcttccctagtattgttggtcgcccacgccacacaggtgtcatggttgggatgggtcaaaaggatgcttatgtaggtgatgaagcccagtcaaagagaggtatcctcactttaaagtaccctatcgaacatggcattgtcagcaattgggatgacatggagaagatttggcaccatactttctacaatgagcttcgtgttgcccctgaagagcatccagtgcttcttacagaagcaccactcaaccctaaggcgaatagggagaagatgacccagattatgtttgaaacattcaattctcctgctatgtatgttgctattcaggcagttctttcactttatgccagtggtcgaacaacaggtattgtcttggactctggtgatggtgtgagccatactgtgccaatttatgaaggctatgccctcccccatgc

SEQ ID NO: 1779 - DNA, 594 bp, Gossypium hirsutum
  Clone ID: LIB3825-006-Q1-K6-D8
gctcattaatgaagaaagctgagagctaaaacagaagaggtgtagttgctatacttccagagaccaagtatgaattacacaccacaaggagtcctatgttccttggattagaaccagaagaaagtactagcatctggtctcaaaaacttgcagatcatgatgtcatagttggggtacttgacactggaatttggccggaaagtgctagctttaatgatacagggatgacaccggttcctgctcactggaaaggaacatgtgaaactggacgaggctttcaaaagtatcactgcaacaggaaaattgtgggtgcaagagtgttctaccggggatatgaagctgccactgggaaaatcaatgagaaaaacgaatataaatcacctcgagatcaagatggacatggtactcacacagcagccactgttgctggctctccggtacgaggtgcaaatcttcttggttatgcctatggaacagctagaggaatggctcctggtgcaagaattgcagcttacaaggtttgctggactggtgggtgcttcagctcggatattctgtcggcggttgatagagcggtgggtgatggagtgaatg

SEQ ID NO: 1780 - DNA, 607 bp, Gossypium hirsutum
  Clone ID: LIB3825-006-Q1-K6-D9
ctcttatcaaaattgccataccttatgactatgatggttcaatacatagacagcatgagcacttagtgttacggaggggtagattccttgacgaggtaaggcagagcatggtatgcacgacgtttcgatatgactgcttggagctagacgattacctagagcaactaccaaggccttcaacaagatccctactgcctccaaaacttggaagacatgaaaaagaggcttagggaaatcaacgaagaggcgggagctttacgtgaaatgcatgctaaagtcgataaggagatgggcgctggccaagattcctcaagtgcttctgcaagtcaagctgaaaaggatgaagaggattcccgctcgatttatgttggtaatgtagactatgcatgtacacctgaagaagtacaacagcattttcaatcctgtggaacagtgaacagagttacaattttgaccgataagtttggtcaacctaaaggattagcttacggtgaatttgttgaaattgatgctgtccaaaatgctctactgttaaatgaatcagaattgcatggtacgacagttgaaggtctcggctaaccgaacaaatattcctggaatgaaacac

SEQ ID NO: 1781 - DNA, 331 bp, Gossypium hirsutum
  unsure (1)..(331): unsure at all n locations; Clone ID: LIB3825-006-Q1-K6-E10
ctcattcctgaatagactagcgaatgcctcttcttcacgtgacttggtgtctggaacagattcgctacccttacatccaacacatatccgtacatcagtatagggtaccacccatcgaatatatgaaaactttagggaagagaagagtataaccgntatcggaaacatacaatatctgaaacttttgttttgagtccagataacttggttgaatatactggaagaggagtaagttttatttgcgaggcacaaccagaaaacaaactattctataaacaattattattcaagtttccttttataaaaatttatgttattgttgtgcactgtc

SEQ ID NO: 1782 - DNA, 596 bp, Gossypium hirsutum
  Clone ID: LIB3825-006-Q1-K6-E11
cggccgcgtgggtttcagagtgtgtgtaaatcttttaggccttttactactgttaatccagtgtatgttgccagtccatactgcatcttcttctctgcttttgaccctcatactgattatcaagaaatggaacctcaatacacacctctcaagattgcccgttttgcagacttcgggattggacttacaaacatggagagtaatatgttgagtggtggagaagggtcgcctccaattgggctaggtcttgagcttggacgtggatctgatcatagaccaactgggttcacaaaatcgtgtggcttcactgtttttcaactacaagaactgcagcttcaatctcttatctacaagtacatggaagctggtctccctgtccctaatcatctccttctccctatatggaaaagtgttgctggttctcttggtggtctccatgccaatccttatcaaccttactctaactgtaaacactaaacacccttctttttcttggttcatagattagatgaaatgatttttgtttttgctttgatgttgttgattcagatttgggttctggaccattgcacttggagtataagaatggggttgat

SEQ ID NO: 1783 - DNA, 600 bp, Gossypium hirsutum
  Clone ID: LIB3825-006-Q1-K6-E7
gctttttcttagttttcctttttgtcccttgtttatttgatatttccccctcatggccgccgctgatgtcgagttccggtgcttcgtcggagggctcgcatgggccaccgacgaccgggccctcgaagaagccttcagtgcgtttggtgaaatcgtcgaatcgaagatcattaatgatcgtgagactggaagatcccgaggctttggattcgttactttccgtgacgagaaagctatgagggacgcgatcgaaggaatgaacggtcaaaatcttgatggaaggaacatcaccgtcaacgaagcccaatcgcgcagaagtggaggcggtggcggaggatttggaggaggaaacggtggttacagccgcggtggaggcggcggcggatatggtggtcgccaaggaggatatggtggcggacgccgtgaaggtggatacggaaatggtggagggtatggtggtggtgggtacggaggtggacgccgtgaaggaggatatggtgacggcggatctcgttactcaaaaggcggcggtgcatctgaaggcagctggaggtcttaagtttaggtttcaaagtgggcttgggcctatattgttatggg

SEQ ID NO: 1784 - DNA, 531 bp, Gossypium hirsutum
  Clone ID: LIB3825-006-Q1-K6-E9
ctctattcctctcttcgaagttgccattttgtagcattgagcaaaatgaatctcaacaacctcaaagttcctaagatgcctggaggtggagcacttcctgctttgcttaagattggagtcattggtgggcttggcctctatggagttgccaatagtctctacaatgttgacggtggtcaccgagcaattgttttcaatcggatattgggcatcaaagataaggtttattccgaggggacacaccttatgataccatggtttgagaggcctattatctatgatgtccgtgcaagacctcatttagttgagagtacttctggtagtcgtgatctccagatggtcaagattgggcttcgagttctcactcgccctaagtcaactcagttaactgaaatttatcgaacccttggtgagaactataatgagagggtcctgccttcaatcattcatgaaactttaaaagctgttgttgctcaatacaatgctagccaactcattactcagagagagaatgtcagtaggggaaatccg

SEQ ID NO: 1785 - DNA, 611 bp, Gossypium hirsutum
  unsure (1)..(611): unsure at all n locations; Clone ID: LIB3825-006-Q1-K6-F10
gtaaacgcaaagagatttttgcaggaaaatgttactgatggattattagcccttggatatgatgcttctatctgcaaatctcattggngaaaaatccccctcttatcccgctggggaatatgaatatatagatgtgataattgaaggggaacgattgctgatcgacattgatttcagatcagaattcgaaatcgcccgatcaacaaaaacttacaaatcaatcctccaaatgcttcccttcatctttgtaggcaaaaccgatcgtcttcagaagataattgctattgtttccgatgctgtaaagcaaagcctaaagaagaagggaatgcacgttcctccatggcgaaaagctgagtatgtcaagtccaaatggctctctcctcataaccgaaccacgccttatccttcgcccactgttacatccacatccacaattgaaacacccaaagaagttgaattagaaaccaaagctaaagagaaaacccaacctgaattgaatcccgaaatgaaaaactcagttgaagattctgagttgggggaatccatatttgctttctctgatagctctgaagaagggaaggaagaggagaaagaagcatggaagctacctg

SEQ ID NO: 1786 - DNA, 358 bp, Gossypium hirsutum
  Clone ID: LIB3825-006-Q1-K6-F7
ctgagagtgatgaagtagaagaagattacgatgatgatgtgaaacgccaagtcgtgaagggctttcagagacgatagtgattaaggttgaagaatccccggcaggagccgttgatgctaccgtgagatcatctgatgaaacattcaatgatgttgggcgtgttggggaggaaggcgctattcgtgatcgctccagcaaaaccaaaatgtgatctcacactgcacatacccttaatataggggtggaatatttgcgttgcttttcattattttaacttctgtttgtgttgtctttttgtaatacaagtacgttctttgttgcatatcttctaaataaacagaacagtatgaattctggg

SEQ ID NO: 1787 - DNA, 600 bp, Gossypium hirsutum
  Clone ID: LIB3825-006-Q1-K6-F8
gtttcttattagctgctgcggaaggtttattttctttactaaagaataaaagctttttctgcagtagcgttcaagtttttaccaatccaaaatttcaatttaaagaaaaggagaaaacagaatggctctctctttcgcaaacgctaagcttttctctactttcgttgtcgatggaatctctaacgttatctccagacgaggatatgcggcggcgtcacaaggaattgtgtcgagtggaataagaggaggagcaggaaggagcgctgctgctgtagtcaagaaaacaggggaagagatgtctggtggagctaaagagaaggtttcatgggttcccgacccggttaccggatgctacagacccgagaactgtgccaacgagatcgacgtggcggagctcagagccaccctcttgaagaagcagtaaaaaaaaaaacaaacaaacaaacaaacaaactagtctctatatttttagctcaacaaagctaacctgcttgcttgctcctccgtcctttgtgtaatacttaatgcttgatttctcatatgcgaatcaaggaatttgtactaggagtttcaattgatcttaatcaaatgcttgttttt

SEQ ID NO: 1788 - DNA, 604 bp, Gossypium hirsutum
  unsure (1)..(604): unsure at all n locations; Clone ID: LIB3825-006-Q1-K6-G11
ggngtatgggaacacgagcattaaactggnaaaagctttatttatatcaaggttttgatcctgccaccgtaaaccttcctccaaatgagctgagccccaacacccccatggaagcatttaatcagagagatgcagatattctctttttatggcatatgtacaaaaattctgaagatggatcaaagaagactgaaatactcaaacagataactgagacaaaaaggcatagaatccacttggatggcagcattgatttgattggaacacttttatatggaccagcaaaaggctctgccattctcaaatctgtaagggaaactggtttgccccttgttgatgactggcaatgcttgaaatccgtggtccgcttgttcgaaacacactgtgggtcattgacacaatacggcatgaaacacatgcgtgcgttcgccaacatttgcaatagtggtgtttcccaagtcttaatgcaggaagcttgtactgctgcatgcaacggccatggtccgattcaatggcatccttcaaatcaaggctatagtgcttgattgcatttactaccattacatttgaatctttccaaagctagtcatatatgtttgtttct

SEQ ID NO: 1789 - DNA, 570 bp, Gossypium hirsutum
  unsure (1)..(570): unsure at all n locations; Clone ID: LIB3825-006-Q1-K6-G7
gttgattttgttggctgngaagtttatgggngaagagagttgttttcttgaagcaacttacttctgggctccttttggtcaccggaccattcaagatcaacggtgttcctttaaggcgtgttaaccaatcctatgtcattgctacttccaccaaggttgacatctcaggggttaacgtagacaagtttgatgacaagtactttgccaaggaagtagagaagaggaagaagaagactgagggagagtttttcgaggctgaaaaagaggataagaaaaaactgcctgaagacaagaaagaagaccagaaagcagtcgacgcctctttgataaagtccattgagggagtcccagacttgaaggcctacctcgccgcaaggttttctctcaagtctggcatgaaaccgcatgagcttgtcttctagaggatattttgcattcccttatgttaaagggcttttacttttgaattcttttggtttagattatctatggttttattatggggtgctattgctatatgtccagaacctaaattttggatagtatcttctgttatgcaagaacttaaag

SEQ ID NO: 1790 - DNA, 602 bp, Gossypium hirsutum
  Clone ID: LIB3825-006-Q1-K6-G8
aaagccgtggtattggttcattgaatgctgtaatgggcaataagttggctgtactagcgggagattttctgctttctcgagcttgtgtggcccttgctgctttaaaaaatacggaggttgtatcattagtagcaacagttgtggagaatctggttatgggtgaaaccatgcaaatgacaacttcatctgaacaacgttgtagcatggactattacatgcaaaagacatactacaagactgcttccttgatttcaaacagttgcaaggcaattgcgcttcttgctgggcaaacagctgaagttgcaatgttggctttcgagtatggcaaaaatctgggattggcatttcaattgatagacgatgttcttgatttcaccggcacatcagcttcccttggaaagggttctctatctgacatccagcagggaattgtaacagctccaatcttgtttgccatggaagagtttccacaattacatgctattgtttatcaaggttttgacaaccccgaaaacattgagattgcccttgaataccttgggaagagtcatggtatggagaggacaaaagagctagccatgaagcatgctaatcttgctgct

SEQ ID NO: 1791 - DNA, 572 bp, Gossypium hirsutum
  Clone ID: LIB3825-006-Q1-K6-G9
gtttctaacaaaatttaaacttttctttgctctctctctgcaggtccaagtcctgtcaagtcccggcgagctaccaccgccctccgccgcgtctccgttgccggcgaccgccgtgaggtgcagaggcggtggagtagaggccacttgctgtcgacgtgattagaggcgatgggatagggtttcttagtttaggttttttctttttttaattttgtgtttgggctatgggtatttgggctgtaatggacttgggttaatgggtttagtgtgggtatttagggcccaaaattgggcttgtacatggactattctagtgctaatggatgcatcagagaatggatgagaacaaaaaggtcaaaaatactgccctacccattaatctgcagtgtttaacattttccgttttccaaagttgcctatacagatatatgtacatactaatatactattcctacggcttatttagagattaaacaaatgaaagccacaaacttgtgcttgcaaataagcaaatcttatttaggctaaatcagaaaatcgggacctctcctttgtacaaatggcaaccaata

SEQ ID NO: 1792 - DNA, 608 bp, Gossypium hirsutum
  Clone ID: LIB3825-006-Q1-K6-H10
caactgcgaggagttgattcctgaattcctcagctttgttaagggtattgtcgactcagaggaccttcctttgaacatctcaagagaaatgttgcagcaaaacaagatcttgaaggttatccgcaagaacttggtaaagaagtgcattgagctcttctttgaaatagcagagaacaaggaagattacaacaagttttatgaggcattctcaaagaacctcaagcttggtatccatgaggactctcagaacaggactaaaattgccgaattgctccgctaccactccaccaagagtggtgatgagctgaccagcttgaaggactatgtgaccagaatgaaggagggtcagaatgatatctactacatcactggtgagagtaaaaaggcagttgagaactctcccttccttgagaagctgaagaagaagggttatgaggtcctttacatggttgatgctattgatgagtatgctgtcggacagctcaaagaatttgagggcaaaaagcttgtgtcagctaccaaggaaggtcttaaacttgatgagagtgaggatgagaagaagaagaagaagctttgaaggaaaatttgagggtctttgcaaggtcatc

SEQ ID NO: 1793 - DNA, 581 bp, Gossypium hirsutum
  Clone ID: LIB3825-006-Q1-K6-H11
agctgaaactgtcatatacagaatcttttatcacatgaagagacgggaaaggccgtcttaccctcagggagctcaaacgtggagaactgatttctgccatgcaacaagcagacgaggaagatgacattaataaagtccttaggttagaatccgggtgaactttatattattgaaagcagcaacatacaaatccttacacacgaaacagtaattatgtaaactgagactacaatatctctctctactttagttggttggtaaaagcatgggaattcttgcccttttctctcctgaatggtcaataaacaattgaaaattgtggatagcttgggtttattaaattgttgtgtcagggaattactgatgctgtaaattatacaacttcctcttttcttcgtcttttaggtacttctcctatgagcacttctatgttatatactgtaagttctgggagttggacacagaccatgatttcttcatcgacagagaaaacctcatcagatatggcaatcatgcccttacctacagaatcgttgatagaatttttttcacaggctcctcagaagtttgctggtgatgta

SEQ ID NO: 1794 - DNA, 460 bp, Gossypium hirsutum
  unsure (1)..(460): unsure at all n locations; Clone ID: LIB3825-006-Q1-K6-H12
gnttcaatgcttgtaaactgcgacagtgaagaggctgaagaggtaagaacaaatgtatcttcatctggcacatccaaacgtaaaagaaaagtgttcaagaaagtttcgttgatgaacaaattaaatttgtgggtgaacaacttggcaaaattgctaatgctttggaaaatttactgccgataagacatcacaactttacgaacaagtgatgtcgatggaggaagaaggatttgatgatgacttcttgtgttctgtgtttgattatctagtgagtcatgaatccgaggccaaagcttttttagttaaaagtaagaagcataaaaaaatttggcttcaaaaattttctcaaagttgaagatattgatacttttatgtggtgtaatattatgcgcttggacaatgttgttactatgtggtgtactactaattatgtatttggataatattattaatttctagt

SEQ ID NO: 1795 - DNA, 566 bp, Gossypium hirsutum
  unsure (1)..(566): unsure at all n locations; Clone ID: LIB3825-006-Q1-K6-H7
tctccttttagctcanaacgctcttcacgctgtgtagaatgccgttcaaaagtacgttgagatcgggagagtcgctctcgttaactacagcaaagactacggcaagctcgtcgtcatcgtcgatgttgttgaccagaacagagctctagttgatgccccagatatggtgaggggccaaatgaactttaagaggcttcaattgactgatttcaaaattgacattcctcgtgttccaaagaagaagacactgattgaagcaatggaaaaagctgatgttaaaaacaagtgggagaatagctcatggggtaaaaagctgattgttcaaaagaagagagcatctctcaatgacttcgacagattcaagatcatgttggccaagatcaagaaagctggagttgtgaggcaagagcttgctaagttgaaaaaggaaaatgcatcttgaagtgattcagaagattttgagtattttgctaattttgtcttctagtattctgcatttttgttttttgtatgtttttatctaagaaaggattaaaaagaatcaattgngggcactttcttttagt

SEQ ID NO: 1796 - DNA, 481 bp, Gossypium hirsutum
  Clone ID: LIB3825-006-Q1-K6-H8
gaagaaatataaagagctatagatactgacttagaaatctagaaaaaagaaagaatagaaagaaaaaaaatataaaaaataaaaaaaaaaacaaaacatgaagaaccataataaagaaaagaaagaaacctgaagtaaatgattcagtggtagcacaaaagcaattgtctgggatcaatcaaagttgggacctaatttgtgggcctttttataaataacccttttggcccgggggggccttagggaaaatgctccaaacccgggggcccttcccaatttttgggctgtcctgtttggccaccggtacccgcgctgccccttttcgttattcccccccttcctgtcgggggtttccccccgggtgccctcttttttggggtaccccatagcgcccccttgtgcgggtttttttccctgagtttggttgggttccccccgttttttccccctttttttcgttttgcgccttattccctttttg

SEQ ID NO: 1797 - DNA, 587 bp, Gossypium hirsutum
  Clone ID: LIB3825-006-Q1-K6-H9
cccacgcgtccgcccacgcgtccggtttggataccaacatatgggtcaaggcaagagctgtgaagtggataaaggtttagccaccagcttcttcaaacaattgaaaagaaaattggtagaaaatcggtcattgagaaaaaggtgtgcaatgactatggctggtgaattcccggctggttagaagattctcattgttgatgatgatagaacatgtctcttagtattggaaagaatgctccggaagttttcataccaagttaccaagtgtcagctagcgagggaagcccttgctttgctttgacaagacaaaaacagatttgatatcgacctatgtgatttacatatgcctgatattaatggatttgagcttgttcaaatcattgaagtaaagatggatttaccgggtgttatgatgtcttctgatgatggaaaaggagttgctatgaagggtatagtccatggagcttgtgattattcggtaaaaccagttcgcatggaagctattggactcattaggcagcatgtggttcgaaagaagaagaaacgtttgtcgggagaaattactaagtcattgccattacaacggg

SEQ ID NO: 1798 - DNA, 538 bp, Gossypium hirsutum
  Clone ID: LIB3825-006-Q1-N6-A10
agatggtaattgttacaattattattgaaagactaactgcataatttacactggacttcaacttgaacaccaggttttagttacaatgcaagcaaaagagaaaagtcacaactagatcaacaatctttcttctttggccaatgtatacaaataaaattaagtcacacacacttagtagtctacatcctttttcccaattattttctcttttaatccgaattctgcccgccctcgacctctaagccatacagtacacctgcatatttctgtactgatttgaaaaagttatccctcaacttcctaaacgtgcatgatgtgagcaaactatccgaaccagcttgatggcatacaccaactctttccacttctaacaactcggccagcttgtttaaaccaccatgtaggccattgcagaacttcatcatatgtttgatatcgtataccatcggaaaatacattttgatcaaattgaagaagccagtttgagtatcgggcaaactcctgcaggtcaaaagtttaagcaaatatccgaaatcat

SEQ ID NO: 1799 - DNA, 366 bp, Gossypium hirsutum
  Clone ID: LIB3825-006-Q1-N6-A11
gtgctaaaacttgtggcagtctctaacataatactaccaaaaatatccgtctatgtacagaactaggactaggactaaatatcaatcacacccatagacaaaccggcaggaactacaggtgagcagaccaagcatctgattatggacgaaggcgaatagggaattgttgatctggcatgaacccattgctgcacaaaagattgtcactggatacaaatacaatacaagaatcatctcgtgatctgcagataggagatgaggaacagaagagcactatccaaatgtttaaagccgaagagtccatttcttcatcttggaaaatcagttgaaaaccatgactctataggcttttaagttacatggacc

SEQ ID NO: 1800 - DNA, 543 bp, Gossypium hirsutum
  Clone ID: LIB3825-006-Q1-N6-A12
ggggataataaactacaaaagattagagagtttgatttttaatggatcaaagagacgaattcaaaaagaacataaaagcaaaacacagcaattcagcaactaaacgagcacaaatccttttttttttgcgtaaatacaaaatgtcaccccctactctcccctcccctctactacatccctaacccaaacttcatttcaagaaggtatccattgcatccgcatacatccccgcgtccgcctgttgctgctgctgctgatctaacaacgccgaagatgaagatgtcgccattcttgctggcaatgtaaagctcctcttgaacttgttttccatctttcttatattctctggatgactatccaagctcaagaactcagtagggttagcatcggtgtccgagttttgattagaatcttttccttcgaccatgaggggatggtggttcgggtcctgtttgtttcccaagctctccgggttaactaaaagcttggcgtcttcattccgtccagtgagagcgttgaagaaagtcaagccgttaggccatt

SEQ ID NO: 1801 - DNA, 537 bp, Gossypium hirsutum
  Clone ID: LIB3825-006-Q1-N6-A2
gaatagaattgtaagggtattaagtatttttataagaattagtcttgaagatgatttcttccctgtaaactaacagggatacaatctctataaaataaatcaggattgaatccatttaattacctgtaaaagctagcactgagctcaacacctcaatcttattttaagcaacttcggctaatgaagtaaagaatctatcactgaaattgtacgttaaaactttgttgtgaacctcaggtggattcaatatccctaatcaaaacccggttacagttcatttaccagctcaggttagctacacctatttcccattaccgtgtgaaccaagaacctggtagacaagttcctctgacagttctttctttgcctgaaagtgtctcatatgcagtataggctgacatccaacatctgcaatagattttccttgcggggtttgcgacttgaatcgttcggtttcgtatgctttaagattgtttctttcatcaggtaaatggtggcaaacgtttaagagcgagccaagagagttcatcttcatgt

SEQ ID NO: 1802 - DNA, 444 bp, Gossypium hirsutum
  Clone ID: LIB3825-006-Q1-N6-A3
aacccttctattccaattatctatattaatcgactctatggtacaacggcaacatcgctaaactctgtgagtttcctacctcctgaatcacacacacatggaaacgcacaaagctttacctatttctaaaacggaatttcatcccgtacgaaaatcaaccgccaaaaactgattaactttcaatgctatgcttgcctcaatacctaaagtgtacgtctaatacccaaatgctacagtaacagctgctcctaccccaagtacaatattggaacagaatcctaccctcgctgacagacactgcattatgatgcgactcccagcatcttcttagcctcttttggcccaacttagacattgttcactgagcctgcaccaaactgggaggttcataatatgaagttcacacacacatgtctgaaaaatttggcctttctaactatcata

SEQ ID NO: 1803 - DNA, 525 bp, Gossypium hirsutum
  Clone ID: LIB3825-006-Q1-N6-A5
cagcaaaaaccaaaccaacagtgtctatagtttttgaaattaaaaggtgaaataagtaaaaacacgaagcattacatcagggctctataggctctcaagccatcatgccatctttaagcagtgctttatcagtcagaatcctcgtaaacttctccatcggatagctcatcgaatgatcttatgtcaagctgatagcggaggatacctccaatgccaccgaagcctctgcaaaactgtgatccttcttgggatttgtttgtgacgaattcaagagaacaaccaaagcgcttgtactcgttggcaaaccattcgagtaagggcattttttcttgaacttccaactctgcagaggtttcaggatcacggaagttgctctgatcagcctcctgctccttattcaggtgttttatgataatttctccggttgcactgtgctttagcacgtacctattgatctctagattttcccacacaataagggtttctacagcacccatttccagagccttcaacgtatcatctatg

SEQ ID NO: 1804 - DNA, 539 bp, Gossypium hirsutum
  Clone ID: LIB3825-006-Q1-N6-A6
gaaaaaaaatatcttatattatcatcaaagagattgccaactagctttgggttttaacatatctggctctagaaaaaaacttattacaagataaaatgaaaaagaaaattaatgctgaaattgatgctgaatcaaactatttttgctttttaacatacacatggaacccagtattttggtactcacaaacacatctaacacaaatgctttcttcattgcattgggggcatgataaatctgttcactaatgaccgttggcaatggaaccgttatcgcaagcagcaaagtccccgtctttctttgcatagaatctccggtacatggaatcaacttcggtgaggtagtatgttccgggagacaaaaggctacagtctttgcttgtcacgaaatccttggctccatacctatgctccatgagcttcatagtctcaacaaacttctcagggggaaactcgtgccttgacttcaatttcccacctacattcatcaccgatgcaatgttcgataggctaaagggatgttgaccttcatggaatcgc

SEQ ID NO: 1805 - DNA, 484 bp, Gossypium hirsutum
  Clone ID: LIB3825-006-Q1-N6-A7
aaaattattaaatatttgggtccaatcatctattacgacatcatttgcctttgttcattacacaacagtttcattcacctccaaagagtgaatgtttcagcaaagttgccatcatgactacatagaacaataaagaaacatccagacaaaattgtgaagaacttggtactattgtgtctcaaaatttcacatcagttgtccatgtaccttgcacactagggtgtttagttacatgccttgtcttcaatttcaccacctttcttcccaatgcgtttcttagcctggttgcataaagaaggatatcttcaggagtcatattcttcacacataccacccgctcgtttttgttcttgtaaaagcctttcaaatgtggatgctgcccacgaatgagttcaggaaccacctccagctgagggtttttctctttaaaagttggtcactctgactccataaatgccctggtgccccggcagctaccttcccc

SEQ ID NO: 1806 - DNA, 545 bp, Gossypium hirsutum
  Clone ID: LIB3825-006-Q1-N6-A9
aataaaaattgatttttatatttattattaaaaataattattaataatagaacaattaaagcaaaaaacccaagctttaagcttaatgtaaaattgaaataattaaaaaaaatacaatctagattcccctaacctaggttcgatgaatccaacccaactaatccatagatctgcatatactaatagaggagtgcaatgattaatttgttaaatcttcaaaaagtaaaattgatgtcaaaaagaatatagttaataaagagaagtaataccctacccaactaatccgtagatctgcgtatgactagtagtcatagtcgagtgccataaaattactttgaaatcagatcgacaacgcatccacagatatatcagcgtttttcaggtatccagcgaaaagtatcaatgccataaaataccatacctctaaacagagcattatagctgaagcaaaagacaatctgacaaatccccagagatgttgaaatgccttccaagagaagccggtccaagcctgaccacaagtaccgctaattatgtacaaaaac

SEQ ID NO: 1807 - DNA, 524 bp, Gossypium hirsutum
  Clone ID: LIB3825-006-Q1-N6-B1
gtgagagaaacaatccactgctttggattaataataaactgcatcaaatattagggagaaattaacatgtttccctacataaaattttcttcatctacaatttaccatttacctccctccccagtttaatataataaaggtttccgcttactctaactgtacataaacaccatataagcagtaaaaaagccaccaagcagcaactgaaggaataaaggaaaaaaagttcttttaagaaaatgacactgcaatctttggtctctatctatagaccaactacagcaaagcttgatgcagaataacactggatgccaaatgcacaactagtcaattttcttctttcagaaacattataaccataattcacctcgtcagtcttaccgctcatctaatcttgagcagaattaacatttgccgctgcagcagcagccgtggccgctttcttgtttgcctttgtcttgcccttaccaggaggtttgtcatctccagggacttcagcagtgagccttcccattttcttctgt

SEQ ID NO: 1808 - DNA, 437 bp, Gossypium hirsutum
  Clone ID: LIB3825-006-Q1-N6-B10
aaaaagggtaaaaacccaaacccaaaaaaaaaaaaaacacccttagcaaacatgtttttagatcaacacccccctcccctaaaaaaaaacaagacgggaggccccaaaaacatgtccccttggaactttttttaaccccacaaaagcatcaaccctgaaaacaaggggggtgcataggaaaaaaaacagttttgcacccaaaaccccccatcagaacgggaatcgggggggaccccagttccgggggggccaaagccggggccaaccccccccaaaattccaagggggggggccaaaccaaagggggttggccttgggggggggttgttgatggggtccaccgacaagggggggggggaaaaccgggaaattgtgggggttggggggggccccgcggtcctggccctagaggggaaagcccaccccgttttgcgggg

SEQ ID NO: 1809 - DNA, 528 bp, Gossypium hirsutum
  Clone ID: LIB3825-006-Q1-N6-B12
tttttttttttttttttttttttttttttttttttttttttttttttttttttttttttttttttttttttttttttttttttttttttttttttttttttttttttttttttttttttttttttttttttttttttttttttaaaaaaaaaaaaaaaaaatttttcaaaaaaaaagaaaaaaaaaaaaggaaaaaggggaaagggagggacccaaaaagtataaaagggcccaaaaaaaaaaaaacaaaataaaaaaaaaaaaaaaaaaaaaaagggggcaaaaaaaaaaaaaaaaaaaaaaaattttaaaaaaaaaaaaaaaaaaaaaaggaaaaaaaaaaaaaaaaaagggaccccaacaaatttaaaaaaaaaaaaaaaaaaaagggggggggtttaatggggaaaaaaaaaaattggggcccaaaaaaaaaaaaaagggggccccaaagggggggggctcaaaaaaaaaaaaaaaatggggcaaagggggaagggaaccccctttttaaaacccttagggggg

SEQ ID NO: 1810 - DNA, 509 bp, Gossypium hirsutum
  Clone ID: LIB3825-006-Q1-N6-B3
ggaaaactgaaagacttcaggctttagccatttcagaaaaaaaaaaaaatcactgggttctctgtagcagttgtttattagacagaaaaatcaaagaaagttgtcctcaaatgcaacagtctttaacaaattatgatggcctaaacacaaattctcatctcaaaacttaaactcgaagcaaaaatatttggaagaaaacaagcaaagctatacccaaggcatgttttaagcagagatgataaagtagcatcaagcttcaagccttcttctttttggatttgagcagcacgaacccaataaaaatacagaggaggcaaaggagcaccacaccggcacacacagggatcagtatggcatattcctggggtagaaaataattgtggatgaagttatcactgtccacaaatggcaggatgatgacccaaaacgtataatacgtgaatattgatagactggtaatagataagagaaacccaactgctcgatccgctaattccattctctttgca

SEQ ID NO: 1811 - DNA, 519 bp, Gossypium hirsutum
  Clone ID: LIB3825-006-Q1-N6-B4
acatgaactagtcacatgaagaccgaaaaataaaacatagtatccagcaccataaaagtaattagacttaacgttaaacgaaacaagaaataaaaagatgaacctacaacccgatataaaatatcctgggtgataatgaattcttaatgccagtatcatcgcagttccttaccgacaaactattactgggagttctctcttattgtctgcaactgagagaatgaaattcggattattgacccaccaagtgaggttgcgtgcttggaaacaagggcttctgtagcttgctcctcattttcaaacataacaagggcttgcttctttccgttcatttcaaagagcttggtattaacgatggtgccatgttccgccaagtggttcacaatttcctcttcagtgacatcctgaggtaaagtagaaagatggaccatctttgttggggagcagcagtaacggtagttcttcgcagcatggcgattaaagcggttgagatttgagttcatatattcatgggtatca

SEQ ID NO: 1812 - DNA, 174 bp, Gossypium hirsutum
  Clone ID: LIB3825-006-Q1-N6-B5
atcacaaaacttcaacactgggttcatagtataggatcaagcataaatgcaaaaacatcatggccatcaatgccattaagtccataaaattggcttcaaaaaaaacatactaaccctatttttttctggctagggaaaaacagataataactttaacaacttaacgctttccgc

SEQ ID NO: 1813 - DNA, 522 bp, Gossypium hirsutum
  Clone ID: LIB3825-006-Q1-N6-B6
cagacataataaatattaacttcatttaagtaataataattctcacatcatatataattggccccatgcccctgaaaatatacaatgcaaaactttcaatatttatggcttacatctctctcaaaacatggggaaagctgctaaagccaaattgcctccttcaccaacacaaccatctttgtcacctctttctttctgatctaaatggatacgctaactagcaggtaggacatactaactcgtcttcacggagtttccgcttccgaccctttatctgaaattccttcttcagtgacatttccatatatagcttctccagctgattcactctactcttcctggcttctaattccctgtaagaagcacctgccttccttttaataagatcagggatatcaccaaaagggggagtaactctgctatatgaagcttgggactgtaattttttagcttcttccctatcctaggaatagaaaatgtgtctgatagatggatgattatcaacagaatgcaacactgcag

SEQ ID NO: 1814 - DNA, 543 bp, Gossypium hirsutum
  Clone ID: LIB3825-006-Q1-N6-B7
aggaaaagagtgtgaagatagaaagataaaagatgtaacaacaaaaattgtgttaacaatttttttttttgatacgttgatagattcgaacacaaactatttttaagaaaagtaaacagtcaaccaatagactacaacttggatcctcgactttaagcatttttgttagctggttacggttgagtggattaatctccaagcaaatggagctcatgtactctggtagttagggagaagcatgatataaacacccacaggtgaaaaaatatttgtcaagccttgtgttgagaactataaacgactaggactaaatgttagcgagcctattcatcctcctgaatcatttcagcttcctcccaccacgaaaccggccccaaaccatcgtagtttattgttccagtaatcaccatcggggcaaatggtttcgaattctctggttgttcaaggggaatcgaaggataaataacactatcaactcgaaatttaatcggatctgacccatcaataacaaatcgtggttcttcggactgtgcttcttctgca

SEQ ID NO: 1815 - DNA, 527 bp, Gossypium hirsutum
  unsure (1)..(527): unsure at all n locations; Clone ID: LIB3825-006-Q1-N6-B8
aaatattnaaaaaaaaacttatatatattaagcatttcttcaacaaatgaatcaatggaatatacaacagtagaggtcacaaataatgaatgaattcactctaaagaagatcaaattaatagaaatcccaaaaatcaatggaaaaagaaaaacataaatcccaaaaataaatgaattcactctatgtttaattcctataaacactaatgaaattaatgttgtgctaaagaagctgtcataaaacgtggtttcttggtcggcaatggactttcaacctcttgctctgtatagatttgacaaaatctgcttccatctttgatttccaactcgcacaaagcgggcaagtttaggtcaaagtcaaagtcgacgcaacgggtttggctcaacgcgccaccgtccgacaccgtcaccccactcaagctgacgctactgctcttgttgttggtgatggcggcggtggtggtggtggtggtggttggtgtttccgccttcgtagtgacagcgtttgtgacctcccaaagcttggc

SEQ ID NO: 1816 - DNA, 503 bp, Gossypium hirsutum
  Clone ID: LIB3825-006-Q1-N6-B9
agccagaacgtctgaatactactcttttctggggtaacatgatcggggacttattacattgctttattaaattttccaactcgatttaggatatttttaacaagaaaactaggtatcctatcgggcatccttaaataaaaaattgggagtttcaacttttcgggcattgcacagctcatcaacacaatcacccctttcgaaaaccgctgccgcccccattcctgtgcctatgcacatcgaaaccactccgaatcggcagtctttgccacgacgcttcatttcatgcagaagcgtagcaacacaacgagcacctgttgcgcccaatggatgtccaattgccattgcgcctccatttacattaatcttttggggatcgagctccaacttcttttgacaatataccaactgggatgcaaatgcctcatttatctcaaaaagatcaacatcatcaagttctaaaccagcagatttaactgctgctggaattgccacagctgggccaa

SEQ ID NO: 1817 - DNA, 495 bp, Gossypium hirsutum
  Clone ID: LIB3825-006-Q1-N6-C1
aaagccaaggaaagggtgaaatctgataaaagcggggcgtaattgaaacctttctttccgtagaacatttttgggaaaggttaaagaactaaggcccgaataaaacaagaaacattggtcaaacaaaaaaacaaaagaggggcaaaaagaaaaaaggggcatttcactgggggggtacctagctggctccctaattaaacgggcatttttgaggggtgggaggactaagcatttcgggggttatgaatattccaggggggactttgacaacaacatcctgtagcaaaaaaacattgacgtttgatacactggcatggggaactggtagctttagggctcgaagggcatccataaatcgggcagctggatgaacgatatttggacttcgaaccccaaaatagcttcgggatcctactattttcacataaacttccactggttttggccaataagtaaaggattgtttcatggtattgccaaatgcggatttggtag

SEQ ID NO: 1818 - DNA, 557 bp, Gossypium hirsutum
  Clone ID: LIB3825-006-Q1-N6-C10
aaatgaaatgcttacttgagatagaagataatagatggcgtatttacttacattccaaagtcaagaaaggggatggggtaaaagtaaaacatctttgtacaaaaggggtgaggttgcaaatgaaaaggccatgcttgaaaatctaaatgcaggtatacatatttatgtatatatttaaatggataccatatactactagtcgtctactaccaccacatcatgtccaaaattggattaataccatttctgccatctatattggattctggtttctgagaaaaacttgtggaccagtcactttcaactcggaactaaatcaagttctaaccaaccaatcgtctaatgttactacggcactccatatacctcccaccaaaaagctgaaacgataaaaaacggtggatgttctcatgtaataacatgatatatgttcaatctgattagttttcttcttcctatttaaaacaaggttcgatacttatatgcaattatacacacccattatattacccggaaatattagagccgagctttaacaattctctgtactagatgct

SEQ ID NO: 1819 - DNA, 498 bp, Gossypium hirsutum
  Clone ID: LIB3825-006-Q1-N6-C11
gataaagcttaaaaatctagacttgattaaaaccaaatacagggggaagctgaactctcactctaagcccagggaggaactgtacaacaatatcagtgatgcacaaaattggacataaatatttgtatttacagcttcatcatattcattactcctacatacagctaagtcaagactaatgcatcccactagacctatctggcaggacccgaaccaccatttgtggctgtggtttcagttgttgcattgtttcgcatttgaggggtaacaggattcctgctatttgcaagaaacgcctgcagatgtggtggaacactaggtggagatgttatatttgtttggggcctcgcagcttgtgttgactgggtgggttgaatcatcatctggctaaaagattcaaaatatactcgacctgtgaggcttccacgcattcgtcctgtaggtcgccagttctgctcaaatgccaaatcagctgacgtatcaggtcttgaagctgca

SEQ ID NO: 1820 - DNA, 552 bp, Gossypium hirsutum
  unsure (1)..(552): unsure at all n locations; Clone ID: LIB3825-006-Q1-N6-C12
ctaagcaagcaccaaagataaggcaccgataaaatgtataaatataccagaaacagaacagcaattatcattaagaactttctccaaaatcactaacaaaacctcccaaaaggcacaaaacaaaatattaaacctaaggataacttcaataataattaaaaaaaaactagtaaaaagttccaacaagaagagtggtgcttagtcaacttcttccatcttgctgccttcagcatcagcatcctctaatgggggcatatcagcatcagcttcaccttcacctgcatcctcgtcaatgctcaagccgagtttcagcatcctgtggattctgttgccaaaggtgttaggctcatcaaggctgaagccagaggtgaggagagcagtctcgaagagaaggagaacaaggtccttcacagatttatcattcttctctgcatcggctctctttctcagctcttccatgatggggttctccgggttgatctccattgtcttcttgcttgacatgtaaccagccatgctgttatccctcaaagcctgngccttcatgattct

SEQ ID NO: 1821 - DNA, 523 bp, Gossypium hirsutum
  Clone ID: LIB3825-006-Q1-N6-C2
aaatgaaagatcagattatttatagggccaaagtccatttacaaaacccaaaactaaaatgaaaaattaaaaaacaattcaataaaagtccaataacccaacccaattactaaagtaacccatgacccaattaaataagccctaaaacccgaggcccaatacacccaaaaattatctcagcagcttgcgagcactagaatcttctggaacgtcccagaacagtgccaaggggtcgggctcccacgaacggtttcctcgcacggcctctttcacgcacccctttccccgctcctccgtacggccattcctgcaaagaacacacgagaagaaagagtaacagaatatacagccaaatgacagaagaaaaatataatttttatttttcatttattctgtaaatctggctataaaaagccattatttggaccttaattttttacccatactgtatgcatacgcacgcacactacgcatattaatcaaacaaaggaaatcaatcaaagttcaaggtggtttccgattc

SEQ ID NO: 1822 - DNA, 546 bp, Gossypium hirsutum
  Clone ID: LIB3825-006-Q1-N6-C3
gatggaaaaatgatgttgtattgagtaataataattttgagctatcgagtgagttcgactacaaatcatcacatatccagtatttcaacaacacttttattgtatcactgctacaacaatggtgttttacatggatgatgatttctcaccaccttcgacgtctcctcccgtaccaatatgcaaatccagctatcgatgctgtcagaacaagtcccgctgctgcatgccaagcatacaccggtttttccaaaacaaggccagaagtagaacggctgacttcaatgggtagtgccggctgtggtttcttgctaattgtcaatgcgaagtttaggccctgctgtcccaactcagccagatcttcaaccggtggtttgagacttgtggctttcgctatggcttcgtactcctctttggttcccccttcaaggaaagacccaacaagatgacccttgcttatccagtaagccccaaaggtaccactcgagtaatccccgaaatgtactgcctctcctacattgtccccgtaaaactgccaagacaatccaa

SEQ ID NO: 1823 - DNA, 503 bp, Gossypium hirsutum
  Clone ID: LIB3825-006-Q1-N6-C5
caaaagttcaacatcttcctattaccaagtactgctgcagcactataaagtaaagttgacaaataccaagtccaaattttacaattggaatgccagtgcaattacttgtgagcagcaatgatcaatatattggcaactacaataccatactacatctaagcaaattggggacttgaatttcacgtcaataaaaactctcaatgagcaaaaacagtgtcattgcgtctaggaggtctatcaggaattgttcctggtttaaacttaaaagcttcatgctttgccagctcaggagggacagggctgccactttgaacaagcatccgcttaagatcaaagaagacatcagtgtcatggagagtcaaaaatgttgtggccacaccagttttgcctgcacgttctgttcttccaatatgatgtgtgtacatttcaatactattcgccatatcatagttaatgacgttagccacatcaggaatatcaatcccacgccctgcaacatctgt

SEQ ID NO: 1824 - DNA, 572 bp, Gossypium hirsutum
  Clone ID: LIB3825-006-Q1-N6-C6
tcgcgatccccgcgtccgattttttatgcagaaattcagaaggaaagggatgaaaatcttaagctgaagtgccaacttggctttcgaaccaagttggtcgaagattatatatcttgtaatgataacgatatggaacgaagtagcttgttgaatgaaatggaagggccgaaagagaatgtggcttgccaagatcttattgaactcgagaaaactacaagcaagcagattgctgctctaaagaaagagttggaggaaaaatcagaagcgttgaaagatatggaaaaccaaaacagttgtctaacggtgaaacaagtcctaactaatcaagagctgcaagatgctcgaaaagaatccatacgtggcttgaacgattttctgaataaccagacaaatcttaagagtgaacagaatgggagagattgatcaaaaagcattcaaagttgcttgctcgttgaagttccaggacgaagattggcgagaaccgtgtgctaaagcatgttcattatggcaacataatgtgcaggatccgaaatggcacccgtttaagatgatcaacatccgaggcaacttgc

SEQ ID NO: 1825 - DNA, 496 bp, Gossypium hirsutum
  Clone ID: LIB3825-006-Q1-N6-C7
tttttttttttttttttttttttttttttttttttttttttttttttttttttttttttttttttttttttttttttttttttttttttatcgggggccaaataaaaggggtttttgggtaaagaacgggtcccttaaaattagggggaaaagatttcgggaacccccatgggggggggggctcctaaaaaaaaaaaaaatccttaaaagggggaagcttcgggatgggggaagggaagggaaaaatagggcaccctttaaaaaaaaggtttgttagagggggcagttaaaggacccggggggggaagtttttgaggcttaaacagggggaaagggaaaaaaaaggggggggggaaaagcccccaaggggctaaggcaacaaaatgggggcaggggaggaggttagtttaaaaacttccaagtttaaaaggtttcaaaggccttaagggagggcacggagcttggggcaatgggggaaactaaacttcataaggtg

SEQ ID NO: 1826 - DNA, 546 bp, Gossypium hirsutum
  Clone ID: LIB3825-006-Q1-N6-C9
tttttttttttttttttttttttttttttttttttttttttttttttttttttttttttttttttttttttttttttttaattttttttttttttttttaaaaagggaaaaaaacccaaaaaaaaaagaggaagggggaaaaaaaaaaaaaacccgggtttcacaaaaaaaaaaaaaaaaaaaaaaaaaaaaaaaaaaaggggaaaaaaacccaaaaaagaaaaaaaaagggatcaaaaaaaaaaaaagggggcaaaaaaaaaggaaaaaaaaaaaaaaaaaggaaaaaaaaacaaaaaaatggggaaaccaaaaaaaaggcaaaaaaacccccaccctgaaaaaaggggcaaaaaaaaaaaaaggggaaactggaaaccggaaaaaacaaagtgggaaaaaaaaaacccctgggaaattaaaaaaaaacccgaacccgggggtcaaacccggaaaattccgaaccggcaccagaaggcaaacaaattttcccaaaagggagcgttataaaaggggggggaaaaaaaaaaaaaaagggtccccggg

SEQ ID NO: 1827 - DNA, 496 bp, Gossypium hirsutum
  Clone ID: LIB3825-006-Q1-N6-D1
aaatcaaccccataagaaataaaattacaggtgttactaattacaagaacatacagcacaactgggggggaaaggggcaaatcaaagttacaaactttgtcaaggaggctggctttttatacaacaaatccaggaaactatgaaattagggttaaatactatgggatataaaaaatatcggcgctttccatataaaaaacatctgttatggaagttgatgatgttggttcatctgtattaacaagtttagccttagcttggggatacttttaaagcatccggggatattgttgacgggcatttggagaatcaaccattgacaacacacgggagactgcctcatcgattggtacatccactttttgtttggggaacactttgaaaagggcctttttttcatcataaatgcaatccgactcactgggaaaacctcgcaagcctacacctttacggggccattgaagtacaaccttgtttagaacaccaacagcccaac

SEQ ID NO: 1828 - DNA, 552 bp, Gossypium hirsutum
  Clone ID: LIB3825-006-Q1-N6-D10
aaaattaaatctgcaacagcccaagacctttactaaatcgggactgaaaaaagactatagacaaacaatgcaattagcaacggtccatagctcaatttgacatgttataacctaacataattaccaaaacccattgaaaaaaaagtcaaataatataatcacacccccattgaagagataaccgaaaaacacccggaaacaacagcaaactgacagggttagacctaagttaaaccaaagcaatgctgctttcaccacctgggggcttgcgaacaccaccaaagtagtctcgagactcaacctttccatcagcgaagatgttgctgccgcttatctcctgcattttcgccatactaagtggcttctcggcagaacctggcggaacatcacccttaaatatgtcattacccgaaagctcagccaatttctgattaggaattttctttgctgtcttaaccctggcctcatcgctcgaattatgtgtatgagattctcccaagtcgaaactgtccttcaatgccaatgcacgtatggttgttggcctcggcaaaa

SEQ ID NO: 1829 - DNA, 524 bp, Gossypium hirsutum
  Clone ID: LIB3825-006-Q1-N6-D11
ctaacaccggtaattagatattctataatttgcttatttcagacagaaaaaaatggcttaaagagcctaagcatacaaactctcaaacgttagtacaccatgggcaatgctttgttctaagtgattcggtcagtaatccttcggaacttatcgaaactttgacggtgtctgctttacaggtataccctcccagctaagatttttcaaatcgatggatgttcattgacaaacaacctcgtttccgatactattcagccatgaaacaacttcatcgattaagggtcttcgccttggatcctggtctaaacatctgcaggcgatttcgagcatgtccaacagctgcttttctagctccttgtcccatagtgatgaatctataatctcggactctcgtttctcgaatttcatctggaaaacccacgacaccaaatcccggcaattttttcctttgcatacttccacgggtcttctaccagtaagaagctcgagaagaacaaccccaaaactgtaaacatcacctctgc

SEQ ID NO: 1830 - DNA, 463 bp, Gossypium hirsutum
  Clone ID: LIB3825-006-Q1-N6-D12
ggattaaaaaattctagtccccattaattggccccccacccaaagaggaaatcattggttaagggggggaggggctttaacaaaaggccccccaaaaggaaaaggctgggcccccccccaaaaataaaaaagccccaagcccccctcaaggtcgaaatccattcaagcccccccatgccaaaaggcctttgggaatctaaaccccgaaatctaaggggagaccgactggttttcccaaaaactttccccccttcaaaaaaaccaaagcttcaaagggccaacaaactgaaccccccccgacagaggactgaaaaaggggggcctcccatcccttcaaattaaaaccccttccggggaacaaaagcggggcccgattcatcaaacccccccttggaaaacccatctgcgggaaggggctaaaaaatcctaaaagggatcccccaatccaaaccctggtttttcc

SEQ ID NO: 1831 - DNA, 508 bp, Gossypium hirsutum
  Clone ID: LIB3825-006-Q1-N6-D2
gaatataaaaaggttctctaattattcccaacttttattgatttatagaactgccctggctaacactgaacattacaacaggaccaaacttttctttatatggtacaacagtacgaacttgaaaaaaaaaaaagtagaagcaaacaaacaacaaacacagactcaaggcagtagcagagcacaaaaagtcgctcctttcatttaataggatcgataataaggatcatcctgggtacctccgcgggtgctccttctagtcccagcattgttaggcgccgcacttgggaagtcttggtttcccgttgtaccgtaagcaccccctgtatctccgccaaaccccatactgctgaggtcatcttgcctgcctgtatcatacccactacctgcggtggggtacccacggttgtcatgtccaccggtaccgccatagccaccagtatcccctctgttgtacccagctgtggtgtagccagtaccaccaataccaccaccaccagcatggccagcc

SEQ ID NO: 1832 - DNA, 451 bp, Gossypium hirsutum
  Clone ID: LIB3825-006-Q1-N6-D3
aaataaaaaaaaaattttttttttttaaattttaaaaggaattggttgggtgggaaggaaaaaaaaaaaaaaaaaaaggaaaaaggaaggggaaaaaaaaaaaaaaaaggggaggggggaaaaagggggaggaaaaggggggggggggggggcccgggggaaaaaggtaaaaaaaaaaaagggcaaaaaagaaaaaaaggggaaaaaaaaagggaaaagggaagggggcaaaagggggaaaaaaaaaaaaaaaaaaaggggggaaggaaaaagaaggaagggaaggggggaaaaggaaagaaaaaaaaaaaaaaagaagggggggggggggggggaggggggaaaaggaaaaagaaaaccggggggggaaaaaaagaaaaaaccgaaaagaggggaagggggggggccctcaaggggggggccgggtggaatttttttaaacgggaaaaag

SEQ ID NO: 1833 - DNA, 528 bp, Gossypium hirsutum
  Clone ID: LIB3825-006-Q1-N6-D5
actggggaattctctgtaaagatcgattatcgggtactacttacagagcttaatcaaaataagagttacaaccttcctaatgcataaaattacatgggtttctataaggcgctatggattatacaaattccttctaaagtaaaaatccatgtgtagaggttgtttaaaaacttggtgccgcatttttgtactcttgctaagaggaaattagttacggatgttatctgtcctctttgcaagaaagatccggaggactcagatcatctgttgtggtcgtgttgtatcttacgacaactatgtagtggccttcaaatcaagatggctccggttgggtgtacctcaaattacaaatgtcattttgttaatacatttcttgcaggtgacgaacataacagacagattatatctatctttttatggcactatggtaccgtagaattaaatgtgtgtatgaaggtgtcaagttctcattgcagaaaactttaagtttcatccgaggatatcatcaagagatatgtttaagtcatg

SEQ ID NO: 1834 - DNA, 165 bp, Gossypium hirsutum
  unsure (1)..(165): unsure at all n locations; Clone ID: LIB3825-006-Q1-N6-D6
gaaaatattattttataattttaaagtttgatatacttgtatcaatcaacaagcacgtttgctttgcaattattatcattattactacttaaaataanagttacagttaaatagatagatttctagcttcacgccaacactgccgctatcttttcctcatgatga

SEQ ID NO: 1835 - DNA, 534 bp, Gossypium hirsutum
  Clone ID: LIB3825-006-Q1-N6-D8
acggcaattggtttttaattactctatatcatgtgaaggctacaaaattgttgtaaaaaccagaaagaaatgcagataaaactaaagatccccttgaccttatataaaaacatagtgtttatttggaatcataggtgactgaaaatctagtttaaaatggtggtaaccatgtgatagcaatggggcttcttactttgtgcactccgtccttccacaccagccctccaaactcaggcattgtttgtggggattttcttgtgaaactgatcttgtaagacagtttctggtttcttctagtgaaatttagagttttgggctcaactttaatggtgacgcctttaaatggtgaaactacaacatggtaatgtgaagcaggaggaccaacatttgtgactgttctatggagagtcaaagttgaaatggctgtatcttctgggaagacaactgagattgctgggtagttcaaatctcctggagtggcaagggtattgtgatggcaagacatgttggaatgcttgctaaaagcttttagct

SEQ ID NO: 1836 - DNA, 459 bp, Gossypium hirsutum
  Clone ID: LIB3825-006-Q1-N6-D9
aaccaaaaagaaaggttacccttaaggggaagggggagccaaaggccaaacccctatcaaatgggggccagacccggggccaaggggggttttttccaacggaagggggccccctaaacagggggggcaaaacttaaaagggggaaccccaaaaaaaaaagggggccccaaaaaaaacccaatctttaaaaaaccaaagcaacaggaaacgggaaaaattaaaacctattttccacaaaaaggaaaccttaaaaaaatttaaaaaaactgggggttaaaaacgggggaagcaaagacacaaaggcaacctggggggggggggaccatcacaccctggaagcccacaatttggaaaaaaacgggcccaccggtggggaagaaaacgggaccccaaccttttgcttccaaataaaagaaaaacaaggggaaaattttaaaaattgccagggggttttaaaa

SEQ ID NO: 1837 - DNA, 538 bp, Gossypium hirsutum
  Clone ID: LIB3825-006-Q1-N6-E1
agaactaaagacttttttgttacattgaacgaaacaaagggtttcacagcgactttgaaattgaacgaaacaagggtttcacacaagttataaagcacgaaataaataaaaagaatgttccatatctttcccatatccaaagcacaatggcaagttactttaagaaaaaacacctccttccttccccaaaacacataagaaagctgataggtattacacaccaaccactgtcatcccatggcatacttctgggtccagctacgagcagtggcttcatacttggcccgatcggtcttatacatgtgagcaatctccggaacaagagggtcatcagggtttggatcggtcagcaacgagcagattgagagcagaaccttggaaatggttagtgcagggctccattgttctttgaggatatcaagacaaatgcttccattgctgttgatgttgggatggaagaccttggtcctaaacgcaaccttaggaggcttgaaaggataatctggagggaaatggatagtaactaaaaacacaccgg

SEQ ID NO: 1838 - DNA, 330 bp, Gossypium hirsutum
  Clone ID: LIB3825-006-Q1-N6-E10
gacagtgcacaacaataacataaatttttataaaaggaaacttgaataataattgtttatagaatagtttgttttctggttgtgcctcgcaaataaaacttactcctcttccagtatattcaaccaagttatctggactcaaaacaaaagtttcagatattgtatgtttccgatacggttatactcttctcttccctaaagttttcatatattcgatgggtggtaccctatactgatgtacggatatgtgttggatgtaagggtagcgaatctgttccagacaccaagtcacgtgaagaagaggcattcgctagtctattcaggaatgag

SEQ ID NO: 1839 - DNA, 510 bp, Gossypium hirsutum
  Clone ID: LIB3825-006-Q1-N6-E11
catgataacaactgggctcatatctcatatggtaattgttgttaatagtacatgaaccatataaaagtttagcatttcattgtcatttaaccacagcattgaaaaagagcaacagatgaccaaaaaaaaaaaggtgcacgttgaaacataactatagtcacgtttccaagcttacaaattccatcagaaatggagcccatcatcatcactactcaccaccaagcaacccaagaaacctacaaacaccattaatgtttatcacatatcaaattttacacacacacaaaaaaaccctctcccaaaggcttttggctttacctacatcaaacgttaaaaatctgtcattgttaaacctttctttttttcttttcttctaaatttcttgaaattgtattgaaaattcaaattttgggttacttccacaaaaaacactctttggggagaaaccaataaagccggaaaaaagattgctgctgctgccactactgctagtattactgttatcaagtt

SEQ ID NO: 1840 - DNA, 444 bp, Gossypium hirsutum
  Clone ID: LIB3825-006-Q1-N6-E2
ggccccagggaaaaagggattaaaaaaaaggaatgggggggggccaaaaaaaccggggggcccaaaaaaaaaacccaaaaaaaccggcccctttggttccccaatccacccccaatttttaaggggcccgggggccccaaaaccccaaaaatttttaaaaaaagaaaccccctccagcttttggggcccgttaaaaaaaaaaaaaaaagccccttttccaaaggaaacccccttccccggggggggggccccccccccccccaaaaaaaaaacggccccccaaaaaaaggaaaaaaaaggggaaaaagggggttaaaaaggggaaacaaaaaaaaggaaaaggggggggttttttccccgtttttttcccccccggggaaaaaaaccccccccaatgtcctcaaaaaaaggccaaaaaaaggggaaaaggggggttttttttcc

SEQ ID NO: 1841 - DNA, 507 bp, Gossypium hirsutum
  Clone ID: LIB3825-006-Q1-N6-E3
gacataaaacttgcttaatccataaaaaaggaacaaaaatagacaactaaaaatctaaaaagacttgcgttccccttcctagcttaattcctatagcaagccatgtttaatgccgttggagggtctgaaagtgaaccattaacaatacgttcaaatatgtacttattagcagcttcagtgaaatgaaccccgtcccagtttacgtaagtccaaggatctttgcaaggagctcccaccaacacttttttcccatgtttgttaacctttgctccacaccccaagttcttgttataattggacttcccaccatggccacagcatgttctaaaagggtgcttgaacccatgcttgctaccttggctaattagggagtatttcactgagtaaacatcaacgtaagtgattgcagcatggggcaaatttttgcgtaactgttccacaatctttttcaatccacggttgaaaaactgagcaacttcattgaatggagaggcgcatccatagtca

SEQ ID NO: 1842 - DNA, 544 bp, Gossypium hirsutum
  Clone ID: LIB3825-006-Q1-N6-E4
gaaaaaaaatttgaacataactaaataagatatatccgtactcaacatcaacatccaactccgagtaacatacccaaaaatcgaaagaaaaaaaaaaccgaataacctaaatagaaaattctgctgccgaaggagggttctaatctcattacattttttttcaataaacaaaacaacttaaattcactcaaaaaatgtaatgaaatgatttattagtaactttgaaagggttacttttatacctgaagagcagctgcaatggaaccagaaaggctaagaatttcaaatggacgtttgcactttacctctttcactgtgtgagggcatgaatcagtgatccagaaataggttagccctttctcaagttgccctccattatcatgttcaaagcgttgccacgagcttttagggaaaattccatgcgtcacatatgcacttatttttgttgctccactggctgctaatactttctggcattcaatcagagtgccacctgattgaaccaaatcatcaacaatcaccacatgccgccctgtagcatctc

SEQ ID NO: 1843 - DNA, 446 bp, Gossypium hirsutum
  Clone ID: LIB3825-006-Q1-N6-E5
gggcgggggggtggaccggggaaatgggggacggggaccgggggggggaccggggttccggaggggggggggggagggggggggggggggggagggggagggggggggggggggggaaagggggaccgggggacaatcccaaaaaaaaaaaaagccgaaagcaaaaaggggaaaggggggggggcaaaaggaggaaaaaaagaaaaagaaagggggggggggcaaagggaaaaaaggaaaggggaaaaaggggaggggaagggggaaaaaagaaagggaaaagggggggggaaaggggggagggggaaggggccccagggggggaaggggaggaaacagggagaagggaaaaaggagaaggcccctcaccggcggggcgagagaaagttgaagaagggggcccaggcgggttggccccaaaaggaaaaagacctaaaggggggggg

SEQ ID NO: 1844 - DNA, 565 bp, Gossypium hirsutum
  Clone ID: LIB3825-006-Q1-N6-E6
tcgcgatctagaccagtctcctctgtgacaatattctaggtcttgcttatccttgtctagtggcggcgccaagacttagggtatccaggctattcagctatctatctgccttcaccggcaatccttcgccacctcgttcattttcgtcactccccaagtccgcgacgatgccgggtgttgacccgccggcggtagagtggcctgcgaagaaggtgcgagacaccttcatcaagttcttcgaaggcaaaaatcacgtttattggaattctagtcccgttgttcctcacaacgatcctactctcttgttcgctaatgccggtatgaaccagtataaaccaatctttttggggactgtggatccgaacactgctatgagcaagctcaccagggcgtgcaacactcaaaaatgcattcgagctggcgggaagcataacgatctcgatgatgtaggaaaagacacttatcaccataccttctttgagatgttgggaaattggtcttttggggattatttcaagaaggaagcaattgagtgggcttgggaactcctcactaaggtttatgg

SEQ ID NO: 1845 - DNA, 545 bp, Gossypium hirsutum
  Clone ID: LIB3825-006-Q1-N6-E9
acctcaaataaacagccccatatggatcaactgatatgatgtttgaacactgatccttaaaacaataaatccttccaaaatccatgagacgacagcaaagccttcaagtttgtatttaacgttctcacaatggaattattgaaccgagtgtgaaataaaggtaaccattttactttgggtgggattcaagatccatctcctgaaggttcagcaacagatcctttgagttcaagaagactttgttggctgaatttgcaatggtctgtgcaatctctctagaggcttcaattttcctcaatgtaatgaatgctgggttctttgcaattgcttgaccaatgagttgggcactcttggcttctccctgtgctcggatgacagcacttttcttgtcctgttcagctttttccacaataaatttagctctctcagcttcttgtgcagccacctgtttcgcctcaattgcagcagtgaattccttcccaaaagtcagaattgtgatggacacatcatcaagttgaatgttgaagtaagctgccctttcagtc

SEQ ID NO: 1846 - DNA, 344 bp, Gossypium hirsutum
  Clone ID: LIB3825-006-Q1-N6-F1
tttttttttttttttttttttttttttttttttttttttttttttttttttttttttttttttttttttttttttttttttttttaaaaaaccccccttttttaaaaatcaggaaacgggtctcaacaatttaaaaatttaaaaaccctccccgggggggttaaccccggttcaaaagaacgaaatagggaagggaaaccaaaaactaaaacagaccccccaggtttcacgggctactgggatctttgcctaatttttgggggcttttttttaaaatttttaaaacccttttttttccactggggtttcaggggggggggaagacaaaaagcttacgggcgccc

SEQ ID NO: 1847 - DNA, 514 bp, Gossypium hirsutum
  Clone ID: LIB3825-006-Q1-N6-F10
catattatcagatcaacccttacataaaaaaacaaaggggattcaaacaggtaagtcatgtaccatagtatttgattctctaataacccaaagggtgcaaaaaaagaagaagggaaaattaaaaaaagtcaaaattttattggttcatcttctattactgaagccaaaccagtcacgagcttaaccccaattagtgaattcttgggttttatctcaggtagcttccatgcttctttctcctcttccttcccttcttcagagctatcagagaaagcaaatatggattcccccaactcagaatcttcaactgagtttttcatttcgggattcaattcaggttgggttttctctttagctttggtttctaattcaacttctttgggtgtttcaattgtggatgtggatgtaacagtgggcgaaggataaggcgtggttcggttatgaggagagagccatttggacttgacatactcagcttttcgccatggaggaacgtgcattcccttcttcttta

SEQ ID NO: 1848 - DNA, 538 bp, Gossypium hirsutum
  Clone ID: LIB3825-006-Q1-N6-F12
gaatagaaaaaacaataagaatataatatatgtatcctatttgtagaaggcaagaaatcggccttccagtatttaatctcaacactcgtaaagcatttacacataaactatagtatggaaaggatacctttccttcgacattagctaactggctccaataatcacctggtctagccttgcctttaatcaatcactcctatgtatttctgagtaaaaaatggtacaacaatggcactagcaaacagtattatcagtgagggcctacacccttcctgctatccccaacaaacaagacactggttcgacattcttcaacttgatggttggcatccgtataggatatacacatttggaaacataaataatatcaatggttttacatttaagatgtttcccataccttgtaatccctcccttcaagggccaaggaccatctttgggaaccactaggaggctcgtaataacctggtccgatcttcatcgcaaccttttcatcaataattgcagcatacacatccctctctgccttgacgatttt

SEQ ID NO: 1849 - DNA, 528 bp, Gossypium hirsutum
  Clone ID: LIB3825-006-Q1-N6-F2
agattagaactcaaaattcatatctaggcaaacgatataaacatccccttgggaaaggagtacaatacatggtattttccctgtctttcacattgctcttagtcttcttgccctaaaaccagaaagaccctatttacaatttagcattttccaaaaacttatgtctatagtcactcacttagaaaagctggctcattatcattattagtatttccacttctatataatatacataatagtagagagaggtatgtatggcgtaacactgatactaacactagcagggtaaatataaaaggatataaaccactatcttttacggcatttctttggcttaatattctatgattaatcctcccatcggtgctctgtggggaatcccttttcttcgtttggcagttcgagttggaggtggtgttgatggtctaaagctctgcactttgttgttaatcttctcatggcaactgctactgtatgaatcctcagagtctaatgctgccatgttcatacctagctgccttttcttct

SEQ ID NO: 1850 - DNA, 490 bp, Gossypium hirsutum
  Clone ID: LIB3825-006-Q1-N6-F3
aataaaaaggggttgatttcatatttatttcagcctctaaaaagtagagaaatgttcaaaaaatgcagagtcttacgttatatatcaacagcatcaactggaagggaagttgttctatgaaaagaattgtggaagcagtggtccagtaaaaaaattttgagcagtgaccatctccttaactcttggagattctgccggtttgcgatactggccacctcggttagctgaattggggcacctcttattcttattgtcatggaaatcggagttaaaatgcttgttaggggcaaaagtcgataatggcggaatgtcattgtttctgttcttgtctttgttactgcagtttgaaaagtctgatacaattcctaattgttgttgatctctaagttctcttaattccatctggtactgggctttaagccatctcagttcctgttggacttcattctcgtaattgtcggagagatcacagtataatgaatgaacttcg

SEQ ID NO: 1851 - DNA, 540 bp, Gossypium hirsutum
  Clone ID: LIB3825-006-Q1-N6-F5
gcgaaactaaagattttgtcagttaagcaacaaattaacactgtttattttaacatcaatgatccaaaaacattttagaccaaatataggcaacggctataggttaaatgtgatctaacagcattttttacagtaaaatgtgaactgatcgaagaagatgcaaataattttactttcttactaccatgatgtgtaagaagttggaattatgatgtatggcatggcatgcatgttttgactaggatgcaaaggggaaatttcgtgtcagaaccattttttccaccaaccagcttgtttgcatcgtaatagaggttacaatcagcatcaaccttaaaaggaactccaacaaaacgcaacctattcaattactctagctaaacccctgctgcagtttttgcctcatgacccatgtttccctgagactcagagctctgtcgtattttcctagtaggagaccgcattgtgacaactcctcagctgatgttggatgaatacccacagtggcatcaaagtctgctttagtcaagccagctttgacag

SEQ ID NO: 1852 - DNA, 534 bp, Gossypium hirsutum
  Clone ID: LIB3825-006-Q1-N6-F6
agctcatgcattaaatccctttgctgttcactttttcatacaagtctatgttcctaaagctagtatgacccatatctgaatacgtgtgcattaagaaaaatgaagaatcgaaacaacataaataccaacaataatgtattttaatgacttctaggggcccaaggagaatgcagtgtaatatgaacaccatcccagcaacttcaatagcaccaggaggattagaccccaccacccaagctgagttgaacccatatcaatcaaccccaactagctttctttcgaaatcagctagcatggagaattctgtatctgatcaaaagaatggtggactagtgttgataaataaggctccaaggtggcatgagcaactccagtgttggtgcttgaacttccatggacgagtcacaattgcttcagtgaaaaactttcagttggtggcttcaccagagaacgaaccggcaggaccagaacatgagaagatcatcctccagtttgggaaagtgggtaaggatttatttaccatggattatcggt

SEQ ID NO: 1853 - DNA, 361 bp, Gossypium hirsutum
  Clone ID: LIB3825-006-Q1-N6-F7
cccaaaatcatactgttctgtttatttagaagaatgcaacaaagaacgtacttgtattacaaaaagacaacacaaacagaagttaaaataatgaaaagcaacgcaaatattccacccctatattaagggtatgtgcagtgtgagatcacattttggttttgctggagcgatcacgaatagcgccttcctccccaacacgcccaacatcattgaatgtttcatcagatgatctcacggtagcatcaacggctcctgccggggattcttcaaccttaatcactatcgtctctgaaagcccttcacgaccttggcgtttcacatcatcatcgtaagtcttccttctaccttcatcacctctcag

SEQ ID NO: 1854 - DNA, 516 bp, Gossypium hirsutum
  Clone ID: LIB3825-006-Q1-N6-F8
aaaaacaagcatttgattaagatcaattgaaactcctagtacaaattccttgattcgcatatgagaaatcaagcattaagttttacacaaaggacgggggagcaagcaagcaggttagctttgttgagctaaaaatatagagactagtttgtttgtttgtttgtttgtttttttttttactgcttcttcaagaggggggctttgagctccgccacgtcgatctcgttggcacagttctcgggtctgtagcatccggtaaccgggtcgggaacccatgaaaccttttttttagctccaccagacattttttcccctgtttttttgactacagcagcagggctccttcctgctcctccttttattccactcgacacaattccttgggacgccgccgcatatcctcgtctggagataacgttagagattccatcgacaacgaaagtagagaaaagcttagcgtttgcgaaagagagagccatttctggtttctcctttttctttaaatggaaattttgg

SEQ ID NO: 1855 - DNA, 321 bp, Gossypium hirsutum
  Clone ID: LIB3825-006-Q1-N6-G1
aaaggggggcccaaaaggggattaagggggcccggcatttccataggaaaaaaaacagggggaaaaaacatttacttaggcgaagggaaacgcccggccgttaatggcccggaaagggtaaaaggccccacatgggatggccaggaaaaagggcccaggaacaaacccccaggggggggctaaattcccaaacctggaccaaaaagggaaaacttcaccctttgggttttaaaaaaaacaaacgaaattaggggggggtttgcaaaaacggaccaaaaatttttccaaaaaaaacgggaagcctgggcccacgcgtccggg

SEQ ID NO: 1856 - DNA, 535 bp, Gossypium hirsutum
  Clone ID: LIB3825-006-Q1-N6-G11
aaaaataaatcttccagcaaatcttttcaattcttttcaatcaagtctttccaaccaaacagatctttccatcatatttacatatatctacctgactatacttactgtgtttaaagataacctcttaaattttgttgaggcaacaagttgaacattttatttttaaatataaatatactctttaaacatttaacacttgaaaacctcgaatttgaagacatttagataatctgtgcaattaaaataactactaccattactattattttgaatttaatgtgcatgcaaatattacttgcaatgttgaagacaccacttccatccgtttaccttaaaaactatttatgcataagcttgatatacaaactgctgctatgcatttacaatcctgtaagtatgcaggatagagatgcgactggcagaaagaaacaaacatatatgactagctttggaaagattcaaatgtaatggtagtaaatgcaatcaagcactatagccttgatttgaaggatgccattgaatcggaccatggccg

SEQ ID NO: 1857 - DNA, 429 bp, Gossypium hirsutum
  Clone ID: LIB3825-006-Q1-N6-G12
accccgagggggggcgggctgaatcccacgatcggggggacgacgtttccacgggcgtataaaaggcccgggtttgggccgccgccacaacccgggtgggtccaccccccgagccgatcgggggaccggttttcgccgttccaaatccgaccggggcgcattgccggcccccatccgtttccctcccgacaatttaaagcactttttgacttttttttaaaaggccttttaatttttccctcggggaacttgttcgctatcggtctttcgcccgtatttagccttggacggaatttaccgcccgattaggggtggattcccaaacaacccgacttgtaaacagggccttttggggcaacagggtccgggcacaacggggttttaaccctttccggggcccctttccaggggacttgggcccggcccgtc

SEQ ID NO: 1858 - DNA, 514 bp, Gossypium hirsutum
  Clone ID: LIB3825-006-Q1-N6-G2
aagaacttcaattccatttaaggtaactctagatataagaagttcaaatctatttaaggtataggaacttcgattctacaaagtaacgaacagaaaacaaaaacaaagaaatcagattcccaggtagaactgaacggtaaaggtaaaatatatacaacaatgagcaattattggcttttggttataagaaagaaagcaaaaagacgcttaaaaaagagtaattttgcctggcgtacggagaagaaccgacatttctaatcaaggaattccaattcctcctctttaagatggacgaagaacttgacaggtcctcggccttcaatttccttaagaaactccaccttgtaaggaagattagctgaaatcggtttccctttccagattccgacgtactgcttaatcactccttccataccaatcagatccaactccggctcgcgaacgacgtgatacactttgagcggtaccttcaccttaaccttggcccctactttagcttcctcgtcggcttcgg

SEQ ID NO: 1859 - DNA, 514 bp, Gossypium hirsutum
  Clone ID: LIB3825-006-Q1-N6-G3
attgaaatgaaaaagcatttctcgggaaacactaaattgttaatagtacagaaaatccagtttaaggtactggtgtgaataaaagcgtgaattattccttgaaaattagtatttaattttctttataaaactcttattatggaacagatcctaaaccttccattcccaagcaacagctactgcaagtactctcaaagcttccaaccgaaaaccttaggcattcttcttcacctcagctgattttatgatatcaatgaactccggcttaagtgaagctccaccaaccaagaaaccatcaacatcaggctgagctgctagttccttgcagtttgcagcagtgacggaccctccataaataatccgggttgattcagcaacttcgggactaacattagcctgaagccatttcctcaactcaaaatgtacttcctgagcttgagctggagtagcaaccttcccggttccaatagcccacacaggctcatatgccaaaacgacattagtccagtctgat

SEQ ID NO: 1860 - DNA, 525 bp, Gossypium hirsutum
  Clone ID: LIB3825-006-Q1-N6-G5
gcaccaattaaaggatttttttattatgagaatctgatgactgtttacaaattacaaataaatgcttgggtgggaatggccatggctatagcagtgacggctgctggtcgttctaatagcagtgaccagtgtctacaccacaacaaaccttaatattcacaaaattccccgaaggctttttgcccataacaatgattgctagatacccactagacctcaaagggtaataaatacatgcactgatctactgggccaaaaagaaagaaaccgtgaaaaagggagatgtgacctatgtacaaatgccactatatctgtctccacttccctatactctaagtggttatatacatgatgccctaaaaaccaaaaagtagaaaccccaaaaaatgtccaatactttccgtgtatttctaacctgcaaatagcagcaacctctttccacattgcaatgccaatatgatattaccagcttcatctgtacactgctgttacttgggcaaacaaactcaatcatggcaggaccca

SEQ ID NO: 1861 - DNA, 511 bp, Gossypium hirsutum
  unsure (1)..(511): unsure at all n locations; Clone ID: LIB3825-006-Q1-N6-G6
actcgaacacaattgatatatgtaagttacaagaaatttacattgtgcacatgcagaacaaanattggtctggtgctgactgctgagaggattagtttctgaagaaccaagtcttatctaacaagaacaattcattttaaagcatcctatctgaactactgtcgagaaataggtgccgttggcaaggatgacggctggttatgaaaaccttcagagctttggaaactctggtaagaattagttgatgatgtggcaaataaggagatgccactcattgcagctccagctatggaataaccaggcaaggaaggctgctgtgatgtcatgctatagctatatgtcaccccatttattgatccagcagttggcatgtactggggcacagcatacggtggcataggcggcagtggtggcagaggtggaggagacgatgatggaggaggtggcacctcatttagagccaactgctgggtggtggtcacaacattatgttggtgtgattcaggatgcg

SEQ ID NO: 1862 - DNA, 527 bp, Gossypium hirsutum
  Clone ID: LIB3825-006-Q1-N6-G7
gaaggaaactttaagttcttgcataacagaagatactatccaaaatttaggttctggacatatagcaatagcaccccataataaaaccatagataatctaaaccaaaagaattcaaaagtaaaagccctttaacataagggaatgcaaaatatcctctagaagacaagctcatgcggtttcatgccagacttgagagaaaaccttgcggcgaggtaggccttcaagtctgggactccctcaatggactttatcaaagaggcgtcgactgctttctggtcttctttcttgtcttcaggcagttttttcttatcctctttttcagcctcgaaaaactctccctcagtcttcttcttcctcttctctacttccttggcaaagtacttgtcatcaaacttgtctacgttaacccctgagatgtcaaccttggtggaagtagcaatgacataggattggttaacacgccttaaaggaacaccgttgatcttgaatggtccggtgaccaaaaggagcccagaagtaagttgct

SEQ ID NO: 1863 - DNA, 505 bp, Gossypium hirsutum
  Clone ID: LIB3825-006-Q1-N6-G8
aacccatgaacacttctgcactggcttagcctagaaactacaatttacaacaacaaaatttattattatgaaaaaattctgtaacaactgaaccttaaactcctccaagcaggggatttccccttaccttgaaggaacaaggattacaacaataagcaaaacctttggcacaatgcataatggattggtacaagtccacagccttttctctctcttatgtcacttgtttcttgggattactctttgagggaaatcaactagtgcccgccttgaccttattacgttctcatcattactctccgggagagaatcaattgctgcagcagcaagattagcatgcttcatggctagctcttttgtcctctccataccatgactcttcccaaggtattcaagggcaatctcaatgttttcggggttgtcaaaaccttgataaacaatagcatgtaattggggaaactcttccatggcaaacaagattggagctgttacaattccctgctgg

SEQ ID NO: 1864 - DNA, 513 bp, Gossypium hirsutum
  Clone ID: LIB3825-006-Q1-N6-G9
attataagctgctcttaatagcaaaatatgtaaaaggttattttacagcttttgccatacaatttctaagcattgactagttctaatgctaaaaggggaagggaagaaaaagaagttttcaaaatgctgtcctacccataaatctgtcacatttaacattagcctattccatagttgcctacatagatacatgtaaaattctcctgctatggcttatttagagattaaacaaataacagacacaccttgtgcttgcaaatatgcatatcttattcaggctaaaattgaaaaccctgtaacccaatatccgcacaagtagtcttctgtccatatatttggcagctaaactgtatattacctatgactatgagcggttgaatgcggcattgggtatgttgcaggacccatgttcatcggtgcaccaggaactgtgactccataacccatatgtgctgaggcaggaagattcactggccttccaactgcagagacaaggggacctcctattggttg

SEQ ID NO: 1865 - DNA, 551 bp, Gossypium hirsutum
  Clone ID: LIB3825-006-Q1-N6-H1
ggaaaaaatttgaacttatttatatttatattataacgaaagcattcatcattctaacaaaaacaagtttagattcgcccattacataacattactagactaaagacctacaagacttgcataagaccaaactgaaaacctaattggttgtttttaaaagcatagaaaaactatgttccataactcagaaactaagcccccataacccaccctcattcattacatacattacccaaaaaagaccatttgatgctcattgaggtcaatattgtgttcttccatcaccctctgtgatcacatctttgaaagcccctccactggggatcataggcaggacatgttcttgatgtgggacaatcacatccaacaagtaaggtccaggagtgtccaacattttctgcattgctgcttttagatcttctttctttgtcacccgggcagctggtatcccgcatgcttcagcaaatttcaacatatttgggaatatttccgactcgttggatgggtctcccaagtatgtatgagccctgtttgccttgtaaaaccggtcc

SEQ ID NO: 1866 - DNA, 548 bp, Gossypium hirsutum
  Clone ID: LIB3825-006-Q1-N6-H10
aacccagaaaaaacagcacttatcatttaagagtactcgacaataactaacaacaacataacaaaagcaaaagcaccaaacaaaatgtaaaacaagctaacagatgcttcaaaagtaagataaatctactgatcttataaaaacatgttaggcttaatcaacttcctccatcttgctgccttcggcatcagcatcctccaatgggggcatatcagcatcaccttcaccttcacctgcatcctcatcaatgctcaagccgagtttcagcatcctgtggattctgttgccaaaggtgttaggctcatcaaggctgaagccagaggtgaggagagcagtctcgaagagaaggagaacaaggtccttcacagatttatcattcttctctgcatcggctctctttctcagctcttccatgatggggttctccgggttgatctccattgtcttcttgcttgacatgtaaccagccatgctgttatccctcaaagcctgggccttcatgattctctccatgtttgcagtccaaccatactcgccagtcactaaac

SEQ ID NO: 1867 - DNA, 539 bp, Gossypium hirsutum
  unsure (1)..(539): unsure at all n locations; Clone ID: LIB3825-006-Q1-N6-H11
aaaagaacataggtctacgacattcttcctcccaaataatcttttacattatgcntgaaactccagtggaatcctagaagagcatgttaaagaaaaaacagcagtgaaaggaaaggaaagagcccatcggggggacccatactagcaatgtagttgatacccgggtggctgatggtttagttaaggggcagggcagggaagggatcatcgattatcctcttccctttttgaatgaagcaattggctttccctagcagcacaattttcattgcgtcaaacttcagtcttcagtgcagcgcagcataaatttgcaaaagggcgagcatatagcatgctggtagacatatacatgtaaaatgctatttggctgataatctgatcagctatatctccatgtagccactcttcattcatctcgaatatgtttgacaaagggtcctacgaaactagcttcggggattttagaatggtgcttcaagggactcatcccatacatcagcacttccatttgaggcatcttcaacatcttcttccattga

SEQ ID NO: 1868 - DNA, 462 bp, Gossypium hirsutum
  Clone ID: LIB3825-006-Q1-N6-H12
cactagaaataataatattatccaaatacataattagtagtacaccacatagtaacaacattgtccaagcgcataatattacaccacataaaagtatcaatatcttcaactttgagaaaatttttgaagccaaatttttttatgcttcttacttttaactaaaaaagctttggcctcggattcatgactcactagataatcaaacacagaacacaagaagtcatcatcaaatccttcttcctccatcgacatcacttgttcgtaaagttgtgatgtcttatcggcagtaaatttttccaaagcattagcaattttgccaagttgttcacccacaaatttaatttgttcatcaacgaaactttcttgaacactttttcttttacgtttggatgtgccagatgaagatacatttgttcttacctcttcagcctcttcactgtcgcagtttacaagcattgaatc

SEQ ID NO: 1869 - DNA, 544 bp, Gossypium hirsutum
  unsure (1)..(544): unsure at all n locations; Clone ID: LIB3825-006-Q1-N6-H2
gggtaaaaggccaataatgccacttataaaattaaaaatttgcacgcatcgggttattaaatgattattccattcattctaagattaatataaacattacatatcattgtaaataaatatcactagaattttgaacacaacataaatgaatttagttctagatattttttaatgatatactcaaatggagtgctttaaatatgaaatcgtcatttgaaaatgaggaaaattagtgaaatctatacataacaatangtataacgtgacttattcaagagaaattaatcagatgacaaaacattgaattaacaaaaacaatctaatcaaaagtctcctttgcatggtctcacgtctgagtctcaatacaccctggtgaagcccaaagttggtgaacattcagccacttttgggaaaaattgatccctttcaagcgaaactttaaaacatgccatgaccttacccacccaaccccaatcaatacgggcataacaaaacgcatagagctaaaacagctaaagctcttacaacatacttagggtaccaa

SEQ ID NO: 1870 - DNA, 542 bp, Gossypium hirsutum
  Clone ID: LIB3825-006-Q1-N6-H3
gaataaatgtttatttatttaacagtccatataaagtccttacaagagcccaaacacaagcccaaatagttcatacccgttacagcaaacctaaaactacccagcagacccatttacacccttgacccaaacagaataccaataaaccaaaacggcccaaaagcccaagtgactttagggaaacaggaaaccctagggtttcctgaagactacagcgccgcagcagcttctggaagcctcgaggagcatctgttcaactccccaaatcgaggccatcaatgcacactgacgcaccatcaatgcgttgtctagtagcttgtccctctcacgaccgtccagcaccgtgatctcaggcctcatctccgaccttggtacctccgttgacgccgagatctccgcaaaagagactctttcatggtcatatgggtatctgcagagattcgaatccatgacagcaagcccagccaccgaaatcttcgcgagtcacctgcaagaaaaggaaacaagcagcagatacacaaaaaaggcagagcaagaaaagg

SEQ ID NO: 1871 - DNA, 505 bp, Gossypium hirsutum
  Clone ID: LIB3825-006-Q1-N6-H4
cttaaaattgctggaagaacttgttttttcatgttagacacatttgaacatgaacaaaaacatagggcttagctttcaaaaagaaattaaacttattggggtcggacagatttcaatatccaacacttgaacccatgtaacataggctatatataactccattttatcaatcatgatccagtcaaaacgggtccatgccaaaattttttatttcctgaaaatgccgtttctcagttgacaacttcactggatttcccgaaatgtaccatcttacaaaggacctggaaaagtaccgttctccctttgctcgttccatcgatctatccattctcccggacatagggcacgatagtacttggcaaacttgtcacactctgaagcattttttccttttgcagctacacaacgatggtactcgatatatcgggtgaagcaatgccttgtttggtttgtagttgggaagcgaaaatctgcaggagcagtctcaagctttatctccggggtt

SEQ ID NO: 1872 - DNA, 541 bp, Gossypium hirsutum
  unsure (1)..(541): unsure at all n locations; Clone ID: LIB3825-006-Q1-N6-H5
aaggtaaagnacatatttattttttaccaaagggtaacatattgtttactcaaatattaagttgcaaaatcatatccttttaacatcaaaaccatgggagaaattctctactacagtttttcgacaaaactaaaatgatcagcaaaaactcctagaagcataaaaaaacaagacaaattcatggactattgttcttcgttcaagctccaacaacctctgcaggagcctcagccattgtctcatcagcaggcctctctagtttcacaccaacatcctctgagtagtcaccatgaacctccatcaacttcccgagatcaaacttgggagccttcaagattttgaccttacgaataaacacattctgcaaaggatagatgctagatgttgccttctcgatttcttttccaatcacctcggggatgaacttttgaaccagttccttcaaatcacaagatgttgcctgggaagtcattatttccctcatctttcggcgtatctgtctaatctggctggactgagcataacaagtccttttaacctg

SEQ ID NO: 1873 - DNA, 385 bp, Gossypium hirsutum
  Clone ID: LIB3825-006-Q1-N6-H6
gacaaagcctaaactttaacctcattaaaacattaaaatggccaatacatagcaggatataaaattagagccaacatgcagggtgccaaaacataaaacaaaataaacaaagcctcactacactaaagcggggaccaattttggattagtgcaaaattccatcccaaaatccttatacatacttcttctgcttcttccttacaatcatatatttaatctcctgaaagctggtgcaaaaccctttcttgatccatctaacttcacattttagcaggtaggggaagtgctgaccttggaagggatgttgacactacattaggctgggagggtctcagccaagttgcctttaattttgacagacatagcggcaggttgcctaaatcgc

SEQ ID NO: 1874 - DNA, 533 bp, Gossypium hirsutum
  Clone ID: LIB3825-006-Q1-N6-H7
tttttttttttttttttttttttttttttttttttttttttttttttttttttttttttttttttttttttttttttttttttttttttttttttttaacaaaagaagagggcccccaagggggtcttttaaaccccttcttgggaaaaaccccccaaaaaacaaaaggggggaatcctggaagacaaaattgggaaaatccccaaaatctttgggaacacctaagggggccttttcctttttaaacaaagaaggggttgggccaaaaaccccaggtttttggggctgggccaaaaggatcttgaattgggggaaggcatgggggggggcccttttttttggaacaaaaaggtttttcccccaggggctattccccccctgggtttaaaaaaaagctttttccatgggttaaaaaaggggcttttttttggggacccgggggggggcaattttgaaaacagccaatgggagccccttaaaggtcattgggccccccaccaaatgggggggaaaaaaaaagagcctggttgggg

SEQ ID NO: 1875 - DNA, 540 bp, Gossypium hirsutum
  Clone ID: LIB3825-006-Q1-N6-H8
tcgcgaattttttttttttttttttttttttttttttttttttttttttttttttttatttttttttatttatttatttgtttattttttgtttttatttttgtttttgtttatagaaaagagggtgggggaaagcagtggcgaaaggggggggggggggggaagggggggggggaagggggggggggagaaggggggaaaaagggggggggggggggaaaaaggggcaaaccgggagaagaaaaagagggaaacaaaaaaaacaaaggggggagagcggggggaaagcaaaaaaaaaaaaaaagcggggggggggggggaaaaaaggaaaaagcaaaagggccaaaaaagggggaaaaagaaacgaaaaggggggaggaaaaaaaaagggggaaaaaaaaggaaaagaggggacgggggggaaaaggggggccgggaaaaagagaaaaaaaggggggggggggggggaaaaagagaaaaaaaaaggggcgcccggaggggggcccaaggcaaaaaaaagaggggaggggggaatggcag

SEQ ID NO: 1876 - DNA, 543 bp, Gossypium hirsutum
  Clone ID: LIB3825-006-Q1-N6-H9
atcgctaatatagaagcaagctcctctttttcaaagtcttacatctttatatacatataagaagaagggaaaggatatgtaacattgaaagaaatttttgaactaatttaatgtctaaataaaacaaatagaactgcacgagacgtacagaggatagaaaaccaggatttgttttgcgaagaaaatcttcaaaaggcttatccgttaaataacatatcagtgaacaattttagctaaccctattcaaattggtccacgaaagaaggcttgttgatcatattgtccgaccaaaaatgagggctcgtggatcaaatcctcaacagctgaaagtgggttcgaaagctctgtaccgtctactgcaacagctgaaagtgggttcgaaagctccgtaccgtctactgcaacagctgaaaatgggttcgaaagctccgtaccgtctactacgttacagtacaaactttcatcattagagttggcaacaccatcgttaggaggaaattcattgtcattagagatagcaacaccattactaataggaggaaa

SEQ ID NO: 1877 - DNA, 434 bp, Gossypium hirsutum
  Clone ID: LIB3825-007-Q1-N6-A10
ctaacaacgggtcaatagatcccacacatacatatttatatttgtttattggggggtcaagttttatgcaaatggaaaaatgcgaaaaagaaggggcaaaatttaaaggtgggagactggcaaaccagacagactttaaaaaaaaaaaaaccaacatttcaacctcgatgtaacggggaaaatcacctacatcgggttacatgggaacctattttaacactggtagtatggggcatgcatttagctctgcctactttggctgccgccggccatgctcgatgttggagccttaaaaaaggacattgggggggagttcccctaatattaacggattcaaaccctttgggttatccctgtttgggcccctcttcctgatctgaatttgaagcatgcagatcccacccagaaaacccagggcctgggagggattcaaa

SEQ ID NO: 1878 - DNA, 483 bp, Gossypium hirsutum
  Clone ID: LIB3825-007-Q1-N6-A12
aatattacggcaccggcccttgcatgctgtccagcttatctcataattagtcgttggagacacgtcgtctgcatgggcatacaatgctcctgcgttgaaatgatattccctcaccacattccacatcatactagccatgggcacattaaggaaactcggaccagcctattgagcgatggccctcacatacattgcgtttcgctcactgggcggtccaaacaacagaatacctgtgcgcggcttgaagaaaccacctttgcaaaggtctgggctaggaagaggaagcatcactaacccctgcagggattctttggtactcttgtaaacgcaccaacatctgaaaatgctacaccgacttctcctgacagagtgacctaaggccttaaccctttttcaaattcattggctagaagaatttccgaaacttttgaagccggagcaatatcatcaccctcgttctttgttgccggatgggactaccca

SEQ ID NO: 1879 - DNA, 536 bp, Gossypium hirsutum
  Clone ID: LIB3825-007-Q1-N6-A2
atgaactacttcaaactaccaaacctgcttcagcagaatttaatacacaatcttttgtaaacaaaagcttttacatttttggcttctttaaccatgtgtgatgtgatgaactgaaaaaaaaaagcggctaacagataaaaggcacgcaacttcagccaccatattttcttttcttgaagttcttgcctgatggcaaagaaacaacattataccgtgaattaccaagttctcgaggaataatagctccagaggattttaaaatatctacaaactccggaatcaatttcttatcctcatcgttcacaaaaacaattgcattaccctcctcccctaatcttgatgccctaccaatctgatgcacatactccttaatggaattgggcatatcaaacactatcacctgtctcacagctaaaagatcaattccgcgacccaaaatcccagtagacacaactactgatacttctccaactaaaaacatcctcattatttccctcctttccttcatggacttcgtcccatgtattgacaaagct

SEQ ID NO: 1880 - DNA, 338 bp, Gossypium hirsutum
  Clone ID: LIB3825-007-Q1-N6-A3
ataaaaacatagataacttatagaaagcatacactaatttaaatataagataagatctgaaatagaaacaaggacaacaggcagagagagtagccaaatataaatacaaccacacattatttagtgtctgtcagacattcataagatcctagtttcataaacaactccagacatcaagtacatttaaatgttgattcatgctgtctgcaccgaggtagatgaatggaaggcaattttctgctgcaattcatctttccttgcacccacaagcttgtcaattatggtgcctcctttcagaaacacaaaagttggcatcgcctcaatagcccacgactgag

SEQ ID NO: 1881 - DNA, 478 bp, Gossypium hirsutum
  Clone ID: LIB3825-007-Q1-N6-A4
gaacaaaaacagcattcatcatttgaacaaaaacaagtttagattcgcccattacataacattactaaagacatacaagacttgcataagaccaaactgaaaacctaattggttgcttttaaaagcatagaaaaactatgttccagaactcagaaactaagcccccataacccaccctcattcattacatacattaccccaaaaaaaaaaccatttgatgctcattgaggtcaatattgtgttcttccatcaccctctgtgatcacatctttgaaagcgcctccactggggatcataggcaggacatgttcttgatgtgggacaatcacatccaacaagtaaggtccaggagtgtccaacattttctgaattgctgctttgagatcttctttcttcgtcacccgggcggctggtatcccgcatgcttcagcaaatttcaacatatttgggaatatttccgactcgttggatgggtctc

SEQ ID NO: 1882 - DNA, 561 bp, Gossypium hirsutum
  Clone ID: LIB3825-007-Q1-N6-A5
aaaaagtactagattaaaaatgttgaagtaaagtataaggactaaatccataatttttgcaaagtataatggagctaagattgttttaagagataaaactatggtaggaaaaagcaggttctgaaagggatgaacccttaaaaggtatcatacagtgctgtacaagctctagtatttcttagtcgcatggtaaagctcgatatactcgagtgcaggccggttccaagaccagtcttgctccatcaccatcttgcacaatgagttgaaccaatcccgagcaccgtaccaagccgtgatcgccctattgagggcataatcaactccactaccatcggctccatcgaaattaaatccgttgggttcaagaccttgtgcttctgctctagctttatcgttatcaacatcaaatacagtgtcatatagtcctccagttttacgaacaactggtatggaaccgtatcgcattgctgtaagttgtgtcaatccacaaggctcgaaaattgatgggactagaatgaaatcagaaccagcatatatcaagtgagaaaagagctcatcata

SEQ ID NO: 1883 - DNA, 561 bp, Gossypium hirsutum
  Clone ID: LIB3825-007-Q1-N6-A6
agtataactttattttatttctctgaaaacgtttatttttatcctacgacatctatgatcatagaaaaatacagataccattatatgttcccaaaaagaaataaaaagaatacagatcattagccatgttcatcaaatggccaaaaaagaaaacgttgtggatgctatgagaaacaagtatagcccagacattggagacattcattattttctaaaacagtgaaatgttgttaacacaacagcttaggagataacaaataaaacacttccacaacaccagatgcctgagagtcacctattctccaagttttgggtacttcaattttattccataatggccacttgcacaggtaattccctgagcagagattaagcagaagcctccagcaactccctttctgcacgctctctaatccttctctccagctctggcctaaaatgccgtataagaccctgcacaggccaagctgctgcatcacccaaagcgcaaattgtgtgcccttcaatctgcttggtcacctcctgaagcatgtcaatctcttccaactttgcattcccaac

SEQ ID NO: 1884 - DNA, 534 bp, Gossypium hirsutum
  Clone ID: LIB3825-007-Q1-N6-A7
cgagagagaggcaattttatttaagagaaagtagctacagcacggtagaggaccccaattacgtattaccactagactagactagactagaaagccatgaaatctccctcaatacaataatgacttttaatatgatggcctaataaaataacctgaagctaaacttagacttgaatttctacgtgccatctgtacatctcctccgatggcactggcaatgtaagtgtcaccaatccggtggctgagtcatagttgaagtgagtgtcggcattgtccacacaacacttcaacggatgctgagatgagtatgcaccaaacctcccacaaccccggactttgagactgatcgctgctgttggattccggttgttgctgagtgaagttgtcaactccgaggaaacctcgccatcaaagaactgcagtttctcattggatgtcatttgtacttcgaacttctccacggcaccgctgctgttgaacatgtcaagaaggccgattggtgcaaatgaaatggttgtggaaattttcttgacg

SEQ ID NO: 1885 - DNA, 497 bp, Gossypium hirsutum
  Clone ID: LIB3825-007-Q1-N6-A8
ggacccaaatttctttttttatgaataaccatttcctccacattatgattctgatcttctacccccgggtttcctcaaaatccagcaagttaacacaaaaagaggggttgcttggcctcaatttcctcaaataggacattttaagggtttaaacacactactaaaacaccttatcaatttcacttaggaaagctgaggggccaaagaagctgaaattcaaccattaaatcattctacaaaaagtagccaaagagaagttttaaaccaaatttaaaggggggaaaaatcatttatccaagtcaaaactcaaccacgggaatactttttaaaactaattgcaaaaatataactaaagatctaggggtttggtgccctagtgtaaatctgctggcttgaatgcgcaaaaaccaacctaataaacccttttgccatcaactcccgtattgccttccttgcaagggatccgttaatcctcataccatcagagaggattgaag

SEQ ID NO: 1886 - DNA, 546 bp, Gossypium hirsutum
  Clone ID: LIB3825-007-Q1-N6-A9
agttagtcgcaaacttcttctctgttttttaaattttgaaatgaaaaaaattacattttgtgtcccaaactaagaaacagatatggcattggactgttagcatattatcccaatctgaatgaatttgatacagcaccaatagtactaatatatgctcttaggataatatgatagatacagataagtgacaaaacgttaaaaacgtagctctctagctgatttacataacgccccagtttgtatagtgtattctgctaatgcacctgactggcctccgccttcttttggaaaaaaagtgatccgaataaaacagcaatgccggttaccgcaatggtgaatataagtcgtttccgtgaatattcaggtggctgccttctcggagcaccttgttccctttcaggggccctcacattcctggaagattccacattgttttctgcaataccagtgcacctacttgcatggttatatctttctctcagtctaatgtatctgttacattgataacacatctctgtccggttcccacagacttcctgatgctca

SEQ ID NO: 1887 - DNA, 393 bp, Gossypium hirsutum
  Clone ID: LIB3825-007-Q1-N6-B1
caataattatattgggcttcaatttaatttgaaaacaaactgagctgaatccataaaggaggagtaaaactctctcagcattgtttttctatatctacaatattcaaattcaataataaggttttagctctaatattgaaagtctgaatgctgtttgagtttacccatttttcatgaatataatatattatttttatttaataatattatctatactattatggaaatttatcaaaattttttttgaacagaaatccgtttatagcaattgggcctgagcagcaaacaggagaagtccatcagcaacaaacaaaccaaagtaaataaaaaaacaaaacaaattggaaaaacaaacagcaaaaagggaaaattaaaaacagaaatcgacaaaca

SEQ ID NO: 1888 - DNA, 579 bp, Gossypium hirsutum
  Clone ID: LIB3825-007-Q1-N6-B10
tcgcgatctagcttagtccctaatcttcccctatctgttttggggattttgaatctgtagtctttgattggttcagttgcaaaacaatcatgggatctgtggatgaagagagatcgcttttggaagctgaacttgatcaggctgaaagcaatgggctttacactggggatggctccgttgacttcaatgggaatcctgttttgaagcagagtactggaaattggagagcatgccctttcattttgggtaatgaatgttgtgagagattggcttattatgggatagcagctaatcttgtaagttacctgaccaagaaactgcatgaaggaaatgtatcagctgcaagaaatgtaactacttggcaaggaacttgctaccttacacctctcattggagctgtcttagcagatgcatattggggaagatattggacaattgcggctttctccactatttacttcttcggaatgtgtacattgactctctcagcatcaattcctgcactgaaacctgctgaatgtgtgggttctatttgtccctcagctactccaactcagtatgctgtatttttctttgggc

SEQ ID NO: 1889 - DNA, 555 bp, Gossypium hirsutum
  Clone ID: LIB3825-007-Q1-N6-B11
cttcaaagttgaacaactcttacaattttacacatcatttaaacccctcaccaccaccgccctgaacattaaccaaaaaaagaaggaaaaaaaatggtcatatggcacaaaatgggatactcactaaaaaccctaataatttttggggaaggttagccggtgttatcaaaagccacctatcatcaacatccccaccacccaattttccaacagaatgagcccaaaattcgtttagctgacgccttcaacacctgccataaaaacgcatcggacacacttccggatgagcaaacagaatctgaatcactccaaaaccaagaataaatccttgaactaaaggacctgctatagctgctacgagctcaaacgtgtatccttttcaatcaacacggatgggaacacaagaacatagggattacgtgcccaagaactacaaactgctctccaacatcaccttagaggggtttcttgatgtccataggaacctaaatcgtcaccagggacgcctataccctatggccaacataggatacggagttgatcgccatcaatgct

SEQ ID NO: 1890 - DNA, 583 bp, Gossypium hirsutum
  unsure (1)..(583): unsure at all n locations; Clone ID: LIB3825-007-Q1-N6-B2
aaacaatctttcaaatcatctaataaatgaaaagctcttcatttgcttacaccacatattttgcttaatctaaacttttccttcttctcatatatgaaaagatcatcatttatacagttaaagactaatctcatcctttaaaaaaataaagagcaactgtctctggaaaatctcatcatcatcgacatttgcaaatacccaaaaaatcatacctttaaactgcaccttcccagctttctattcagagtcagattccatattacccatagcctttaaacctcttggtctcttctttgtgatcttcttctccctgacttcataacgttcgagggttaaatcgcaaagccatgtcccaggacttaccagattgagggtacgttgaataaattttgatcgcttttttggtctttgtggcagtttagatcctttaaaggtcatgaaatcttcttctttctctttatttgttaaagcaatcacgaatttaggtggccaaaccatgggtgcaggagctatctcaccgctcccagaagatgaccctcctttnttgctatcctgagctgtctccgaagatgccgccgattta

SEQ ID NO: 1891 - DNA, 537 bp, Gossypium hirsutum
  Clone ID: LIB3825-007-Q1-N6-B3
cataaaatctctactgttcatttttaaattaaccatgttttgaaggaaaaagaaaattcccacaaaggggaaacaaaaaaaaaatttttttttttttagaatatgatttcaaaattaatgttttgtccaaagaactcaaacttaccgagagtgcaaaacttaggctaaaaggtaggccttgttgcagtaccgctccacccgaatacatcacctggaaaaggatagcttcccaaattataaaaaggaacacctccaccaccgccagttccagtagcccccccgttgttgctggtggtgccattgcctccatcacccaactgccctccaccaccactgccggtcactccaaatgtttgtaaagctgctggttgaagctaaactgctggctcttccttttggttgtcaagaggtaacctatcataaacggttaaagataaaacctcaaaccgtccatgtagtgttataacactcccggatggggcagccggttgccgcaatgtgacattagtgacagccccggttccactgagcacacaa

SEQ ID NO: 1892 - DNA, 487 bp, Gossypium hirsutum
  Clone ID: LIB3825-007-Q1-N6-B4
ggaaataaaaacttccggaatatcgacttttttttgaactgaaaatgaccggttttaccgaacctttgcgcactacaagctcaataatatcggttaaaaatttaacagaactaacaaaatgaacaaccctttttgtatcaattctaaagggggacagtccacgagccaattgaaaactaaggaaaatcactatacaactgaactgtcactttttcacgtaaaatgttcgcataagcgagtttattttcatggcgaaagtaaaaaaaacaagcatttatcatgcccaaaaaagacgagatagaaaaagctgaacagcttgtccagcagcagaggggaatactacgtctcacaacaccatcagttgccaaatcggcctcttctccatggcattctttgtcgactgctgccgttacgttgtgcaggaccattcattcgctcttttttcatattggcaaacaacgaatccagtgtatgaggcctttgcttt

SEQ ID NO: 1893 - DNA, 565 bp, Gossypium hirsutum
  Clone ID: LIB3825-007-Q1-N6-B5
caaaacactcgataaagttgatttccaaaacacacatcatcattctgaaaacattggattgtgcaaaagtgtattctgcaaaaacattgctaattacataaaaggaagtttcaaaaaaatttaaaagtaattactcacagccatacgcccatcttttctttcaccactcacccataatttggctgcaaatgtacgtaccttaccacacacgcacaccataccaacattgcaacctagggtcctcctaagctactaaggcgccccaagccctaaaatgttaaccacaacctccttatcagtgaaccagtcgtagacacatttaaatagttagtctcctttgtcactatcccaacgacagcatcatcaattaacaaacaatatcaatcctatggggtccctcattaatatatatcctatgttagaatccagatacatatggaatttgagaaaaattattctccaaatctgagggagggaatatatatatactcaagacaaacatgcaaaaagttaatccagtataaagtgtgacctaatcccaagcacttgccaccccgggagcata

SEQ ID NO: 1894 - DNA, 560 bp, Gossypium hirsutum
  Clone ID: LIB3825-007-Q1-N6-B6
aagtacattatcacttttattgatgatttttgtagatatgtatggatggatttcatgagaaaaaatcaaaagttttaatgaagtttaaagcaattaaagacatggtcgaaaaggagcttgatcgaaatttacgatgcctttatacagatgacgtctaaagaatatgcgaagatagccaccatgtcagacgaccccacaaaaaaagtaattgtcgagtagaagaaccgacatacttaccaaagcatgttacatacaaagaatgtgccactacgattttgggtagagtatatgaaaataactgctgatgttatcgatccactgccacaggcaaagcttaatttcatgacaccatacaaaaaacttgggaaaatcaagtctaaggttatatcggctacgtatttgtgcctaaccaaagtttgataagaaggcaatcgaatacatagccgtaagctttgatactcaaagaaatgattgaaagtgtcgtgatctaaccactgaacgatgttatacatctaaaagtgtcgtgagctatgatactcaatgaggcgtcatccaatgtt

SEQ ID NO: 1895 - DNA, 526 bp, Gossypium hirsutum
  unsure (1)..(526): unsure at all n locations; Clone ID: LIB3825-007-Q1-N6-B7
gtcccaaaatattcttccataaaattagaaaaaaaaagttacaaagccaggaaaattaaaactgaaatagacctagtacagaataatgttaaatagaccaaataaaaacactgggtttgacataacaaatgaccctcacattaaccaaccattcaaaacctagcagtgcaatggaaatccattatctgtcttttgggattggttttattttatatagttcattagtctgaatcctaaaagcagcaacccattataggagtacaatcgaaggccaatcttttaatttggtcttgcaaattcatacgttcttggtaatagttttgatcttactaattgtactcaattcccagctgctaactagttggtacgattttccgtgccgtatcccctacctcttccaccataaccatagcctcttccgtaataagaacctctagctcgaccaccatggaaaggtccccggccacctctaccgncacgatgccttgggaaatcgccaaaggtctctgtatccctcctcatttgc

SEQ ID NO: 1896 - DNA, 565 bp, Gossypium hirsutum
  unsure (1)..(565): unsure at all n locations; Clone ID: LIB3825-007-Q1-N6-B8
aaaacacaaacagttcatangaaaagaaaattgcgaaatcaaccaaaatagacacccgattagaaaccaccacggaggcgaaggacaagatgcagtgtggactccttctggatattgtagtcagctagagttcgaccatcctccaactgcttcccagcaaatatcaacctctgctggtctggtggaatcccctccttgtcctgaatcttcgctttcacattgtcgatcgtgtctgaactctccacctccagggtgattgttttcccggtcaaggtcttcacgaatatctgcatccctcctcgaagtcgtaaaaccaaatgcagggtcgattccttttggatgttatagtctgcaagtgtcctcccatcctcaagctgctttccggcaaaaatcaacctctgctggtctggaggaatcccctccttgtcctgaattttcgctttgacattgtcaatggtgtccgagctctcgacctccagggtgatggttttaccggtcaaggtcttcacgaatatctgcatccctcctcgaagtcggagcaccaagtggagggtagactctttct

SEQ ID NO: 1897 - DNA, 143 bp, Gossypium hirsutum
  unsure (1)..(143): unsure at all n locations; Clone ID: LIB3825-007-Q1-N6-C10
aaacaatcccatcaaaaacaaatttatttcaataaaactaaaatacaacaaaaacaaacatgaaaactaaaacccattgttccatccatcacaagagacagtcacaagntnaanaaaaccattaaaacagggtccagattata

SEQ ID NO: 1898 - DNA, 544 bp, Gossypium hirsutum
  Clone ID: LIB3825-007-Q1-N6-C12
aaatcaaagtcttggcacctttaaacccattacctcccgtgacagaattttcaaaaagtcttaaaatttgtgggagaaaaaaagttaaaattattttctaaaacttgtggaaattacattttagaccccaaaagttaaaaatgattttcagtggggggctgagctgcccccattataaaaacaaattacacacatcacgctcatcttgattgccagagacccaatgctgatttattttccatacctgatggatcagaacttggggtgtacttgcaccagagattaatgattttctcaggggaagcagactctgctcggtatcatcagcaagcgtggtggttttctcaactcaaactcggacttcgagttcatcagaaacagctacgttatcgaccggatgaacattactgttctcacttcattttgaagattgaatgtcatcttcatcaggaaaaggatctaattctatcttcttttccgtctctctattgagcgtcacgactttcatcataaaacaagaagagagattattcccctgattcag

SEQ ID NO: 1899 - DNA, 565 bp, Gossypium hirsutum
  Clone ID: LIB3825-007-Q1-N6-C2
gatactgcaaattatatcatctataaacggaatcaaagctgttgatatagactcgatttccacgcctctgttttggcttgaaatataacagacactaatggtatgtagtactttatgactctaatccctttaacaagctctttaagttactacactcgtacgggtacaacacaaaccactgtaaaataatattacaaaccttttcttgtatcattacaggactaggctagcaacaaggatagattctcaggttggcttttgcttctcctggttagcatcgatttgcttgcttgttctttagtagtatttcatctggtcgtcaatggaggatgacttcaatcatggcttctctgttaaaattcttcttgaggtgtctgtaactgtaaaacgaatcccttcataggaagtaagatagttgctccttttttcttgaacccccttctccgtacaagtcattccactgttttaactcattcattccagctccctcagatgcgaagctagccgccacctgattctttgcttgcctgaaatcttccatagataatggccttagggtaatgac

SEQ ID NO: 1900 - DNA, 539 bp, Gossypium hirsutum
  Clone ID: LIB3825-007-Q1-N6-C3
atgatcaaacacacattcaacacacaatagagagcatgtcttaaacgttacaggttcctacgagatcatatgatatctatgagtaaattgttcttgcaactaaactatagatgagatgaaacatgatatgatctttcactctccacaacacaccctacagatttcacctctgaattgttggtttggttcgggtttggcacgaggaaattagcacccatatccaaattcttttttgttgttggccttggatttctccattgctctaggagctaatccaattgcatcagagctcttcatgattttcaacctcttgcacgtttcgataaacatctcccatggaacatcgccgacaagcatccagtcaccatctttatctttgtatgttaccaactattctgatccatgcaaaagatccttcaaccggctctcactcagggtttccttcccggcagtaccattagacccacattgaccaagggtaaaacagctgaacatcttctcaagagcagaagacagttcctgatatgtagaataagttc

SEQ ID NO: 1901 - DNA, 513 bp, Gossypium hirsutum
  Clone ID: LIB3825-007-Q1-N6-C4
ctctaattattcccaacttttattgatttatagaactgccctggctaacactgaacattacaacaggaccaaacttttctttatatggtacaacagtacgaacttgaaaaagaaaaaaagtagaagcaaacaaacaacaaacacagactcaaggcagtagcagagcacaaaaagtcgctcctttcatttaataggatcgataataaggatcatcctgggtacctccgcgggtgctccttctagtcccagcattgttaggcgccgcacttgggaagtcttggtttcccgttgtaccgtaagcaccccctgtatctccgccaaaccccatactgctgaggtcatcttgcctgcctgtatcatacccactacctgcggtggggtacccacggttgtcatgtccaccggtaccgccatagccaccagtatcccctctgttgtacccagctgtggtgtagccagtaccaccaataccaccaccaccagcatggccagccgtggcgttatgatggcggg

SEQ ID NO: 1902 - DNA, 235 bp, Gossypium hirsutum
  Clone ID: LIB3825-007-Q1-N6-C8
gaaccaagaaaaatccataataaagatcactcaacatctataagagtataaaatatcttacgcatttcacaaaccgtttatgcccacacaccagtaactatatgattttttcttaagacaagacaagacaagcattagtagttttttaaggataatacctggttttaacgtttacctgtttagttctggatgtcatttttacattatgagcactgggtgtgcatatggggtgggc

SEQ ID NO: 1903 - DNA, 535 bp, Gossypium hirsutum
  Clone ID: LIB3825-007-Q1-N6-C9
caaatgtatagtttgtatgatttaactaatggaaaaacagaaacttctatttaaattaagttctttatatattacacagtttttttgggcatggggttcggcatcaagggagaagaagctgcttgatttcattaactacatggagtatcttcttgctaggtgaatccctgtaagaagatccaggccctaatatcatgaaccggttccacccatccataatctcagggcaaaagaccttccaaagtatggtggtctccatccacgatggcaccgtcaagcatctgtccccacgcctggcgctttcaactattgcctttgcacatttctctaccgactctactggcatcaaactcacttggacatctctcatttctcgatcaacttccaatctgccttcctttgataggaatttgccttcggtcatctcggtatcaataaatccaggcttcacgattgtgattccgattcgagtcccaaattcaatcctcaatgtctcgtaaaagcttatcagtgcagctttgcttgcattgtagaa

SEQ ID NO: 1904 - DNA, 582 bp, Gossypium hirsutum
  unsure (1)..(582): unsure at all n locations; Clone ID: LIB3825-007-Q1-N6-D1
caaacaaaagagattttaattaattgaaatgcaatcatctgaattaaaaactacagaagctaactctcaaagtctaatacaatacataaaaccataaatttcttattgttcatctaagctcagtaaatatgataaaatactatgagatatgtagtaacatacataaatggttctccctccaacctgcaaaataagcgtttcacacaatgatgtgttttcacttggaagcaccattaggaatcttggcggaaatatcgcccgatgggttcagttcatcccaagcttcaatccatgtcaccatagcatccgccagcttattgaagtagtcatcgaccttgccgagtttcgccttcacttgcttggagatctcaatgtagcatttctgaacggtggtgcagtccttcggaagggcaacggattggaagaacggaatcaactcttcttgccagtaaattcctttgtattctttcttaaggttcacaaacgggttgctcgctttgctgtgccaaatgtagggaagtccggtcttcactccccatccggggtgatcgcanataaccttcgtgcaccagccagcccaca

SEQ ID NO: 1905 - DNA, 450 bp, Gossypium hirsutum
  Clone ID: LIB3825-007-Q1-N6-D10
gagacaaaacagtgtttcagctgaatattcaaagttgaaccagcttagatttttaagaacaataaagggataattaaatgcaatatctaaaaagccagcttttgatcatcacttcactatgcagatcttaataaccgaagcagccccgatacggtgcagtgcaacgatggcatcaccaggcttgcacaaccccttctccgtagctgacttcattgctgcttctaagatgacctcggtggattcggcatcagttgccttggctgacccttctgccaggatgggaaccaagcccctatatatcagactgtgtctggctggaccttcgtcactgcaggtccaatcaaatgaatcggttgtcaagactgggacaaccactgataggataggaacagctggtctgtacttggcgaccaatttgactggcgttacaccacggggtaagacaacgat

SEQ ID NO: 1906 - DNA, 529 bp, Gossypium hirsutum
  Clone ID: LIB3825-007-Q1-N6-D11
cccatcaaaaacaaatttatttcaataaaaataaaatacaacaaaaacaaacatgaaaactaaaacccattgttccatccatcacaagagacagtcacaagtaaaaacataaaacaggtccagattattatattcacaagtcatagcccacataaacaggattcaaagcagatcaactttcaaaaaccaacggctccatttaagtcgtttgctcaccaaacaccttagcgatcttttttgtaggaaccaaaggcaaataggaggcaaccttgtaccctttttttgcactgctagccactgtctcgttatacttatcgctgcaataagcagctgttgggacaacgaccgaggcaacttgagggaaaagcgggagcatgttgagtttaccccaagctgaaaccgcacattgttcagctttgggttcatacttcgcataaagctcttttgctgggggttcatacttggggtacactgattttgctaatcctgaggcggtgttcaccactccagcacggtggacttcggaagc

SEQ ID NO: 1907 - DNA, 548 bp, Gossypium hirsutum
  Clone ID: LIB3825-007-Q1-N6-D12
aaaagagtaaatttgactaaaataggatcaggaaaaattacattatcttcaacgtgtgaaccttaccaagttaaaaattaaagtttaagatttgtggcaatcaattcatctgattggaataaaagctattatcatatggaaccttgagaatctgaaactcttgaagatggttgtcaccctcaacttgggattgagtagtctgctcttgttccatctgccagttttcagataaggcatatggaatggggaaactctgcgaaatcacattcatcgtgggctgagacatgctgctaccactaacatgcacagggtacgcaagtgaaccatgttgttttggctcacaagaaaccgaagactcatttgacagaagagagagagcacgatgaagatcttgcgtcgtacccatatttgaagcaactgtggattcttctacaccttggttgagaacctcaactgtgttttgcttgccctttacaggcaggaatctgttggaatcgtaacaccgagatgtcatggaattcaacagctggttgcctggcagttgcagc

SEQ ID NO: 1908 - DNA, 354 bp, Gossypium hirsutum
  Clone ID: LIB3825-007-Q1-N6-D4
aaaacccaaaaaaataaaaaaaaaaaaaaaaaaggggccaagaaaaaaaggcccaaaaagggccactaaaaatttaaaaaaacaaaataaaaaaaggggcccaggaaaaaaaaacccaaatcaaaaaccaaccccaaaaaaaaaaaaaccccaggggaaaaccggccccaacaaaaaaaacccaaaaccccaccaaaaaggggcaaaatgggggaccaaaaaaaaaccaaaagtttccccccccaaaagggccaaaagctttggaaaaatggggaaagggaacaaaaggggaaacttccaaaaaaaaaaccccacccaaaacctcaaggtaaaaaggggttttttttccgaaaa

SEQ ID NO: 1909 - DNA, 444 bp, Gossypium hirsutum
  Clone ID: LIB3825-007-Q1-N6-D5
aaaaaaaaaaaaacccaaaagccaaaatttgggcttttaaaaaaagggcaaaaaaaaccaaaaaaaaaccaaaccaaaaaaaccaaaacccaaaaaaaacccggggccaaaaaaaaccaaaaaaaccaaaaaaaaaaagggccaaagggggcccaaaaggggaaaaaaccaaaaaacccgggggggttgggaaaggggcaaaaaaaaaaaaaaagggaccccaaggggggttcccacgggggggttaaaaaagggggttttttggaagggggggttccccaaaccttaaaaaaaaaacaaggggggcccttatttctttaaaaaaaaaaaaacccggaaggggggatttaaagggggaaaccggggaaaaaagaaaaggggaaattcccttttttttgaaagggggggggggggaaatttgaaaaaaggggaaaaaaagggaaa

SEQ ID NO: 1910 - DNA, 536 bp, Gossypium hirsutum
  Clone ID: LIB3825-007-Q1-N6-D6
ggggaaaacattgtttttttccaactaccaagaacaacaatggaaaccgaaaattttatcaattattcttaaactacaagaacaaatgacaaagtttgcaagaaacaaaagaacatgaaaaaccaaaacattttaacgggcgtagaaacatcaataattccaaaaggggctggcattttctgagactgacaagtcaattacgccatctatgccttgtttgcaatgttgtttgagagccagtccagtcccttgtacagtccttcaccagatgtggcgcatgtactctggatataccagtgaccctggcggaaaaaatgaaggccaagcttgtcggtaatctcagcagcattcatagcatttggaagatcttgcttgtttgcaaatactagaagcacagcatccctcaactcatcctcattcaacatcctgtgcaactcatttttagcttcaaccacacggtcacgatcattgctatcaaccacgaaaataagtccttgcatgttttggaaatagtgtctccacaatggtcggatctt

SEQ ID NO: 1911 - DNA, 564 bp, Gossypium hirsutum
  Clone ID: LIB3825-007-Q1-N6-D7
gaaaacgaaaagaaaatgaccaggaatttatttgaatacagagagctgcttacaagttacaatatacaaccacatagagcagcacaaggacataagcatagaagcagaacagagcaacaaaattgatagattactttctagcatatcagccgactgctacaataggaaacttcaacccacagtcttgtttccaccttcttgtgtcttactcttgccaccttcttgtgtcttactcttgccaccttcttgtgtcttactcttgccaccttcctgttctctgcctccctcagagatccttcctcctccttggctcctattctggatcttctgctccatactcactgccgtgtccggcaagggccacttcactgggtctagcccctgagacatagagcccctgcttccacgaatataagtagcaatccacgacagcgatgacagtccagtgatcccaaatgctccggaggtcaagaatccggctatggaacccgcaatgagaaaagcagcaggtaccaaaacagggctgaaataaggaaaagggggcggcaatagcaagacctatga

SEQ ID NO: 1912 - DNA, 534 bp, Gossypium hirsutum
  Clone ID: LIB3825-007-Q1-N6-E10
agaaacaagattccataaactatatcagtaatagtaattccagtaatattgaaaataaaataatcctaatcatcatcttcactttcatcactgtatgaaacaagaccagtcttagcaacattaagggacttatcgggatcacttttaggtgattccacattatcaacatcaggtgcctttgttccccttatgagtttttcctcctgctcggtttttgccctttttgcttgtggcttcacttttatgagcatacctagaggccgagtggctggattcttcttcccaactgttttttgttcctggtttgcaagaacaggtggtgtttcttttagttcaagcacgacattggactgtgctgcaacagctgcttggaaacttcgcaactgttcagcttcctcatccgccacttgtcgttcatattcccttcttgacatctccaatttatcaagaaactcagtttcgtcttcatccaaagctttgggtggcctatgtttgaaccggtcattaaactctgcatctttcttgggtttaatt

SEQ ID NO: 1913 - DNA, 568 bp, Gossypium hirsutum
  Clone ID: LIB3825-007-Q1-N6-E11
cctccaaagtgaacaaccattacaatttcacacaacatttaaaccccccaccaccaccaccctgtacatcaaccaaaaaaagaaggaaaaaaaaatgttcatatcttcagcatttaatacttactaatatccctaattttttttccagtttgttagcagatgttagcaaaatctacctctcatctacatccccaccacccaattttccaactggatttgccccaaaatcgaatagctcatgccttcaagaccgcgcatcgtctgcatcggaatcacttccggatgagctcccagaatctgaatcactcgaagacgaagaatcgctgcttgaactactggagctgctagagctgctactagctcgatcgttatccttctcaatctccacgggtgggaaactgctcatcggcatttcgtccccaatatctacatcttcctctccagcatcgccttttttcggtttcttcatctccattggaacctcaatcttctccacggttgcctcttccctatggctgtcattggatacggcgttgttcgccatcaatgcttgccgctttatcttgct

SEQ ID NO: 1914 - DNA, 535 bp, Gossypium hirsutum
  Clone ID: LIB3825-007-Q1-N6-E12
cacacaactaatacataaaaagattaaaaagagatgacggtttgtatccttcatacattacaaacttttattttgcctttaaaaacttctaaaattttcctccattcatctaaaaactacaaagtctaacccaaaaatcctcaaataatcccgcgtaatttcaacttctgaaactatatatatatatataactagaatcgaactgcgaatgaagacggtaccagaaaagcattacataaccaacaaattactaaatccaaaggtcaaaagagatcaatgacaggaggtaccatgccttccacctgaggtccattagcatatactcgtcttcccctttcctgctgagtcaccacaccatcttccccgatcaccagcataaggtgaccttgacctctcaagaattgggctacatgaatttcagtgttcgatagaattctaattattctgaagtggcccacgctgttgggatggagacaaccggtcccgtttcatccccacctcaagaaaactgcgcgttggggaacgttgacctcca

SEQ ID NO: 1915 - DNA, 562 bp, Gossypium hirsutum
  Clone ID: LIB3825-007-Q1-N6-E4
aaaaaaaaaaaagctgaaataaataattaaaatcaatacaataactgtgtgaatcttgcaagttagtgtttcaataatagtagttattgtcactataactgttaacaaattgttgatattctccattgctgactgtcttggactgtactgcaattgagcaaatgtccttcacttgctatcccttcaattcctccctcaatcaaccatatgatgctatgctttcttttctaagctgtaaatgacttactggtattattaacattttatgtcattccagtagggtttcggtcagtggtttgtacaacgggacacgtagttccatggtccaagtaaccgccacgccgacaagtgaacaaaatgccggcacaagtcctaagccgtatctcgtgattgaaaagttactggttgaatagtttccagcaactattggtgagctactatgaaaggattgaagaacaaatagggtgagcccacatgagattttatccaagaagctcaatgatccacagacaaatgcgcaaccattaagatcttgaccgattagcacattctgcatgctcac

SEQ ID NO: 1916 - DNA, 578 bp, Gossypium hirsutum
  Clone ID: LIB3825-007-Q1-N6-E5
aagaaaaataaaaatctgattcaatcaattttttacacatttcaaccgatccgtacttctcaagccaaccgatctaatgactttctccagactcgtagctcaactaatttccagtccaacctaacaatccagcctgacttaaacatcattgagtaaaactaacagaagatacattggttccatgattcgaaaattttaaaatccaaattaactaaattccaaccaacacgagctatccaattgaccggttaaatcatatcactttcttccgttatcaaattgagtttaaaaacacaaaactcagatgaaagcagtccggccaccccttcgactgtgtctatcgtatgtggtgttgaatttgtcgaccagctcattcattgtgcttgaacagttagtgaacatagcaagataagtaatcaataatgtgtcgttatattccattagaaagtcatcttgaaatttttctgattcaattgcaggtaaccttcggaggaggcttgatacttgccttaacagtgaactttcgcaaggaatatcacctttttgcattccaacaagatattgatgaagcaccctga

SEQ ID NO: 1917 - DNA, 501 bp, Gossypium hirsutum
  Clone ID: LIB3825-007-Q1-N6-E6
aaccgccctttatccttccttgcttacaaaagagaatggggtcataaattttcacttttttttttaatctcatgacccaaatcatgacatgtttccatagcttatttgttagggctggtcctttctacataataaaacccaaaattttgcctgccgccaatcgaacactttgttaacaaacacaattatgcatgctggtaagggtttagtacaggaatgaaaactccaggtctccttccaagccattattggatttgcaaaaggatggctggctttaaacttgatcaagcaaaaggactaacttttagctagcccatcacgtgatataaagggttgaaaaaactcgacccaccgatcctgagggcaattaacactgatccacttgtaatcccagcaaaccataataagattgatcctccaaatgattcaaaacccttataaaaatccgatggcaaaaattccccattaacaccactaaattttgtttttaaagaccctgtt

SEQ ID NO: 1918 - DNA, 488 bp, Gossypium hirsutum
  Clone ID: LIB3825-007-Q1-N6-E7
gatatatagatggattaatttacttatttttttagtagagggaaccaaatacaatttggctcatagtataggagcctcaatggtacttttgatatttgctttttgatctaacatacaaagactaaattccccatttgttgggtaggagtaaaatgtaatttgactcttagtacaggggactatacagtaattttaccaaattaaaggttgaaaatcaatcaacttgatatatatgtgtgtgtgtgtgtgtgtgtgcaggaatcagtgaataactcactgggaaatctactgacatatccatatgtgagagatgctatgacgagtggacaattggcactgagaggaggttattacgactttgttaatggacattttgagcaatggagggccttcacaccagctccaccattgccacccatgccccagcctttctaactgtcgtctcatttactttatctgctgcaactgagaacttgcttgtttgctct

SEQ ID NO: 1919 - DNA, 579 bp, Gossypium hirsutum
  Clone ID: LIB3825-007-Q1-N6-E8
gtgaaattcgtattcgggatttgattttactaaaatatcacctctatgcaatgcaatagagaaagcaatgaacaaaacctttgttgcctggactatctggaaattgatgattttatatatactacaatacaacatatctgtgaaagagacctagacattaaatgcaataaaataaattatagagggggagtcaaactatgtaaaatgagatgaccaaaaggagggggtttcatgctccttaaccttgtcagtgacactaaatgagctcacgcttttcctccttttcttacacttgagaagtcggagacagagctccttccgatctgcgggcagtttgcccagaaatcgacgctttgtctgatacatggacgttgtaccgctcgtataccttttcgcggttttccgaccaccaagtttctgcttggtgctctccaaatcttcttcggctgaagcgcactcgtttgagatccctagttccatcccgcagtactacaagagttatatagactccaggctcatattgttcaatccactcagcctccacttgattgccattagcagccaatgctgaatttctag

SEQ ID NO: 1920 - DNA, 556 bp, Gossypium hirsutum
  unsure (1)..(556): unsure at all n locations; Clone ID: LIB3825-007-Q1-N6-F10
aaattaaaccaatatataaatattaaaaattaaaattagtattatttcgattttaaaaatncaccatatctttccataaatcaaaaaaaaaatcgaatagtaaatgatcatttaccaaaagttccatatatttttaagttaaaacactaggctctggctaagagtccaataaaaacacaccaagctaagctttaaacatgcccaactcttacatataaactggtttagtcctcatttagaacactaaaacaaacagttaaaacactgggctatagcttagattgcagacaccaagtttataagcttaaacatgtccagttcttacatgtaaattggttttgtcaaagctccatatatatataaagactagctagggtcggggtagatgattttagcttctggtgctgaacttagattcagcaatggtaactccatcatttaacggttaaacgataggtccatatagaaacacaccaagctaagatttaaacatgtccagttcttacatataaactggttttgtcaaaactccgcatgtacatgtatatataaagac

SEQ ID NO: 1921 - DNA, 564 bp, Gossypium hirsutum
  Clone ID: LIB3825-007-Q1-N6-F11
aaatgcaagcttgattgatttccatccctccatataatttcaagatttacttacaatttccatgacaaaaagaaagacagaatttgaaggcgtaagatacaattgaagtattgtctccggacttcttcatattcttgtatccaagccggaaggatttaatgattagagttaacaatgaagccaggcttgtctatatgaaaatgcgacttagtttgatttaaactcaccaaacttgtgtttttctacatggaactgcttgaatacatactccatctctggaaatgcagacaacagcaagagctcaagaagatcatatgccagcagcttcaaacaaacactagactgaatgaagaaatagaggtccttagcagattgttcatactccttgcgaccaacaagacccacaatagcagctggtgcattgtcaatcattagctcatatacgaattttgcacgacgttctgcttctagttgttgctgctcatcacccaatctagatgaacatgtttcaggaggtagcggactgcaaggtgaagccttggaagggccactggatgatggcgg

SEQ ID NO: 1922 - DNA, 463 bp, Gossypium hirsutum
  Clone ID: LIB3825-007-Q1-N6-F12
cccccctcacatgaaaatataacattggaaaaagggttgaagtttgaaaatgtccaaactaaagacggggccccaaactgccaattccttgttttggtggaggggcctccaaaggcttatttggggtttttttttttcagcaaaaaaaatttcaggggtaacaccctccatttaaacaatgggtttaaacatttgctctaaaaatcgaaaaaacctggcgatgatcaaaaaaaaaactttgaatccagcagtcccctttttccaagggaaaaaccccacataaccaaagcaagcttttagccccccttttgaaaaattaagggaaatttgttgggcttcctaatttgggggcggagcctgatttttgcaaaaaaataaaacaaagatttgtttggtaaatctttaacaaaccaaagggcttgcaagggatcaacttttttgttttaaaaaataacattgttta

SEQ ID NO: 1923 - DNA, 567 bp, Gossypium hirsutum
  Clone ID: LIB3825-007-Q1-N6-F2
aacatacatcatgtatttataatatttgtgcagccaattatccatggtcatacacacacaatcaaaaataaataccaaattttcatatcctttatgccctaagccgaatacacttgtcatgttcacctacatttttcaagtacaacattctcatattcggcattagtatcaagcataatttaatcatagtttgttcaagcactcatacaacaagatacatccaatttaacaagaaacaaaaaccttatttaatacaattaacaccgaattcctcatgtaaaaagtaccattgccgaatatcatttagttcaccttaatccacctcatgatcgaatgcctttaagcttaatatcatggtatcgtaactcaacatttatcaatatgtcattaacaaaatatgctcatatcaaatttactcccaattatatctcaaaattcaacaagcttataactaattaataattaaattccatttcaaagtatcaaaacattatcaaatgtatactcatcctaaatgaccgaatgcacattaactaagcacttaataattttctttagccattgaac

SEQ ID NO: 1924 - DNA, 562 bp, Gossypium hirsutum
  Clone ID: LIB3825-007-Q1-N6-F3
attacaacacacactagtttatcattagagctttcccaaagtggacatacatacatggatagaactttcaaacatatgacttgagtactgaaacagaatggggttggtgcacatgaattaatcagtcttaatctcaggtgattggatggatgatggataaacaacattcttaagaccagtgaaatccaatatcttcttgcttggtgcttgctggtgtggagctcctggcctcgagaaatgggataatatgtaaccccattccaccagttccgggaaaaacatcttccacaggtaagtcaccctgaaccatgatggctgagttaagtaccgatctcctttgcttgcactgttcactattgcctgggcgcacccactggccgacgctactgggatagaactcacttgtacatctctcatgtcttgctgaacttccatgttaccatctctttgaaggaatttgccttgggtgatttcagactcgataaaaccaggtgttacaattgttatcttaacctcggatccaagttcaatccttaatgtatcgaaaaaggctgtcaatgct

SEQ ID NO: 1925 - DNA, 579 bp, Gossypium hirsutum
  Clone ID: LIB3825-007-Q1-N6-F4
gaaagaaaatcaggccatcacatacaaattattaggaccaacagacgtcaaatgctcaaaatgaatatgttacacgacaagatctacgtgaatccaatatccattgcacagcaggtaagaagcaaaaaaagaaaaagaaaagaagaaattacaacatacagtatcattatgtatcacgattaaaaaatattatttataaaggaaaaaggttggaataaataaggtcatcaccctggtgttctgtgcagtctcggatgtcttctgcttcgtttcttccgtcttcccagtgaggaaatccatagctctcttagcagcgtctgcagctgaatctttcaattctccaatcttactaactgttgtatccttaccttcctttgctttctccgttgcatattccgtcccctgttttgtcttctcagctgtcacgtccttcgcttccttcgctttttcagctgcatagtctttatactcggtcgctttttccattgtagtatcttttgcttccttagctttctgcgctgcgtagtctgtcaactcgggagccttctgcgctgtcgtatcctttgctcccttggcttt

SEQ ID NO: 1926 - DNA, 367 bp, Gossypium hirsutum
  Clone ID: LIB3825-007-Q1-N6-F5
ttttttttttttttttttttttttttttttttttttttttttttttttttttattgtttttttttgttagtttgtacacgaattttcaaaattagggactaaaaaaaatttactagactgtaggtgtttgccacaaaatcttgaaccaatcgctatgaccaattaagcaaatcaaggggtcctctaaaacaaagttaaaaaaagggagcgaaaacaccatcaaattaaaacaactaacctgtcccaccacggtcaaaccccagaaaaaaataagtaaaggaaaaaaaacaaacaaacacaacgcgaagggcgacccagaaagaccggaacagtccacccagacggacaaaacgtacccataacgagg

SEQ ID NO: 1927 - DNA, 475 bp, Gossypium hirsutum
  Clone ID: LIB3825-007-Q1-N6-F6
gcgggttgaaattttcgggtttaaagatttatttctctccctttaagggggacctagccctagttttaaggtgggtttggattcacaggggtgtcatggggcccaataacccacaaattttgcccgccctgggaatatggcgtcatcccccgaaaaacccaaatcgctttgcaacccgggggccaattttttaaaaagtttcccaaaattttaaagggtttatgaaaatatctaagggtttaccaaactttctattggtttaccaatatatctaaaagtttatcaaattttctaaaatttaccaaaatttctacccttttgccaatacttttgaaacttccccaaaatttctaaaccccctccccagtcttaacaattttcaaaatttctctaattttaccaaaatatttaggggtttaccaaaatatctaacaagttccccatttttttaacgatttacccatatttctaaaaa

SEQ ID NO: 1928 - DNA, 535 bp, Gossypium hirsutum
  Clone ID: LIB3825-007-Q1-N6-F7
gacgaaaaagatatcttatttaatggtagttaatcgtaaaaactacataaagcaagttcctgaaaaccaccaaacccagtgacgataaaaacagcaccataaaagagtctaaatgacagacattaaatattctagacattagacaacatcccaacttaacacatagttctctttttcttctctaagagagctgtccgcagtcagcaacaacaacgggcttggaagttcttccactgctagacccaactttctcaatggctttcaccacatccatgccttcaacaacttgtccaaacacaacgtgctttccgtcgagccactcagtcttagccgtgcaaatgaagaactgagatccgttagttccgggaccagcgttagccattgagagaataccgggaccagtgtgcttcttgatgaagttctcgtcagcgaacttggatccgtagatggattcacctccggtaccgtttccggccgtgaagtcacctccttggcacataaagttagggatcacacgatggaaagaggagccttt

SEQ ID NO: 1929 - DNA, 552 bp, Gossypium hirsutum
  Clone ID: LIB3825-007-Q1-N6-F9
aacaacaaaaagttcaaatcacttcattatttttagtaggttataatcaaaacaccaagataaccaggatcctatggcatccacatacatatatatacaggtattcaaagttactttgttttgttgttcccactctaagagcagcgggtaactaacactgattgcaagcagtgaaaagtgaaaaaaaaaatcacatttcagcaaacagtttctctgccttaccaccttcagctagtgaacccttggtccatcttttcagcatttctaaggctgccttgggctggtccataggcaccatgtgaccagcatcatgaaccttaagaaaaccaagaggtccatgagttttcaagactcctgcttccgagccatcaaccacaaatggaacctctggcgatgctacaaattcttttcgaccagaccattgcattgcatgaacccatcttgaattgccgagccagttgcagataagatcatattcaccagcatagacaagaagcttgattccgtcctcaaggagagcaggaatgccaacttcaagattccgcatccagt

SEQ ID NO: 1930 - DNA, 363 bp, Gossypium hirsutum
  Clone ID: LIB3825-007-Q1-N6-G1
tttttttaccaaacaattacaccattaaaaaacaaagcagtgctaagactactacaagtaccttcaaacatgtccttatcatgtcgacgcattttgataacaagaagcaagctaaagtcacccaatagcaccaacagcttttgaggataccaagcagcaaagccttcctcacctaaacgagaaaatggtaaaactcagaggcttccgggacccttcatgttctgctttgccacctctaattcatgcctcgatggtatcttgctttgcagtgaagttattgttgacctcagcaaattatctccaactatcaatctcaactttttgacaaaatcatcacgagttatcttctttgccttacagagc

SEQ ID NO: 1931 - DNA, 540 bp, Gossypium hirsutum
  Clone ID: LIB3825-007-Q1-N6-G10
gaaaacaaatccagggaagcagcattgaacaagatagaaccacatacatgtgttttacgagttgagagtgtggcaccaaaatttgggttaattgtaaaccatgtattttggggttgcactaaacttttgatatcccttgatgaccttgttcaccgcatctaggaaatctttctctgtcactgtttttcttcgagcccgaatagcatacattccagcctctgtgcacacacttcttatgtcggccccggtagaatttgggcaaagtcgggctaaaagttcaaatctaatatcacgttcacagttcatcgttcttgtatgaattttaaatatctgtgttcgactctccaaatcagggagaccaaactcaaccttacgatctaatcgtccaggacgtaataatgcaggatctagcgtgtccggcctgtttgttgccatcaggactttgatgtttccacgagcatcaaagccatcaagctggttgacaatttcaagcatggtacgctgaacctcattgtctccacccacaccatcatcaaaacg

SEQ ID NO: 1932 - DNA, 565 bp, Gossypium hirsutum
  Clone ID: LIB3825-007-Q1-N6-G2
aaaatgccctttattataagtatacatactgttattttaaaacacaaaaaaaatcataaaatttgcatttttacatgcgataagtgggcttgacacatagattaatcttccttggcaacgagacaccaaagttctcagtcatgtccagttcattcggcgatattccactaggtagctcccaattgaaacaatgcactaattgagctagaataagtttaactgtgattaatcctaatttcttccctgggcataatctacggcctgcaccaaatgggatgagttcaaaatcatgtccatgaaggtctatattgctatcaatgaacctttctggaaaaaactcttcagcattattggaccaagtattagggtctctccccattgcccaaatgttcactaagacccttgattgttttggtatgtaacagccatcaataattatgtcttccactgactcacgaggaactagcaaaggtgcaacaggatgaagcctaaaaatttctttcacaaccatgtctaggtactccaattttggtaaatcattttcctctaccattctcttgttccc

SEQ ID NO: 1933 - DNA, 544 bp, Gossypium hirsutum
  Clone ID: LIB3825-007-Q1-N6-G3
aaaagaaatattaataaaaaagagctcattctccttgaaaactttagtaaatgtgcttattcatattatcacaaagcaagttataatacttattgaggaacacaataaaacaccattatagtgtttcccacctaacatgggcacaaaccaatcattttaaagggcggttgataaaaaaataaatggtccaaaaacatcctcatgacacgcctaattattcctgcaaatgctaatttgctgatagaacatacttaccacctttgccacttgagctaaccagaaattcggtaccatttggacaagtaggacacacttgctctaaatatgccagcgcatacaacgtattcaacattgggattttgccctacataaaagataacctcttgaaagctgcgttatatcacaaatggttccatgaaaatccacttaaaaccaattgcgtacgcgatcttttttgtaaaaggatagaaggatgcaaaaagtgcttcaacgtaaacaatgactgaatgcgaaggaacatgtttctactcctaatgaaaatttc

SEQ ID NO: 1934 - DNA, 535 bp, Gossypium hirsutum
  Clone ID: LIB3825-007-Q1-N6-G4
aaaacttcattaacaaagaaattttctttaagtaactttaaaaattataaatataacataaaattttaaacatataaatatgtaattattaatagcaaaaacacttcaaaccaacttttgattttgataataaaaaaaaatttaaaatatgttcttcacaaatttaatatttaatttctatactattatttttaaaattttaattacatcactttctggtaaattttattttttaaaattttggttatttgacttttaaaataggaaaaatacttgctaataaacttgaatttgacaaaataattttaataatattttaaaaattaaaatctctagaaaataaagagactaaatttctaaaaataaaaatttaaaaattaaatttcaaatgaaaattacaaaaacttatgcacattttaagtaaaaaaacacaatcttccatcataaaagcactttaaaaacaccatttgcaaaacatttttggagaagcaaaaaagcaatactaaaacaaatactgcatagatgcccatggcgg

SEQ ID NO: 1935 - DNA, 554 bp, Gossypium hirsutum
  Clone ID: LIB3825-007-Q1-N6-G5
cagtccaaaaaaaagttattgtccctcaatcggtagcattttacatcaaaaacaatgttggtggcgatgccacagtcaagatactaaatacagaagggcatttcccccatctatcagctcataatttactatttagggttttaaaagagactattcaaataaaaaattagaagaaactatggatctaatttcttcctctatacgagggctattttaatgcaaaaataatgttatcttgacgactacgccaatgtactcgcatattccagatcaactgatcagatatgtgtctcaaatctcaataacttcaagttagagtactttctacgtaatccattgccttccgtttgacagattcaattctttcctcatcaccacgggacttttcataatcgagatactttttgaataaaaacttcatctttttgggtggtaagctcaaactaattgccctctcaaacagagcacgaatcacatcttcatctccaagtcgaatttcttgatcaagataaatgctccacaaatccgttctctttgggtactcccgtaaaact

SEQ ID NO: 1936 - DNA, 528 bp, Gossypium hirsutum
  Clone ID: LIB3825-007-Q1-N6-G6
aaagcaaaacgccaaggaccttagtttcctttattcacatactgtcactgttcaagaagttaagccagtacactgcttaaggtatgaaagaaatgaaccaaaaaaacaagtgaatctcaaatgtttattaatactgaatcctatcactcacttctttagtagcatagcgctgcattgtgccattatctttgatgccctggtaatagaatcagtcatgtagaaattctcaacagcagccttgaacggtgtcaagcttatcttctgactacagtctggactcaatgaaggtccaaaagcagctggctctatctcatctgtgttgagtaggtttggtgcaacagtcctcatcctggatcgtatggctcctaatgtatcataaggtaaacgaattcctgcaacctcagagagtgctcgaataatcttccaatcatccctagcatcacccactgtagggactgcaggtaatgtttgctgagagcaaccttcagtattttcatatgtaccctccttctcactgaatgctgctga

SEQ ID NO: 1937 - DNA, 541 bp, Gossypium hirsutum
  Clone ID: LIB3825-007-Q1-N6-G7
cttggtaacgggattctctccctcaaccaagaattcttaaccgagaccatttttataacagaaacgtcctcacaaatggttttttttactaatacaacaaccgacaagaagaaaaacgacacaataacattctcaaaaaaacagtaggaatatctgaaatgaagcacacgactttcagcaaccaaaacaattgctaaatcaacaccgttattaggtagtaagctccattatagcactaacaatgtcaccatcagcagccttgagtgccttgacagcctttgacctggacactcctgcttgtgtcataactaattcaatgtccttgggctccacccctgtgtcatccacttcttcatcgtcctggactgctgttgatgactccggtttcgatatcacatggcttagatcaggagccttgaattgctctgcagcttgagtctgcagttgtgagcttaagtcctcaatcttagcctctccaaatattacataagtatctgatgctgggctcttgaacacgtctggttttgagatgacaaataag

SEQ ID NO: 1938 - DNA, 548 bp, Gossypium hirsutum
  Clone ID: LIB3825-007-Q1-N6-G8
gaatagcaactacattggaataacttcatttcaatccattaaaaagatacattaaatccaaataataattaaattaattattgtagctttgcttttcttcttctataaaaaaccccaaaatcttacattgcaacactcttggccacccctcttcttatttcgtgttttccaaaatggggaggaatggtaactaaaggtaagctacaaactaaggtatttgtacaatgcatttgtttgatgtttttcttctgttagcctaagctctaaaatatagccaacccaatgaatgaaaaaagtgacattgtttgtaatgacccattgcaacttcaaggctccgagtgtcttcgacctaatccaatggcagatttttggacaatgcctgtcattctattgataatgtcttcaaacgatggtcgattttctggattactttgccaacagtcactgatgatagattctatctgaggatcaaggccttctggtagctctaatcgtctatccatgaagcctacaactccaactacctgtaaagagttgaggttgttcca

SEQ ID NO: 1939 - DNA, 551 bp, Gossypium hirsutum
  unsure (1)..(551): unsure at all n locations; Clone ID: LIB3825-007-Q1-N6-G9
gaaattaacttggtttgcaatatgaaaatatttaaaaacaataatcagatcagcaatctttttaaacccaatcacacataaaatatatacacttntgaagatcatatatatatatatatcttcttcctctacatcaagagctcattaacccacccgaggtcaagatcatgatccaaaacgacaccgtttccattgtttttctcatcatcaccaccaccattgaaatattcaccagaaccagaaggacttaccattgaaggagctcctttgaatgaaacatcaagccatggaatgtttgtatttggagtagtagccattggtgaaggtacttcggacaaagtcatggttcctaaacaactcatgacttccttcaacaaaacatcatcgtaactggttgtcatttcggttccaaatttactaatacgatcaccgccgtaccttggtgttcgttgctggtgttttaagggagatagaggcggtgacagggatggggatctcgagaattgagataaacccaagagagtacttgttggggacaacgacgacgacga

SEQ ID NO: 1940 - DNA, 550 bp, Gossypium hirsutum
  Clone ID: LIB3825-007-Q1-N6-H1
ccttggaaatgatagcacttggcgtagttcaatgaacatatttatagttacaacattataatttatgtggctcatgctatgatatgttgcctatggttcagtcaatatcaagttgcaaagccaagtagtggcatttagttgttgggaatctaggattctatgataaactattatgatttctgggaattgccaaataccacctccatttaagccgtcgtcaaggctgttttgactgaacaaatcgctgatgtgctatttgattattcataatgactgcagccaatgtattgtaagatgaaaactgtcttaggtgtctgaatagatatttgtaagaattgaaactccaggccacgtgttctattttcttgttcctttgtattcctggcagtgacatatttttgctttacaatggacaactcagacttctcattattcttagtctttctctagctttccgggcttttgtttgtgttttcgttttccattcctcaaagcactgctgctttcttttcctctcgagttctgccagagcctgcttaaggtgggcatt

SEQ ID NO: 1941 - DNA, 571 bp, Gossypium hirsutum
  Clone ID: LIB3825-007-Q1-N6-H10
ataaaaattaaaatcatcaatttaataataaaaagactaatttactgtttttatttgtttagaaattttaataaatagcttacttaaaaccattaagctgtttatcacccaatgcatctttccggaacgatttgttggatatggtaaggtttgatgggtgaagtcatcccttgaaatcaaagtggttatggcttcccgaaaagtagggctgtagaagacagggaaaaatgatctaaatgatattaagaactaatgggatcacaattatatatgattattgtcaatgaaagggccctcgacgctggtggtggtggtggtctgattttgcaagcgatgttatgctcctcatgcacaatcacgagatcccctttaacgataccttcctttcatttcaccatttttgattctctcttcccgtggttgcgggttgccaatggctcagctacccctttaacaactctttgatggtgggaaatggggcctactgcacctaacttgacccccccctccatcatatatcccttgacattcagaccctcagctaccaaacaaaatcccatcatacatgggc

SEQ ID NO: 1942 - DNA, 561 bp, Gossypium hirsutum
  Clone ID: LIB3825-007-Q1-N6-H2
gaaaagagaaaagggttcatgccattccactaattttactttcaaaactccaaacatcatcaaatgaaataaaaatgtcaaaaacaccgaaatcaaaactgatacaaccactccgcggaaactaaaatttactgcgacacgcccaaccacttggagaagttctcgaactctgtgtaatcgctgtcggagatcatagtttgataccatgctttgccagctgacttgattgcggttgcttcctccttagatataggcttcctcttcttgtcaagcttctccttcttggccttaacacgttgtgcctcagccaaaagagacatccttctagcagtctttgcgtaagggttcaacttcagcatagcattcaagttcttgagtggattcttcttcaaaggtgccctcttgatctccttcttaattggcttaacgaccgactgaacctcatcggagttaatgatcctaccaagatcagcattcaccatcttagaacgaggtaaaatgtaccccttcttcttctcagaaggcttctcaaatgacccataaatcgagtcaagtttctca

SEQ ID NO: 1943 - DNA, 321 bp, Gossypium hirsutum
  unsure (1)..(321): unsure at all n locations; Clone ID: LIB3825-007-Q1-N6-H3
agctattacattttngaaaactctgctaataaaaactggtcaaattatataaggttatggctacaaagggagatgagttctcatcattaacctctcttttttccccttctaccaccatgcctcggattccatcaaattttccgggcatttcacaccatcgttggatatttgcttcacaagcttttggcgaccttctcgtataaatcacgaggccaattctgacgcatattatttgcaaggaaggttgcaatctttgatctcatggctcgaagtgatccatctgtatcggatacattgtccaaacaagttatagcaaccttt

SEQ ID NO: 1944 - DNA, 551 bp, Gossypium hirsutum
  Clone ID: LIB3825-007-Q1-N6-H4
aaaagtaaatcagataaaaaagaggataattttccttgaaaacttttgtaaatgtgttgatacatattataacaaagcaagtaataatacttattgaggaacaataagaaacaccatgaaagtatttcagtaaaacatgggacaaagcaattattttcaagggggatgaagaaaaattaatggccaaaaacatcatcatcatcagactaattatacctgcaaatgcttatttgctgtttgaacatccttatcacctctgccactgcagttaaccacaaatttggtaccatttggtaaagttggacacagtttctctaagtatgccagcgcatacgacgtctccaacattgggattatgccctccagtcgagataatctcttgaatgctgcattatatcacaaatggttccatcagaatccactgaagaccaattgcataggcgatatttttagtaaaaggatagaaggatgcaagaagtgcttcaacgtgaacaaggactgaatgcgaaggaacatgtttctactccatatgaaactttcttaggtcatat

SEQ ID NO: 1945 - DNA, 548 bp, Gossypium hirsutum
  Clone ID: LIB3825-007-Q1-N6-H5
acaatattatcaggctacatggcctcactttgtattcaatatatattataaaagaaagcaaagaacaaaaatacaaaataaataaagaaacttacatagtgctttaacttattacaaagggatttgtctccttagtatgtttctaccatgggagatcgccacttttatcccaaatatcaggttatcattacgttgccttggagacatccttacttgacctattgtacttcatatggctcctaactagttgtcctgctgaaattgcagacataagcgacagctccccggcaagaacagcagacgctacaatggttgccagcgtcctagagtttgctcccggtgtctctttgcttgcacccttcactccaagtaagttcaaacaggctgattgagatgcaagctgagttccaccaccaacagtcccaacctcgatggaaggcattgtgacagagatgtggagatccttgccatcattaacagcttccatcatcgtgatgcaatgcgagctctcgacgttttgagccggatcttggccggtagctatgtag

SEQ ID NO: 1946 - DNA, 300 bp, Gossypium hirsutum
  Clone ID: LIB3825-007-Q1-N6-H6
gtgaaacgagaaaatgttattccaaaatcttatattacctgtcgaaattaccacccattaattgtttcaagcacccaaacccaaaccaaaacgacctaaaaactttataacctgaattaaaccgatctaaattgatccaaccaaaacccaatctgacccaatcaattgaaaattctacctgaaaagcatcaagtcacagccataatcacaatcatcctccacccctcctttgccttaccattaacacaaaattccattatttgtgtcgttaggaaggaaagagcaaattttaaatgtgaa

SEQ ID NO: 1947 - DNA, 565 bp, Gossypium hirsutum
  Clone ID: LIB3825-007-Q1-N6-H7
atgcaaattatataataccagtactaataataatggatagaaacagttttataagtacaaaaccctcttcttttccagtactaggtaagcttcttaacatgtaccgaaccaacatagctataatttaaggtgcataatacttgtatatctaattgtcttttaactgatgtatacatatacactatattcctatcatcttttctcttccaactaagatatttcatatcttttgctgtttctgtttctaatttctagtcttcttttttttttcatctctttatttttattacatatggtgataatcgaaggcactaagcggatcaaacactgctttagcgtgtttggaaaccatgatttcagaggcagcccaaagcttgcagcttcgttggaattcgaccccagtttggatgtccatgcttcgttgcagtctgcaaagtatttcccacttatatttagcagtcttggatgcgtggcgacgtaacaagtcgtggcagctgcctgagggatggttttcaggagcttggaagccaaaaagaaaaccagatctgttatcaagccctcacgt

SEQ ID NO: 1948 - DNA, 445 bp, Gossypium hirsutum
  unsure (1)..(445): unsure at all n locations; Clone ID: LIB3825-007-Q1-N6-H8
caaaaaaaaaaaaaattaatgggaaatggggggaaaaagggggggaggggaaaaaagaaaacaaagattccgggggacaaaataataaaagaaactaaccgggaaagggggggggagggtaaaaaaaaaaagggggggaaaaaaacaaaccggggaaataaaacccggaaaccgggaagggaaaaaccctcaaaacaaaaaaggggaaaggccataaaaggggggggggaaattggaagaaagggggttgcatgggggaaaagagggcaccaaaggtggaaatcacggttgggggaaaaaaaaagagaaggggtacccccaggactattaaaaaaagcccgggaggaccgctgcctttntggggaaggaaaaaaaaatgggttttaaaactttggggaatccaaccggggaagcaggaacctgggaggaaaaatttttgagaaaa

SEQ ID NO: 1949 - DNA, 434 bp, Gossypium hirsutum
  Clone ID: LIB3825-008-Q1-N6-A1
gactcttctggacgggtaaaacggttgggcatttacgggcgacaaaagtcaaacaataattccagaaaagtttagaaatacacaagtactatccaatacaaacaatttggtcgtggaagccgtacagtccaccactcatttttacaacaaataaatcatgtatctatctatctaatctaggaccgtcttgcaaaagaatcaaaaggaaaaccctaccccccccccccccaaaccaacacctgaattaatttctggcgaataattacatttatattttaatacacactaacttttcctacaaggaaatttgcacaactgggctcggaatttggcaaattacaatatatgatttgcatcattatgtggccaaaaaactccacaggttttttcctatccatacttcaccagggggctataaattattctactcccct

SEQ ID NO: 1950 - DNA, 469 bp, Gossypium hirsutum
  Clone ID: LIB3825-008-Q1-N6-A10
gaaacaaaaaaggttatcgctagctcagtctgatttttcttacagaacggcaaaaccgtttgttttgacggaaacattcaagaaaacgaatttagtaaaaagctagaccagctcatcttaaaatccgattttggggactcaattagatgtaatagccggggaaggggaaacctcgaccaacaatctttcctgtacaataccaagcaaaacattctaacccgaacagggtagcaattcctgcatcttcaatcttccattcattccttttcttccacattagcttcacataatccatctccttttggaatgccccgtatcggctaggaatgccctaatcaagttcgcggggatgcatttccagctccaccttgctgcccggtttgagcagctggcgctgcctcataagtgccacgagtgcccccacttgctttgctgtcagaatgatttgctggaggctgtgaataactgc

SEQ ID NO: 1951 - DNA, 562 bp, Gossypium hirsutum
  Clone ID: LIB3825-008-Q1-N6-A11
aagttggtctcagacaagaaggttctcttacactaacaaaactttttagaaaaggtaagaacctttccctgagtgatcccaaacagaattgtcaacctgtaatgcacaggagctctttcttcaatgttttcatgttatggaagtccaaaggaatacacaagcaagcagcacttgcgaccaggattcagataatagaatctgcttgcagcctgagagtagttgatgctggccggccaccacttgtaaatccttttagtgctatcttgtcatgtcacctgatgggtgattttcaagattatcagctcccttactggtactgggtttactagaacttggctgggccatcgcttgattcagtggaggggataattgcatcgggtgaagaccaatattatactgctgataaggatcagcaaagtttgggacacaaggctggtttgggttttgtacaccaagccggtttaacatggtgtctgactgattgtttggttggattcttgatggatcaggagctggagctggagccagagccggtggtggcatatgaaagggtcgcatagta

SEQ ID NO: 1952 - DNA, 511 bp, Gossypium hirsutum
  Clone ID: LIB3825-008-Q1-N6-A12
gaacatcgaagttgacgattcataatagcgtccaaagacaaacttaaaatattaaaacaaagatctaatagcagtaacccatgaaagttcgaaaaccacatagctaataataatcccagataagcttccagacacattatttaaaaccaaaaaaaggccaccaacaacggcaaacaatccttacctagaaaccaccgcgaaggcgaaggacaagatgcagagtagactccttttggatattataatcagccaatgtcctgccatcttcaagttgcttgccagcaaatatgagcctttgctggtctggtgggatcccttccttgtcttgaatctttgccttaagattgtcaatggtgtctgaactttcaacctctagagtgatagtctttccagtaagagtcttaacaaagatctgcatcccaccacgcagccgcaacaccaaatgaagggtagactccttttggatattgtagtcggccaatgtcctaccatcttcgagctgcttgccagc

SEQ ID NO: 1953 - DNA, 566 bp, Gossypium hirsutum
  Clone ID: LIB3825-008-Q1-N6-A2
aagaagagccttttgaaattcaatgaatgtcccaaaattagcagataatggtttaaaacttgggtctgaagaatttccaagccaaaggtccagatagaaatagacagcacaagaacagacatttaagctttagctataaaactatatgaaacctgaggaaaaagaatcatcatgaagcttcatatttcttttgtatagagcctaaaaaggaacaaagaaaatcaaaacaacaatacaacaacgagaatcttgttagcatttatgattgaatctattttcagaatcgagaccaacgaatgttttaatactgtggaaggaattcttattttttcacccaagataaccccctttcatggcaaaaagcaaatcaagcccatccatctaatgaatatacatttgcacttaagtgcaaatgattctcaaacaaaaacctttgaaagcaaaactttatatatgcatctcatctgatcttgtaaaagtaccgattgaaatagtaaccgattacctccctaaattctctgaaaccaattccagaagcataacatcaatcaacagccgaaaaactg

SEQ ID NO: 1954 - DNA, 509 bp, Gossypium hirsutum
  Clone ID: LIB3825-008-Q1-N6-A3
cccaaacgctggatgaatccctggatttaatagtaaggttgtttgacagggttcgttgattaggtaaagcaaagggtctttaaatctacaatcactacaaaggagcctaaaaaggcataacattggggctactaaacctttttaatgcctttgtcgcccacaaaatgacatgggacttgaatttctccagctaagctaaaacctccttttccggcctataaatcaaatcactcatgccccatatttgcaatgtccctcctccaccagttgtttcacagtcatcaaacacactaacaacagtccatggatcaaatgcattccaatggaagtaaacaactttgtccctgtgtccagcgtgctggaaaaacagtcccgcaggagcactaggaaatcttgaagcacgttccacctttttgccaaccttgtcatagtcccaaatgttcaaaagcccatcctcagcaaaactgccaaatacaaatgacttgtttggagaccactgcacgcataaa

SEQ ID NO: 1955 - DNA, 550 bp, Gossypium hirsutum
  Clone ID: LIB3825-008-Q1-N6-A4
gtattaacaactcaatatacttctattattatcaaaagaacatacgattacaacacaaaactttactatttataaaacaaatgttaactacccttaactactaactaacaaggcttctacctcctaaccgttaactgctgctaactgctgctaactacctcagctattatatactctaatatgccaccatcctcttcagctcctgctaatcaacacctggtaaacacatgctttttgggccgagcttaagacctgttctgaacttagtaaacaatggtgctgacagcggcttagtgaacacatctgcaatctgctcgtatgttggtatgtgccctacagtaagttgtccagcggtgactttctcacggacaaagaaaagatccaactcaacgtgtttaaatttaaaatgtaggactgggtttgcagagaccgcaaccactcctgagctatcacaccacacagcaggttttcacagagaaaaaacatacagttctttcaacaggactcgagccaaacgacttcagcaacagtatgagccaaccccctgtac

SEQ ID NO: 1956 - DNA, 547 bp, Gossypium hirsutum
  Clone ID: LIB3825-008-Q1-N6-A5
aaatgaaaaaccattgacatgaaaggtaagatggcaacaccatgaatgtcaacaacagactaaaacttcagaactcttttaaagtctaccataccctttccaaaatgagcttcttctttcttttttttttaggctctcaaggcttgagtgccaaagcaagtccgaccttggggctcttatcgatggacttggtatccacctctccagaaatggtaaagagcgattttgggcgccactcgtgctggatgagtgcgcttaccttgccggcattgttcacccgtgccttgattgtggttgatggatccaatgcatgttgtgtacccacggtgatggtgttcacattggtagagaagctatgggtcacctcagcaccaacaacagtgttggtcgatggattcacaatatggtagtaagatgcgttaactgaatcacccttttcattcagagccaaagaagcaatgaggtctgcattggtgaagctgaatcccgcgttgcatttggtgaaattcccagtcttcgtgtcgaatgagatatcggtacctagtgc

SEQ ID NO: 1957 - DNA, 547 bp, Gossypium hirsutum
  Clone ID: LIB3825-008-Q1-N6-A6
atgaaatggcagatctcgtctcatctcatgtcattgattaaatactcgaaatcaagcttacaaattttataccgaagttttctaaaagctgttctaaaactgtctgatgatatgaaaaacagaatgaactaatgcttttaaccaagtcaaaacagcagaacatagccctcgaaaaaaccaccttacttcttatcttctttctcagcctcagcagccttcttcaatctggcaccgatatatcgcgcattcgtacgttcaacacgaagcttgttgtaggccttgaatgacttcatctcctcggtgaccttcaccagctcaacagaaggcttctcatgagaaataggcatgtatggtccttgcacttgggttgcagttgcaagctcctcagcagtagaatcaccagccttagacttgcgtgcacgtcttgggaagacaacaagtttggccttgtaagtcttaagcctctgaacattggcttgaagaccttcaagagatcggttcttacgacggtgatcaactgatataccgatggtgggtgcaagtttct

SEQ ID NO: 1958 - DNA, 466 bp, Gossypium hirsutum
  Clone ID: LIB3825-008-Q1-N6-A7
ctggaaaaactcaccattttattcataaaaggacttagaagcataaaattgttttctttataaaaataaaaatattttattttctaaatgataataacaattctcacccaagtttcactcaatgacaaaagaagaaagtaacacatactccaaacttcgatttcaattgggggctgccgtagctttcaagaccctggccccaagcttcaacgcatattccacaagcttgtcgacgtcgggtgaaacatccttcaccgcctcatgggcggagaagcaatccgcccactgcaccaacccgggcgttttggcttcggaaatcagcttcatctcactcaatttctcgatcacttcaatccacgccaacaagctaccgaacactttgtccacgaacccaatattttccccaccaaagaaagctttccctttgctcaatttaccaaaaacttcctccaacagcaccatccct

SEQ ID NO: 1959 - DNA, 278 bp, Gossypium hirsutum
  Clone ID: LIB3825-008-Q1-N6-A8
gagaaaatatgcattctttttatttcataacagaaaatgtttggagtgaacccaccccaacttaaacaaaagacacttatcatcatccatccctgaaaacataaacaagtattcgaatcccatatcaaacaacatacacatcactcgattctcacccacacattctgcaaccaccataatcccaacccaactgctcaaacccaccgatatgcagatcctacatacctaggagaggattggccaagcttcacagcgaatacatatattacaactgcctg

SEQ ID NO: 1960 - DNA, 452 bp, Gossypium hirsutum
  Clone ID: LIB3825-008-Q1-N6-B1
aaatcaaacttcccaaaaaaactacattcaaatttacttaaaactgaacactttttgttctctcatccaggatacaactttaatacatttcaaattgaaaacaactcacgggttttctaactaatgaattggaatgatagatatttacatgtacactctcacattacaccaactgttgaaccactctatatgggagcacattcttcttatttctccttcatctctaggcttctttttctatataaacaagtttgttcacagttcacgggcaagggaagggatgctttaaaaacttttatccacttcctataacaacctacaaggcctcgtatttataagtttgaggggctatcttcagctttttgatagtttttggcctgcaacactgatattttccaggctgctacaaaaatcctgaatttctttttccttttaacttcttcgtaattaaa

SEQ ID NO: 1961 - DNA, 564 bp, Gossypium hirsutum
  Clone ID: LIB3825-008-Q1-N6-B10
gaatccaatactcaaatgccgaaagaaattttattatataaaggctataaaagcctaagcatctcaacttacaacagcaagctattttggatacagtggaaatataaaagcttccccttggacaaagatcatagtgcacaaactaaatacgacaaaataaataatcttacctgatattggttgatactttttggattcaatgccactagcatagctatatcataataaaacttggttccaaagcaagtttacttcattctttgccgtcagcagcacgaagtgacccgagctggaccggtgcttgggttcctaccaccttagatgatccgtaaacagatagatcaatgccttgagccttctctttctcaatctgttccttgatccagaagtatgtaattctcagcccatccttcaacctcattgtaggggcccaaccaagtttttctttgatcaatgtattgtctgaattacgaccacggacaccctctggaccggggatatggtggattggaagctttttatcttcaaagctaagcacaatctccgccatctcgttcatgctac

SEQ ID NO: 1962 - DNA, 543 bp, Gossypium hirsutum
  Clone ID: LIB3825-008-Q1-N6-B11
aatcaacaaccgttaatcaagttaaacgaatcgacaatacacgggttaaacataatcctaatccttaattaaaggtataataaaatagagatcaaaccctacccatgctttaaaagaaggaacctaggctccatgcaaacattattagttagctaaaatggatctaaagaaacattggctgcttatttaattaagactaaaggctgaactactgaatttcagctgagacatgtgagactactgtgtgggaattttaggcgtgaacttattatggcaatcgccaaccttacctttgcgaaaataaaaaacggtttgaatattcagatcccctaggcctcaacgacgtgtcccatttttattcacttgcaagtggctcaagaactcaaaactacacatttttataatcacttcaggttcccctggtggccagacctttagccgataaaggacaaaaaataatactctgccaatctcttaagagacaaaacaatatctccattgattccttcatattacaagagcataaactccaccggatgttcc

SEQ ID NO: 1963 - DNA, 548 bp, Gossypium hirsutum
  Clone ID: LIB3825-008-Q1-N6-B12
aaatagtaaaactagctatccaactcagctgaattgtttgatacatgaatttaatagccaataaacgagtctaatcaaacaaacatgagcagttcattttcttttttaaatcgcgaatcgattttgagcttcgaaaacgaaaattgatcgagcgtgagccaaactcaagtctcaaactttgaatgaaaagctcatagtttcatacagtttgaatacagttcggctcaaccccagataacatccttaatactaaaaactaacgtgcatattttggcatttcaataaattctaagatagttgcctctagaagattacgttcaacaaataagacagcaaccagtttaggaagttctttagagctgacaaaccttgcattgtgtgtaaagatatccgctttagtccttgtatttcattgcttctttctcaaaaccaatagtcggaaactgttttgcgtactcctccacttcttgtcggagcttagcgatttcggtttgaaagtatgtatccgactgtaaggttgctacaaaatccttcaactttgttcctta

SEQ ID NO: 1964 - DNA, 553 bp, Gossypium hirsutum
  Clone ID: LIB3825-008-Q1-N6-B2
aatcaaacaaaaaactacttctgattcttattatatatcttgcaatcaatctttttaataaaaaaaatcattcaatgatctaacggaaaattcccaaaatgaagactttctggcctaaacgaaatatagaccaaagcattacaatttacaagccactcaatgccaacaataatataatatatatataccagattgattaaagaaaaaaaaaagctttccggaggcaaccgaactgaactcgcaacgacacgggccgataaatgtagacttgataattcatatcatccaaattagaaacacttccggtgaacgatagccggacctgattcatcgtactcagccttggaaatccacatctgctggaaggtgctaagagaagctaaaatggaacctccaatccaaacactgtattttctctcaggaggtgcaaccaccttgatcttcatgctgctaggtgcaagtgcagtgatttccttgctcatcctatcagcaataccagggaacatggttgttccaccactcagcactatgtttccatacagatcttttctga

SEQ ID NO: 1965 - DNA, 576 bp, Gossypium hirsutum
  Clone ID: LIB3825-008-Q1-N6-B3
caaatagaaccttattttattttattttttaaattagttttcattcttttggccctttttagaaaaccaaaatattgcacaccataaccataatacaatataccaaaattggtttctcatattgtacatgtaaatccctctccaacccatgatgaaaggtggaaggaaaaaatttatgcaaaatgtgaagtgagcaaaataggataactccggggaccaaagattaaaaagttaaaatgcagctattttggtggtgaagtttttggttgaagacaagatttcattaattatcatctgcaatcagcaccaacagcttcatggattgatttgaaaccatccctttctaaacactcagcaagttcagcctttatttggggaattaaggcagggcctccatatgcaaatgctgtataaagctgaacgagcgttgctccagctcgtatttttttgtatgcatcctcaccactgctaatacctccacagcctattaaagggatctttccccttgttaggacatacatctccttcaagatgttggttgacaaattaaaaagaggctttccgcttaagccacca

SEQ ID NO: 1966 - DNA, 511 bp, Gossypium hirsutum
  Clone ID: LIB3825-008-Q1-N6-B4
ccaaggtgcaggggacacacgctcgtggtcaggccgtatggctcacacgaccaagtgacacacccgtgttctagacaatgtggtatttgaagtagggcacatggccgtgtccctagcccgtgtaactctttaacttgtaatacatttaaatttaggggtcacgcggccaagccacacatccgtgtgccaagccgtgtgatcaattttgagcattctgttttgaaattttaagatgtaggggaaacacagccagaacgcacgcccatgtgctaggcatgactgaaacgcacgcctgtgtctctgtccatgtggacaaaataatgtcatttccaagccttatttttcacccaatttcaccttccaccgaaaagtccaagggatagtgtgatgtagctctgaccaacttccaaactttacgagcctccgagtactttccggaggatgtaacagagaagatccccagtatcccactagctgaaacaccgcacgaagatttccatttttggagcgt

SEQ ID NO: 1967 - DNA, 538 bp, Gossypium hirsutum
  Clone ID: LIB3825-008-Q1-N6-B5
gagcaataggagattattaattagaaattacgtaaaactcagttattacatacaactactatatcattagataactcgaacacaatttttaaacctacaaatgatgggagaacactgctgaaggaagcatttattacaagccagaggaaatacaaacatgacgcagtacttaagtaacataactacacgaacactcttgagagagatgattgattgttaggtcgtgacttaaattatatggaggaagcagttggacatgggggaatgcatatatcagtaatgccttccagcatcatcactacagtcttgatggaaggacgaagtgctggttcatcttggatacaccaaagtgccaccatcaccattctttccaagcttttcttatctacttcttcaccaagcacaagcttatccaactttttttcaaccagacatttatacaccaaaatcgacagaatgatctcctctgggtttgatacagtggtgtccaagtttcgtctgcaaaacacagtttccaatagcacaattccgtaactgt

SEQ ID NO: 1968 - DNA, 562 bp, Gossypium hirsutum
  Clone ID: LIB3825-008-Q1-N6-B6
agaacaggcgaaaagactaaattaagacttcacaaatcatccaaaacttagagcaatcaaagtacatcaacgagaactatgagaaacaataaagcagataatgtaacctgtcaacaatcctatatgtttatgctttaacacaaataaacttagtcgaagagactgaatcccatatcgtcatcagactcttcttcaggttcgggtttcttttcctcctcggcaggggcagcagcaggagcagcaccaccaccagcagcagcaacaggggcagcggcaacagcaaacttacttggatccgccaagtactccttcactttatcagcctgagggaaggaatactcagttgcgacagcaacggccaatatgttcttgtagccattgatgaacatgtgtggtgcagcagccagggttgggtacgagatggcgagagacaatgccgtaaccatggagacaccagtagcgaatttctcaatcaggtcatcctcggtaaggtcaagcacctcagggctaaagactgacccattgtcataaacagacaagacaacaagaccgtatgagaatg

SEQ ID NO: 1969 - DNA, 568 bp, Gossypium hirsutum
  Clone ID: LIB3825-008-Q1-N6-B7
gacaaaggatttaatttcttggttttgtaaattaaagtacaatattgacccaatggcgcttcatttctagttttccctttagtttcatcaatccaatggctttggacattgatgccattttcttctatgctatgtacaccaatctactcttgggaaaagttgggtcatttaatggatttttatctacaacacacccaccccagcacggccattactcttatctttgtttcaaattttcagacaacaactaagcctatcactccaacacaagttgcttatgacgatttaagtcatttaggtagctggttcgactgtaatcttgcaaatccaagctgtctgcaattattcctctctcaccacaatatttcagctccccctctaccggactctctttgttcttcagcaactccacaacctgaaaattgcaaagaatttagcggttcctgccatgttccaaatggaaaacaaagggaacaaaaggagatgctttcgaattcgtttcgtacccttatcatggttggacgctgactggcagagtgattaatgcacatggaagctgttatcattg

SEQ ID NO: 1970 - DNA, 515 bp, Gossypium hirsutum
  Clone ID: LIB3825-008-Q1-N6-B8
agtcaagttagtctcaatctgtatttatagttatacgtgtcattttacatgttttgcaacatattagaattaaactactcaatttgttagtaaaaggaccgaattgcactccacctttaaatacaggaattattggtattcttttacctatgagaaaagaaacatcacctgaactggacacgatttgccattggaacttgaatgcactaattactagaaaatgaaaatggattaggctaaactttagacttgaaatgacatgctcattctaaaacagaaaccacgtgttccgcctgctacaaatcacctggaaacattaacaattaaaagcactaccatactctttctaatttcaccaagcttaatccattacattacaaaaatcaataccatttaaagcttgtgcctgcctggactggacatttacctttcaaaactgtcaaataatctccatagtatgcatgaatatgaattttgacaaaaaaagactatgtcaacattattaatgcatatta

SEQ ID NO: 1971 - DNA, 477 bp, Gossypium hirsutum
  Clone ID: LIB3825-008-Q1-N6-B9
ataaaagagttaaaagaaaaagaaaaaaggcccgagggaaaaagaaaagaacaacggaaaaagggggccgggcagcctaaacaaaaaaagagagggcccccggaggggacaaaaggggggaaaaaaggggggagccccccgggggggcaaaagggggggaccttggaaggaaccccgggggcggccccggggggaaaaagggacccggaccccaggggcccgccccgccacggggacccgaaaaaaccccccccacaatggaagggggcccgggcggcctaaaggagaaagccgacccccaccccccccgggggtgggccgggggccaaccaaaccacagagggggggggggggaacccaaaaaaacaaaaacgtgattgggggaaaaaaaacccaaaagggaattccccttggaggaagaaagaagggacccccattttcgggcccaagggggggagccaccccccaaactccacg

SEQ ID NO: 1972 - DNA, 463 bp, Gossypium hirsutum
  Clone ID: LIB3825-008-Q1-N6-C1
aattcaaaatcccccatacaacctggtttaaataaaaaaaaaccattttttttgagctgtactcaccttaaaccttaactgtcactagtccatctatgggatggtttatgaactcctaatttttttggttcatgctgaaacatttgggttttttattcgaatatgctccgaaccgtccacaccctgggattctcacctttatcttacattctgatgattggttttgggagtccatagcttaaactgcccctcctgaattgtacatgtcgagtaatccgataggagcaaaccgaaaatcctcgctgaatgccctgataggaaaaacagtaaagacttcacatttcaaatgttctaaggccacttgaaattttgcattttttgacattgtcttcagggaacctgaaggcatgcatatactgcacaatgtcctctccaattctcacctgcaaccttttaaagggca

SEQ ID NO: 1973 - DNA, 510 bp, Gossypium hirsutum
  Clone ID: LIB3825-008-Q1-N6-C10
aacaaatcaacattcataaattagcaatataattgttttgatcacacaacacgaaacaataaccaaagcataaataagaacacactactcgaaaacaagagttgagaggtatattttttgaagacatagtaagatactgaactgaaatctacaacacttaagacacaagaagcaatttaaggttatacagtatcaagttctttgccaagcttgccaccaagcttgccacatgcaagttttgcatctcttcagttggaaaagaagggaagagaaaatgataatagataaactagcaagaccagagggatgaaagaggcttccctttctgacaagtcacgacatgttccaatacgatctcctccacttgtttttccacatcttctatgcactgggaagcatctatcatcttccatgaagaatcttcaagaagcttatagtgttgtgcaactttcttctgaaactcgagctgctcgtatctctcaccttcgtagcctcctctttctgcagctt

SEQ ID NO: 1974 - DNA, 528 bp, Gossypium hirsutum
  Clone ID: LIB3825-008-Q1-N6-C11
acaaaaacgtcactttcatctaaaatccaatggtacaataccctattgcaagacttttaacatatatgaatgccaaataccttacagctctatcatcttaaacatggatgttgcttgagttgttctaagtgccaactacttaaaaccgtttggcttattggccattgcaaatccaagaataggatggacgctttacataaatgtaaaagatcccactttcatttaattgcctatgataactgaaattagaagtaaatgaagggcagtgtcaactacctgaaaattgatgcttactgctaggtagtctcattgcaccattccaaggatgattgttgtttttgtaaaatagactcttgctgaaactgttattgtcacattacagttcaagcagcagagcagcctgcagggtatcagtgtgcaaaagtatcatttggcctttcatacaaaagtttttgatccagatcaaggcaccaaatatggatgcatcatgcacaccaaaaaagaacttcattgcatactttgcttggc

SEQ ID NO: 1975 - DNA, 581 bp, Gossypium hirsutum
  Clone ID: LIB3825-008-Q1-N6-C2
gagaaatcaacatgcttatataataataataataataataataataaagaaaccaccacttgaaataaataaataaaaacctaaaacccatcctccctaagaagaaaaacggtcaaaagaaaaacatatccatcataaaatgacttatggattcttagaaaaccctacaccgcttgcctgcaacccccccccccaaccccgccttggattattcactttatatccccttgaagatggtcccatggtaccgtaaaatctataataaaattctaaagccagtaaaaaaccaccaagcattcattatattttacaagaccacaaacacatccccaaggggattcatagaaaatgtcagcaaccgtttgacaaaaagttcttcactgttttgggtatcctgaaccatcttctgaaagaaggccgttcgagtgaggaattggattggcttctttgatcaaatcaccatttgttgttgttatatctttcttttcatctccaggcttttcttcccatacctgcttttgcaactgatgtttagcctttttctcctgaattgctttctggcgaatctcgtaaaattcgaa

SEQ ID NO: 1976 - DNA, 498 bp, Gossypium hirsutum
  Clone ID: LIB3825-008-Q1-N6-C3
ctctaattatccccaacttttatgggttaaaaaaacggcccgggctaacactgaacattacaacaggaccaaacttttttttattggggccaacagtccgaacttgaaaaaaaaaaaaggggaagcaaacaaacaacaaacacagcctcaggggggtggcaaagcacaaaaaggcgcccctttcattaaatgggaccgataataggggtcatccgggggccccccgggggggctccttttagtcccagcattgttaggccccccacttgggaagttttggtttcccgttgacccgaaagcaccccctgtttttccgccaaaccccatactggggagggaattttgcctgcctgtataaaacccactacctgggggggggtccccacggttgtaatgtccaccggtccccccataaccaccagaatcccctttgttgtccccagctgggggggagccagtcccaccaataccaccaccaccagtttggccagccggggc

SEQ ID NO: 1977 - DNA, 576 bp, Gossypium hirsutum
  Clone ID: LIB3825-008-Q1-N6-C4
ggaaactgattaataagtatctttgatcactgattataaaacaaagtagcaaatccaactttcagccatggttaaacataatagagcaacgacggaaatatttacaagcaacacaacactatctttacgtaatggaggctgagagagctagtgactccatgtttccaaccatctttatataaagttatacctaacacagtaatgggtgtatatttgaagaaaactgtcaccccattccatgataaggtatttttatgccgcctcggcaaagccaactctctctttaccgaaatcgaacacggtgtggtagcggcccatgaaaacatctcccaaaatccagaggggtccacgaggaggaggaacatccaaagcagtaaagccactgatgcactgagcttgaggaccttcacccaccttgagaatatactcttcaggggaaaggtcgaaaacttcgtcaccaatagtgaaggaaacagttggcatggacgatagacttccacattcaacagcagattctcccatcggactcggcatacggtcacatagctgattgacgtagttcaatatgatgtcttg

SEQ ID NO: 1978 - DNA, 510 bp, Gossypium hirsutum
  Clone ID: LIB3825-008-Q1-N6-C5
gaaacaatgattgggagatcttttttagaaaaggaagaaaaaaaagaacaattacagtttaattaacaagttgcaagcacaaaatactggcgcagaggaatgatgggaagtacatgtttacaacaccccctaactgggaacttgtcaaactactgaatggggtgcgaaacaaagctaaggcaactaaaagtatagtaggaactctacctgcctagtcatcacttatttcaacgttacctcccttaaaatgcaagtgctttttttttttttggaaatttgtcaagccctttccactccctgtcacaccaaccttaccttgaggatcatccggtgatttgaaaatgctctcacccttaccccccgaaaaaaaaccaacctttttagtcttgcctttggttgtctgaaactgctgccaagcattctgccgcttattttgtgccacttcaagttgttcatgtcgcatttttgacttgaaagcatgtatcttcttccgtttggcagctttcacat

SEQ ID NO: 1979 - DNA, 549 bp, Gossypium hirsutum
  Clone ID: LIB3825-008-Q1-N6-C6
aagttgaattttccattttaattgtacaaaatttttatgatatacacaataattgactcccaaacatcaacactacaaagaataattaattttttttttaatttttgttttatctcttaaaccaaattaaaattttaaaccttccaaaatcaaaatgagaatgccgaggcaactcacttcttcatccaccgagtcaacccagatgcaccctgtccacgactccaaaactcgcccaaaaacgtcttggccgcatccaaactagggaaataagtaggctccaagaatatctgactcaacgagtcacccgagtcagaactcgtcacgactcggttccctttagcttccaagctccccataaccaccaccagcacttgcttgtacccataaaagaaccgtttcaaggctccttcgatggcttgcaaggcttgtaccaaaaacaccttattaccctcctccttctctgcgtacagtttcatcgcggcttcttgtatcctgggtccacctttagggtccacttccacgcccaaaataaacggaaccttatgcttc

SEQ ID NO: 1980 - DNA, 495 bp, Gossypium hirsutum
  Clone ID: LIB3825-008-Q1-N6-C7
actcaaaattccctttcggaacttaaaataactggatttcctttgttttccctaaaataatagacatcaaaattgcagaaactggcaaaaatttgcagaaattataactaatcaggggaagtaaaatctacagcagagtcctttaaggatttccgagcccgccaataaatagcagcagcagtttctgttgttcccaacttagtttccagggaatgggaatctttccataagctaggggcttgggcataagttgcaagggcagcttcgtacaactttcgggtatttactaaaaaatcctcgttgccaaaaaaagcaagatttgactctaattcaatgcaatttttgtataatgcaagacctggatgaggtagagccaggaatcgcttataaaccccttttgcatgtttaaacccatccttttgaaagatgaaattaactacagctgaagaaaaagagaaccccttttcactgccaccatatttagcgactggtttg

SEQ ID NO: 1981 - DNA, 559 bp, Gossypium hirsutum
  Clone ID: LIB3825-008-Q1-N6-C8
gaaggaaacttttgattcaaagcattaagtattagcgggacaaaatgcgcaatcagatggaatctttacaagactcatcaactgttattaatttcaaggccttgaataatagaccgggatagtttacctgccttttaacttgtaaactgcagttgcttcttccgaataccaaacttcaggacactgtcctcccatagcaaatggatgaaatatacagatttttcaaccatttatcctttacatgggtactaggaaaagcagatgtacgcaaagtttcttgcattacatcttgtgattttctcttggacgcactaagtatgaatgcagcttggtcctctgtagcagctgctgcggtaatccgatatcctttttcccatcttctatgaatcccctcacttggataaaggaaatcgagttcaacaacctgagtaggatagcctgcattacgggacatgacaatgccccatttgctgcctgcagcggtcattgaggtcacagagaagccttctttccacttcttattaatccatttgaaaggaaatacgtcactaactttgta

SEQ ID NO: 1982 - DNA, 547 bp, Gossypium hirsutum
  Clone ID: LIB3825-008-Q1-N6-C9
actacaaaacattccattgaaaaacatgctaaaaggacaatatgtacaacaaaaccatgataatgtaagaagcaacaggaaaatcaaaaggacatgtgtttctttctaagctgtctaatgaacaaaccaacaacttgatcttattcataagagggaaaaaaaaaacaatactatttcttgcagaacaaaagatggtggtatatgcttcaaaggaagacaagttttagatttacagtcgccaaaaacgcagcccaagccaaacaaggcataaccgagttaccagcaatcggattcacctttccaaaatctcttgaacacccgaccaaggtcccaaccatcgccaaactcacaagcaacccagcccagctagctcccatccaaagcacagtcggatgccaagccatactcaatcctaagtaacccaaataaagagacaaagccgtcggtttaacgtggaacccaccttcaacccaaacaaaccaagccgacagccccatcacgaagctcgaagccaagcaacctgtatgtaaaagccacaaaggaggga

SEQ ID NO: 1983 - DNA, 570 bp, Gossypium hirsutum
  Clone ID: LIB3825-008-Q1-N6-D1
acacttcgttccgaaaaagaatctaatttataattaaaagttcatggttacgagaaatagataacaaaaccatctgttcatatacaatcagaacagtttttcttctttaaagtacagagacggtctcctctcgtcccgcaaggcttcgccgattattcaatctccatggatggtgtatcgctcccatttcttcgttggatcatatatctcccatcttgaagcagggaagatgtgcttgttcttttcgtaccaatgcctctcgactactttaccggcatgggactcgtccttctcgattgtagcatcggctatcgttcgcacatcttcatgcacatcgaaatggaaaagcggtccacttttgcccctcgccttgttaataatcagctcgtagaagctatgttgatgaggaataataagatcttctttaacataaagcagattttccacagaagttgtccgaatctctctaaactctggtgcaagttgctgctgaactgctcgaaggaattctcctatggtatcacccttgcgtacctggatcactcgtctatggcctgctccatcccagta

SEQ ID NO: 1984 - DNA, 526 bp, Gossypium hirsutum
  Clone ID: LIB3825-008-Q1-N6-D10
gcaagatatatatatatctatttcctactagttttactgcacaacatgattttactcctggaattgacaagtacaatatacagtgcccaacttttaacacctacaccatgcttcttgtaggaagcatcagatgatattacgcgaagaaaaatggagaagataacttcaaatctgctttgggtgcttaacgatcaccaccggacatttaacatgcttagcacagtgatcactcacacttcccagaattgcccttttgaagaaaccataatcatggcatcccatcaccaacgtatcagctttgattttgctcactatgttacatatttcatccttggcatctccactccccacgattctctccacatttattttggggggggattttctgcaaatagcttcggctcttctcatcactgtattcaccatgtcactgccgtatttttccaaggctacgatcacatcggtggaaaacatataccttgaagcgtcgagggaagagtaaacagggggtgaaggttttacataa

SEQ ID NO: 1985 - DNA, 539 bp, Gossypium hirsutum
  Clone ID: LIB3825-008-Q1-N6-D11
aatcaacaaccgcaaattaagttaaacgaaacgacaatacaaggtttaaacataatcctaatccttaatcaaaggatagtaaaatagagatcaaaccctacccatgctttaaaaaaaagaaactaggcaccatgcaaacattattagtttcgaaaatggatctaatgaaacattggcttcttatttaattaagacttaaacctgagctacttaatttttgctgagttatttggtctaactgtgtggccattttaggcgtcaaataattcttccaatctccaaccttccctttccgaaaataaatcttgttttgaatctccaaattcccttgcccttcacgatgtatcccacttttattcacttccaagttgcttagattctcaaaactacacatctttataatcttttcaggtacccctttttgctgttcctctgttgagaaaggacaacccataaactctgccaatttcttaagatacaaaacagtatcttcattcatttcttcatatttcaagaacataaacttgtccggatgttcc

SEQ ID NO: 1986 - DNA, 552 bp, Gossypium hirsutum
  Clone ID: LIB3825-008-Q1-N6-D12
gcataaagataaagtaggtacttgcattcaccaaaacatgtcaggcaacagctgtaatcgatgtttttacaacacgaagttaagtccacagttccaagaaaacctctcattctatttacaacatactatctgtccttgcgggcagacgacggaagaaattgatcggtgccgaaggtgtcttgtggcgaaacctgggatgcctcataacataaaacccagcaagaagagcaatcatctgaaaaggtgtgacatacaaaacaatggcagccaccagacataataacacaaatattgtcgtggcacgaggatcccgccagcttaggagtgcctgaagccgctcgccttgtgtagctatgtcaccaacaacagtctgaattcgccctgcgacactccttaaacgatcatacctcatccgaactatatccgagcttttcgatgcaggaaaggtctcgaattcttcatctagctcatcaggagaaactgcatcggcacaagaaagactagtgttcatatgaggagggtaccttggtcgataacgatagttccaaaccc

SEQ ID NO: 1987 - DNA, 539 bp, Gossypium hirsutum
  Clone ID: LIB3825-008-Q1-N6-D2
acaaatatatgttgtataaacttgtttagataagttgcaagctgttttataaaactgtacaagttacaagaacgggtattcacgcaagttcttaagttcgtgttttgtgtaagtaatctaactatacaagttacaacaaagggaattcatacccatgattattcacaaaggagcttccttgttcattgaaaaacttggattgggggtccatggaattatcatctcccattttcaaatcatgaatgctggaccttttcttgtttttttcattgacggagttgagacgaaaaaagtacttctgtgcatggctcgctacttgagttggcgttcttgaaacgacggcatttcttgatatgctcctccaatctcctttcccatacttttgaagtccaatcaaaaataatctgtgttcttcttcggtccaagggacgcctttccttctttcgctttccctttcctttcctttggatccaacccaaacttggctcctacctgactcgttaacccaactcgctgattccaactcaccctcataactc

SEQ ID NO: 1988 - DNA, 474 bp, Gossypium hirsutum
  Clone ID: LIB3825-008-Q1-N6-D3
aatatataatttttttttttttattgaggggcaggagaaacataaaaaagaaaaaaaaaaaaacccaaattaaggggggaaaaaaaaaaaaaagggggggggggggccggaaaaaaaaaagaaaaaattatgaaaaagggaaaaaagtaaaaaaaggggggaaaaaactaaaaaaaaaaaagggggaaaaaaaaaaaaaggggaaaaaaccaggacaaaaagatattttttttttttaaaaaacccaaaaaaaaaaaaaaaacccccaggggggaaagggggaaaggagaatgaaaaaaaaagacaccctcccacaggaaaaaaaaagggaaaaaaacaaaaccttgtgcttcccgggcatagggggcacaaaaaagaggaaaacaatgatccttcccaaaaggggggaaaaaaaaaaaaagaaggtccccgaaagttctgggcccctgggatatgcaaaaagggggagggggg

SEQ ID NO: 1989 - DNA, 414 bp, Gossypium hirsutum
  Clone ID: LIB3825-008-Q1-N6-D4
ggaaaaaaggagggaaggaaaggtggaaaggggggggggggggggggggggagggggggaaaaaaggaaaaaagaagggaaggggaaagggggaagagaagaaaaggggaaaaaagggaagaaaaaggaagaaaaaaaaaaaaggggaaaaaaaagggggacaaagggaaaaggaaaaaaaaactaagggaggggaggaaagaaagatcgaagaaaaaaatgaagaaaaggaaaaaagaagggaaaaggaaaatgaagaaaaaaaaaaatggggaaaaaaaaaaccgcccgaggaggaaagggggggaaaaaaaaaaaaaataaaaaaggcggagggggagggaagaaaaaacaaagtacaaagaaggggagcacaggggaagaaaaatcgaaaaaggaaaaagggggggaaaa

SEQ ID NO: 1990 - DNA, 539 bp, Gossypium hirsutum
  Clone ID: LIB3825-008-Q1-N6-D5
gcttaaagaaaaacaactttgacttaaaagtaaaaatgtgatagatagtaccacatcatttctacagattattgcaaaaaacctaccccacacacaattgaagagcaacacaagactagcagtgattaggcacaatattttgtggttataggcaaaggcaagttctaagggatgggagctctcaacttcatttcagttttctcgatgtcaatggcgaaacccttggcatgctgtttccagtaatcagcctgtggattgatccattcaggttcttcaatttccacccttgactgcataattgcttcggttgagatgctgtatttgtcatccctcttcttcactagctctggctcgattttccccaggttcaccccctgtggtgacatcatcaatgctggtgctccaagtggaagtctgtcacctctgtcaacctgccatgtgcaccaaaacttgccataggtttttgcaagattttccagttcaggtttccctatcatttctggtgttctgggattaacccagagccctgattttatctc

SEQ ID NO: 1991 - DNA, 557 bp, Gossypium hirsutum
  Clone ID: LIB3825-008-Q1-N6-D6
ttttttttttttttttttttttttttttttttttttttttttttttttttttttttttttttttttttttttttttttttttttaaaaaccaaaaacccaaaatggatttttggggttttcccaacaaaacaaacccaaattttttaaaacagggaaaaaaaaccccccccggggggggggaaaacagcccaaaccccgggggcaaaaaaaacaaaccccccaaaaaaaagcccccccccgggtcccggggaaaaaaaccattggttttttggttaaaaaaaaaaaaaaaaacggccccgggggcccccccggaaatcccggcccggcccccgggggggccccactttccccaaagggggggcgattaaaagcggggggaaaaaagggcaaaaccggttcccggggaaaaaaggtaacccccccaaaatccccaaaaaaaaaaaacccgaaaaaaaaaagggaaaacccggggggcccaaagggggggcccacccccaataattggggggggccccccggcccctttccaaggggaaaaaccggggggcccacctgt

SEQ ID NO: 1992 - DNA, 533 bp, Gossypium hirsutum
  Clone ID: LIB3825-008-Q1-N6-D7
ggacctaaatatttttaatcatttaatgagaaggccaagccgagaaagcttggttcatggcaaagtatgatatatgttatcatatatacataagatagccttgaaactataattctacaactttttgactagcttcccaaaacaggacataaggagcatcctataaaaatgtaagctgtcaatgaacgagactacatataagacaagactcaaaaatcttctttttttttttggtacaaaagaagccatccttgacctgcaaaataccaatgccaaccgaactaaactcaaggttcgagactacactttataaaagcctattttcatttgagacgtgcatgctatggtactaatgaaagccatcataagtggttttgtttgtgggatatgaacatgctaacaaatgaaactgaatgtagcaaaagggaccccaaaaacatttatgaattggttaaaacaagcaaccttggatttggtagaataatcagtttccaattttaatatctatgtatggaatgataatcgtgtgagga

SEQ ID NO: 1993 - DNA, 478 bp, Gossypium hirsutum
  Clone ID: LIB3825-008-Q1-N6-E1
ggcataaaacactttcacataaaaacccaaactcgaaaacataaacaactgtcatccaaactccaaaacagtaccatatttgaaatttcaaacaaaatttctagtttaaatgggggctttaacagtcattggtgtaaatataaacgccaaaacaactagtatcctattatgccttatcggccttggcagcagtggcagcagcttgtcctttgagcctaccagtcctccttgcagcaataagaccaaccttttgtccagggggagcatcacgtttaactgtactagcatgaccaatgtgttgatggttaccacctccgtggggatgctcaactgggttcatagccacaccacgaaccttaggccagcagttcctcttcactttatacttggggaaagcattaccagccttaagcagaggtttctcagtcctaccacctccagcaacctgcccaattatgggacgacaaccacttggaac

SEQ ID NO: 1994 - DNA, 370 bp, Gossypium hirsutum
  Clone ID: LIB3825-008-Q1-N6-E10
aggggagagttttgacatccatttttcagggtcaaaatacagccctaaattggcccttgcccccattcctttgagaacatgccaccttataaaattttaattttccagcaaacaactttttttttttggggggatttattcatacaaaaaagggggaaaaccaggggtaaaaacaacattaaagggggggggtttgaaataatcaaaccgggatcctcacccatggggacttggtcattaaacggggggggaatcttaaacgattgtcacaaaattccaagggggaaatgtaaaacttggaaagcaaatgaaattccggggcaaaatctttgacccctgcccaaagggatgaatataaaatttttgcccc

SEQ ID NO: 1995 - DNA, 534 bp, Gossypium hirsutum
  Clone ID: LIB3825-008-Q1-N6-E11
aaatgaatgtatgttatcggattaaccaaaactgtaacaaaaaggaccaaaaacgaaaagaatacacatttgtcatacgtaacttactttacagtaatccaacaacacaacttaaatgcaatctgttttccaagcctctcaaatgatgacctaatagcatacaccaaaaaagcagctttgcaagggaatcacgtgaagtgccacaagtttcatcagcagcatcttgaaaatttcccgtgtttactatccctgaatctttcatacaggcatccttgaaaaacctttgtaatatattctgaacaagctgatggatcatttcctccacttgtaccgatgatggttgggataattctgtcaccatgtcagcatccaaggatcgtaaatactctaacaaaccattcatgttttccctgccacactccattcgcacattttcctttttttgagcactcagttcctccccatatcaaataactcagcttgcagcttctcaatatacttcaaagcctccggcgacaaatcctcaaaaaccct

SEQ ID NO: 1996 - DNA, 409 bp, Gossypium hirsutum
  Clone ID: LIB3825-008-Q1-N6-E12
ggtgattaattttcttgtaattaatttttcccaaatttgtaagaacattggttgttccatatctttggttgaatatattacatgttggttacttgttgcgaagagaatgctttctcttgggggggggggggggatttaaatgaaaccaaagaaatagaaatcgcgccagccgtgatctccaccattggctgcaatgtcacaactgggctcaaaaagaacacgactgcaatcgcggaactctgccacaccttcagctgtgcaaacgctccttccgggtcgtgcttaaaaagtcgagcaagcaaagcactgtgctgcgtgttcaaaaccccatcaccgccgcccaggaaagccgccatgagaagagggtttattacgccaagcactccactagttgcaccccacgcgttcg

SEQ ID NO: 1997 - DNA, 487 bp, Gossypium hirsutum
  Clone ID: LIB3825-008-Q1-N6-E2
attaaatacccatagtttatattttgtttttttacacataccgttactatttgggcgtggggcaacctcctagtatccttgaaactgacttgcctgaggggatacatacagtaggaaatttttaaaactgaaaactatagccagctcttgcttgcaccaagactcaaaacacccacaaaagggtttatttaaacctaaaaagaatcgaaaagggaagcttggggaaggtctgggcggcacatataaaccattcacaatgggaccaccaaccttatggaaggggaggccagtcatgtttgaggagcaaagtttacttgcaaggaacacaaagcgtgaaacatcctcactggggtaacaaggggggaaaattggaacttgaactccaaactgaccccataactttttatgagaccctgctggaatccaccggagtacatatgggcccgggtgccactgcaatgagacgtacaccaaaaaataccttttg

SEQ ID NO: 1998 - DNA, 547 bp, Gossypium hirsutum
  Clone ID: LIB3825-008-Q1-N6-E3
aaaaaaaaatcctgctggcaagttcctacgaggcaagccagaattacattcatcaatgtatagatatgcactcaaataccatatttgaatgaaaccaaacgtgtagcatcagttttaaacaagctcaaattatgggtatggcacgattgaaataaggggaaaataaataattaaaaagctgaggggaagtctttgtatgggttgccaagtgcaactacatttccaggccgagaaaaacaacctggtaattaccaagagtattggacttgaaaccagcagcacaataatcaaaatagtattcccatgtccggatgaacttgtcattgaatcccaaggcatggattttgctctgtttctccaagaaataatttctccaatatctaagcgtttggtagtaatgaagtccgatgttttccacatgctccacacagagtttggacgcagcattcatggctgttgttatcctagccagagaaggtaagcatccaccagggaagatgtattccttgatgaaatccgagcttcgcctgtattcattgtaccgttc

SEQ ID NO: 1999 - DNA, 558 bp, Gossypium hirsutum
  Clone ID: LIB3825-008-Q1-N6-E4
gaaaacgaaaagaaaatgaccaggaatttatttgaatacagagagctgcttacaagttacaatatacaaccacatagagcagcacaaggacataagcatagaagcagaacagagcaacaaaattgatagattactttctagcatatcagccgactgctacaataggaaacttcaacccacagtcttgtttccaccttcttgtgtcttactcttgccaccttcttgtgtcttactcttgccaccttcttgtgtcttactcttgccaccttcctgttctctgcctccctcagagatccttcctcctccttggctcctattctggatcttctgctccatactcactgccgtgtccggcaagggccacttcactgggtctagcccctgagacatagagcccctgcttccacgaatataagtagcaatccacgacagcgatgacagtccagtgatcccaaatgctccggaggtcaagaatccggctatggaacccgcaatgaggaaagcagcaggtaccaaaacagggctgaaaataaggaaaagtggggcggcaatagcaag

SEQ ID NO: 2000 - DNA, 553 bp, Gossypium hirsutum
  Clone ID: LIB3825-008-Q1-N6-E6
aagcaataagcacacaaataatttgcgaactttttattaaggaaagtagagaccctagtggctgcttattttatagctataatgctcaaccaccataaggatacatagactgactcatgactcaaacaagatagttaatctgaaacagagtcccaccatgtcaatggtggtcactgatctccccaccattgatggacataaacaccagttcctctaagggacttgaagagatccatccaatctctgttcaccgcttggttggaacagtgcaggaatagctcatcaatggagcatatggttccactttcaaacaaatctgagagaattttcaactccacttcccctgcattcatcttcagaaccacaaagtctgcattttgcactgtttctttaatccaaagaaggaagtcgaatccttcgtcttcaacatacggatcggaatcatcagaatcaatggaagcctcagaattggatgtagctctatttccagcaaggctaggataataaacaaagttgataccaggcttgttgacataagatagcatcactgaac

SEQ ID NO: 2001 - DNA, 567 bp, Gossypium hirsutum
  unsure (1)..(567): unsure at all n locations; Clone ID: LIB3825-008-Q1-N6-E7
agattcaaaggtaaaacagcttcgatacaggaagttgaagacagctacaggagccacagtacaacccagatggagtcttacgctaataaaactcggacgataaagagccggccgcggcccttaatatcaactaagtctactatataatgtataaatatgtaatacaagcatcagggcgtatgaatgtccctgtttaacttcgcagctgtcgccatggtatccgccactcctccagccgtggctatcatgtcagccttgtttctttgctccgcccctctcacctcttctgcatcttcatttgtcaccgctttaaccgtaggcagcttttccgaagcatccgataaaacatctgatatagtgatcttattatgaccataagacgcacggtcgttgaaagtggcagcagcttgagctctagtgccaagaccactatgttgagttagcctgctgctagcagccctcgcttcagccactcgtattgcagcggcatcaccttggtcaaccggtttgtcaccaacagagaggactgttgcctncaaagcttctccaatggtgatgccactttga

SEQ ID NO: 2002 - DNA, 536 bp, Gossypium hirsutum
  Clone ID: LIB3825-008-Q1-N6-E9
aaactgttgactatttactcgttcgggataatctttacataaaagagagtaccggtagaactgcttccgcttctcggtttttgttattggtttccttggatggtttgtaacggtgccgcagcttgaatccgtggggtcattgacgactgacttgaggagaatgagaccaaaagtttaatagcaaagcatctctccggagttcacccactgcacaaaactatctgagaattcctcgagaacgttggactgttgtgaattaccaaaagatagctcagttccggtttgctgccttcccttcatactcgatccacattcgctactggatggagttgcttccccgattacaccgttaacaacattctccaatgaaagaccagcgaacgaagagcttgtaagaactgatgacccatcaaatggttcatcctcgcaagaatttccggacgatgaaatacagtccaggtcgacaaagttagagtaattgaagccatccccacgttcagagaagaaaattcgaccggtttcaagacagcggtctc

SEQ ID NO: 2003 - DNA, 574 bp, Gossypium hirsutum
  Clone ID: LIB3825-008-Q1-N6-F1
aacaaggaaaataatgataataacaatagtaatagtaaaacacagaacaaggaagctccctgctaaatgcttgctaaactaataatcatcaatgcggttgctatttaaaccgcatttctatttctggtggaattaacaccgtagatggtgttaccgacttcggcagcttggcattgtttcctcatctctatcaccttcttgtgagagttggagtgcaatgatggaacaaatgtaggacttgcagcaggacggtattctggaaagaggcggccagacctgtagcgaaccccacatgcattacaaagggtctttggacccttgggtccttctctccattgtggagtttttgtaacttcacagtgcgtacatttcctaacaacagcagtctcttcggaggaggatttgtcgatctcacaggaacctgaaagccatgtcaggttctttttcttctatctctttttggcagatttctctgttaaatggctttctgattctgattcagaaccaaccaaggaagtagatcctgtggaggatatgaaaggcaatgtgaactgcaggttaaaggtagatgctc

SEQ ID NO: 2004 - DNA, 309 bp, Gossypium hirsutum
  Clone ID: LIB3825-008-Q1-N6-F10
tttttttttttttttttttttttttttttttttttttttttttgggttgtttcttttaattttatacgggaactggcatgggagccaaactaacttatagggaggggaatgaaagcaaggcccggccaaggcaagagcaaagcggggagggaaaatttcatccttttagaggacaacaaaacaaaaaaggccgagcgcgaaggagtgagaagcaaagcgcgcctaaagaaagaagggaacaaaaaaaaaagaagggggaggagcgcccgagaaaaatgaaggaaaaaaaacgggccagaccaactaagt

SEQ ID NO: 2005 - DNA, 563 bp, Gossypium hirsutum
  Clone ID: LIB3825-008-Q1-N6-F2
ccgtatcatatttcgtgtcacatccaaatattacacggtacggacaaatagtagccgttaaaacaatttcttaatttaaaaaaaaaaataaccgaagcataagcaaaaaaataaacataattaatatagtttctaaaaggctaaataataatgggaaacccgccaggattcctagttataaaccaacagaaattttttgtctgatttcgctcccttttttttcaagtctatagtcagaccagcttctctaagccaacatctcctaaatttacaccaaaatccctgaaatcaacactatatgccttggctgcaaaaaggacgtcatgcgattcataccaatccattatacttctgaagctcccccttgagaatttctgcacgtgtgctggtcaccgctggggaggttctgaaccagttacacctgatgtggtacttggtccagcaccattttcagctggaggagaggtgccccattttccttccgactccaatggctcaacaatttggaccccaccatctgttaatcccaaagcaaattgatttgggtcggatgggtgtgccgc

SEQ ID NO: 2006 - DNA, 573 bp, Gossypium hirsutum
  Clone ID: LIB3825-008-Q1-N6-F3
aatacattccaaacatggttttatcatgttaaaaaccatataactcattatacagaactgatacttatgtattagtaagagtccagtaaccaacaaatttatttccccacattatgttttcattataaaacagtgactaaacaacaaatcagaagatgcatggaggagatcatattacaacttggaagatggtttcttggaactccgcctagctatgaattcttgcatcttcttaaactgctccggtgtcattccatcgtagtattcatgacccctctccttttctatggcaagaccctggcgaagatccaatttgtacccatcattgatcacagacttgtacctgagaaccaagtcttgactgttcttcataattgctcctgcaagttgtcgagctttattcaacacttcattttggtcaacaacataattgacaaaccccaatttctcagcttcctctgctgacaaaggcatggctgccaacgacacttcgcgagccttgtttggtcctatgaagcgtgcaagcttctgggataaaccccatgaaggaaatatcccaaatctggcgtgagt

SEQ ID NO: 2007 - DNA, 564 bp, Gossypium hirsutum
  Clone ID: LIB3825-008-Q1-N6-F4
acacaaaatcttgattcctttttggtctatatttgatctcaccaaactggcaaccaaattaactttaccatcctctcaataagcaacataatcaaaacaaacaaagctccaatcctaaatattagattaagatgaacatttacaacaaagcgcacacatatttttcttgcaggaaaattctagccggctaaaaatggcacttttttttttctacttaatgtactgagagagccatctgaaaccatccccatatcccatcttacgcacaatgctgcacataaaaacttcgagtggacgcacattggtgccttccaaattaaccttccctttccctgttgtgaagtttgtcaaccccatatggaaacgtaattcgtcctccgacgctgcgtacggtaggtcgatcttgttccccaagatgaggaatggtacgtctgctagtgattcatccgaaaggagggcatcgagctcctttttcgactctgcgaatcgttccttgtcgtatgcatcaaccaggtacaccacagcatcgacctgcgtcacaattgagattccatagataaaccc

SEQ ID NO: 2008 - DNA, 559 bp, Gossypium hirsutum
  Clone ID: LIB3825-008-Q1-N6-F5
gccgaaagaaatttattatataaaggctataaaagcctaagcatatcaacttacaacagcaagctattttggatacagtggaaatataaaagcttccccttggacaaagatcatagtgcacaaactaaatacgacaaaataaataatcttacctgatattggttgatactttttggattcaatgccactagcatagctatatcataataaaacttggttccaaagcaagtttacttcattctttgccgtcagcagcacgaagtgacccgagctggaccggtgcttgggttcctaccaccttagatgatccgtaaacagatagatcaatgccttgagccttctctttctcaatctgttccttgatccagaagtatgtaattctcagcccatccttcaacctcattgtaggggcccaaccaagtttttctttgatcaatgtattgtctgaattacgaccacggacaccctctggaccggggatatggtggattggaagctttttatcttcaaagctaagcacaatctccgccatctcgttcatgctaaccatctcatcact

SEQ ID NO: 2009 - DNA, 543 bp, Gossypium hirsutum
  Clone ID: LIB3825-008-Q1-N6-F6
aaagaaaaactaaaactcttattgaatatcaatggattacaatttttcttttttttcaaacttgtttttaattacaaaaaaggattggttgccattgccccctattcttaatcccgtcttccccacaaaacactaaaactggcctgaaatcgaccttttcagcatgggcctgccgacttccttaacttactattcaaatactgctccacgcatgtctgatttgtctcgaagatgaatggcattccccttatcttaatcaaacaacccgaatcaaggctcaggctctgcccaggacctacttccttgttatttatcgataccgaacacttgccgagatttttaagatggaatgatccatccccttccaagtcgaaaattgcctgccgccttgacactttattagcacacccttctcttcccaagtcaatgtcaacaacaaaatcttctgttgttctacccaacaatatctcaggtttcttaatataatgtttggaatggcgggcataccaaatggcaaaagctccatgggatgcaatggccctt

SEQ ID NO: 2010 - DNA, 552 bp, Gossypium hirsutum
  Clone ID: LIB3825-008-Q1-N6-F7
ataggaataaaactagtacataccatgatgtaaaaaagtacaagagaaacagaagagcaaatttcagtccactcagatgttgaacatattttgaatagaccaacaaaatcagttatccactgtaacatacttgagaactctatagggagttgatacacataaagcatgaaaatgctgaagcctgcataaaactggagagccttccacaacctgaatagtcctagaaaattgctagtcaaagaccaatccactagcccaacacagcttccaatgaaaaatgtcaaagaaatccacgagggatggctaattcccacaaccagctgaatagcaggtagaagcaaacaggaagcaactttaagatgggaacctttcaaagttcaagccatgctttccaatctctttgtcccagttaagcacttggaaaacaatatccccttctcccggaaagtaaccattgttgtctcttactcttttcgctcgatgtaggagatgaaggaagcattgacaacctaaggttatctcctattcaaccagcagagggtggaggaataa

SEQ ID NO: 2011 - DNA, 537 bp, Gossypium hirsutum
  Clone ID: LIB3825-008-Q1-N6-F8
atataacataattttatatatgaaatgccaacctcatttttcaccagaaaatcaacatgaaactatggctggttataaaaattacaaaacttgctcatatacaatagtagtctattctattcacaaaatcgtctcacgaatctcatcttgcttttctccttcatactatatccattgtctcaccttgaggaactaactgcctcttatctgtttattaattcatttgcaatgccttgagcttcttttaatagctccaagctttttgcacagtcatcatccgttgttgcagacttcaatttcgaaagcaagtccctgacagcgctaacgaattcttctgaatcctctgtcctttcaccacggaagctagcagtagattttaatacaattgcttgtgtttctagttcttgatcactagatggtgtttcctgcaactgcttttctcctgattttttcctcgctctgctgctttcaatcatttccagtcttgtagccattatcattgctttattgatacacgatgaaggcagctgcgcgagc

SEQ ID NO: 2012 - DNA, 538 bp, Gossypium hirsutum
  Clone ID: LIB3825-008-Q1-N6-F9
gaaatcataaaacgattttgcacaattcttcttggtttaccaaaaaaaagaaaaagaaaaagccaccacttagaaaaaaaatccgtcatacagatctgtatacagcacaaaagcttagcaaatcttaagctgtcaaaggaaccctagagaccaatacttgcaacagattcatccccacactactatcactaatttagtcctctctctatactttgtacagattcaaaaccatgacacactcaacacgcacaaaccagaatattatctcagtaatattatgttctatataaacagattaagtagataaatacacccacataagataccattaggagttaaaaacactaattggcactgattccagaattcttgttaaactttgaagtagcgaggctggcaacatggaactgtggttggtaattgtttgtaggtcggtcaagaactggaggttcattcaagaatgcccaagtgctccttgtccaccacccactttgctttacgatattttccaggcttttttctgtgtccatgtctatga

SEQ ID NO: 2013 - DNA, 569 bp, Gossypium hirsutum
  Clone ID: LIB3825-008-Q1-N6-G1
aacccagaaaaatcaaggtatttacgagaattaagcaaaaaaataatggaaggggtacagcaccgaatggttgaggtgaatggcataaacattcacatagctgaaaaaggtgaaggtccagtcatccttttcctccatggcttccctgagctctggtactcatggcgtcaccaaatcctcgctttatctaacatgggtttccgaaccgttgcccccgatttgagaggctacggcgactcggatattcccgagtcagtcgacagttacacttgtttccacatggtcggcgatctagtggagttgatagacgtgctggatccgcgagaagggaaggtgttcgtggtagggcatgactggggagccatactagcatggtttttgtgtctgtttaggcctgtataaacatgtcaacgacacctctgaagctcatccacagagtaactgggtcgagcacacatcatatactttagtctcagctgccggctgctgacttttaaaagcaacttaggcaaatgagcattggatagataattaggatagtaaaccaagttttttttccaaccaacact

SEQ ID NO: 2014 - DNA, 531 bp, Gossypium hirsutum
  Clone ID: LIB3825-008-Q1-N6-G11
cagaaaaaaagctaacaccatcaccatttataaaacacagataaatccatttaggtttttgtttttcatacttggcctttgaaaccatatgcatgataagcaaaatacatcattaacttggtttagaaacgagaggccgtccacgtcccattgtaaatccccgtgttccatcaggcattctaggtcctggtgggggcttcgatggttctacggcatggcatgaggatgtagttccatggccgtgtccgttggtaccacgatttttctgtctcctccctcgtcgtctgtttctaggttgaaacccgtttttctctttggacaaatgctccccatcctcatcatcaggtatatcttcatgatactcacttgaagcatttttctcctcggttcctgtttgatcagatacctgagcattgatgtttttttcatgagcaggtcccctccaagcttgctttcgctgtccatgcttaccctttcgctcaaaaagcttaacatgcatgccatttctccagtcatgttcatcgttcaaag

SEQ ID NO: 2015 - DNA, 550 bp, Gossypium hirsutum
  Clone ID: LIB3825-008-Q1-N6-G12
gtataacaatcacttctttataacaatcaaaaccttagacaaatatataatgttatagaaaatgttgattgtattcacttgcatccctataatatgacgagatttaaaataaaataaaataaaataaccaatcaatcaaaatgcataacgtagttgcagtaacggctgacatgcaaagtacatgaaagtcgtactaacttttgattgagtagggcaactatatttacttcctaaccttggcctcttgtcctacttactacatcagaaaggtgcactgaaaaagaaccatgtggaactacaatgaagatgcaatgcctctaaaacttgagcctcatttgttccttcaaaataaatcactttaccataagctaagcattgtttaagaagcaaaacatgaaggatctgagagctcataagaagcaaaaatcactgcaaaaaaataaataaataaacatctttagggcctgaaaactacattctttaggtattcacgattcatggactacataagaaaaacactttctatttgtcagaggcttaaatcatacac

SEQ ID NO: 2016 - DNA, 574 bp, Gossypium hirsutum
  Clone ID: LIB3825-008-Q1-N6-G3
actccagaacttggaatccctacacatgtatgtattttacagattacatgaaaggttctttttgattaatttatggagaacctaaagatttaaagaacaaagatctaataaatacaaagtctgtcataagaaaggctaaaaaggggctcaatggagagattacaaaaaggataaaaatggctgctgattaaggttgttaacagcaaaagaattttcaagcatacttaactggggaagtaatgtctttctcttttctgccagcaaggatcatggaaatctggagtcctctgctaaatgcttggttgaagagcaatcgagtttgaaactcggatacgaacgggaaccatgacaagatagctatgggcatgaacaatatcagacccatgatatactcatatccccttgctagctcctttattgagtcccagaactttaagcttttcaacactggcctcattgcttgtccaatgagaagaattgcccatccagtcggcaagaaggcaaggatggcagcaaacaaatccgatattgtgaggccacatactacaaatagcacagtcatgactgacaaaaa

SEQ ID NO: 2017 - DNA, 572 bp, Gossypium hirsutum
  Clone ID: LIB3825-008-Q1-N6-G4
accaaaatgattatttctataaccaaaataactcaacaccaatttaaaaaaagaaagaaaaagaaaaggcaatttttttctcttcttcccctactcgattttgctaattccaatacgcttaacaacagcgtttctaatagcttccgtttgtaaacaaagctcattttgctcaatccccgccatgtaactcctcacttcttttcttatcatctctttcattactgcaaaaaactcggcactgaaaaactgcttctccaccggagctgggaccggtgccgaagcctgtgtggtcacttgggtcgggttgaatccgggtggagaaacaggttcggtaaagtcagaaccgggtaacgagaggctgagtaaagtaggtgggtccgttgccgatgaagctgtttcaacatgttgactcaaagggactaaagaacccgttttgaaagccggtgagggagctggtaaactcgagtcactcaaatcggaccccgatggactacttggattgccggttccgagactggcggatcgtttaagcggctgaggggaatcgtcgttaaaaccttcggtcatcgaca

SEQ ID NO: 2018 - DNA, 537 bp, Gossypium hirsutum
  Clone ID: LIB3825-008-Q1-N6-G5
aaggggggtgctgtaaaccaacttaaatcttaatcgtaacaaagcacagtgcagagttatgatacatattctatagaaacatgagacttgtcataatagacatagtaacacaaatcttagtccaggtatagatcgtagaaaatacggaaatagtacgcagaagtaacttagccaacaacatgtcctcaacagtatctccatttgaaaattgaaattattcccaacaaaacattgtttcattatcagaaccagagtttgtacggggattgcttagtatatatctaggggaaggaaaatcacctcatttcaggccttcccatcccactccgcgtaaaactgtttaaggaattcctccatgaccttatgccttttctcggccctccttagtccagccttagttttcatcaaatcctttaacttaagaagcttctcatggaaatggttcacagtagtctgctcctctttcttcatgtaatgttccttggataagtccaatcgtgactggatagcaggatcgtgaagcactctgtttctgtt

SEQ ID NO: 2019 - DNA, 557 bp, Gossypium hirsutum
  unsure (1)..(557): unsure at all n locations; Clone ID: LIB3825-008-Q1-N6-G6
atataaaattttattgacataacacttanagattatctcacatttttaaatttggacggaatataaattcatagtcaaaatagacctatttgtaaagttagatactaaagtagaccccaacaacatataagtatcaaaacgaaactagctcacaaagcgaaacttcttatgaaagaagataaacaaattgtgctacttgaagggaacaacactggcactggaaaaacattccgtggttgaggacataaaatctcttaagcactgcgtccaggttatgagctactcacagcaacacagatcgctgggaaatagtgtgccaaattaccttttgtatctcttcttggaaccacatggacaaggagcattacggctcatttctccactctttaccatattaaacttggcaagatccaatggtgttgaacccattagcttttgcacctgcaaaagataaaaaaaataaaacgaatgacatttccaatggagaaagagagagatgcataaactaatacttgtcattgatgttttaaactgtgggagaaacattcatccgaact

SEQ ID NO: 2020 - DNA, 415 bp, Gossypium hirsutum
  Clone ID: LIB3825-008-Q1-N6-G7
aattgtcttggtttacctttttagaatacaaccggaccaaaaataattttatttggaacaacaaaaaaaacctgaaaaacaaaaaagatagagaaaacaaacatcgaaccctgagctaaggctttttcaaaaaaaaaaaacacggccggtcccggggggggacccggaaaaaggggcaccgcgggctaccggcgggggagttccccctattgcgaggattgttagaccccggggtagggaaggccagggccccccccggggcgaaagggccctccggttccaagccaaaccccaaaccgagggggaaacataagagctgaaagcctcgggccccctaacggggggggggacccacactgatgtgatgtccacccgctcccgcctttccaccagggaaacctgtggtgccccctgc

SEQ ID NO: 2021 - DNA, 545 bp, Gossypium hirsutum
  Clone ID: LIB3825-008-Q1-N6-G8
aacaaagccaattgtctatttgaatacaaaaaaacataacaatcgtgtccattgtaaaaaccatctaagtccaccagtaaacaaaatatagaaggaactaactagcagcattgcataaaatgggtaacgtaacctcttcaattaattattattttgttgcttagcttacagcttgtcctcgtaatcggagagcggggtcatctgctccttcaatcccttcctcttacggatctcagcaacatggttggctgcctgggaaccaggttccaatggatctgatgacatcatatcccagtggtcaaacacgcattgtgggaaagcctgtcctgaagttgcagccctcagggtgcttgagaatccaaatgactcgataacaggaaggtatgctttgatgttgtatagtggagtaccaggcctctgcatctcctcaaacacatgtcctcgcttctggttaagaacactgtaaataccaccaagtgcttgctctggggcttggatctccaccaagtacactggctcaagcagcctcggcttggcagtcagct

SEQ ID NO: 2022 - DNA, 121 bp, Gossypium hirsutum
  Clone ID: LIB3825-008-Q1-N6-G9
ggggcccggggggcgccccgggaattccgggccgggcccggggggggccccaattttccctaaaggggggcgtataaaagcggggggaaaaaaggggaaaaggggttcccgggggaaaaag

SEQ ID NO: 2023 - DNA, 558 bp, Gossypium hirsutum
  Clone ID: LIB3825-008-Q1-N6-H1
atgagagaagattgtatgaaattgtgatttttcgtcatcttatccctttcctattagaaaatcattgaaaaagaataagaataaaatagaatcacagttttatacaattccttctcaaatttcagatacatatccaatatatggttattatcaaattttcatatatctgtatcattttattgaatttcaaaacttatcaagtgagaccaatctattgtacacatatattgtcatgaaccgccccccaacaaatgcaatatcttgcaatgttttttaacttttctcctgattttccaaaacactctttctcataagggatataactgtagctggctctggagctccaaatactgaactccctgccactatgcaatttgctccagccgatgcagccacatcaatagttgaaggccctaatccgccatcgacctctatatcgagagatggatacttgttccttagcacgcgcaccttatccatcatttctggcatgaacttttgtccaccaaatccaggttccacagtcatcacaagaaccatttccacgggattttcgct

SEQ ID NO: 2024 - DNA, 562 bp, Gossypium hirsutum
  Clone ID: LIB3825-008-Q1-N6-H10
acagtgatcaacatagaatcatttcaggtttatgatatttgacaatatcgtttctcaaaaaatgggggttccttgaaaacagttaaattaatcgtattatatattcaggaacctttgcttgatttgattctcctgttgatttctttctccaattcttcatgtcctcccacatcctccacttccttcggccctagaaacagcccatatggaataccattgaatttttctgaatgatggagctggtgagccgcagcaaccttcctgaagtaaggcacgttggcgatagggcctacggggaatctcttatggacgagaccatcgtggacgaacatgtaagccattccaaacatcgttataccaagcccagcaccgaaacatataccaggtacaaggcctttgttgaagaaaccatacgagagaagagcaattgctgggacggcgttggttatggcgaacacatcgtttagctcgaacggtccttctctgggtcgatggtgtgactcgtgcatatgccataacgatgcgtgccaaagagctctgtgagcccatctagcccaaaact

SEQ ID NO: 2025 - DNA, 545 bp, Gossypium hirsutum
  Clone ID: LIB3825-008-Q1-N6-H11
aaataaaactttaatttgtaattcaaacttacaaatacttattagcttacaataaagaaactggaaaatacagaggaaaaagtacaaatacttaataggattcccgtcacttgttgggtgcctttatgtaaccaacatgggaagagttagaggttttagcaagggttttcaactcattagcgatccaacatttggatgtttccctgtggtaaaagtaccccaaacacttgcaatcagaggtgcatttcctcccacaatcactctcctttatcccttctccttcgttgtactggctcatgaaatggtcaactccttctagcttgtagtagctgaaaccattcggcctacaattcaccttcttcggctgacaattctggctccaaccgagtaatccgtttgttgacgggcaagcaacgcattggttctcctcacagagtccaaagttcccacacctctccggcagttcgcattcagtgccccatattgagtccctagagaagagagtgaaagtctcttcccatgcctgtgaatcaaccttgtcataa

SEQ ID NO: 2026 - DNA, 57 bp, Gossypium hirsutum
  Clone ID: LIB3825-008-Q1-N6-H2
aacgatccaacaattgatttttattcaatgtgatacgctgaaagtgcaaaagaaaaa

SEQ ID NO: 2027 - DNA, 565 bp, Gossypium hirsutum
  Clone ID: LIB3825-008-Q1-N6-H3
gtaaataagaatcataaattcataaaatttcaggcaaaatatggagataacataattggagggatatccattcatcaattttattaggcataacacacaattttattaccataacaaattgtacaaaagaaaacaaatcaaagtcattcaccattatagagccccaaacccgagccagatttcactgtgtcgatggggttggaggtttccatgtggtagtcaggaaaaccatctaccatgatctcacagatattatcaatctccttactccgacatggttgcttaggactcaaggcagaggagtagcaatgaaggctagttcctttttctgattcagccagtgagacattttgacagtccctcgtatcatgtaatcttgaagaaggatgtcagacgagtttttcccacattgatgaaaacaaattagcagtccaggccaaggtgctgtcagacataacttgagctgtatttagcatctcatgagactgattctgctgtttttccactctctggaacattgattccgatagcactcgcgatactattttaggcattttgacttctt

SEQ ID NO: 2028 - DNA, 554 bp, Gossypium hirsutum
  Clone ID: LIB3825-008-Q1-N6-H4
aacttaaaagacaatttttcccattgaagttttctgcgtaacaaagatctttcctatagttccatagtgggaagttcatatagatagtctcaaaatagcacttcaaaagttttaacgagtttggatagggattctaagctctgattacaattctcacttccacatattacttaatccctagtcctcaattactacttcagttcccacaacatttgctattgcgatctctgctgtagtcctccattctgccctctttacctcattccaactcttcatttttcttgaaatatcagatacatacgaatactaagatcaacctagaagtatatatatctgaaaaaaggctagaaaaacatcagcctgcctgtgttgtactcatacccgaaatttgatgcttagccacgaatctgatcaacatagcttaatagttacaggaattcagtcttccgaaattgtttagagtacatgatcttgtgaataacttccatggtaaaatgcagaataacaggatggggatctgtttaacatggtcttagcattctaaactatctggc

SEQ ID NO: 2029 - DNA, 561 bp, Gossypium hirsutum
  Clone ID: LIB3825-008-Q1-N6-H5
gctaacaaaatccacttccattgtggggctgaagaaacaaagaagttgacacttattatatagctgagatataattttatgaaagataatagccagaacgtctgaatactactcttttctggggtaacatgatcggtgacttattacattgctttattaaattttccaactcgatttaggatatttttaacaagaaaactaggtatcctatcgggcatccttagataagagattgtgagtttcaacttttcgggcattgcacagctcatcaacacaatcacccctttcgaagaccgctgccgcccccattcctgtgcctatgcacatcgaaaccactccgaatcggcagtctttgccacgacgcttcatttcatgcagaagcgtagcaacacaacgagcacctgttgcgcccaatggatgtccaattgccattgcgcctccatttacattaatcttttgtggatcgagctccaacttcttttgacaatatacgaactgggatgcaaatgcctcatttatctcaaaaagatcaacatcatcaagttctagaccagcagattt

SEQ ID NO: 2030 - DNA, 466 bp, Gossypium hirsutum
  Clone ID: LIB3825-008-Q1-N6-H6
gctcgaatctaggaagaaagaaaacattaattaaccgactttacaagacaaatatgttacaatgaacaaaacaatgtgtattaacaaaatacatcaaatgcctatcaacaaatacacctgttgtcttttttacctggaaccggaaaagcccaccggctccgatgattaacatgttgggatcttttgcactttccaaaatggcatccttttccagtttctagcaggaatcatcattcaatgcttccatacatgatcaacgattctgaatcaccatttggggccatcccttttgaacatttcaattctttaaggtttccaagagtttactttcttgtatcggctttgcgcgaggcttaacaggaagtccgtaaatatatgttcggacccaggctttttccctttcccaggaaagctgtccgtctcgatgacataaaaaggatcccttcttccatgtaaccggaaaata

SEQ ID NO: 2031 - DNA, 430 bp, Gossypium hirsutum
  Clone ID: LIB3825-009-Q1-N6-A1
gataagcaaatcaaaacttcaatgtctaatatttataacatttctagggaacaacagaacataacataaacttgaatattctaagtaaaagagaagaaaaaaaccgcttttagtattaaatccccactactactttcagtccgtacataacagaaggtaaaacataaactcaaaagatcctgtttgaaggacccatggtgctcttcaagtagaggcacctcacattttgccaatttttcttcaacaaagaaacaaggaaattgacgctcatttgcacattttggaagatctgcttctcctccattgcaacattcccaacagcaactcccatgcatagaacctttttcagctggaacttaaccattgcctttgtttcattcaccttcgactctagggatttctggtgagtgacaagggggtggaattacct

SEQ ID NO: 2032 - DNA, 399 bp, Gossypium hirsutum
  Clone ID: LIB3825-009-Q1-N6-A10
catattaatctttgtctcagtttcatgacaagtgaatctgcaacaaccataattaggatgtctagaaaccagccgagttccagcaatggtaaaatattaaactatctacttaaactaaagattgaaaaacaaatctttcatggctgtagggcctaggactatggaaggctgaaaccaccaaaaccttgtccaaggaacgcctcgacagctcatcagagactgacatttgctaaacagcctaccacctatggccctaactatatgaccttgctagacattgcatgcaaggacacttggactcttgcctattgcatcaatgctcatgtgtgagcccttaacaggataatacatcctgcaaatatattcagaagcacgtgtttaagggccctccatgactta

SEQ ID NO: 2033 - DNA, 553 bp, Gossypium hirsutum
  Clone ID: LIB3825-009-Q1-N6-A11
aatattagtttggtttttacctcaaataaatctcgagttttaaaaaataaaactcaatcgaactcgagcttgagctcagttcagttatagttggtatccagactaagcaacaaaatttttttgccttacatatcttaaaagcattgtacaagactcgggataggtaactgagcaaaaacgaaggcgtggctagaaccggcggatatctttgggtggtttgaagttgagaggatgagtttgttcggttgcggtttcatcttctttccacattttaatcgtcttgtcagcttcacagctaaccaatcttgtaccagttacatcgtatgagagagcgtatataccagcttcactatccaacgagccgggctgcacgattgtatgagcttgctggaaattgtgaccgcttctccaatcccagaaccacaaactcccgttgtcacctccggtagccattacaccgtcctcattaacagccatggtgttaattatagtcttttgctgagagagcatattgtgtaagaattctccctttgaaagactgaatttctttatg

SEQ ID NO: 2034 - DNA, 547 bp, Gossypium hirsutum
  Clone ID: LIB3825-009-Q1-N6-A12
ccaagtaacaaatggagattaaataaagaaaccagaattttaaatagacagataacataaggaacgtatacttgttacacaagaaccaatgaaacaaaagaaaccggagattgctatcatgaactaaatatatgagatcaagaaagaacaaaatgtgtgcataaatagtttggttactgtcctttgaaagcttagacatgagcagtgccttcagtgaattttggatcctcacatctatatcgaccatctggtccgattccaaaaccttttggatcggcaaagacattttcgagcagctgactccgagaaggaacggggctttcatccgcaaactcaacagcatcctctaccacttcatctatcttcttatcaatagcctttaaatctgcttcactggccagactgttctcaatgaggtacttcttcagggctgtgatgggatctcttgcagcatagtaagctttctcagcagggtcacgaagctcgtcggggtcagccaatgagtgtcctctaaacctgtatgtctcgcattcgaccaatgttggac

SEQ ID NO: 2035 - DNA, 487 bp, Gossypium hirsutum
  Clone ID: LIB3825-009-Q1-N6-A2
gaaattaacctgacttcattaatatcaaatgttgatacaatattgtaaagcttcaacaatggtgagcatagtgtacatatagagttgacattgaaacagaaactgataaatccacgatcagtttaagacaacaaaagaagaaacaagaatttcaattaaaaaaaaaattcatgccctcacaaatttctatcctggctactttccgagcatactcaagaaagttgccaaagtaggagacttatccagctttggaaagtcaacagagaatggtaacaaacctattttaaagctacaactgacctagttcgtgagagaattctatagattctttcagaattttttctgctcttctcttcctgtcttccttttcattatcattttcaaacgatcttctcaagatccttgttcttggaattgaaatctggtgcagtgcctaaaggcttctttccaattccaattttaaaatgcaccatagcccacgcgtccg

SEQ ID NO: 2036 - DNA, 569 bp, Gossypium hirsutum
  unsure (1)..(569): unsure at all n locations; Clone ID: LIB3825-009-Q1-N6-A3
aagtgatgcaaatttcatgttttttttaaatatccaacacaagtaaaagaatgctatccgaatcagtactccaaactctcaaaacaaaactgaagagaaaatttaacaaatctaaaaactcaatacttgctttgaagcacaaccgcagggcaactcacttctttttctccccacctccagctgacctcatcttgcggagaacgctagacatctcctcacgcttcttcttggcccgcttgtgagtgcctagctttctctttgccaccttcaaagcacgcttatctttcccaactttgagaagttcagttatcctcttctcatatggagcgaaaccagcaacctcccgaattaggctcctcacaaagtggactctcttgctggttttcccctttctattagaagggcgggaagccaattccttcttggtaacaacatgtcctttgtttaagcccacagaaaggccagttttaggttgacttggagccatcacctaccgaacagccctaacagaaaatcacctaaaagaactcgaagcttcccgcccacgcgtncgcccacgcgtncgccca

SEQ ID NO: 2037 - DNA, 432 bp, Gossypium hirsutum
  Clone ID: LIB3825-009-Q1-N6-A4
aaacgtaaatcttaataatttgaattacaaaactcaaaacccagcattagagattgtcttaaaatgttgcctaaagtcttcaagttcggttttaccacgtaatatcactagcaagcaaaccaattcaggttgcagctcaattacaaacagatattccacgtaatatcaccatcatggaagagtgaatgatagaaataattctagcaaaccaaaaggcaaaaacacacaaattataaccatgtcttaatcctatgcccctggtgaggatgtgctagatccaactgatttccagagcattacccaatccaccatggctttagctgcacgagcaaaaatgggatctttcgatcctagctgctctttaacaacatttgccacctcagctacacagtcctctgttgttgtagctttccgtggcaacctcaccgactg

SEQ ID NO: 2038 - DNA, 562 bp, Gossypium hirsutum
  Clone ID: LIB3825-009-Q1-N6-A5
agcagaaataacttgaaccaatcatgctttatatagtttatgtttactcaacaatgataaatctaaagacttaaaaacagaaaacgtcactgatttcataaattcatgtatgtatcaagtgcctgagatgacaatagtctgcatgatcctatagctaatgaaacattgcagtgcagtgctaaaactaaacccgggacattccaagctttcgttcaaaaaggcggcggagtaggtaaacttgaagaacactggctccaattagtgctgcagattcgtaaaaggccttgtgaactgctcttttactcatggcttcatttactattgcctgacgttctgtctgagcctctaaccagtgctgttcaaactggatgttataaagagcttcctctaacttagatatttgttctaacaaagggttgaaatgctcatcctttgcatgctgatcatagtatgtaaaatgactttcatgtacatcaaagtcgaccgtttcatagtaaggagatttattactgaaacagaaatggtgaattcctttttgatgagcaacaaactcaaatttctc

SEQ ID NO: 2039 - DNA, 265 bp, Gossypium hirsutum
  Clone ID: LIB3825-009-Q1-N6-A6
ccaaaaaccatgagtaatttgatacatctaaactatacgcaacatcctcaacaaacatatatataaactgtatctgcatttgcatttgcaattcagtttttgtttttgaacaagaaatacctttcactttacaagcatcgaaattcgattaaatttgaacaatcaactccgtaatcaacaatgagccgaatttgttagcacatatagttccttcactccaagcaaaacctttgagatgattccatcggcgatcatcagattttgc

SEQ ID NO: 2040 - DNA, 393 bp, Gossypium hirsutum
  Clone ID: LIB3825-009-Q1-N6-A7
aagcattcaattgtggtaatttttattggtctcataaggattcagagttatgtcggcagtgaaatgcacaggacagcttacttattactcatcaaggagtgacatgcatatatatatacatatttatatttatacccagtggacttggcttcattacagacattacaactttctgctctatactctttaacatgatgatctcagtggtcatctaaagctttgcaatgacatatggtggcaagttgaatttggatctagttggaagctttagatcttcccaatcttcatccttcaccttggagaaatacctgtctactgtagtatcagcaatatgctccaatttcgacggctcccacttttgggtcttatctttatccagtagtatagccctgc

SEQ ID NO: 2041 - DNA, 558 bp, Gossypium hirsutum
  Clone ID: LIB3825-009-Q1-N6-B10
catcaaatctttttaacattcccaaataatattacaacaaggtatcttatcagaggagtggatcaaatcttgttaccttatcagctggactcttctagtgttttcctctttgctatttgtcggatgaattggcttcagataaggggtcattggtgttcacagtttgtcgtacgaattgccctcggatacgaggtcgttgttgtgctaaccttttcctgctttgatatcggacctccttccggaagcatcgatcttttcgcttctgtcgaaatttggtcaatgcagcttcccgacgtgcagatttgctttggtctacgttgcttccactaccactcccactccctgccccacttgcatcaccacttccaccgcttccactttttccagctattccattatcgctttctatgtttgtccctacagtatcagctatggtgctacttccatgtggcccattgcttgagtggttactacccgagttacttccattgacactgtagttgccagcatttccttcaacaggaacaggcccacccaacacattggatgacccgcaat

SEQ ID NO: 2042 - DNA, 503 bp, Gossypium hirsutum
  Clone ID: LIB3825-009-Q1-N6-B11
aatatcactataaattgttttttcgtttaaatatttggggttcgcttctcttttcattcaagatgaccatcctcattgatcaacctgattttggaattgaagcagggtttaacaaggccgatgatgttgaaaaaaaagcggtgttgaatgggggatttatgatgccacataccaacttttttggccacacctttagagattatcatgttgaaagtgagaggcaacagggtgttgaaaacttttatcgaaccaatcatatcaaccagacatatgactttgtcaagagaatgagagaagagtccggaaatttaaacaaggtggaaatgaccatatgggaatgctgtgagcttcttaatgatgtggttgatgaaagtgaccctgacttggatgagcctcaaattgaacacttgctgcaaacagctgaggctatccgaaaggactatcctgatgaggattggctgcacctcacaggccttatccatgaccttggaaaagtgcttctt

SEQ ID NO: 2043 - DNA, 555 bp, Gossypium hirsutum
  Clone ID: LIB3825-009-Q1-N6-B2
aaacagaagagcatgcatcctattttggttaacttattcaaattggctagagacagaactctatgaaatttatttaaatctgaaaccgaatgtttgtcggaatagaaaacaagaagatgattgattataaaatattaagacaaacaaatgagcatagaacagaagagtgggagaggttttccagccacattcatctttggaaactggattctatttctgcctcttgtagatcttccctaagaatgacttcaacactgcttgcactggtttgctaggatgagcttcaattgaggttacgagcctctcatagctcttgctttcgtagtcctcaaatacgcccttgagattaagctcattgtatagagccttcactttagcaacattggcagggtctggtttcccatagttctcatataacactttcttctgctcctcattacagatttccaaagctttaaccaccaaccaagagcacttaaaatcttcaatatcagttccaatcttaccaatggtctcaggattgccaaagcaatccaaatagtcatcctgtacttg

SEQ ID NO: 2044 - DNA, 574 bp, Gossypium hirsutum
  Clone ID: LIB3825-009-Q1-N6-B3
ggatggaaatagaaggctgtccggaaattcccttttaattctttttaattcatgtttgtatgcaccttttgtttgggtatttaatagagcattgttttatttagaaaaaggctaaatacaaacaaaaggcaatacatggaaagattgagtctgccaatcacagttctctcaataaacaccacccttcatcttcctcaatgtctagcatgaaatccacatcacaataactcgtatcgtcgtcgtcgtcgtcgtcatcgttctgcttgtcatgcagagaccaaaacttagccagaaaatcatcattgtcgtcgttgtcgttaagaacgtatgtaccaacatcctcatagacataatcatgatcattgacatgattaccaatctcatcatcatcatcatcatcattaaaactatacaaatattccaaaactccagtggcagaaaacccggaaaatttgaaaccggccaaattacatgtcctaaacttttgagtaccctttgacttgtccttggacttacttaccggattcaaatgacactcaacacaatgtaacctcccacattttccactaaactt

SEQ ID NO: 2045 - DNA, 563 bp, Gossypium hirsutum
  Clone ID: LIB3825-009-Q1-N6-B6
agaaactgcttggtgttaataagaattaaaacaagaaaaatcaattacaaattacaagtgcatagataaattatattctttttaagactctaatatatggggcaaaccagacaatttcagcaatgatttgaaggaccaatgtcatacactcttcggaataaaacagcagcatggatggatccctatgaaagcaccaactatttagcatccgaaccattggaaaagaaaactatcgtgttgaaagccaagaaaaactatcgtgtcgaaaaccaaggttgtgtcggaataaatgtgcagacaaaattatctgaattttccgatttccatctttttcttcatccttctttgaccatggtatacgaacgtgtcaattatccctgcgactgtgaagatacctccgattacagcacagatattggtgatgaagtgcaaaaatgaactatgctcctccttaaaagtgaccttgatcggagaaaagtcatagtagaagaaaactccaggttgagaattagggctaatgtactccaaatccttgaaatgctccgtcacggaatactgattcg

SEQ ID NO: 2046 - DNA, 539 bp, Gossypium hirsutum
  Clone ID: LIB3825-009-Q1-N6-B7
aaattctaaatatagcaatatgatcagaacttgtacaactttctttttttaatattcctttaattccccctttcaaagacaacgtttagttagcttgatacgatcagcctacattgccgagtgaggccgtgcgcatggtcccttcaaaccacacaaatatctcccgtttgcttgtgttccgccagtggcttttgccatcgaaatcactattttatcactgcattcttccaaaccttgatcgaaaggatccagactttggtctaaagttacagcattgcagcgcttgtcaagccaacctatgatatccgcgaacaccatttccacgttctcatcgggctctccggctgtcaagccgtgccacatccccggatataattttatggttttgtcagtgcttctcgctttctcgtacagtgccttgcttacttctgggtctgtcactgtatctgcttccccatgcaacacaaagaaggggagtctcacctcattcaaaccattttcaatgctcatgctggttctgagcacttccaatgctgttt

SEQ ID NO: 2047 - DNA, 544 bp, Gossypium hirsutum
  unsure (1)..(544): unsure at all n locations; Clone ID: LIB3825-009-Q1-N6-B8
ttttttttcttgcttattttgttactgaattaagttgagcggttttacatttacagacgcataaaaaactatttttgtggacaaaaaaaactgtttttttatgttatgactcttccgtatacgtccgctttggtttgaatgggcattctgaagaaacttcagtttagttctgctatagaaaaaagaggattcttggattgagctttttcctcccggcgagaaagcttttattctgcaattcatttcaaaagacttcaatcggtacacgcaaaaaataggccaattcagcagctttttgttcaatttcgcgcggagtcaaattctcatcagtacgagtcaagggaacggccccctggcctctgatttccatataaaggacacgacgagcataaataccctctttaacttctattctgatggactgaatatctttcataaggaatcgtagaaagatgcgacgattttttccaggaaaaccccaacgaaaaatacagactattcncctcctttctatcgaatcgatcataaccactgcctacattcc

SEQ ID NO: 2048 - DNA, 579 bp, Gossypium hirsutum
  Clone ID: LIB3825-009-Q1-N6-C1
actcgaacacaattgatatatgtaagttacaagaaatttacattgtgcacatgcagaacaaagattggtctggtgctgactgctgagaggattagtttctgaagaaccaagtcttatctaacaagaacaattcattttaaagcatcctatctgaactactgtcgagaaataggtgccgttggcaaggatgacggctggttatgaaaaccttcagagctttggaaactctggtaagaattagttgatgatgtggcaaataaggagatgccactcattgcagctccagctatggaataaccaggcaaggaaggctgctgtgatgtcatgctatagctatatgtcaccccatttattgatccagcagttggcatgtactggggcacagcatacggtggcataggcggcagtggtggcagaggtggaggagacgatgatggaggaggtggcacctcatttagagccaactgctgggtggtggtcacaacattatgttggtgtgattcaggatgcgagaatggtggaactgaggcttgttgaggattctgagatggtatgtaagactggtcattctcacgctta

SEQ ID NO: 2049 - DNA, 547 bp, Gossypium hirsutum
  Clone ID: LIB3825-009-Q1-N6-C11
aacgaaggttaccttgaaatgtttcaaaactgaatatttgagttaaaattcatccctgaaaacagtaagtggtagtctgtttaaaaccaactttttaacatctaaactgttaaacagcagtcgcatgaataaacttacacatttcttactttgcatcaatccatgatatgatgcaagaatttgctacgttagccaaagaggccaatgggagcatatactattaatccggttaaattcttttgtggacaaaacaaatcaaaagtctacaaccttttttttaaggaaaaaaaaaaacactcacaggggctctcgccatcacaccttgataggttcatatttttcacctatagctccacctttctgtttctgaaactccatatatctgagagtgctggcaaagaaagcatccgctgctggatctagtgtgctagagtcactatgcatctcggttgttattaattcaatcagactctggattgcagcaacagtgatctgggggttccccttctcaaagaaataaaggtacttgttcagtatctcaacaaac

SEQ ID NO: 2050 - DNA, 556 bp, Gossypium hirsutum
  Clone ID: LIB3825-009-Q1-N6-C12
atctcaaaaagctgttgcaatttaagaaaacatctgattcaacaagaaatccatactcaaaatgatgctttgatgcttaaggatttctatacaacacccagagaaatagaaaaagcaatgcaaaaaatgtggtgaaaatgaatgtaaaagaagttttgaccacacaacaaaatcaaaatgttagagatggttagctactaagccataagtaaattaacctgcttgccactaagaatttgatagctaagtcaagtgttttgatactaccaacattttcaactaatacaacctaccaagataattgtatataataatataattttcataaagaaaggcattttagaagttcataccttgagctatgaatggcttaacctttcttttctacatcaactttcaccatactataagccatcatcaagtagtattttcatcttcacgtgtttcacccaccctgattcgcttcgttgaaccggtagaagctttagttggtgcaacagctagtcgtttcaggcggtaactaacaagtgagggaccgaaaatgctgtactttccg

SEQ ID NO: 2051 - DNA, 567 bp, Gossypium hirsutum
  Clone ID: LIB3825-009-Q1-N6-C3
aacaaagcaactaatatgctattttatatttgtaatcaaaagcatatctttcacaatcaaaatcatatatgaagaagaaagtggacaaaattttaagaacaaatttaccaaccttataaaaatattaggcttagggaaaaacaataacaatctataatgccgtttggaccgcagcagttctcgtacatcgataccgtgcttggaatatcgacgagaagcaaatggctctccagctcgagatgtgaaacaaagatgtctcaacgacaaaacgtggcggcggcgtgttattgactcaatcgatcatcagctatatgaacctacccctcattccgaattcactcttatttcgctaccaagaaaaagaatagctaagaaaaaaaagccgtaatacagttcattctctcacccaaaaaaaaaaaaggaatttcaatcttccagatcaaaatctgtacatgtcagagagccctgaatgaagagcgtcgtgccctgtcatgcttcaatcttcggctattatcgatgtttataggtttcaatagtcgttctgcttctaattcggattgaagggaa

SEQ ID NO: 2052 - DNA, 483 bp, Gossypium hirsutum
  Clone ID: LIB3825-009-Q1-N6-C5
ggcacccaaacacaaagggcggggggggaaacaaaactagggaaaacacggaaaaaaggggatacaagggggggctaaccgaaaataaaaaattggggggaaaagaaaaacaaaagggacaaaccaaaaaaaaaattattatacaacacttggggggcaaaaaatccccaaaaaaataaaaaacaacctatgggaaataaaaaaaaatttcattcccacccaaaaaaaactaaaattttaaaaacccaaatttaaagccctggcccccacatgggggaaaaaaaaaaaaaaaacggcaaattttttccaaaaatataaccttgaaaaacttgttctccaaaaaaaaaatggtcaaaacccaaacatccctgaaaaaaaaaaagggaaaatttgattacccaaaacttttaaacccaataaaaaaaaacaaaaaaatatgcttaaaagtctattctgggcaaattggcacaaaaaaaatttgtt

SEQ ID NO: 2053 - DNA, 383 bp, Gossypium hirsutum
  Clone ID: LIB3825-009-Q1-N6-C7
ccaccacaaagatgaagatgatacattcaaaatcaccgtacttactgcaatatgaaccgatcatacttccaagcccgatcaagatcacaaacgttaatcaacacatttccattttgcagtataaggaagcattaagcatatatattgcagtaagcatatcatagaacacaataatagaaagttgagtaaaagctagtctcaggctttgactcaatgataggcagctgcaccctgcagtgctgaatgttcggataaccatttgctagaagagcaagcttcaaaaatttcaccggtgttttcggtcttcggcatgtagtcatcgagatattgctgatagacataggaaatgaagccccaaatagccaacaccatagatatcacct

SEQ ID NO: 2054 - DNA, 390 bp, Gossypium hirsutum
  Clone ID: LIB3825-009-Q1-N6-C8
aaatgaaccatcaaagacagattttaattcatcggaaatttcatgttctgaagtggaaatcaaatgagctagaagagtttcagcattacagattcgacgtgttataatctaatggcaactcgttacatataaagcgcaacaaaaatgaaacatctaagctgccatacgtatatacatatagtttgatctatttcatcatgctaccacgaaagcactggatgtacccgtgaaatgctgaatcgatcccataagccgtttcgcagcaccaaaatgtcttattctgtaaactcctagtgaggcagatggagggattgtccattcgatggttgcttgacttcgggggcttagtttcgaaggtcttgaccacttaaaccgaaggcagaaatcgtc

SEQ ID NO: 2055 - DNA, 512 bp, Gossypium hirsutum
  Clone ID: LIB3825-009-Q1-N6-C9
aacaaatgaaatcccagaagggaaagtttaaattaactttgtttttgaacaattcatcaatgtttctcaacatttgaaagtttgtaagtaatgttccgaagctaaaaccctgactatttttgttgcactcttttttgccaacatttgaacagtttttaaaaatggaaaaaagggaaatgagcccacctgcccttgattagattagcttgacatataacatgaatttttttgctgacccggggaaaaaaaaaatattttgtaaataactttaatggaaaaaaatggatgataattgaaaaaaagggactggtttggttgttcctttgtcctcctctcgtcttttccttgggagtaaaattttcatggcaccaacctggtttcattcacttaaatgattagaatctgaaatcaggatctacatccattgcccaagcaaactttgccaaaagtgatttgttgaatatcttctcgatgggaacttcatgccgcttgcaccatgcaactgtaatcct

SEQ ID NO: 2056 - DNA, 556 bp, Gossypium hirsutum
  unsure (1)..(556): unsure at all n locations; Clone ID: LIB3825-009-Q1-N6-D1
agaacaataaaaacatacatntgattaaacaacagctacaactctattcgtccaagtacacaattagacttgattatttcaaacaactaaaaataacacgatacaaaatatgacacaacaacatcataaatactgaaccctccattataatgacaatccaaagctttagtaactcatcaatctttcaatggcttcagtttcttgggaaatccattcatcccaacacccatgaaactttgcttctaaacctaggtgctcttctttggtggtgtattgccatatttccaagtgaattgctttaaaccatcaggataagtaccccctgcaacctcatggattgggatcgcatctgaaatttctttcaaatcttcttttgtcagctttactttcactgattcgatattgctgtctagatttttaatcttggttgttccgggaataggagaaacatcatccccttgatgaagaacccaggcaagtgcaagttgtgccggtgtacatccatgcttttcagccaacttctctactttcgaatataggatcctatttcgctcca

SEQ ID NO: 2057 - DNA, 535 bp, Gossypium hirsutum
  Clone ID: LIB3825-009-Q1-N6-D10
attgcaatgacatagtgatcatatatagagagagagaaatacatttcatagctctcacaaagtatcagttttcctctaaaatgagtgcatccattgcaggttaaatcatagaaacatggccagaagcataccttagaacctatatttacacaaattatatctatatctcaaaggttgctttcattttcttacgatagttatcaatccaaccttggatcagcttgatctcggttgccctctgttccactaaccagtcagggtcctctgtcgaagaggcacgcaagtcgatgtgatgggcgccttctttcgtgatgagagcaataatcgtttcagatatattcttcagaacactgccaccactccaaggatctaataaaccatttgagaatatgatgttgcttccaaaggatttcaatacatgctcgatatcatgtccaccaaattcggttgttatccatctaggccttggtgtcacctggaaatcctcctggcacccttctcggaaagcagagtaatcccaatcatatgctggaac

SEQ ID NO: 2058 - DNA, 547 bp, Gossypium hirsutum
  unsure (1)..(547): unsure at all n locations; Clone ID: LIB3825-009-Q1-N6-D11
accaacttagtagcattgacactcatacattcaaacattttattacatcaccatccctcacattttattacataactcatacgcttcaaacacctcattgtttccagtttgttcatgcattcaccttaggtgcccacccggcgatcacgtattccttagcagcccgcgttttcacgaacgattcacgagtgaatatcgacttcatgtaattgcggacattagtcaagctttccggaacagtccatttcttgaaatggcccagagcaacctcaagatggtaaagtttgggtcccaaagctaaatcaactgcacttatcttttccccagcaatgaatgggccatgtgccttaagatgttcatccaatgccttgagttcattaagcaaagcctgctcagatccatcattagcatctttgctcttcaaaaatgtgacaaaagttccaaatatgtnttgatccaacagaggcaaattgaggaggggttttgagacaaggctgagggtatttttcttcaaggattccaacaattacatcagaatcagccaccc

SEQ ID NO: 2059 - DNA, 526 bp, Gossypium hirsutum
  Clone ID: LIB3825-009-Q1-N6-D12
gatgtcagataataacaaaaaagttatggctctcaaagatcgctaaagattgtatcttgctttcttatcctctaaacaaaaagagcatattaatgggaacaaggacaactgggtttgacactaccagcagaggccaacttatggctgcgctcccaagtatccactggtgtagcatgttcatgagggatgtgccggggatgtttctctcttttgtcaccctttacctgctttagtgcatgcttaagggcaggcaacaatgcctccatgcattctgcgacggcatttggattcccgggcatgttgatgatcaatgttgaccctcttatgcctgctgctgagcgtgagagcatagcaaatggtgttacctttaaactctcttgcatcatgacatacaaaagaccgggtgtttctttttcaatcacctctttagttgcttcaggggtcacatctcttggagtgaatccggtgccaccaagtgtaaggataagatccagcttatcaatatcactccatctctgcaaaacta

SEQ ID NO: 2060 - DNA, 571 bp, Gossypium hirsutum
  Clone ID: LIB3825-009-Q1-N6-D3
aacctaaacggggtatccatcaaatcttgccattttgaacgatgatattgttcttaggtacaggttacagtctggagcaggctttgacaattggtaaggcactaaaaggtttcttacaaactctgttacatatgcaagcgtctaggaggggtaggaacggtagggtgattgggtattgtgtcgtttggtcccagatcatctatggggggccgctgcttatgatgatttgttgcagactggtaagccattgctaaggctaatgcgatgtgatcatggttaggaggagcgtatatgcccgtgttgactgtggttcgtctccgagtaccagttggaggtggattaggtatgtttttgaagccagtcggaacaacaattactggcaaacctacgagatttccgatgcatactcgctcccaatccgttgcatttccaatgaatgcatcaacattgaagttttctttcacttcttggattaactttccacgagctctttgtgcctgcaaataatctacagctgaaactacacgtgcaagacgtaactcaacaggccattgatcttgagcttcataat

SEQ ID NO: 2061 - DNA, 483 bp, Gossypium hirsutum
  Clone ID: LIB3825-009-Q1-N6-D4
tttttttttttttttttttttttttttttttttttttttttttttttttttttttttttttttttttttttttaaccaaaaagggcaaaaaggaaaggggggggggggagggggggccaaaataggccgggcaaaaggtaaaaaaaaaaaaggcaaggcaacagaaaaacaaacaaaaggggcgaaggggaaaaaaaaaaagggaaaaaaggggaaaacaaaaaaaagaagggaggaaaaagaaaaaaaaaaaaaaacccaaacgggaaaaaaacaaaaaaaaaaaacaaccaaaccccccaaaaaaagcggccgcccgaaacggcaaaggaaaaaaaaagggaccgggaagggaaacaacgcccgaaggggggggcgggcaaagcaaaaaaggcaaaaaaaaaacctattggaggggggcaacccccaaaaaagatagaagctcccggggccaaccgaaaaaaacaacacgcccgacggggc

SEQ ID NO: 2062 - DNA, 459 bp, Gossypium hirsutum
  unsure (1)..(459): unsure at all n locations; Clone ID: LIB3825-009-Q1-N6-D5
gtcataaatattaaagtaaaaataaaaatttagaatcaaaactaaaataaataatacatatngagaaacagactgactagttgaacctacctataactatacacattgcaatgtaataaaaaatacaattcaatttcttaatcaagtaaatcttggtaataaaagatataatacatttacttaatcaaggaaatcttgtaatgaactcaaagcaatgagccttagagaaaaacttttgagcatggcttcgaatttgaacagcagattttgtgcctacatgcttattattattggcaggccccattctctttacataactacaacagctgtactggcaaaagcaaaacaaaacaaaacatgctgacttcaacaataatgcagcgtgtgtcaggcaaatgtttaaatttaagtcaattcttaacttattctctacaataccagggcacagcttgaaggaac

SEQ ID NO: 2063 - DNA, 531 bp, Gossypium hirsutum
  Clone ID: LIB3825-009-Q1-N6-D6
aaacgggaattaccaacatatcataaccaatccgaattcataaacatttcggagtttacatacactggcaaattgctttatgtaagaaaaggcaaccccccatgcaaaacctacatataatgaacacagcaactcattacagctttgctatattttttccccttattattaattatcgttataggcctcaaattctaatgggaactgccttccaaatgggttaaataaaacatctacagttgcctggaaccaaaaacaaaggttaggggaatctccaaaatcagctgctttcaggttattctaacgacacccattgttactgttttcctttccgcatcgctacaatggagattttagcaacttctttagggttattactattttaccaaaagacggccgttgagcgggatcatcggcccaacaagattccatgagggaaaccaacttgggggaggtgttaggaggaatggcaagcttcctattctggaaagctacagcaccaaccacctacaatttgcagcaccacaagac

SEQ ID NO: 2064 - DNA, 540 bp, Gossypium hirsutum
  Clone ID: LIB3825-009-Q1-N6-D7
aaaaaggttctctaattattcccaacttttattgatttatagaactgccctggctaacactgaacattacaacaggaccaaacttttctttatatggtacaacagtacgaacttgaaaaagaaaaaagtagaagcaaacaaacaacaaacacagactcaaggcagtagcagagcacaaaaagtcgctcctttcatttaataggatcgataataaggatcatcctgggtacctccgcgggtgctccttctagtcccagcattgttaggcgccgcacttgggaagtcttggtttcccgttgtaccgtaagcaccccctgtatctccgccaaaccccatactgctgaggtcatcttgcctgcctgtatcatacccactacctgcggtggggtacccacggttgtcatgtccaccggtaccgccatagccaccagtatcccctctgttgtacccagctgtggtgtagccagtaccaccaataccaccaccaccagcatggccagccgtggcgttatgatggcgggcctcttgtttcctcagctc

SEQ ID NO: 2065 - DNA, 548 bp, Gossypium hirsutum
  Clone ID: LIB3825-009-Q1-N6-D8
aaaaaaaaaaggaccgtaacttgtcattctgcactactgatccaattaacaagctagcaaaaccttacaaccccatgtcagaatctcattcctatcatgaaactatatttacatttcctgtaattagatataaaataacggagaaaaatctttttgtacttatagcatgtatattctatatctttatactagctcacgtcaattcaaactggcaacactctagtatgagaactttataaaaacatctgacctgttaggttatttgatatttgctctgcacttccatttaaacatcgtatacaggtaagcgttcttcaatggagacccgacagatagggcattttctacacttctcgcagcaggtactgcaaagaatacgatgcctacaggggagcaaaaccacacttatctctctctcaaagcaaaccctacataacactttttcattttgaagcctctcaaactcctgctgactatatttggtgatttctgattgctcaccaagagctgcctgaagcctccaaacctcctcagctagatccttttta

SEQ ID NO: 2066 - DNA, 473 bp, Gossypium hirsutum
  Clone ID: LIB3825-009-Q1-N6-D9
tttttttttttttttttttttttttttttttttttttttttttttttttttttttttttttttttttttttttttttttttttttttttttttttttttttttttttttttttttttgaggagggacaaagggggccccaaagaacccccttggggattttaaacccaagaaaaaagaggccaaggccaagggggaaaaagaaaggggggccggcaaaagcggaaaaaggcacccaaaaaggggacaggggttttgggggggccacaaaaaaaaaaaaaaacccccaagaccaacggggagggaaaaacgggggggggcccatgggccctgggggaaaaaacaaaaggaccaaaatccttcctttaaccaaaagggttttgggaatattgtattccaaggccaaaaaaaccaaaattggggaccaacaacccccgaaaaagggggggcacatggggggggaaccccacacttt

SEQ ID NO: 2067 - DNA, 436 bp, Gossypium hirsutum
  Clone ID: LIB3825-009-Q1-N6-E1
gcagaaaaaaaactgatatatttacataaaatcaattatggaaggtgacgagaaacctatttcgtctcttaaacctacatcccaaaattcgagtcatctcagttccttcaccaataggcaaagtcacagcttccactctctttttcctcaaaagttgaccaaatatcgacccatcttttttatgatgaacattatgaactatcacagtcgaccctgttttaataccatcctcctcctccaccattgttttaaacattaatttcaagtactcatcgtcgaacttacaatcgatcactgcaaaatccacgttcttcaaccgcatttttatctgttttatgattgtctcgcgtgggctagtgttggtgggttcagcgtgaaccaaatttatgtattgttgaagttgatccgcggtgtggtggtggtggtggtggtggga

SEQ ID NO: 2068 - DNA, 492 bp, Gossypium hirsutum
  Clone ID: LIB3825-009-Q1-N6-E10
aggaacctgttttaggaacccggaataatttagctaaacaaaaaggctcttccaaaagaatcctcccaaaagtttccaccttaagaaaacctcccgaaaaaaatccaagacaaaaccaaattccacacccaacctatgccctttacccaagctctttgggcaaccccacggaacattcaaacccgcaacttattcgcccgccccaaggtccaggcccttggggcaaacccccccggaaaaaaggcccatttttatggaaaagtgatccttaccttccatgggtttttacggggggttttcacgttcaagccccaccttaaacccaaaagaaaaatttgaaggaaaccttttccaagggccttccctgagtgcccaccatcaagaccttgacctaaaaccttcccgtataccaatcttgccttgaaacacaagaaatgaaacccgggaataatatttttaaaaataacccctttaaaaaaccacttccttttt

SEQ ID NO: 2069 - DNA, 558 bp, Gossypium hirsutum
  Clone ID: LIB3825-009-Q1-N6-E12
tttttttttttttttttttgtaaattctattacaacaattgaattactaattataggcctattctattacagctcttttttagaaaccttactccaaacattccgtacagtttgggaagctttgatgggggatcaatctatcatgggtggatttgtttttcagacccttaaacaggaaacgccttcttccctcatcatttccagagatcgtataaaattccgaactatgattattccaaatactctcttgtagcagtaatctttggttatcgaaactccaccgaaacaacagcaataattaacacagaaatcaaacgcaacttcactaacaaatcaataaccgattatacatatatcaatcaaacgaaatttagactaatcctaattcagatgataacccaccaaatatatcctttttcccaaactagaaattacatttttctgtgaggaaattaaaaaaaaaagactgagagtttatagacgaaaacccagacacacctttgcattctaaaccaagcaaatcagcaaatctaagacccaagttacgctatacaacat

SEQ ID NO: 2070 - DNA, 571 bp, Gossypium hirsutum
  Clone ID: LIB3825-009-Q1-N6-E2
aaaacaacctaaaatcaaatatatattagtattatttggttgaaacagatggtgctacagaggaagagaatcgggtcaggtcgccccaggtttacaaattcttcaaagcttacaccattatgaacttaaagcacaagttcaataaaattatttaaacgatagagatactcaagcttgtcgggaaaaacaggcttccaacttcaaggtgtcttagacttgggcggtgacggaagtaactgataacaggagatgagagatgaaacaaatccaaaggctcccgttactcgaggggtgactttcttcggtgccaattgaagaagcccaactgctactactatatccattcccgctttaacaagggccaaagtcctctcatttgaattttggagcttcgcacgatactcctcattcttgtacttgtcactatccttaagtctcttttccaactttttcattgatgcagatagccttccaagctccccaagctcaaccaatgtggtacatattgatgatcccatccaacagaaaagggatattcgtccaatcaactcagcacgttctttgttcttat

SEQ ID NO: 2071 - DNA, 555 bp, Gossypium hirsutum
  Clone ID: LIB3825-009-Q1-N6-E3
attctacaatgaccaaatattattgaactgttttaacttttttttttaaacccttctacttaaacaggtcagtgagtcaaaagctacaatttttttttctataaagtccatgaatatgatcttctcaaaatgggcttcatttgtttatcttcttcaatcgctatcatacctaagtgagatgggtcttccaacatcatcttcgccactaagtaaccagcaatcgaccacgtttgagctttacgtgattgcttaccgatgtatcggcccagctttccgtcgtaatattctggccaatggtctttcagcaacctggcttcggctatttcgatggcacgtcttgcaatttggggacgtccagtcttcacacaagcggctgtgagaagccatagtaacactggccatgatcctccattgtggtaactccaccgggtgtttttggggtcacatcctgttataatccgccattcatgagtttccatggctggataacaaacctttaacggcatttctccgaccaactcttcccagcgtgattctataagatccatgatggca

SEQ ID NO: 2072 - DNA, 563 bp, Gossypium hirsutum
  Clone ID: LIB3825-009-Q1-N6-E4
gaaaacaaaacaattaaataaaaaaatagaataattagttgacacgagattattattaaatatatgcaaatatgcaagttgactattacaaaattgggtgtagtttttgatcaactaattagttgatcctactggaggttctaaccataatctgcttaactaacatacaaacataaggcactctgatactttttttgcacataaaatatctgaaactcacacctgaattcgggttcagagcacatacagtatcaactgtatgtagatcaatatcattcttattcgctggtgcaatgccttccatatgcatttgtagaggtaagagccagtcattatgtgccttctgcaaattgtacttggactgcaatctagtgtagttggtttttcctgttccatttgccaccagtcaaaacataaaagagctttcaaaggtatgattcaatcggtggggattcttgtgtctgtgcattagatttggcgaccttttctatacatactttctgacgagctcttattgacccattgctgttaatttatttgagccaacagtgcttattgaactt

SEQ ID NO: 2073 - DNA, 489 bp, Gossypium hirsutum
  Clone ID: LIB3825-009-Q1-N6-E5
aaaaagcaagactaagccatggggatagcaacatgcatattttttcagtaaacatccaaattcaaaatacacatgggcattcaaatagaaaaaaaggacctaggaataagtccccaactgcaaatataaacatataacagcttaggggggacatatcggtaaagctataactttccctgggggtaaaaacaggccaatgttttttacaagggcagggaaatataaagcccttttgggaaccataacaaaatttgaaacaagcttaaaaacggacaattttaagggcccactaggcccgtaatttacaggaacatattgctccatttgaaaatacgaagggacttatagctaaatgcctaattaaacacccgaacatcatttctcaaggtcctttccattagtcaaaagccaattgaaaggaaaaaaaaaacccctgtagttaaaaacgtagttttatgtctgaaaagccctaaatccatatgcttgctt

SEQ ID NO: 2074 - DNA, 449 bp, Gossypium hirsutum
  Clone ID: LIB3825-009-Q1-N6-E6
cgggccccgggggcccccccggaaaacccggcccggccccggaaggccacccaacttccccaaaagggaggcgaaaaaaaccgggggaaaaaaaaggaaaaaacggttcccggggaaaaaaggtaaccccccaaaaatcccaaaaaaaaaaaaacccgaaaaaaaaaagggaaaacccggggggcccaaaaaaggaaccaaaccaaaaaaaatgggggggccccaaccgcccctttccaaagggaaaaaccgggcggcccaactgaaaaaaaaaaacccccaacccccgggaaaaggcggtttgcaaattggcccccaggggggtttttttttccaccaagaaaacggcaaaaagggaatgcccctcaacccccggcccccaaaaaaaggaaaaaagcggcccaccctggtttcccccacaaggaaaaaaccctgttgaaggggggaaa

SEQ ID NO: 2075 - DNA, 535 bp, Gossypium hirsutum
  Clone ID: LIB3825-009-Q1-N6-E8
cgcataaacatggcgattagaattaacttcaaaatagggctaatacaagtaattcaaatcaaaccctttaataatattaaaaaaaaaaaaaccttcaataacaagaaaaacagagttaaaatacctaaaggaatttactccataaacgcaaacccataatcaacgacaataccgttttgccttcataatctattaattcatgcaattaggaaaggcagaacggtaagcataaaagcttcgtatgtaaaagtcgcattaccactgtacatgggatccttctccttgaatttctcagttagtcctttaactgtaaggcagcactcgatgaagttgtcatattcaatggccttgtttttgcctccagttttatcaaactttgagacaagcaaatccaaaacaacagaagagactgaaaatccgagactcagaagtgcttctctcagttcattggcatctattttgccactcctgtccctatcgaatctctcaaagatggccctccaattctgaagactatagaacactgaagtgaact

SEQ ID NO: 2076 - DNA, 504 bp, Gossypium hirsutum
  Clone ID: LIB3825-009-Q1-N6-E9
tgtttgctgttttaataaatggaacgcccgagagcgctcttaccgatgcgaccaggaagccggtggtgatagaacgaactgtaaaagccggaccatgaacagcccacgtactaacctgccttgccctccttccaattggcggacctcgtccttgcattacaccgggctaaccctcaccggcaccgacataggcctatgcgtggcatcgccactcttgctcatctcaagcccggctctgctgccaactgccatggcggctttcatggctgaggccggtttcttggcgtacggcgcttacgggtggacgggactggactgggtctcctacgtctcaaaccgcggcagacaggcgactggcaccgaccaactcgactcggaccgaaccaagaggggcatgcaggatgtggcggggtgtgtgggacaaaagactgaggaagctgggcagactatcgaaaacactgctcatgagggtggctcgacatgagtatgaaccatggcaggatg

SEQ ID NO: 2077 - DNA, 556 bp, Gossypium hirsutum
  Clone ID: LIB3825-009-Q1-N6-F1
aacgtattcaagtggatattgtaccgagacaagaaaaaatgcttacaactagtacccactagagtcacgattggtttacaagggtgatgatggacatacaaaaatcaattcctgaactgacgaaacctcactgacctaaataaatccccctccatcttgacagacaagacaagccataaaagggttaacaccgaattacaatacatactacagtctacaaataatacgggcatgccatattattatcctcatcatagtttacaggtcattttacactaaactatgagcacattattagtacaacatacttcatctcacccgtcccttccctctcctgttgtttctgctcactttctttacctcctgcttctccataacactgttgcttttcctttttgagtgtcgtgtattcggcttctgtgccaaatcttcaccttcaccttcaccttcaccttcaaatttcatgcttgaactgtgctgggaatcggatatggcgacatcattttcatttacttctgccacttctatggaagcctcacccactcttgttgcattc

SEQ ID NO: 2078 - DNA, 530 bp, Gossypium hirsutum
  Clone ID: LIB3825-009-Q1-N6-F10
gcacaaatggagagtttcggatacaattcgtataccggacagattaccatttagaacacaaaatttctccaccgattccttctagtcgagcctcccggtctgtcattataccccgagaagtagaaagaattacaatccccatcccgcctaaaatcctaggaatttgttgatagttagaatagattcgtagacctggtcgactgatccgtcgtaaatttaaaatagttctatgtggtccttttctattccgtctatgtcgtagggttaaaaccaaaaaatatttgttgcgttcccgatgtttccttacgttatcgataaaaccttctcgtaaaagtattttaacaatgttttcagtgatgttagtagatcctatttgaatcgttccttttctattcatatcagcatttcgtatagaggttattatgtcagcaatagtgtccttacccatggtaaactaaaatttttgttgctcccgaattttgatataaccaacgtggtcttttttttttacttagtaaaggtatatacgt

SEQ ID NO: 2079 - DNA, 536 bp, Gossypium hirsutum
  Clone ID: LIB3825-009-Q1-N6-F11
aaaataatatctaataataattaattaatatactcttgtgtataggtaaaattccattgttaagagtctgctaccctagcacgtctctgtctgcctctctggcaagtttaggttctcaaaagtttttcttggcctgacggcttacatctccagtgttttgaataattctcttcgttcggttttctcgtgttacgcccatggaatcagaatttgctggtctatcccttgaagatgaagatgaagaaatcctgaaaaagtgtttggacgactaagggtctgctcgaaaaaggtctttgctggagggtgggaaaaggtgataaaatttcaatacgagatgatcttccaaccgattgtagcagaaaaaattttgaagatcccactggcggagatggaacatgaagactttcaagtttggagaggggagtcgaccggcgagttttcaattaggagcgcctataaactattacatgaatctacattggatcctaatgatttaatattacataccaaaactataaatttctatagaaagctat

SEQ ID NO: 2080 - DNA, 557 bp, Gossypium hirsutum
  Clone ID: LIB3825-009-Q1-N6-F12
gccaaatcatcatcaactctcattaatcaaaggaaaaagatcagaaaagaagaagaaacaatatacaagagagggctggttcaagcttagatgaagccaaagtattacaatgcctgcatataacttagagaattcctccggagtgtgagctatctcgagactgtctctaacctccattgccatttgtaacctcgtctgaattgcgttcctggacttcctataaacaccttcatcttgttctttcaagctaagggcagatatattagtctgagcacaaatacattaaaatacttacattagcatacagtgaaaaagctttctcatattgcccattgataaaataataattcgagattatgtatatgatattaataccatatttatatagataaacagaaatataatcccccttgtcatgggcaaacaaaaacagatcagtgctggtaaagaaggctattcttttttgtaaattctctgtatcaaactccactatatcacaagtatattagagcgggaacagctgaaaagaatgtgatgtgaaggggcaaacgtaatgc

SEQ ID NO: 2081 - DNA, 559 bp, Gossypium hirsutum
  unsure (1)..(559): unsure at all n locations; Clone ID: LIB3825-009-Q1-N6-F2
tttttttttttttttttttttttttttttttttttttttttttttttttttttttttttttttttttttttttttttttttttttttttttttttttttttttttaaattttaatggggaggaaagaaaaaaccccccaacccaaaaaaaaaaaaaaaaaaaaaaaaaaaaaaaggaaaaaaaaaaaaaaaaaaggggccaaaggaaaaaaaaggaaaagtggggaaaaaaaaaaaaaaaaaaaaaaaggggaaaaaaaaaaaaaaagaaaagggggaaaagaaacaaaaaagggggaaaaaaaaaaaaaaaggggggggaaaaaaaaaaaaaaaaagggaaaccccccggaaaccctaggaaaaaaaagaaaaacaaaaacgggggaaaaagttggggaaaaaggaaaaaaggccccccaaaaatggggggaaaaaaaaggagaaaaaaaaggggtaaaaattgggaaaaaaaagggggggggcggggggggagaggggaaaaaaagggggnaaaagcccaaaattaaaaaaaaaaggggggaaaaaaggcctcctag

SEQ ID NO: 2082 - DNA, 571 bp, Gossypium hirsutum
  Clone ID: LIB3825-009-Q1-N6-F3
aatgtgttaaaaaaacaagtattgaataattataaattgctttgaaaccacaatgagtactagaaattaataatattatctaaatacataattagtagtactaaaagtgaacactatatccttctcaaagctaaaataaaatggtttcagtgtaagggtttctgcttctaactcattcaaccttcttgctggatttgtcatcactaccatcttcagacgtaaccgcagtcttcaactcgtcaaactccaatagctgcacatcatgttagctcctattaaccatattgtaatccaaatacaaatacagaccataatcatttcattgattatattcaaagctgaatagtgaaatttatcatataccataaccaaactataatcattattcaggaacacaattaatccaacattctccaggtttttgtttgtgtcaagcataaggtcctcatgtacctctatgggaattgagtccattttcttactttttaccaagacttggacatggttcatttcataaacattaaacccgattctcaaatgcaaaatcctacttgttgctagtccttggaaa

SEQ ID NO: 2083 - DNA, 540 bp, Gossypium hirsutum
  unsure (1)..(540): unsure at all n locations; Clone ID: LIB3825-009-Q1-N6-F4
gcgcaaaccctaatgttcgggcattttattgacgatcaaacactgacacacacacannaaaaacacacggaaatggtangaagaaacgatcaaaggtggcatgcctcgatcatttatttaatagctattactgcagatttccatttgtagagggaacggccagtctgactagtcgtcatagtcatcatggcgcttatggtggtgggccttatagcggtggtggtgacgcttctcttcatcatcatcatcactgtcgtcatcgccatgtttcttgcggccatatccttcttcctcggatctaccataacttggcttcctatatccttctgcctcttcctcggatctaccataacttggcttcctatatccttcttcctcttcctcggatctaccataacttggtttcctctcatacccggacccgtattcagtctctgtcctacctccataacccgatccatactcgccctcagtcctccgtccgtatccggttccatattcggatccgcctccttcatactctgcctttcggccaaaccc

SEQ ID NO: 2084 - DNA, 539 bp, Gossypium hirsutum
  unsure (1)..(539): unsure at all n locations; Clone ID: LIB3825-009-Q1-N6-F5
ttttttttttttttttattttttttttatttttttttttaatttttttttttttttttatctttaaaaatttaactttttggtttttaaaaaagccaacccaacggcgcccacccggcccccccccggcccccaacccaacagcaagcgggaaccaaaaaaaaaaaaaaacaagaaaaaaaaaaaaaaggggggggggaaaaaaaaaaaaaaggggggaaggaaagagaaggaaaaaaagggacgggcaggagaaaaaaaaaagcggaaaaaaaggggaaaaaaaagggggagaaaaccgggaaacaaccaaccccaggaagagggcgagaagcagaaaaaacaaaaaggaaaccgnaccgggccaccaaaaaaaaaaaccccgccaaaaaaaaggcaagaaaagacaaaaaaaaaaagcccaggaaagaaaaaaaaaagcccaaaagaacagaaaaaagaaaaagccaaaaaaaaaagaaaaaaaaaaaacggaaaaaggggggggaaaaaaaacgnaaaaggggagggggggggggg

SEQ ID NO: 2085 - DNA, 531 bp, Gossypium hirsutum
  Clone ID: LIB3825-009-Q1-N6-F6
accacaaatctaatatattagtatattacccattatttcacaactagagaaaaagaagaagataaaatcaacatgccacgaaaatcgcaaagacgaaagacttctcgaaaatgaaacacacttaaagtacattttacaagcaagcaaagcaaccttccatggttcatattcatgtcctaccaccctcatgagccttgttttcgatagtctgcccagcttccttagtcttttgtcccacataccccaccatattttgcatgccccttttggcccggtccgcgtcgagctgctcggtgccagtcgcctgtctgaagcggttaaatacgtaggagagcgaggacagtcccgtcaacccaaaagccccggacgacaagaaaccggccacagccatgaaaaccgcgatggcagctgggagcaaaaccgggctgaaaatgacgaaaagtggcgttgccacccataggccgatgacggtgccggtgagggttagcccggctaatgcaaggagagtgccgccgatgggaaggagggtga

SEQ ID NO: 2086 - DNA, 542 bp, Gossypium hirsutum
  Clone ID: LIB3825-009-Q1-N6-F9
ccgtaaactttgcgaaatctacttgcttcctgattaacgtatattaatttacagtcatacacgaaaacaaaaaaaatttattccttaccaaatcgcctcattccttgataaaagttcccgtgagtttggaccgtgtcatcattgcgaacccataacactgctacggctgttcttgcaccttctgtttcaagaaggaaccattcccaattaaaaatagctcgattcttcaaatgagctatttatactttacaggttttaagaaagttcttccttgttgaacttgttccaagcttccttgagaatatcgaaaaccttttcagcaatatatttctgttcaagagtggcacctttctgctgaaccttatcagggtggacacataatgtggcctttctataaacttttttgactgagccagaggtaatcaaatcagtcaatgaaactggctcccaaccacattcaggccaaagtacccgttccattgatgaaagcagtgcatgcatattgccttccttccctgcagcccagcgttttatctcaaaat

SEQ ID NO: 2087 - DNA, 151 bp, Gossypium hirsutum
  Clone ID: LIB3825-009-Q1-N6-G1
tcgcgatctagaactagtttcctttgtaaaattactgatcaatgaaatcacaaaaataaaaatttgcttttttgaagcaaaaaagcaaatttttatttttgtgatttcattgatcagtaattttacaaaggaaactagttctagatcgcga

SEQ ID NO: 2088 - DNA, 446 bp, Gossypium hirsutum
  Clone ID: LIB3825-009-Q1-N6-G10
cctgggaaataaaaatttaaaatttttaccccaagaaaaaaccctaaaccgggggaaagaaaaaccttaaaccccgctaaaaaccagcccccccccaaaaggggaaattgggggggaggcaaaaaggcccaaagggcctttaaaccccaagggcccaaaagggccccccaccctaaaaaactggggccctggggccccccgacccaggggcccccaggaacataaaggcccaaagggggggggaaaaaaaaaaaaggattttcccaaaagggggagggcccccccaaaccccagcaaaggggaaacttttgaaaacaccccaatgggcgggataatttaggggggcccccaaacaagggcccgggggaaaggggggtcctttttaaaaagcgggggcctttttttttggagggaaatacaaaaaggctgggggccccggggggcaa

SEQ ID NO: 2089 - DNA, 525 bp, Gossypium hirsutum
  Clone ID: LIB3825-009-Q1-N6-G11
catatatatatatatcaactagcatagatcaaagactaaatgaaacattaatctaacataaataaaaacagaaaacaacagaaacaaacaagacatgacagttttgttctgtttttagtctgtacatgaaaaacaaagggattcaaaaaccagttacctaatttaaacttatgtccctttttttttttctctaaatccaaatttaagctctaataataataagctttgtgtcgcttttgcttattatataattattgtcattcttaagcaacactgatgattttattgttatctccactgctaaagtttggcatcacctgaaatggagaatgcctggaagttgaagatgatgatgaatccatttgatcggattgcaaagacagcttgagtgacagcgataaaggatccgtcgccggatttaagtttgtgttgagatcggatctctgaagagctgggaaatttggaaccggacggatgagatttgccgtcggaacattgttattcaattgattcccctgtgctatt

SEQ ID NO: 2090 - DNA, 549 bp, Gossypium hirsutum
  Clone ID: LIB3825-009-Q1-N6-G12
ggtccccaacattattaaaacttctcattaaagtcttttttatatgacatttgagatcaatttgcacgtaacagatctttccatacatcaaaatggagatttcaatacatttgagatcaaaagattctcttacttactgcttatgacatgctagagtaacaggaattgcagggtctgataacgagccattgagtgtacgatctgcaacatattgatttgcagcctgagtgtaatgaactccatcccagcttacaaacatagacgggtttttgcacgaaactccaaatacttcggttttgttgatgattgctttgttcccacaccatacgtgatcgtagttcacgtgatatccgcaacagggctttaatggatccgccattcctagattcttagcattgccaatcattgcaatcttagcggtatagacgtctacaagagtaaccgaagcttctgggagctccgttcttaacttgattactctgtccttaagctgtctattgaaatccatggccatttcattttgtttcttgacacaaccgtactgatcaa

SEQ ID NO: 2091 - DNA, 561 bp, Gossypium hirsutum
  Clone ID: LIB3825-009-Q1-N6-G2
acatgtgcaatgttaatttatgattcatacaaatcttgagtgataagtttaaccatatctattacaagatcatgcattcttactctttcatttcctacattttctaactagcaattctctactaatgttcttagtattgcttgtcccttgtccatgtttgcttccaagctacccatttcctctattaatccctttccaacccaatcccttatcaattgttcctttagaattcccgagtcttcacgatacgatgcacaagtaaggaaacaattttggattctttgatctttcaatcgatcgtagctgaatcacagttgttgatacaccttgtctttaatttcgatgatactcgatatgtttcggttcaattctgcaagcgcattcctccatattggaaaactatcttcacttctcatgctactggcaactataactatcaccaacggtaaaccggcacaacgctcaacgatagattttgcaatcggttgtaaatctatagaactcattaggttttgaccaaccttgtccgagaacaatgtccatgcatcttcattcgaaagt

SEQ ID NO: 2092 - DNA, 556 bp, Gossypium hirsutum
  unsure (1)..(556): unsure at all n locations; Clone ID: LIB3825-009-Q1-N6-G4
aacacgtagcaaaacgacagtttgtagtaaattaaagacatagattcgttctgtataaagtatacaacatgatggaacataatttaatagcaaaaaagtggaagaaaatggccaaagcgccatgcaaancatggctgttcttggcaaagaacaataggtaacttcttactatacaaacctcagttccctcaaaaacttgaaaggtgaaaataaaaaaggaacaagaactagtgcaattgcctgtactaaaattttaatgcttctctaaacttgatgctaaaactattttgcaggcctttcttaccagcaccggcaacatttccaccctgcatcatcgccacaaactcattgtaatcgatgcgtccgtcattatcctgatcaacttctcggatcatttcttcaaggcgaacatcttctatgccaaactcctcgcaagctttttggagctcatctggagtaatataaccactaccatccttatcaaagtaggagaaggcagcaaatagatgatcttctttctcgattttgtttaggtgcagcgtagcagctacaaact

SEQ ID NO: 2093 - DNA, 549 bp, Gossypium hirsutum
  Clone ID: LIB3825-009-Q1-N6-G5
caaatagttcattaatcattttgtagatttttgaagttaaagtcactaaaatctcacagggcattacatgagaaagaggagagagctaagggcagattgacaagaaaccagtttttcctcatagctttcacttgcagctttgcctactatgtacttccaggctaccttttcccaactttaacttccctgtcctggatttgctgggtattcccaacttctatcctagcacatcagctaggttcaggacttcatggcttgggtattggtgccattggatttgattggtccagcatatccgcctaccttggaagtcctcttgctagcccttggtttgcaactgttaacattgctgttggttttgctcttatcacctatatcatcactcccattgcttattggctcaatctcttcaatgccaagcatttccccatattctcagacggcttgtttacttctactgggcagagttacaatatttcagctattatagactcaaacttccacattgacatggcggcatatgagcgtgggggtagcctgtatctcagc

SEQ ID NO: 2094 - DNA, 461 bp, Gossypium hirsutum
  Clone ID: LIB3825-009-Q1-N6-G6
gggggaaagggaaaaccccttaaaaaccccccccaaacaaaaaaagggcttttttttttccggggggggggggaaaaaaaaaagccaaaaatttcaaacccaaaccaaaaaaaaaccaaaccccgggcccttaaaaaaaaaccaaaaaaccccaaaaaaaaaaaggaaacccccaaaaaaaaaaaaaaaaaacccccccccccctaagggaaaacccaaaaaaaaaaacccagggggggaccccccctatgccccggggccggggggggggggccccccccgggggcccaggggggaaaaaaaaaaaacccccctgaaattcggggaaaccgaaaaaaaaaaaaggggcccaaaaagccccaccccccaaccccggggggggggcaaccccccccaaagggcaaaaaaaaaggtttaacccaaagcccgtggttaaaaaaacccgggaggccaacccccaa

SEQ ID NO: 2095 - DNA, 378 bp, Gossypium hirsutum
  Clone ID: LIB3825-009-Q1-N6-G7
ggggaaaaaaaaaatttaaaaaaaaaaaaaggggaaaaggaaaggggaaaaaaaaaaaagggggggggggggaaaaaatgggggggggggaaaaaaaaaaaaaaaaaaaaaaaaaaaaaaaaaaaaaaaaggttattaaaaaaaaaattgagttaaaaagcaaaaaattaaaaaaaaaaaaaaaaaaaaccggggggggaaaaggggccaggggtaaaaaaaaaaaaaaaaaaaaacaaaaccttttttttttttaagggggcaaaaaaaaagggttttggaaaaaaaaaaaaagaggaaggggggggtttccttgtttttttgaaaaaaaaaaaaaaaaatttggcttaaaaacggagaggggggggtaaccaaaaa

SEQ ID NO: 2096 - DNA, 553 bp, Gossypium hirsutum
  Clone ID: LIB3825-009-Q1-N6-G8
aattaagaaagattctcattaaaagtaaaaaagagtggttaatttttgaacgagaggttataaacaaaatcatctcagataatggatcatagttttcctcagtttgcaaacacggattactgtcgtaaaactatttacatcggatttaaaagataaaaccgtgtctaaaatgatacaaaacacggattactatcacctcttgtttatcatagcttcctacctctcagatgcctaaaattaagatcatgaaaaggcgttttccgtttaaaaaaaaatgcaaaacatcaagcatcgactggaggaggaaggttaagatcgagggcaaggccaggtctccttgccttgcaatgaatggccgatgaagagtccggttcacttcggactacacttgcaaatcccatacccaactgtactcccaccggatcgaaccgaaccggataaacctgaccaacaacgccagctccccccaacgcttcgaaaaatagaaccggccgcgaccgggtcaccccgctaatcccaccattagcgactccaccacccagagccagctgct

SEQ ID NO: 2097 - DNA, 425 bp, Gossypium hirsutum
  Clone ID: LIB3825-009-Q1-N6-H1
ggaaagacgaaaaaagaaataatctctcctatttactccggcggcgaagaaacaaattatcactatttttattcctttttctacttcttcttccaagggcagggtaaccccaagggggggggggtttttttttaccaattggggccctcccttcaccacccccatgggggggggctacaggggtcataactaccccttttactacaggacgcttacctagccaacatttaaatccgggtttacccaaacttttttggttcaccccaacattccccacctgtccgactggtgctgagcagtttttggatttcaaacggacccccccaaaagggaattttaatggggccgatttcccctcctttgcaatcagtttcgcaacagcacccgctgctttagctaattggccaccccttccaagggtgatt

SEQ ID NO: 2098 - DNA, 563 bp, Gossypium hirsutum
  Clone ID: LIB3825-009-Q1-N6-H10
gaatacagagagctgcttacaagttacaatatacaaccacatagagcagcacaaggacataagcatagaagcagaacagagcaacaaaattgatagattactttctagcatatcagccgactgctacaataggaaacttcaacccacagtcttgtttccaccttcttgtgtcttactcttgccaccttcttgtgtcttactcttgccaccttcttgtgtcttactcttgccaccttcctgttctctgcctccctcagagatccttcctcctccttggctcctattctggatcttctgctccatactcactgccgtgtccggcaagggccacttcactgggtctagcccctgagacatagagcccctgcttccacgaatataagtagcaatccacgacagcgatgacagtccagtgatcccaaatgctccggaggtcaagaatccggctatggaacccgcaatgagaaaagcagcaggtaccaaaacagggctaaaaataaggaaaagtggggcggcaatagcaagacctatgagggatccaataaggctcaaaccagcaagca

SEQ ID NO: 2099 - DNA, 544 bp, Gossypium hirsutum
  Clone ID: LIB3825-009-Q1-N6-H12
gaaaagaaaaccctagttaaatataataattatacagaaaggaggtgaatccaaacaccaaaaggaaagatgaagctttgtagcatttagcactcctaaaaattcttggattagtacaaataaagcagtacaaggcctacagggtcaacatttccatcaatgattaatcaaagcctattgttagaaaaggttagagaaaatcagaaatagcaggccaaaccaactcaaatcggacggctaagggattacaagtactaacaaattttaagatatttttactggattttctcaaactctaatttttgcctaatgactccgtactcgtcgcgcctctcgaattggactgcaactgaaccgtgccctccggtttgatctgttggtccttcgatagcctcatagtcctggagtcaaccgaaacgcctccaccctctgctctgcaccgcgtcgccacaacagtatggtagccgtacctccgttttgaagataaacgatccggatcgtcctctctttcaccaccagaataattatcgctactagaagaact

SEQ ID NO: 2100 - DNA, 567 bp, Gossypium hirsutum
  Clone ID: LIB3825-009-Q1-N6-H2
accaacaaaaatcattttattatttgcatttaaaaaaccaatgtaactacaaaatgtatatacagattttataagtagaacaacaaatctcacatctctgacaaaaggttactgatcttccgaagctctttcagagctgtcattgctgtaacttgtcctttgccaactaaattgcttttacccaagttgtccactgatcccacttgaactcgatcttgctggaaaacagactcaagaacctgaatgtgttcaagcatagactgccccagattcttcaatgttcccattacattctggtccacatctctttggctggcgagagatgaattacgagaagcaccagcaatagatgagtctgctgtattgctcttgctatcacgatttagagattttggtgtctcattggtacctcctcctttatccgatgcctcctgactgacattgtttcgtccaaacctcaaaagccattgaaatctacctgagagatgtcttctttccctcatggctgagaccagcttccctgaagattcattctcatgcggcgaatttaaagggacaccttcagga

SEQ ID NO: 2101 - DNA, 546 bp, Gossypium hirsutum
  Clone ID: LIB3825-009-Q1-N6-H3
cttcaaggacaaacttttttatcatcaaaggtttccacaatatctgacatgagttcattattatgataaaaggcaaggagctgagtataaaacttttgtcacaaaaacatggactttccaatgaaattataccaatgcgattgttataactcgatagaaatggctcctgctgaatagaacaaaaatgattgtaggatctgtacgaaggccctaaaaacatagtattcatgttggcatcacacaggcagattccttagcagacgaagtgctcgtgaccagtgtgatctttgcgataaaacaatcttcctcaacgctggcaccgccccagcagctatgattgcagaatgattctcactgtccatactcagattatacagtattgataaggctgcttcgactgccctgtcactcccttgttcaataagattcacaagtggaaatataccaacctcagatgcgacagctcgggtggaatccacaaccccttcggaaattattctgttaagttcaacagcggcggattcctgtgtttctggagaaagagac

SEQ ID NO: 2102 - DNA, 157 bp, Gossypium hirsutum
  Clone ID: LIB3825-009-Q1-N6-H4
tcgcgatctagaactagacgcacgcgtggacccaccaattaatgaccgacccctgcctgcatgccaaccatctctatctatagtgagatgaaagctagctggacgtatggatatagatagctgctgtctgaaagaaatagccattcacacacacaca

SEQ ID NO: 2103 - DNA, 547 bp, Gossypium hirsutum
  Clone ID: LIB3825-009-Q1-N6-H6
ggaaccatataaaagtttagcatttcattgtcatttaaccacagcagtgtgaaaaagagcaaccgatgaccaaaaaaaaaaaaggggcccgtggaaacataactatcgtcacgtttccaagcttacaaattccattacaaatggagcccatcatcatcactactcaccaccaagcaacccaagaaacctacatcaaacgtttgagatctggcattgctaaacctttctttttttctttcacttaaaaatgctcttgaaatgtgctttgaagattcaaattttgggttacttccacgaagaacactctttggggagaaaccaataaatccggaaaaaagattgctgctgttgccactactgctagtattactgtgatcaacttgcataaaaatggaaaggttggtgccagcattcccatgggtgataataccactaccactactgtgtgctagaaaagcttccacaagctttcttgaaagctgtcagcctctatgcatgagtctctcacagattatatgggctgggactgcttctttgttgaaactac

SEQ ID NO: 2104 - DNA, 550 bp, Gossypium hirsutum
  Clone ID: LIB3825-009-Q1-N6-H9
atgataaagctaatttattaaaaatttagtattacaagagctttaaaatttatttaaaatatcaactagaaaccaatgtacttgtaccacatttactttgctatggaacattgtgaatttgtggaatgagttggatcagaaaacagggatgcccaaatgatggcatgtcatcatgaatgcttgttcaggccaaggaagaaacggtgttttctcctcttagaatgtctcccagaaccttttgagacaacataaggtaaaaaatgtacctgagaattatttcgaacaccaaaatcctgaagtgcagcgccatcattaaagagcttctcattgtggtgtgctaggcagaaattagcccaaacgtgcctccatgaaatgtgtcgatgccccatcttggattgctctaactcaatcactttcttctcgattgcgagcttcaagtctttcaccgtggctgaattcatcactgcaacatcttcaaattccaaggaaagccaatccaaacaagtactgactttagtttcaaacacaaattctatgtggctgaaggcct

SEQ ID NO: 2105 - DNA, 518 bp, Gossypium hirsutum
  unsure (1)..(518): unsure at all n locations; Clone ID: LIB3825-010-Q1-N6-A10
ccgcaatggctatagtaaacctaattttgtaatttacaagctcaagaagtgaaagacatcatgtaatcaacaaacaacttgatgcaaaattacagttggtaatctctttgatagtgactgacaatgatgcttctatattctaaaggaaaaaaagccagtaaccatttcttgatttgattttcgtatggagatttgcttggttacgaatctcttcatacagtgcaaaagcagaaccacaagaataagcaaagcatagccgaggcaaaatatagggctatggctgaaggtgtttgtgagcttatttggctacagaaggtattggaggagttgcaactgtcaaggaggaaaattatccctgtacgacggttttttctacttttcccaatttttattttatcatgataatactggtaatccatataatgaagagtagccagtgacantttctctcaatgtgttgcagttttaagcaaacttcatgctgataggcctctgtttttctctagtaactgccaatt

SEQ ID NO: 2106 - DNA, 457 bp, Gossypium hirsutum
  Clone ID: LIB3825-010-Q1-N6-A11
gcaaatcacaacataaacttgacttccacatttacattgcaagctgaagcttacgtaccggggaaatggtaataattcttattctgttatacagggaatcgattttaaaaataacaatccatatggatacctacaagctcaatacacctacacccctttaactaatttctttacatacaaccttctgtgaatgcagcatggcgcatttacctactttgacttacaaggagatttctcataaaaggagggggaaattttgccttggccgttctataaataactttgtgccagataagcatcatagataatgaggatatttcagttgttacctcctcgaatccatcgcgctgaacctgtctttgccaagcctgaataataatcacccacgttcgcaacaaatagtggatctctatcttcaactcttaactcgttcacgacactacccgtgctatttccc

SEQ ID NO: 2107 - DNA, 545 bp, Gossypium hirsutum
  Clone ID: LIB3825-010-Q1-N6-A12
aacaggctaaattggaagggttaataaattataaatgatcaacgcacattccaaatgctacatgacaaacagactaagaagcatccaatgaaatatcaaatctgaaaagggagcacattcccgttactattaaaaaaattgcggggcatatagggaaacaatctacgacgaaaaaataaaaggggcaagatggtccacatatcccaaattatgcacactgtgaccctaacttaacagaacacatcagtaaattcaaagtataatacaaccttatgggacagggcaccagccatccaaagtctgttcagacccaataatttggtgatgatctgcacatatagttattcttaggcgatagaaggccctttgattggccactttcaaactcactataagaccctgaaaaaccaagacgagacgagattaataattgatctgccataactgctgggtctgctttgattgtggctggccttgagacccactcatggacccatccctagggttttgctgctgagggtccagcgatactcccgtttgcgaat

SEQ ID NO: 2108 - DNA, 557 bp, Gossypium hirsutum
  Clone ID: LIB3825-010-Q1-N6-A2
aatgaagcaacttacagtctttaaaatttaaagcaagcctttacttacaactgtatttccaaactggaatgtctatgtattgggtatattggtttcagatcttctaatcaaacgtaacaacaaatataaaaataacatcatggattacatatcaatctccgtcttcagcagtaaaatcaggttccggaggcttttgtagtttcaccaactcctttgcgctcttagcgttccggttccgatgaatgccacgaagtgcgtttgcagcaaacttggaagctaagaaagtagcaccgatgctgtatgaacctccaccgctgttattgcgggttccatctgatcctgctgctgctgcttcctcttcttcttccttacgacgaagctcctccatgatcttcctcttggaataacgccgccaagcagcttggataaagcaagctgcccaggttctccactgctgtgaatgaaaacggaatgtatgttgtacctgtctactgtgaagacgcctgaattgaccggcaacaaattttaattcctcagctatgagggcaaaagcttcg

SEQ ID NO: 2109 - DNA, 513 bp, Gossypium hirsutum
  unsure (1)..(513): unsure at all n locations; Clone ID: LIB3825-010-Q1-N6-A4
aatgttccaagcgaataatcataaaattaacatagttttaacaccaaggttcaacaggtttagtttaataatccatgcaaccccaaacatactagatattgttcgaaattccaagaagcaaagcccaacaaaacagatgttcaaaatacaagcactcccttaacagtagaacataacacgcttgacattttccttgagggcaggcagaggtctgacggcagcactagcaccaggtcctcttgtgctacgcccaccagcagctgcagctccacctccacgccctgcagctgtggcacttgtcattgatccactgtctgatgtttctggttccatataaaaccgagctcggaatgcagcaagatgtgcgtagtacgcagggggaacaatagacactgatcgtgtgcaccttgcatatgtatagcaaaggttatttgtgagagattgtaatgcatcagctgtaaacttgttctcatnccatagcacatggtaatgagctggacggcttgtaccctg

SEQ ID NO: 2110 - DNA, 552 bp, Gossypium hirsutum
  Clone ID: LIB3825-010-Q1-N6-A6
atagtaattggatacagttttatcaataatgaatttctattttacaagaatataagtatacaaaaaaattaaatataaaaacaataatcgactctcaagcatcaagactagaaagaataattaatcttccgcttcttttcgattttccaatctgtgcattttatctttagtttctaatcaaaatgagtggcaccgagtcatcagttcttccatcgagtcaacccagatccaccgagttcacgattccaaaactcgcccaaaaaagtcttagccgcatccaaactaggaaaataagcaggctctaagaatacctggctcaacgaatcgaccgagccggagccggccacgactcggttccctttcgcttctaaactccccataaccaccaccaacacctgcttatatccgtaaaagaaccgttttaaagctccttcgatggcttgcaaagcttgtacgaggaagaccttattgccctcctgcttctctgagtacaatctcatcgcagcttcttggatcctgggtccgcccttaggatccacctccacacccaat

SEQ ID NO: 2111 - DNA, 505 bp, Gossypium hirsutum
  Clone ID: LIB3825-010-Q1-N6-A8
aagagacaaaactatacattattgtacctttcaagaaaacgatgagagctgaacctgaataaaaactataaataaagataacaaagacatgagaaaagacaaaatatccctaaatctactaaatatcagctcagccccatgaatgtttattgatttttgcttgtaggttctttgttgggagattaaagcatatatcccccttgctggtttaaccgcaaaagattcatgctttaattcccactctggtcatccatgtaaataccaatttccttcggaatgtattggattcgggttccatttcagctcaatgtcgcaaacaataacaatctgatggatcatctatttcatgacagtttgctgcttttggggaaggtcttggtgccgcttgacggaatcttggttctcaccctctacacttgtgtccttgtcttccttagtcaggtatttgtcgacttgtgcagcagcttgccttccttccgagattgcccacacgactaatgactga

SEQ ID NO: 2112 - DNA, 541 bp, Gossypium hirsutum
  Clone ID: LIB3825-010-Q1-N6-A9
gatggtgaaaagtaatttatttgccacatccaagtttatttacatccactactaagtggttccatatcgaaaataaaaatgaaaagaatccttttgaaaaaagaataaaatttacattgtaacaccattgaggggaaaaaaaacactggattccagcatgtccgagactcgaacgtcgaacggcaaacggctcttttggccattttgatttgatacctccacggataggaacaagctttgaatccagttgcattcaggtatcatcaacttgtgaatgaaaaacgaagctcgggaatgttgttgtgatgtccttgaggtattgcagggtcatgtttttcagaagggacggatgtcgtaaaacaaggcttctccactcttccttgtcaatccttccatcgtgtttcgtatcagcttcctcaaaggttttctataacatcatccgaaaggttcatgcctgattcagcaagcgtagccactaccatttgcttcacttcctgcctctcaatgaaaccttgttgcttgagatcgtatagttgaaaag

SEQ ID NO: 2113 - DNA, 524 bp, Gossypium hirsutum
  Clone ID: LIB3825-010-Q1-N6-B1
ccacaaaataaaatctatagtgagaaaggaaaatgaaaaattgagagacagaaattctgagaactttataactacttaaatcatgattgccacacattctgtggtttaaaacaaagagaaaccctaaatcccccgatcaataaaaaactaagaatgacttctgtcgttttagtggtctaggcatttgctttcctaagctagttgtgaggtaacaattacatttggcatttccctctctcaaacagcataggcaaataaataggtaaccgaaacaattccaaaacttccaaatcatccagaagcattgatatcctgaatagcggatctcaggacctcatccccagcaacctgccgtagtttctttataaaagcatccttggccatcattccagccctatatgtgctgtatatcatcaatatttcttggacattgccaggaggtagagagctcttaatcttcgaaaataatttttcaagggaatacttaacacccgcaactgccctcagtggagcttcacctttgc

SEQ ID NO: 2114 - DNA, 506 bp, Gossypium hirsutum
  Clone ID: LIB3825-010-Q1-N6-B11
accaaggaatggcattgactagattctttgaggacatcatgcggactttcttgggcgttgaactaatttaattgtacattgagagtagcaaaaacgctgcgggtaacatttctatgctagtaagatgtagatgatcaacttctgaagaagacccataattgccataccaccctgcctaacttacgccaaaggagaaggcatttcaattgaaagtaggcgcatacaccatctgtctctaccctgactgaccaatatgttaatggtcttaactgattacagacccaaaccaccttatggaaaatgaggtttcctaccacccgcgaaactgtgacaactcccaagttacatgttgagagggacctttaaagatctccggatctataaatttacgtctttattcccccacaaaattacaccaaactttaatgttcaatcaccctaattgattgctgcacttcatgatgaatccgattaaacctgataattttactcaaacaaccttaacc

SEQ ID NO: 2115 - DNA, 558 bp, Gossypium hirsutum
  Clone ID: LIB3825-010-Q1-N6-B12
aaaatataaagtccaatttttaaatagtccatcatcaaagtccaaattacaagacattacaaacctaaacccaaacccaaatttaaaacccattacattaataccaattacagcccaaaattacatcggcccaaatagcccaaaatactttagaaacagaaaccctagggtttctacctctagcgccgcagccaggttccagcccacagcgccgtacggcctcctggcaccacagccacgcccacgcctctgtacgccaatgcacagcccccgtacatgcgccacgcacaccccgtacctgcaagcaaatacaaaagccacagcacaacaaagagggaaaaacaaaaaaaggaaagtgtatttttcttttcatttttttgtttcggctataaaagccatgtagtgattaatgtaattttttttacacacactaatacgcagattaaatagaaaattcgaaagcaatttttccaaaaggtgatctcgagtttttttttctgtttcttttccttttgaatctatttttgcctttttttagagtttgcatgtggttttctg

SEQ ID NO: 2116 - DNA, 589 bp, Gossypium hirsutum
  Clone ID: LIB3825-010-Q1-N6-B2
aaaaaacaatgaacggttcctgattacaagcaatcacaatccaattgacagagacagcacaattcagcaaaaaccaaaccaacagtgtctatagtttttgaaattaaaaggtgaaataagtaaaaacacgaagcattacatcagggctctataggctctcaagccatcatgccatctttaagcagtgctttatcagtcagaatcctcgtaaacttctccatcggatagctcatcgaatgatcttatgtcaagctgatagcggaggatacctccaatgccaccgaagcctctgcaaaactgtgatccttcttgggatttgtttgtgacgaattcaagagaacaaccaaagcgcttgtactcgttggcaaaccattcgagtaagggcattttttcttgaacttccaactctgcagaggtttcaggatcacggaagttgctctgatcagcctcctgctccttattcaggtgttttatgataatttctccggttgcactgtgctttagcacgtacctattgatctctagattttcccacacaataagggtttctacagcacccatttccagagccttcaacgtatcatctatg

SEQ ID NO: 2117 - DNA, 564 bp, Gossypium hirsutum
  Clone ID: LIB3825-010-Q1-N6-B3
gcctaatcgaattatatatttgctttaaatttattaaaattacaaaaatatattacataattgatgaaataacacctcataataacaaagaaccacaaatgaaggatcattgtaatacaattccaagccaaactcttttcaataacacccttattcctggatcagttgtgtaaaataagaaaatacagtaaacatggaaaaatattacatttttacacaacatgcatgaaacataactggtaaagccaaggatgagttgccggtctccgccgccccttctcactggacaacagaagcaccgtgccgtattccatcgcctgtaccgcctgcacgtgatatattggcgaatccatgttctagccgctggaaattgcagtcattgttggaaacgctcgagatgttcatgcagcttgtattcggaccgtcatatccggccatgcgagaataatgactctctagttctgatatactattcgtttgattattgcagataacattgggctgctggagtgtctttttgctaagaaaacgtcctcctgatcccctaaccctattcagtgcatg

SEQ ID NO: 2118 - DNA, 565 bp, Gossypium hirsutum
  Clone ID: LIB3825-010-Q1-N6-B8
gtcaagtctagatttaattcaaataataatgaagctgaggttatcaactggcagattcacatgcatctaagaaagcaatgaaaagcatgctcagataacttgtcaaaaggattgtttgcagaaatatagtttaaagcttgggcatcttgaagattccaaaatccaaaaattagctccgctgatgcacagaattcaatgcttctttctcttttcaattgcagtttgagttatccatcactaattgggcatgaagctcattttcagctggctgatggaaggaagaccctaattagttcctttacagtcactcttttcctgcaagttgggcattttccctgggctgctattgcagctttgatgcatgccttgcagaaaatgtgcccacatcttgttgacatctcctcatttaatgaacccatacaaattggacaagtgaaggttggctccttgggaagtgactggggctttgtaatttccttgaccatagactgcggtgaactctccaaattgatataccgatcacaattgataactactggggtcggaggaagtctcctgcacctgt

SEQ ID NO: 2119 - DNA, 560 bp, Gossypium hirsutum
  unsure (1)..(560): unsure at all n locations; Clone ID: LIB3825-010-Q1-N6-B9
gacacactcataaagtattancttgaaaagaatgccaaatcatcatcaactctcattaatcaaaggaaaaagatcagaaaagaagaagaaacaatatacaacagagggctggttcaagcttagatgaagccaaagtattgcaatgcctgcatataacttagagaagtcctttgctgctttcaattcaaccgccagagaatccaaaacactagaatagaaagccaaatatgcaccctgagttttagcactaatccatgagtcttcccatacatatatgccatgattgcggacaagcacagcagttgttttaggataggcttcaatagctttagcaagagaatcaataagctcgttttcataagccgtgttctcgataattgggttcacaagttcatcgtagtaaccatgtccttggattccttttatcatttccatatgagtgattctttcaaatgtggattgatcattgttgcaagacaggattccatttcgtgactgtggatcacagccccagcattacgcatacgatacgccttcatgaaaagcgaagcacaatcaga

SEQ ID NO: 2120 - DNA, 441 bp, Gossypium hirsutum
  Clone ID: LIB3825-010-Q1-N6-C1
ggcagcataaaatattcaaacagcatgcttatgttttaactttattactagccataatcagcactagaaactaaacaatcaactttgaagtcactcatatactggtgatacaaacctaaacttaaatcatctagacaattaacggggggaaatactcccggatacatactaacccagccaccttcaaatcagtcacctagaatagtccaaactttgactcctgctcctactaaagctccggcttggactccttgagccacagggggacctcgagtaaaaccgttctctatatcttttatctccaggtgaaattgaccttgagtaacgtctttgcctaggaggaggagaataatagtatggactgcgggagtaacttcgagcatatcttggggatcgagaaaacttggtggagagcgccttctgcgttctcttgccctcatt

SEQ ID NO: 2121 - DNA, 573 bp, Gossypium hirsutum
  Clone ID: LIB3825-010-Q1-N6-C10
caatgaaagatatatgatataaattgataactgaattataattcaaaatattcttacaataatattaaaattaacaatgttaaaaatattcttacagtaactaaagcacactaaaatgtttacacaatcaactcccagaaacaggtgtagcagtaaccacaagaaaaaaaaggaaaatacacaaatccagaaacaacagtttttggcaatcactttttcaggagtaataccgaaaaaataaccccctggtttaaacaaaaatgacacattacttagaagtctccttgctttgtctttagtttcaaatcttaactgcaaatgctgcaacagactagatcagcctgaatgtccttttgcaacagggtttccaaattatccttaatttcagatattgtgccttttgtcagattcaactgttctagaatgaattcttcaacaacctccattgagaccttatcagtcacaactgagaatctggccatagatgaaaagctagaagcagagaagctcaaaaaatccagtagcagctttgatctcctgggttcttctttgtctccaaaatgggatctccct

SEQ ID NO: 2122 - DNA, 577 bp, Gossypium hirsutum
  Clone ID: LIB3825-010-Q1-N6-C11
attaaatatttgggtccaatcatctattacgacatcatttgcctttgttcattacacaacagtttcattcacctccaaagagtgaatgtttcagcaaagttgccatcatgactacatagaacaataaagaaacatccagacaaaattgtgaagaacttggtactattgtgtctcaaaatttcacatcagttgtccatgtaccttgcacactagggtgtttagttacatgccttgtcttcaatttcaccacctttcttcccaatgcgtttcttagcctggttgcataaagaaggatatcttcaggagtcatattcttcacacataccacccgctcgtttttgttcttgtaaaagcctttcaaatgtggatgctgcccacgaatgagttcaggaaccacctccagctgagggtttttctctttaaaagttggtaactctgactccataaatgccctgatgccccggctactacctccccaatcacaatagcttacaatcagctttttaagttgccaaactcctcgcagtgccatcttcattttcaaaacataaaaaaattattaactaagtatatgttt

SEQ ID NO: 2123 - DNA, 521 bp, Gossypium hirsutum
  Clone ID: LIB3825-010-Q1-N6-C12
aaaaaaaaaaggcaaattttcactataaaaaaggggaaaggggaacagggaaacaatgagggagaaagagaagtgaagggcaacgtccaccatcccaaattagcacactgtgttcctaagttaacataaccagacaataaataagtaaaatacaacctcgtggcacagggcagtagccattcaaggtctcttcagacccctatcaaccatacatgtaattattcaatcgcacgaatgccttaaattggccactttcaaactcactaccaagaccctgaaaaacccggaggtgataacattagtaattgttttgccacaactgttgggtctgctttgatggctggccttgagacccactcagggatccatccatagggttttgctgctgatggtcccccaatactcctgtttgtgaatggtagaaatttgggtatccaagagccccaaaatgctgcgaaggttgttgcccttgtcgaaatccaccaccctgctggttttgcccctggaagctgtaataattg

SEQ ID NO: 2124 - DNA, 575 bp, Gossypium hirsutum
  Clone ID: LIB3825-010-Q1-N6-C2
aaaacgaacaatacgactttgcacttgaataagttcatttttagttaaaattccatgaaatagcttaacattttagctttcctctcggtttcaagatgtagacaggaggcggaaagagaagcttttttgtggcagtggttgagcatttcataattgttgctccgaacctgggtcaccaagagagctccatgaagtcattgaggatacaagagtcgagtgaattataattgtgttagcaccagcaaatgtcttgtgcattgcatgttccttaacaagtttatgtcttggaagttatcttttcttcttcgtatttaggttgtaatctaatcatttcacatggaagctctagaatatgctgcagggcatgataagatacattcttttgttgtagatggaagattatccagctgaaattctggtgaagtcgacagatcactctggtccagttagcaacgttgtccaaagtcccttggaggaatctgctttgatatgcagtatgggaacaagatttagcagcatagatagtgaaactggaattccagctgaaagcagttctgcagccagtcagaattcct

SEQ ID NO: 2125 - DNA, 546 bp, Gossypium hirsutum
  Clone ID: LIB3825-010-Q1-N6-C3
gctcaaacataaaacatcccactttataatattaaaatgttcaaaatcaataccaaaaccaaatccagctcaaatctatatctatattctagacagcattaaaaacaaagctcttctttcagttacagcaacacccaacattacctaagttaaaaccagattgaaaccagagacaacaatagcagttaaacagacaaacaaaatgattcaatataagtgtggtttaatggtcttcagtttatagacgtcaacattaagctgtttacctatggagcaccataagctggaagatcaggccattgatttgggctcaaagaagaagcagttttgctgttactggtgttagtgactttaacggtgcttgtgaccgcttcattgatgaaattttgatgccaattctgctgataataagagttacctgcagcgggccattggaactgggtctgctgatggtgttgtgaccccaaaaatgggacaccatatccctgcagaagacccaaatttgaagaactactgccgaagtcaccaccaccaatacgtagagcc

SEQ ID NO: 2126 - DNA, 553 bp, Gossypium hirsutum
  unsure (1)..(553): unsure at all n locations; Clone ID: LIB3825-010-Q1-N6-C4
aaacattatgattgattcaccttttttcttgttttctacacgtatgttgtatgttgcacaacgtgcttacccaaacaggaacaaattacagagaaagggcaaaaaattccattcaatacacaagcagtagcactcccattatcatcatcatcatcatcaccttgctgctatctatcactgacgcacgatggcatggcatgtagacgaccactcatcccaacttcattgccctttttatttcctatgcttctttggtgaaggctctgcttgtggctcgcactgaacactcgaaagctgctcccggatgtatgccattgatctcaacattgctcctaatgtatccctggacacctggaatttaacctccgactctcctgtactagtctcggtgtcttgaagcttcaaattgatgacggcaaccctgttagctggggtagaaagctgttcactgatataagccattgacctcaacatgggttctaaagtaatccttgagagctttaaaataatgactgccaacctatnttcaggtttagaattcttgttctccatt

SEQ ID NO: 2127 - DNA, 581 bp, Gossypium hirsutum
  unsure (1)..(581): unsure at all n locations; Clone ID: LIB3825-010-Q1-N6-C5
gccgatggaaaaaatgactgcatttctcaaaataataatcttggttcttcactagcagacaaagcctgtctgcaaaactaaattgaagggggaaactaccaagtccccgtaatgggaaattttcggttatttgatagcctttatttttatttgcatctcacattctacatttgatggaaatcttggaagggcaggctcccaacccatggatttactgcctaatcaagtttctgataacatatggaagtataccaccattgttgaagtatgccaattcaacctcagtgtcgaagcggacagtgcaggtgaaagatttcccattgtcagttgtgacagtcacatcttggccaggtcgtatttcatctattttgcgtgggagatcaatggtataacgctcgtgacctgttaaacctagtgtgtccgcgtcctcaccagacttgaaacaaagtggaatgattcccattcctaccaaattactgcgatggattctctcaaaactttttgcaattaccgcttttactcccaatagcattgggcctttggcagcccaatctcgggagctaccacttncatactcagct

SEQ ID NO: 2128 - DNA, 471 bp, Gossypium hirsutum
  Clone ID: LIB3825-010-Q1-N6-C9
ataaatatcaatataataacgggacggtttcttaacccgaagaggaacagttttaacatagcacaacaaacaactatttcggggggttttttttttttttggtatccgccccaaacatgataaacaatccaacaccttttatttcaggcacaaactataaacgctttttaacaaaaatctttccattaaaaatcgcaataaacaggctgaaaataaaagtcttttactattttggaccaatgtccttgagggcacaaatctgctcctcccccattgccgacataacaaacaccaaaaggtttttcccctaaacaaaaccgtccttgatctgtttaaacaagttttaatcagttgggagcctcaaatcatccttagggtctccgctttcagtcagcaagctcacaaatccatcctcaaaaatgtcgatcaattggtaatcagaacggttgacgtgcggaaaatcaaaattgg

SEQ ID NO: 2129 - DNA, 470 bp, Gossypium hirsutum
  Clone ID: LIB3825-010-Q1-N6-D10
aatacagaatcattagtcattcacactttatttgctaaattatagtagatatatagataatagcactaaccaaaccatcattatcatctgggacattctcaaatcatcaaaactagtttcaaccacctaggttggtgaatgagattacttcttaaggtcagtgatgttagttccattttagtctacgtaggcaaggcagaagaaaaaaggaggaaactgtctaactgctaaaaggaatttatgactgattatcaggacatattaatctatgagcttctttagcttccacaagatctctacttgcctcatcatgagcaaattcatcagcccaagaagcacctgcattgtactgttgctgatattctgttgcccagttctctgatgctggtttgacctggttatcatcaatgataagtgcaccacgagctcatctgggatacaaattgaagaaaattgtgaattgttgatgc

SEQ ID NO: 2130 - DNA, 571 bp, Gossypium hirsutum
  Clone ID: LIB3825-010-Q1-N6-D11
acttgtaataaatttaccctttgtttcacattaatggcagaaatcaatgaatcttaccaatatcaaaacattagagtaaaagatgatgacgacatgcttcagtgctaactgctaagctgtacaaacaaggaattactgcttggtaatatgcaaccaacataacttcatcatgcaattggcaaatccaaaattcatcctcaaagtcgagcacatttaaaagatgaataagtaaatcagggggaaaaggaactatgatgatgagagagggattggttttactgcactttgaattcgtcgaaaagctgtttttactctctcctttagaccttcattttcactctcaacatccccactctgtttatcaagaagagccacattcccatcaacacttaccataagctttccattttctcctaatttcacatccccaaacagtgaaaccaggagtgcatgaataaccttttccgccttcttcccgttttcttcttccgtttttatggcctcagattccactactaccttagggatctcccggctgatgttcagaaccaatgccacgatggaatccgac

SEQ ID NO: 2131 - DNA, 514 bp, Gossypium hirsutum
  Clone ID: LIB3825-010-Q1-N6-D12
caaaaagaactgtaatgtgataaatgatagttaaaatataacataaaccaaatgagtaactaaactaaattcatagaaaaaaaaacttaataaaaagcaaatccgtaaaaccctacagaagctaggacaggaccagccagcattcatccaacaagtctttcgacaaaaaaaaaactctagatatgataggtttaagcagcagcctgagcagcaagccttttcctcgcttcctcaatgatcgacaacttgatacccttgcccttgggaagcgaaatccatggctttgttcctttaccgattgtgaagacattgcctaaacgagttgcaaactcgtgtccagcagcatcttgtacatggattgtctcgaagctacccttatgcttctccctgttcttaatcactccaacacgtcccctgttccttccaccagtgaccatgacaacattcccaacatcaaacttgatgaaatcaacaattttgttgctctctaagtcaagcttgatggtgtcgttgg

SEQ ID NO: 2132 - DNA, 589 bp, Gossypium hirsutum
  Clone ID: LIB3825-010-Q1-N6-D2
agggtaaaattctcaatgtgttcaaatatcaaaactgtctctaacatagaacttgattgttggtggtatcacataacattaactcacatgcaaaataggtaacaaatagagagtacactgctgaacaaagaaacctgcaaatggctcaaacattgtatcgacctttcactgatctttcccttcgaaagtcatcatggaagctatatgtaattttatcattgatatcaatgatctccttccacttccttccaatacccatctgagcagcctcattcgttgcagtcttggtccacaatgcaagtttgtcctgcctttggcgaacactggcaactacaccacaaatctcatctgcctcatcaaattgctccccgatcaatgccatcaaactttcaagccacatgttctcaagattagcctttctgttgctagtgacagaccattttcctccattagcacactcaggatcttcccatttgggctcaattccagccttaaacaagtggaaatcagcatttccaggcaacttactaggcttgaatatttgatcatacaaacaccaaaattcttctacagtgtcaaaagtgtaaac

SEQ ID NO: 2133 - DNA, 523 bp, Gossypium hirsutum
  Clone ID: LIB3825-010-Q1-N6-D3
ggctacaaagagaagagaagcatattttatttggttcaagcaggagaaatgaaatgcaagtctaggatcagttgaaaccacgacctactaaaatatttaactaactggtcatcaaagctacaaatatcagagcaactcccattctgtcattgtcatgggtagtagatatgggtgtgagaatatcatcaaagccaaaaatcaggctccgccctccctttctcaacacttcccacaataacactttcaaattacaatccggtggcccttcaacaccaaactataaacatttctccccaaactattaccaggaaacagtcatcatccgcgcattaaatcaatgttgacatggctattgttacccatatccattgatctcgacccaggccacacccctgccggggcacttggagtcatattttgacttggggatatgcctggaggagctactagattgtcaaccatctgatcatctgaatcttttaccccttcttgccctccttttttgttctttgccggacgcgtg

SEQ ID NO: 2134 - DNA, 542 bp, Gossypium hirsutum
  Clone ID: LIB3825-010-Q1-N6-D4
gatagtaacaagagttgtataaaagaaaaacctaaacagccttttactttggccctgtttagtggaatatctgaagggttagtagggatcaaagtatgagggagtgtccgtatttagcattgcttttgactgttcaaaagtaattgtttttgcagcaaaaacaatgctaaacaagagtttttgccattcaaaactggcaaaatacttctaaagagtgcttttgaagccacacgaaggaactggctcgaagagtttattttaggcaattgcgattgtgaacggctataccaggcaacatgtatgagtagacagagctctcagggcagctccccttccacaccaatttcttcttctctccttttgcatatgttttattgaagattgagttctctattgtacccacttttcacttgaccgtggctcgaagcatcaaaaactgccatcatcttcaagctttttgcaccggacattgctggttttttttccttggtcttcatccaccaagttctgatctgacacctttatgaaagaccaaatactaa

SEQ ID NO: 2135 - DNA, 520 bp, Gossypium hirsutum
  Clone ID: LIB3825-010-Q1-N6-D6
gagaaatgaatcaaaacttttttcaggatcccagttaacaggatagaccaaagcaaaacaagcatttcaatatcaaaatgacaaacgagacttgtaaactgattaatttcttgttctcatattatagaaactattccactagccatagaatgcgaaaacaggggaggaggacaaaacagaagcgtattagagcatgatatttcactaattttccttccacccacaactcaaaacatcaaaataactaaaaagacaacaccataacaaagttgacaacattgactgcaacaaatatctaaatcaaaaactaaaattactgagacacacccaaccacttagagaagttctcaaactctgtgtaatcactgtcggagatcatagtctgataccatgctttgcctgctgacttgattgctgttgcctcctccttaaaaatgggcttcctcttcttgtcaagcttctccttcttagctttaacacgttgtgcctcggctaaaagagaatcctcctagcagtcttc

SEQ ID NO: 2136 - DNA, 562 bp, Gossypium hirsutum
  Clone ID: LIB3825-010-Q1-N6-D8
atgcaacttataaaattacaattagacaaagtaaagagcagaatgagaggttgtgatctatctttaaggcagacctgagttcttgatgtaccaatttatatccaaacaaagctaacttaataaaagctgacaaacagctacactgttacaagcccaaatcaggatattcccagaacaactttgaaagtagaagatcacccaactctcattgtttgggtatgaccgtgacgttcttcaagtcccaaatatcatcatcccaagcaacatcgttgaacaatgcaccataagccatgtcaacaaaatccacatcccagaaaggcgaccagatggatgcccatgacatttgctcatccacgtacgcccattcctcccaccacactaaagtactctgcatgctacataacgctacttctccctcatcggcatccaaacctctcctgctcttgtttcgaacttgatgttttccagctgcttgagccatggcctctatattgctcccttgcctcttcatgattttctcgatgaaaagagaaataatgacaatgttaatgaagcggcgaaa

SEQ ID NO: 2137 - DNA, 532 bp, Gossypium hirsutum
  Clone ID: LIB3825-010-Q1-N6-D9
ggctataaagtttgtcctccttccattgcatataatttacgagtaaaataaagagtgtctatatatcaacgaaaatagaatgacaaaaataaagaaatagcataaataattcaggaacatgatctgcaactgctgaaaatctcaccccgcattatatcaatggccatatgttcatgggtgtaccgctctggacctaaataaacacccgtcttctctaaaagtgtaagtgcttcttctttcccatatcttgaggcataaagcttcaggtattcaaagtccttacctgcaagccgctgagaatgcgctctagtctaagggaagcaacaggtttctttgaagacgagaacacctcacctgggtagtacaaaacaccatcacctggggggaggcctcgcctaaatcttatctcggcactgggaactgttgccttctcgtagcagttggcaccccaatacagaaaaccagttccaccttccttccacacacgccacataacagcacgatgctgtgttcctcgcattcccagatgcca

SEQ ID NO: 2138 - DNA, 255 bp, Gossypium hirsutum
  Clone ID: LIB3825-010-Q1-N6-E1
aaaaaaaaagtaaaaaatgttttatataaccttataaaataaaaaaaaaaaaaaaagggaaaaaaatgttaaaaaaaaaaaaataaaaaaaaagggaagaaaaaaaatattttccccccccccccctgggtgaggggagtaaaaaaaaaaaaaaaaaaaaaagggggagggtttttttttttattataaaagggggggagcgtcgtctcgatagcaaaattttaaatataaaaaaagggggggaaaaaaaataaa

SEQ ID NO: 2139 - DNA, 303 bp, Gossypium hirsutum
  Clone ID: LIB3825-010-Q1-N6-E10
aaaaagaaacccggaggggattttctggcaaaacattttaccagggaggggcaaaaaaacccaccttttttttccccaagggaaggggctttccttttttaaaagaaaaaaaaggggttggcccaaagggggggaaaaaaggtggaagggggggccaaaatggcccatttttataaggggggaaaaagttcggggccgcggtattgtgatttcggggcaccctcccaacgggtggaacagcccggcgaaaaaaaccaggcccgggtctttcgggtcccaccaacaaaattgggggggggggaa

SEQ ID NO: 2140 - DNA, 556 bp, Gossypium hirsutum
  Clone ID: LIB3825-010-Q1-N6-E11
gaggactcagaaacagactagatttcatttctaactcttcaaattggttcggtttcaaaataaatcacgccagatattacaacgaaacataacgaaaaacaggtcgtatagagaacattgagataccagtactagttattcactgtcgatcgaatcgataccactgtaaaaaccaatcaaagcagatagcaaagtgaagagactacttacttgaagccaaattgtctactctttgtttaggttacggataacaaatggaagaatgccaccgtgatcaaagtatgccaattccacctcagtatcgaagcggacagcacacgtgaacgatttgccagtgtcagttgtgactgtaacatcttggccgggccttatctcactgattttatttggaaggtcaattgaataacgttcatggccagttaatcctagagaatcagcgtcctcaccaggcttgaaacaaagaggaatgattcccataccaaccagattacttcgatggatcctctcgaagctcttggcgataactgctttcacgcccagtaacattgggcccttg

SEQ ID NO: 2141 - DNA, 551 bp, Gossypium hirsutum
  Clone ID: LIB3825-010-Q1-N6-E12
atcctataaataataacgttaagaacaaagaagatttacataataaaaatcaatacttcaattcacaaagaattctacacatgtgaagcaaagatcacaattttaattatatatatttaaatcaattcaaaattcagaagtatatgtattttgaatattcaggctccatttaatgtatgctttttccttgagaaagaaaagttttcaggaatcaaagagacaattctgcacggagaaactcagtgcatagttttcacccatttcgcagtagaatcaccacccaccccatatgccatatcatttgttcaacgtcatcatcatcatcatcccgacaacaagcttcgtagttatgaaaatttggtctatagcattaggccgggcaccactcatcagttctgctttttaacagttcccatgttagaaaagtaacagctaacactactaactccaacttgcgttctaattgtcagttaattccttcaaatcattattagctcatatatatctttaacagcaaacccagacagccatccatcatgattatttcatat

SEQ ID NO: 2142 - DNA, 137 bp, Gossypium hirsutum
  Clone ID: LIB3825-010-Q1-N6-E2
aaaaaaaaaataaaaaaaaatggggcgcggggggcgccccgggaattccgggccgggcccggggggggacccaattttccctaagggggggggtataaaagctgggggaaaaaaggggaaaaggggtttccggggga

SEQ ID NO: 2143 - DNA, 556 bp, Gossypium hirsutum
  Clone ID: LIB3825-010-Q1-N6-E3
aaatcgaaacacagtcacacatttcgatagaatttgttagaaaatataaaccctaatcgaacaaaacatacgattctctaaaacctgataaatcttagcaataactgaacaaagttctacaatggtacgatttagggtttatcaaaagcaagttcaagcatataaggaaggaaataggaaggaatatacctattactgactcgaacttgcagggccgacaaggactccttgagcggagccttccttcttgttgctttcatctttcgagtcatcatcggactttttgatcctaattttgtattttgtctcgaaatcagcaatttccttctttttcttctccagggtctcgttaagacgagcaattacttcctcgagcccttctttgtttcgttgcacagcagggagaacctctttgatggttctctcgacaaggacacctccaatcatccggtaacaccgcctcgactggtcaagtggctgaatggcatttataactagcgaatgctcgctcacttccatctccaactcggtgatcttagaataaatttgatttagt

SEQ ID NO: 2144 - DNA, 517 bp, Gossypium hirsutum
  Clone ID: LIB3825-010-Q1-N6-E6
agggaaagaaacatcattcaatatctattttgggtataatcaaaacaaccatcattgaatccgaaagcctacaactcaagaacattattaaaccatcatttaaaaaaccctaaaatcccaaatcggaaaccctaatcagaatccaatctcaaaacaaaaagaaaaagaaatctaagaactggggaacttagtaaccgcctttgttccttcaaaaacgggatgcttagccaattcaccaggcaaaaccaatcgaacggggggttggatctccctaaatgtaatcggcggcttcttattatacctagccaatctcgatgctttttgagccaatttctcaaaaatatcgttgatgaaactgttcattatccccatcgctttgctcgaaatcccgatatcaggatgaacctgtttcaataccttgaaaatgtaaatcttgtaagtctcgacgctctttttaacctttttcttctttttatctgcgccgcctttttttgagatctttttctccccctttggc

SEQ ID NO: 2145 - DNA, 353 bp, Gossypium hirsutum
  unsure (1)..(353): unsure at all n locations; Clone ID: LIB3825-010-Q1-N6-E7
ccccaaaaataaatatttggggaaacccattgggccaagaacattttcccccaataataaaacaaaagcccccggattatttacgttcccagaaaacacagccccttctaagaagcaaaaacctaaaaacttggcaacaactacagaaaaggggaaagaaaaaacttcttacaaacaaaaaacggggcctaaaacatggtaaaaaaggaaaaaagaacctcccaccccccgggaaaggataaaaaaccccagggttcccaccatccttttgggcggaaaacaatttttacaaaaggggggggaaaaggngaaccctttaggtgtcaaaaaggggaggatccccccccggggcc

SEQ ID NO: 2146 - DNA, 540 bp, Gossypium hirsutum
  Clone ID: LIB3825-010-Q1-N6-E9
cccatccaaatgaattgaatgcatgtaatatagataataagttacacgaaaatttatcaagacacaaaacaaaaagaaaatgtaaacatttaaagaccacctgtataagcatgtgacaaaactttctagcttaaagtctcatttttgtacactaatctcagaatgatggaaagatgaggtccaagtgaactcaatgatgatctaagcctcttcattttgatcatcaggctcatcctttgcctctttcttttcacctccagattcatcatctttcctttcactgaattttaaacgtattggtcggtccatcaattccttcccatctagagtagaaacagcagcttcagcttcctccattgtggcaaaggaaacaaagccatacccagcagactgtcccgacgggttagaaaaaacaaccctaactgaaaccggattaaaggcagagaaaaattctctgaggtgagtagacctagctttccaagcaaggttagagacataaagcttatggcgtgtctcacgggaaggaaccattggctccaa

SEQ ID NO: 2147 - DNA, 504 bp, Gossypium hirsutum
  Clone ID: LIB3825-010-Q1-N6-F10
gagcgaaagaaccaaagacttttttgttacattgaacgaaacaaagggtttcacagcgacttcgagaacgaaacaagggtttcacacaagttataaagcgcggaataaataaaaagaatgtccatatcttcccatatccaaagcacaatgacaaattcctttaagaaaaaacaccccctcccttccccaaaagaaaacataaaatggttcgacacagttggcaacataagaaagctgatacatattacacaccaacaactgtcatcccatggcatacttctgggtccagctacgagcagtggcttcatactttgcccgatcagtcttatacatgtgagcaatctccggaacaagagggtcatcagggtttggatcggtcagcaacgagcagattgagagcagaaccttggaaatggttagtgcagggctccattgttctttgaggatattaagacaaatgcttccattgctgttgatgttgggatggaagaccttggtcctaaa

SEQ ID NO: 2148 - DNA, 543 bp, Gossypium hirsutum
  Clone ID: LIB3825-010-Q1-N6-F11
gcaaatcataatcatcattgagcatgaaacttgaagaatttatattagaaacaagcaatgataaaatttacattacaagaaatgcaacttgaatttatatctcctaagctctttaacctcccatccattcacccatccccattaagtttatccctgtaaatatgacttgttatgtttccactccccactacccattctctatactcatcttcagtaacttttttctattaatatttactaacatagcgggcaaagaaagcaaggtgataagtggaagggaaaatccgctagtgctcatcaatgtcatcttcatcaggtaatagtgcagtcagtaaagaatactttaccaggagagagatccttcccttcttgacgactaatcttgccccagaaacaacccaatatccaggaacctcttgtggtcctcttgttatctctgttgtatcaacaaatttcaaaagcttaggagcttgaacaggtacgggagggcctccagggtaaacagcggagtttatattcaaatcagctggccctggaggtggt

SEQ ID NO: 2149 - DNA, 548 bp, Gossypium hirsutum
  Clone ID: LIB3825-010-Q1-N6-F12
agcagaaaaatgatgctctttcattcattccattaaaactgcaatgtctgatttttttttccagttacttgctagggtttgttttattttataccaaaaccctaaaccttacagtgtactgacactacacacattcatgctgaagcaaaatcatcaaagagtacaatactagtcagtagctagaacacttccaggccttttctccgatcggggttccaggaaatcccaaatatctgttcattcaaccatctgcagcgtaattcaaatgtgggtttcggaggatcaactatggagtttgaaactcaccgtgtggagaatgagaaccagttgtggagaagtcagatgatgccatcggaatggatatcgatagctgtgttgtagaaaatgaggtctggttggatctgtcatcttcaagagctgaccaggtgtccctggttttaggccactcgtcaaagaacggccgaagagattgaccctcgggcttcacagtttctcccgagttgaaatcgctgaaaaacgaatgctgagggtaatcattcagtaagacc

SEQ ID NO: 2150 - DNA, 539 bp, Gossypium hirsutum
  Clone ID: LIB3825-010-Q1-N6-F2
tttttttttttttttttttttttttttttttttttttttttttttttttttttttttttttttttttttttttttttttttttttaattttttttgggacccgggggggccccgggaagcccggacggggaacgggaggggaaccagggggcccgaaagggaggcgggtaaaagggggggaaaagaagggcgaaaggaggccccggaagaaaatggccggccggcaaaagggaaaaaaagaggggacccaaaaaaaaaaaaagaaaaaccggaggggcaaaaggaaagggccaacgaaaaaaaaaggaaaccaaaaaaaaggccgggtcaaaggaagaaaacccgggggggaaaaaggaaaaaagaagcggcaaacccaaggaaaaaagcggcccccccagggggaccgaggggggtttttctccccgcaaggggaaccgccaaaaaaaaaggggccacaaccccaggccccttgaaaagttcccgcgaagggtccacggggggggggcccaccgggggaaaaccccgcggcggggggg

SEQ ID NO: 2151 - DNA, 549 bp, Gossypium hirsutum
  Clone ID: LIB3825-010-Q1-N6-F3
ccaaaaccaaaacacatccatatatattatatatatcaatattttcttaaaaccaaaacacagagatatgtatgtatcgatacaataaccaaaaccttaaatcaccattagactcgttaactattactttcaaagggataataaaccatgatatatgtaaaactagttcatcccaaaactttcagatctataatatcgtagctggttagaaacgagctttccgttttcgagcagtgtactttgtgtcagggggaacgacattccctttccttctcatctggtccttcttcctcaacacccattctctgcccttccctttcttgtttactttctgctttttctgaggtctatgcctgtccgaaatgcaaaccgtctgattttcttcatctccactgctctcataatcagaacaactctctccgtcttcaccttttccactgggaacgacagagctgagggacggcgggccacaagtgaggacaaggtattcttttctcttcttggtactgtgcgggtaatcgacaaccacgccaccagcaaatccagagc

SEQ ID NO: 2152 - DNA, 556 bp, Gossypium hirsutum
  Clone ID: LIB3825-010-Q1-N6-F5
ataatatgtaaacaagacaaaaacaataattaacgattctgtcattttttacacaattatcagattacatggctcttctagtttctttttcttggatatcaaacaataagaaataaacgaacaaaatacaaaacgaataaagaaaattacaaagagatggtcagattccatacatacatagcatgggatttgcaacaacactacaataatatacctttaacaatgtttcatctaggaagaaaggttggacacatccttacttgatctattgtatttcatatggctcttaaccagctgacccgctgcaagagcagacatgagtgacagctcccccgcgaggacggcaccagctacaatggttgcaagcatccttgagtttgctccagctacttctttgcttgcacccttaacgccgagcaagttcaaacaggctgactgagatgcaagctgagttccaccaccaacggtgccaacctcaacagaaggcattgtgacagagatgtgaaggtcctttccatcattaacggcttccatcatagtgatgcaatgagagctc

SEQ ID NO: 2153 - DNA, 566 bp, Gossypium hirsutum
  unsure (1)..(566): unsure at all n locations; Clone ID: LIB3825-010-Q1-N6-F7
aacaaaagccacagaaaatgttccattagaaaagaccagaaacattacaaaccagataagctgcaaatccctgtatcatcttcacatacatcaaaggaagatgaaaagatcacccccaaccatacttacattaactaaatttagaaaaaggaacgagctgattattactcgctatcaaacaacaaaaccaaattacatattttagctagttttaaactacagtccctttcagaccctagatccagttacagcagtgccggtcttgtgccctggttcatcccccggtgcatgcatcccatagtcggaatctcgataccctggtccgtaccgactgctgaacacaccggcatggatcaacaacacatacaaaagttgagtgaatgcaaggattattatgaatgcttcaagtatcctcaacctccatcctctccatcctcctatatttatatgcttacaagcaaacccaaaggctaatgcagttagagcccaagcaataagtgcagaagaaccagctgcagccaaactatcacttctncatgacctaatatgatgaccacctgcaaatt

SEQ ID NO: 2154 - DNA, 513 bp, Gossypium hirsutum
  Clone ID: LIB3825-010-Q1-N6-F8
attcaaattgattttgcatttcattacaaggaattgtcaatttttgacatccttaacctgggtttttttgcaattcattacaagaaattaagatgcaggaaactgaaatttgaaacaaaagatttaaacttgttcatcttgagggactttgccattgggttgctgcttgtcttggcggggtttcttctcacctatctcaatgcttgttccattaccacttggcttcttaatttcctgaaaccccttgttgttgcggtaaatgaaataaaggatgagttgcatggtccctaacccacacccaaacccattggggacagcaacaaaagcatcacgaccaaggagaccattgataaaccatgaagtcccacagaggaacacaaatagtgacaagaaaaatggcatgaactcaacacttttggtcttgatcaccagcctcatgattgaaaggggagaagcctacataatgatggagaaaatgggggcagctaggccacaaaagagctttctgccatt

SEQ ID NO: 2155 - DNA, 488 bp, Gossypium hirsutum
  Clone ID: LIB3825-010-Q1-N6-F9
aattaaattaatacccgggccccgggaaggaaaaaaaaaaccccacccacagagaaagaagaaaaacagaaccccaaaaaaaaagaaaaagaaaaaaaaaaaaaaaaaaaaaaacagggcaaaaaaaaaaaaaaaccccacccaaaaaaaaaaaaagggcccggaacagcgaaaacaaaaccgggaaggagaaaggaaaaaaaacaaggccaaaaaaaccaaaaaaaaaaaaaccggaaacacaaaaaaaaaaagaaccacccccacccccccccccaccaggaaaaaaagaaacagaaaaaaggggggggaggggaaagggaagagaggggggggaacgaaatcgaaacccccccgaccgaaagaaagaaaaaagagggtgcaaaaaaaaaaaaaaaaagaaggggggcaaaaaaaaaaaaagggggggggcccccccagaaaaaacgggcgcgggggaagaaaaaaaaaatcgggcccggaacgaa

SEQ ID NO: 2156 - DNA, 501 bp, Gossypium hirsutum
  Clone ID: LIB3825-010-Q1-N6-G10
gctagctaacagacacgtcagtttttccatccaaattggaggctgaagtgcttaaaagaaaaagaataagaataagggctatttttgacattacgcttttttaagtacagttctgatgcgtaagttttgtattcagtgctaagtttacaaattgagaaactagccattgatgttggagacaggtatcctagatttcaagattcgagaaccaagtgccattcttgtgtaaagtgcatcgataggtttctttttgggtctcctttagactgttggccatcgaacaagacatgcatttgtgcttgtaagcttatatacctttctcaggttcttcattctacccaccgcctccatccatacattccctttgtttcattctaacccagctcttacccagtcatggctatccacagcacatttatatagcctctcctgaaataccatttcagcttatcgaagcaaaagcaaaatcctccttttggatcacttgcctttctccgaata

SEQ ID NO: 2157 - DNA, 555 bp, Gossypium hirsutum
  Clone ID: LIB3825-010-Q1-N6-G11
atagcttcaataagtaatccaccattgcacacaaacaaattggttattacatacatcaacaatcatcatttgagcacagatctacaaaaagaatgtgtcacaatctttatgaacagcttgcaccagaaagatatatcggagcaagtaatgcttacaacattatcagagctctgatagaattgcagggatgtaatgagatagctctgctgtgagagattgaaatccattcactagttgtgtgtggaaatcttggtcttcttctcctattagtctgaagtgtacacgaattgcccgcttgcaaacagccataaattcaaggagtgcagcaataagttgctgtagctcctgagaacgcaaccttgtggcaggttcaccagacaagaaggctgtgcacacactcagaacaccactattcacttgaactgcaacactgccttgaagaattctttgcaggctctgaagacgaggcagttggtctccttcggaactacgaggctcttccaactcatttcgtagggctgctgttcgagtttcaatcattccaatcgcattcta

SEQ ID NO: 2158 - DNA, 286 bp, Gossypium hirsutum
  Clone ID: LIB3825-010-Q1-N6-G12
cacattaacttatgattcattaattatccgttttattgctgtcaagaaaaaaaatatcccggagaagaaaaaccaaaaagcgcccccaaaaaaaaaagatactcgcccgaaaaaagccaaaaccggagcaaaagactacagcggatacagaaaacacacagccttttagacaatcaggtccgctcccaaaaaaaaatggagagaaaaagacatggtccagcagggagcccccacaaggaacgggggttgcatgcccaaactcaaaaaaaaaaaaaaccacgacatc

SEQ ID NO: 2159 - DNA, 574 bp, Gossypium hirsutum
  Clone ID: LIB3825-010-Q1-N6-G2
tttttttttttttttttttttttttttttttttttttttttttttttttttttttttttttttttttttttttttttttttttttttttttttttttttttttttttttttattttttttaatgtttttttttaaattttttttttaggggggggaaaactaaaaaagaaaaaaaagggaaaaaaagaaaaaaaaaaaaaaaaaaaaaaaaagggggggaaaaaaaaaaaagggaaaaaaaaccccaaaaaaaaaaaaaaaaaaaaaaaaaaaaaagcccggcctttttaaaaggaaaaacccaaaaaaaaaaaaaaaaggggctttattatttttttttcaaaccccaaaaaacctttaaaaaaagaaaaaagtttccccccgggggggggggaaaaaaaacggctggggaaaaaaaaaaagggggggccccccccccctttatgggggaaaaaaaaaaaaacccaaaaaagggggggttttaaaattgggcggaaaaagccccctttttcaaaaagggttaaagggttaaaaaaaaagggaaaaaaaaaaaaaaaaaaaagggttttttcac

SEQ ID NO: 2160 - DNA, 535 bp, Gossypium hirsutum
  Clone ID: LIB3825-010-Q1-N6-G4
acaacaaaatctcaaacttatattaagtaacatcacaaaataagtcgatgtttatcacttagtttcaggtattatttatgtataagccaaacagtaaaaaagaaagaaaagaaaagaaaaacaatcacagcaaagcctgtgaaaaaaacagttttacatctaacaaaggtactttcacaaatataatttctatttttctctacttattcttcaaactcttctcttcattatctctgggtgtatctgtatttgtatcgatatgcctagtgttttagttttgctcaagcatcttgttgcttaagaaatacaagtatcttgttgatcagcaaatatatccaacagggaaagtgcctcagggatgttgagttcaaggcggaattttggaccatcgtagtgatggagaattggcctaaatgaatcttcttcaagaggctcgcagattttccttgtaataacccgaacctgagcagggaatcgagattcgccagggcatttcttgtcctcccggcagttgggtcaatgtttgttccaccaa

SEQ ID NO: 2161 - DNA, 556 bp, Gossypium hirsutum
  Clone ID: LIB3825-010-Q1-N6-G5
aacaagacatggatcccatcaacaataggtccaacaagataagaggcaaattgcattatgtctgctcaaaagcatacagttttcaagcagaaagctattgacaagggtagtaaatttattttcgcagagacacatagataggccgttttccattttatttcacttggtgatgttataatataacaataaagcctaaaccccagaaccagccagtcgtcgtctcgaggcatttgatatggatacttgagtaagcttgtctgcatcattcaacgccatgcgctccttgagtggcatataatgccgtagccatacaccagtataaacctgttggggtcttattatctttgtatcaggatcatctagagactcgcgccagtgtgccaagtacccagccattcgagggattgcaaataacacagtgaagaactctggtggaaatcccatggcccggtatattaacccagaatagaaatcaacatttggataaagcttcctcttaataaaatattcgtcagataatgcggccttctccaaactaatagctacctcaataagt

SEQ ID NO: 2162 - DNA, 558 bp, Gossypium hirsutum
  Clone ID: LIB3825-010-Q1-N6-G6
aaccaagaattcaacttaaataaataagatctcaagtataacagtcatgcacgaatgtaaattaaaattaaaagaaaaaagggggaaaaaaggccaaaatctgcacttcagacagtgaattgcaactgttaacaatgtttgagaaaagctaaacaccacgaagatgataatgttctagtttgttcttggtgtggcccattcgactcgcaggatgagattgtcgtacccatatccgttcagcttgttaatagctctttgagcatcctctctgttcacaaagttgacaaaaccgaaccctctacttgtgcctgtcttctgatccatagcgacatacacacgcgtcacagcaccaaatggtcggaaaagttcatgcaagtcagcctcccgagtgtcctcagataagtttgttaccctcacagagttttcatcgttcctacgtctcatatccgatccggttgttctctctgcaccggctctcatgcttggtggaacataggctccctttccagctccaggagcagctgccgaggtctcggctgccgcgggcttatcaacaaa

SEQ ID NO: 2163 - DNA, 558 bp, Gossypium hirsutum
  Clone ID: LIB3825-010-Q1-N6-G8
gcatgcacccgttttctcagaccttagtgaataagcatcataaaatcacttatttatactggagaggagatgttagagtaagacaaagttgaaatctgatgtcagagagtgatttgagaaagtttagaaggaaaaggaagacgatttaaatgaatgatgcatgtcaaatttaccagaatattgtagtcttgatgttggacaaaatgatagtaaatgatctataaaaaacttaaatggtgacaaatccaccaaactaatttaattttttttagcaaattagcccaaattccaatcaagtttcaaaagtccaaaattcaatttcacaaagtcgaatagtctagtctaaatcaacaataattcagagtttaaaatcaacaaatgattgaacttgtaggcaaatgttctaatttagtgctagacaaaatccatcgtctacaaaatatacagataacagattagtcaatctatgtgagccccaacatgatacctcaaggataatgcttcagtttctgaattgttttatgtgatcaaaatggcagccatgaacattgaccaagc

SEQ ID NO: 2164 - DNA, 544 bp, Gossypium hirsutum
  Clone ID: LIB3825-010-Q1-N6-G9
ctctaattattcccaacttttattgatttatagaactgccctggctaacactgaacattacaacaggaccaaacttttctttatatggtacaacagtacgaacttgaaaaagaaaaaaagtagaagcaaacaaacaacaaacacagacttattgttgtagcagagcacaaaaagtcgctcctttcatttaataggatcgataataaggatcatcctgggtacctccgcgggtgctccttctagtcccagcattgttaggcgccgcacttgggaagtcttggtttcccgttgtaccgtaagcaccccctgtatctccgccaaaccccatactgctgaggtcatcttgcctgcctgtatcatacccactacctgcggtggggtacccacggttgtcatgtccaccggtaccgtcatagccaccagtatcccttctgttgtacccagctgtggtgtagccagtaccaccaataccaccaccaccagcatggtcagccgtggcgttatgatggcgggcctcttgttccctcagctctgcatcttcttg

SEQ ID NO: 2165 - DNA, 433 bp, Gossypium hirsutum
  Clone ID: LIB3825-010-Q1-N6-H1
aaagaacaaaaaacctttccggcccttttttttttggaaattgggttttccctttcctacgataccctggaaccattttggacggcaatttttttccaatttaatttaattaagggtaagatcccaactggaaaggggggactaaaattggggtttgggccgggaatccccgggggccatcgaacgacggggtttttttaaggttccaaggggggccgcctggggggcgggaaaaaaaaacactgggaaaaacaacttgacatgctgggggaacaggacagggggccctcctgcacaaaaaagcatccccagcagcaaacgggttttgggccttcccataaaaggaggcccaagcgggactttggtttttaaagggccccccttttcgcaatgggacatgcccaggcaatatcggggggggaaacgaaaatga

SEQ ID NO: 2166 - DNA, 552 bp, Gossypium hirsutum
  Clone ID: LIB3825-010-Q1-N6-H12
caaacgcaaaatgcatgtaaaattgatatgatgatcagagcagatacattttatcattcacttgaggaaaattgccctccattacacctatcgcatcaactgagaaagtttgtaagtttgccaacagaaaaatgcggcaatcagttgatcataaaacagctatatggaaaaactggaccaaagaataacaattatccccaaacccatacatccataaaattagcttatacctctgcttcattcagattgcatgggagccacttttccttgaaatctagctatggcaatatcagctatcaagtgcaccaagtgccttcatatcctcgaggaatgctgtgtacgagtcatctatactctgtgccttcggagctgatgatgtgctagctgattcaggcttcacaatggtagtagctacaggcttggtggtcgatgtcatgattaagtgtgaaggctttggtcttgcttttggggcagtaatctccctccttactcgaacagatgcaggcaccatagccgtaagctccggctggtgctgagccagtggccgcttaa

SEQ ID NO: 2167 - DNA, 554 bp, Gossypium hirsutum
  Clone ID: LIB3825-010-Q1-N6-H2
gagactacaacaaaaggcaaaaaaccttgataaaggtacattttcccaaaatagaatgctccctatccagaagcctaaaaacactaaaattgtatggtgaacaaacaagaattggatctacaatccacgaccacccaaaaccttgcagtattacattgtcaaaagacaaaatgggcttaatgaggaagcgaaaaccctaaattaatctcacagccaaatttcctctgctaagctttcaacgctttcttctaaatgatatgcaacaatgtcaataaatcactacactacacaccaaaaaacttatctttgatcactcccaaccaatttccaaattaatgtcttcaagcaggggcaggtacccttggtgccatgttcttcgctgctgcattaacagcaagtccaccagtgcggttcatgcggctgccaccattactccccatgtcacccctttgatatccatcacctctgcggttggaataccctcctcggttgttgctcctgtttccaaactcaccccggctgtagcccctgccaccaccaccaccatagtttcc

SEQ ID NO: 2168 - DNA, 82 bp, Gossypium hirsutum
  Clone ID: LIB3825-010-Q1-N6-H3
cgctgccgctctagctggatttaaggcgcctttttttttttttttttgttccattttaagttctttgtccaaaattttaaaa

SEQ ID NO: 2169 - DNA, 581 bp, Gossypium hirsutum
  Clone ID: LIB3825-010-Q1-N6-H4
gaagtgatatatatatacatccaatatcacctttaccttaaaagacactgttataaaagaaattgacctctaaaaatctcctaaaacattcccaaagaaaattacccccttgaaggagcactgtgattccaatataaatgatcagtggtactatttggctacaatccggtaaaggcaaaaatttattcaatttgttaggccaagcttcaaagtactgttagctaacatcagtaaacacattggggaggtggcggctattctacagtaactcaccgctcatacgtaccccgtgtgatgaacttacattcatacgtacgatctaacaagaatacgggagtgaggcagaatatacaaggaatacaagcgtgctgggctaagattctggttgctcggattttaaaggtgcaccggatgaggatgcacagctcccattttgcaggtaaaggctatttgcaaccatagaatcactaaccaaaccgacatcaacatcatcgaagttgagtgcccctctgatcttcctgccaccattcaagtgattgttgatagcagttaggtcctttcgaaaggctctgataggcacg

SEQ ID NO: 2170 - DNA, 576 bp, Gossypium hirsutum
  Clone ID: LIB3825-010-Q1-N6-H7
actaaatgctacccatattacatatgacaaagaagaatacacacaagtcagatactatttaagagtcaactaaatagaagacaaaatctcatcagccatggatagatatatataagcatttaaaaggtggcctaaaccttttatttaagtaataaaccctaaactaaaacacacaatctagtttgttcttggtgtagcccattcaactctcaggatgagattatcataaccatagccattgagtttgtttatagctctctgggcatcatccttgttcacaaaattaacgaaaccaaaaccccgactcatgccagtcttctggtcaatggcaacataaactcgacttactgcaccaaatggccggaaaagctcgtgcaagtcagcttcccgggtgtcctccgaaagattagtgacccggacagagttctcgtcgtttctgcgtctcatatcagttccgcttctatcagctccggctctcatacctggaggaacataagtattcttccctgatccagcagcagcagttgcagtttcaggtactgcaggcttatcgacgaatgactcagccggcagagc

SEQ ID NO: 2171 - DNA, 529 bp, Gossypium hirsutum
  Clone ID: LIB3825-010-Q1-N6-H8
gtaccataaacgaggagataaaataattaactgaaataatacaaaaatcaaaactatactatattaccaaaactgagggccccccgacccactaaacacacaacccatgcaactttagagcctattcaagaccaaggagccgagctaactcacaaagatctaatcgagacacatttcggaaccagattaatagcgaccacacggttcgtgaaccaataaaaccttctgtctagctccccagacatatcatactctgtttactgcggcacaacgaataagacctgcttccaccctttcccctatatcccacttgagacaataccacgggatgcctccctatatccacgctcggtaataacgctacagattacatcaaccacaaaccttcataaaagcttagcttcttgatatagagcaacccatttctctaatcttacaatcagcactgttcaaaacaaagtcaaactctggcatgataaaaactgtgagcgctgctgctcgaaagcttttcttaatattgacaagactg

SEQ ID NO: 2172 - DNA, 588 bp, Gossypium hirsutum
  Clone ID: LIB3825-011-Q1-K6-A1
cccaaaccttaccttatctagggttagggttttgctccttctgagtttctctctcataccaaaaattctccaaattgaagatgatgcaacaaccagcacaagctatggtaccaccaccaatggctccaccaccttctatggcgggtgctccacagacccaacaacagtaccaatatcagcaaccacctccggctccggttcctcagacacaaccaccttacatgatgatgaacatgatgcagccgcctcagagtcatcctccacctatgtggcccccacaacaaggttcggctggggtaccagctcaacaacagccagcgggtcaaccggctaacgcagatgaggttcggactttgtggatcggagatttgcagtattatatggatgagaattatctcttgagctgttttgcccaaactggagaggttgcttctgtaaaagttatccgcaacaagcaaaccggtcaagtggagggctatgggtttattgagtttgtttcaagagctgctgctgagagagttttacaaacatacaatggtacacctatgccaaatggtgagagcaactataggctgaactgggcatcct

SEQ ID NO: 2173 - DNA, 605 bp, Gossypium hirsutum
  Clone ID: LIB3825-011-Q1-K6-A11
gtcgaagcgcaccatttctgcgcacatcaaaacgaagaaatgcgacaatgtctcatatatgacacccccgagccgatgcaaagctcatcgggttggagtacatgatatcggagaatttgtttttgacgttgccggacgaagagaagccgctttggcattcgcatttgtacgaagtgaagagcggggtgttgtttatgccgcgagttccggggccgatcgagaggcatggtctggacaaagtttgcaagacttatgggaagaccatccatttttggcaagtcgataaaggtgataatctccctcttgggttacctcaattgatgatggctctcactagagatggtcagctcgatgaagaactcggtcgagatgtggagaagcgatttggggtatcatttgagaaagaaagggcgaagagagctgagttgacgggtccaacacatgggattcatccattggcaaatggtggtgggaaagggctgatccctaaactcagggaggtggattgtaagcctgctgattcagctccccgggtcttcgattgaatcatcggatcttttgagtatacgtttcttaacagcaattacgaggtgaaactgatgtga

SEQ ID NO: 2174 - DNA, 550 bp, Gossypium hirsutum
  Clone ID: LIB3825-011-Q1-K6-A12
caatcttcatatcttagtgataaatgataatgctgtgtagtcatagtttttagtttgcaataaaaaatccttctcgaaaaaaaaaaaaaaaaaaaaaaaaaaaaaaaaaaaaaaaaaaaaaaaaaaaaaaaaaaaaaaaaaaaaaaaaaaaaaaaaaaaaaaaaaaaaaaaaaaaaaaaaaaaaaaagggggaaaaaaaaaaaaaaaaaaaaaaaaaaaaaaaaaaaaaaaaaaaaaaaaaaaaaaaaaaaaagggggggcccctaaaaaaaaaaaaaatggccggcgcttgaaaaggggggggattgggaaaaaccttggggggccccaaaaaaaatcgcttggggcccatttccaaaatcggggggggggaaaaaccgggggggcccccaacttaacctcctttcaaaaaatgcccttttttcaaatggggaaaagaaaaagaaaatggcccccccccaataaaccctcccaaaaagggggggcgctccccggcgggggggggggccccccccgcgaggggcgcccaaaaaacccggggggggggggg

SEQ ID NO: 2175 - DNA, 601 bp, Gossypium hirsutum
  Clone ID: LIB3825-011-Q1-K6-A4
ctcgcgcgcaaataagcgagctttgtctgagactgatattatcaagtcggagactcgggttcccggtggatctcggtgttttacggcggggataccggaggaggagtatgtgtcggattatgaaatagacggtggattccgaacggaattcgggatctcgatggaagaaattggattttccggtgatggatttggaactggcgggaaaattggcggtgataacggagatgattcgtacggtgataaggggaagatgggcgattattatcgtgaaatgttgaaactaaaccccggtgacccacttcttttgagaaactacggcaggttcttacacgaggtaaaaaagtttgacatcactaatacatagaaaagttttgatctttcgaaaatctgatggatattgcattatggttttgcaggtggaaaaggatatggagagagcagaggagtattacgggagagctatcttagccagccctggagatggggaagttttgtctttgtacgggaacctaatctgggaacgacacagagacgagagccgtgctaagtcttacttcgaccgagccgtcactgcttctcctgacgactgcatggtgct

SEQ ID NO: 2176 - DNA, 573 bp, Gossypium hirsutum
  unsure (1)..(573): unsure at all n locations; Clone ID: LIB3825-011-Q1-K6-A6
cggccgcgtgggtttacgaagactctcgtggactataaaagttcacccanattccctattcacttctcgaacagttaattcatcgtttctgtctccgattgatctggtgctcctaccttttagatctctccctgaagcattaaatcttgagaatggatgataatggtgataaaagaggaaaatatcccacgtgggattgaatgggaagttgtgtccttaactgcatctgcatatgctgccgctcctggtccaaaagaagttgaaacaaaggatgataacaagggtgatccatatgaagtaggggaagcagaaacttctcatgctttattcatgtctggtcactttgtcttcccccctagcgagcatgagaatttgccattggaacccgagaatagtagtgaacgtgtaggcaaggacgtggtccatgaattaggtgttgtagaagaaggtggtagatctaggacaaaggaagaagaagaagattggtctttgagagggttgaatgtgcatgaagaattttcaggtatgcaattttttgataaaaaacatggtacagagtttgatgaaggaaca

SEQ ID NO: 2177 - DNA, 607 bp, Gossypium hirsutum
  unsure (1)..(607): unsure at all n locations; Clone ID: LIB3825-011-Q1-K6-A8
atatattcccccctcctacttgcaatttctctagcaaatacactatcaagagagagagaaaagaagatttttgtgacgnaaaaaaaaaaaaaaaggaaaaggactaaagttggatggttgtagggttttgcacgtaaaagctcgtgtttaatcatcataatgactagcattatgggcacagaggatgataagtatagcacgattaacttcgaagagacggagttgcgtttagggttgcccggcgccaatggaaacgacggtgaaactaccaaaaacaacggaaaacgagggttctcagagaccgttaatttgaagcttaacctttcatcaaaggagactgtagccgaggattccgacaagatgaaggagaagagctcaactgaccctgcaaagccacctgccaaggcacaagtggtgggatggccaccagtcaggtcattccggaagaacatcatggccgtccaaaaagccagttccgaggaggaaggtggcagcaagaaggccggaaacagtgcagccgccattactaccaccacggctgcggcgtttgttaaggtcagcatggacggtgcaccttatctacgcaaagtggacttgaaactataca

SEQ ID NO: 2178 - DNA, 576 bp, Gossypium hirsutum
  Clone ID: LIB3825-011-Q1-K6-A9
attgttctggttttctcattgaagtttgcatttagtttatgataacctacctgctggtaaggacgtgctacaccattctgattaaccataataactcaaccagatattgcatttatatctccaggtataaaaaataataaaaatgtttttctcttctttcatgattctagattttttaaatatacctacttaagatgatgcatgtctgaggaagtccttatcttttgtggataagtgcatcaaaatttgtttgaacagcttgccagtggcccaaatggaattttatttgaaagagttggtcaacttattactaaagctaggagtcaattgcaaacatagtacaaagtagcattccgtgctaaatattctaaaatttatgcaaaaaccattggaggtctatttaatggttgtagaagaaatttgggctgaaatttgaagaaattcttctgaaagcagtagtgcggaacataattaatctaattagtattccccgcttgatcctgtaatgaacttaaatgcaatataacgcttatgctatttgcattctggattggcaaagaatttctggacaaccac

SEQ ID NO: 2179 - DNA, 604 bp, Gossypium hirsutum
  unsure (1)..(604): unsure at all n locations; Clone ID: LIB3825-011-Q1-K6-B1
acaggggaggatttctattacatggatgaagattttgtagatgacatggatgaagacaactacggtcaagctggtggagatgtggatgctgatgaatatgacatgctgaccaaggtgaccgatacgacttctgcgcaagcgcgngaagagggaaagacattcaggggattccgtgggaaagactgaacataactagagaaaaatataggttgacaaggcttgagcagtataagaactatgagaatatgccttcttccggtgaagctgttgacaaggaatttaaacatataaagaagggtgggaactactatgaattcttctacaatactagattaattaaacctacgatccttcattttcagctcagaaacttggtttgggctacttcaaagcatgatgtttaccttatgtccaattattcggttatgcattggtcatcagtgtcgtgtaatctgtccgagatccttaattttgctgggcatgtggcacctaccgagaaacatcccggaagtttgttagaaggttttacacaaactcaaataagcaccctagcagtcaaagacaattttatggttgcaggaagcttccaaggagagcttacttt

SEQ ID NO: 2180 - DNA, 531 bp, Gossypium hirsutum
  Clone ID: LIB3825-011-Q1-K6-B10
ttgcaaaccccgtggtgcatgtaaatctaaatcagctctctgctagctacgtcggacatgtgaaagccgttccatagtctttctatacattcaatagctaatagccatgaaaaccacatggtttttctgggtttttcatggcagtgtctttctatattttctacttttttatttataattatttacattcctgtaagtatcagttacattgttgaaaagtgtataacgtttgtataaaatcaaaagtgaataaattttgcaaaaaaaaaaaaaaaaaaaaaaaaaaaaaaaaaaatataaaaaaaaatgaaatggaaaaaataaaaaaataaaaactaaaacgcaggaacctccgctcgtccccctcgaaaaaaaaaaaaaaagatgggctttccgttgccttttcaataaacaaccgtgcgatcgtctcagcttttcgtgatcgaactatcaagcttaagaatacccttggagaatgcaaatacactctccaagagggcaatgctcatacagattggataagctggggtc

SEQ ID NO: 2181 - DNA, 591 bp, Gossypium hirsutum
  Clone ID: LIB3825-011-Q1-K6-B11
tactctttcaccttttgtgaagttctcaaattttttttcttctcagtatcctttttttttttttttgaaatactgtacttaattataatcctgtaagctgaacgattcccgctgagcagccggcgaggcagaacggcagccggttgcaggtataacttgtgatggacccttccatagtgaagctccttgaagaagaagaggacgagtctatgcattctggagctgacgttgaggctttccaggcggcgttgaatcgagacattgaaggcgatgcgtcgaattctcagcagtctggttcaaatatcgcagttctgtctcaaggaagcaatccagcttccagtcaatcggttgcgcaatggccggcctcggggcaagacggaaactccaactttcaaaatcaacaagtccttcaaagtgcacagcaacagcagcagactttgtctgaatcagagcaaaagcagcacggagctgttgtcactggaagtcagcaacaagtgcaacagccaaatgatgttccaaaagaacatagtcgtctaccaccacaacaaaaacaaccccaagaggaccatccacaaggagtgaccgaacaaa

SEQ ID NO: 2182 - DNA, 515 bp, Gossypium hirsutum
  Clone ID: LIB3825-011-Q1-K6-B12
actactagctatcttatagagagagctaactacaatcaactgaccggccgtcgacaaccaacggactgacagagacaataccctgtacccacctaactcaattggcttgacatacatctttcttcagccggctggataactaacaagaccagcaccgaccgaccttcctaacaaacacgcacccagactggataatgaaacgcaccctccctgggcccattcatcacgcgcggtgtggggggtactcacacccagaccgacccactcactagccacctacctaccgctcctttctttttctttctttcctttctttctacgcacgtcggctgtctctgccaagctatatataaatggctggctttatggatgcgatctattgattgactgaacctacctccaccaaaactaacttaaggagagggatcacgtactgagccatccatctgcctgacagacggtcgctcttcctcggaggagtgcacccacttaataaagaactctcgcttcaaaca

SEQ ID NO: 2183 - DNA, 597 bp, Gossypium hirsutum
  unsure (1)..(597): unsure at all n locations; Clone ID: LIB3825-011-Q1-K6-B2
cccaaatactcaattatacgctgtattgctattggagatgttgatgaacaatattggtngaaaatgttcataagctggtgattgatacaggcattctcccaattcttgtgaagatagtcaagaaaaagtcggacttaccagtgcgagagagaatttttttgcttttggatgctacacaaacatctcttggtggtgcttctggaaagttccctcagtactattcagcatactacgatctggtgagtgctggagtagaatttcctcaaaggcctcatgcaacaccatcaaatccacctacttcacaaccaattaaaagtaatacgcttaatggtgaacttgcctccgccagacaagaggcagttgcaaaggaagcagagcctcagattgttcccgagtccagtattattcagaaggctagtaatgcgttagaggttttaagagaagtccttgatgcagttgatgctcaaaatcctgaggctgcgaaggatgaatttacacttgaccttgtggaacagtgttcattccagaagcaacgagtgatgcatcttgtgatgagttctagggatgagaaggtggtttctcgagcaattgaattga

SEQ ID NO: 2184 - DNA, 90 bp, Gossypium hirsutum
  unsure (1)..(90): unsure at all n locations; Clone ID: LIB3825-011-Q1-K6-B3
gcccacgacgatccggnagacggcgtgccgctcacaagcagtccagccacccgtcccgcgactgctacgtccacgcgttctcgattggga

SEQ ID NO: 2185 - DNA, 593 bp, Gossypium hirsutum
  Clone ID: LIB3825-011-Q1-K6-B5
atttgaaaccggagcgtagtgggggatttagtaatagtttacataaatatatatacatatccgaattatttaacgttcggaagttggaacacatggctgctgctaagctgcttatccccactctctcccacttccggccgctaacatgcgctgcggccgtctccgctacaaacccagcgcggctggtccctcacccaccggacctcctcaagtggatcaagagggaaggtgggttcgtgcacgaggctgtaacaattacccaggatacaacttacgggctaggtcttgtcgcctctggaggaatccccaagggttctgatcttatcgtcctccctgaacactttcccttgaagtttcaatcagacaaagacgatgaggctgactctgttttgctccctttgtctaaccgagttccaggaacttgatgctctttcctaggaagcaaatttcaacgtgtttctcttagcattttatacttgcttaatgcttattgtggttatgcgtgtattattttgctcctatgcttgattcaaccccaagattctcccagagcccacttatagttaactagaatggtttgtttaccagtggtc

SEQ ID NO: 2186 - DNA, 579 bp, Gossypium hirsutum
  unsure (1)..(579): unsure at all n locations; Clone ID: LIB3825-011-Q1-K6-B6
ccaagcttcatcaaaaagagcaacgattcctcctggtttctgccaagtaaaagaaagaaaaaacgtatcattaagcaaaataatgaaggataatataaatgaaacagagggttatgtccgatttattcgagtttaaggcttgattatgttcanatatcagaaaacaaagcagtatggaagatcaaaccagctgcagaatagtaggagtgaagttaatgcatagttcaggtttgaacgaaaggagttaagccacatgaggagtgtgacactgatatgcacaaagagaaatctcatcgatacttcatgtaatattaatggttaacataatctatgggggatctaaccttttcaataagatccaggacatcttgattatcaacaaattctatgtagctccagttaatcttctcttttgtgtactcttcttgctccatcttgaagacatgctgaaaaacataccagaaacacataaatatatagtttcgggtcaaattgatatagctgaaatgatcaaagcatgattcaagaccttacctgattgaaatgctgttgcaacttctcatttgtaaagttaataca

SEQ ID NO: 2187 - DNA, 498 bp, Gossypium hirsutum
  unsure (1)..(498): unsure at all n locations; Clone ID: LIB3825-011-Q1-K6-B7
cggtcgcgtgggcggacgcgtggngaaaaaaaaaaaaaaaaaaaaaaaaaaaaaaaaaaaaaaaaaaaaaaaaaaaaaaaaaaaaaaaaaaaaaaaaaatataaaagataaaaaaattacatacataatacatacaaaaaaattatattatggtgtcggcctttttaggggctccttcttgccccccccttgtttacaaatcttttatggtttgttttttggccctcttctttctttttccctgcccggcttttccccctttttccctttggaattcccgggcttacccccccttttttcccttttgctaatcccccttttcgcgggttggtttttggccctggccctctttccggtttttcttccccactttttttgcgccttttttgcaattgtgccctgccctttcccccgcccttttccccggtggtttgggttgtttccccccagtgggcccctcccttttcgcctttccttttccccctttttttgggtttt

SEQ ID NO: 2188 - DNA, 371 bp, Gossypium hirsutum
  unsure (1)..(371): unsure at all n locations; Clone ID: LIB3825-011-Q1-K6-B8
tagnaaagcagcaacttagttaaacatacagtgtcatttctattccagaacctttggggtgcatctgattttaagtgtcgtttcttttgcggggcaggagatggagttctgtgaaagcccctaaggtctggttgcatcttgattcaatgcaatggagcaaatacatatagagcggcaggtattatcagtatgtataagctctctgatctttattgaagaggcacatcgtgtatataagagtttgttctttatccatcactagtagtactacctggtaatttcttcctactcggactcgaatgatcatgacgttaccttcgatgtaaaaagctaatataataatttgtgtgaaagttataatacgtggaatc

SEQ ID NO: 2189 - DNA, 581 bp, Gossypium hirsutum
  unsure (1)..(581): unsure at all n locations; Clone ID: LIB3825-011-Q1-K6-B9
gtngaaaaccaaactgaatatctggatgggtatcgttggtgaagaaccggttctgtctagactagatcgagtagacaacatggtaaggcagttggaggaaatgagagggagccatggtaatggtaattataacaggtctccaagcccaaggagctctagcgcatccaccccatcaagtgggacgttgggcagcacatgtacggagggtcatccttcatctatcgatttctccccaaccgccaagtccctggagaagtactgtcgtcccattgatcatgtcatggtggagactcagctcaaaggaacgctccttcagaggctggaccaagtagaggaccgcctactcaagctgtgtgtgcagttggaggaagaattggaagaagagaagaagagggaagcggtccatgttgagaagaaggggcacaagaaaggaatcaaacaatttgtgaagcaatgtgtcaaagggaaacactctaaacaacacaaaggaacggaatggaatggaaaggcaaagagcagcctcagcctcagccttggttcaaatataaaataaaaacttgatatgtataatttgatcatgc

SEQ ID NO: 2190 - DNA, 612 bp, Gossypium hirsutum
  unsure (1)..(612): unsure at all n locations; Clone ID: LIB3825-011-Q1-K6-C10
ctgagttccgccattttcctanaaaccctagttcttccctaagaagccaatctttcgaatcttcattctttccatggccaagaagcgaaagcaacgatcttctgcggtcgaacccactaaggaaacggcggatcctcaaccaatcaaagaggaagagcagcaacaacatcaggaatacatacccgaagatccgaaaccgaaagtagaagaggaacagaaactacaggaagtggaagaggaagtagaagaggaggttgaagaagaagaggaagtggaactggaagaggaagaggaagaggaagaggaggaagaggagaacgaagaagacgacgacgatgaagaagccgaaaaccaaaccctagtcggttcttccaacgccgccgttcaaaatggagctccaaaaggaacgagtcaagacgaggaattggacgacgagccgttcgagaagcttctagaaccttttgggaaagatcaattgattacccttattaagaaagcggtcgataagcacccagaattcatctcgtcggttcgggagcttgcggatgtggacccggctcaacggaagatcttcgtacacggtcttagctgggatacgactgctgaaaccct

SEQ ID NO: 2191 - DNA, 595 bp, Gossypium hirsutum
  unsure (1)..(595): unsure at all n locations; Clone ID: LIB3825-011-Q1-K6-C11
gaaaggaacgaanaagaacaaaggaaatggagattgtttggcaaactcctgctcatcctgctcagaaacaagattatgtttttcacaacgggaagcgccatgtacgaccttactactttgagttcgtctctcatgttaataaacgatgggaaggtaaaacaatagtggatttgttcgctcaagagttcagaggtcgatctagagattactatgttataggcatgaaccaccagtgatggcttgggatgttgaagttcttcaaaatgaacctgatgtactgacagtttgcaaacctgcatcagttcctgtacatccatgtggtcaatatcgtaaaaacacagttttgggtattctccaagcagagtatggattggctcctttgtatcccattcatcgactagatcgtctagtctcaggactgcttatcatggccaaaaatccagctaaagctgacagtttcaggcagcatatcgaagctggactagtgcagaaacagtatgttgcaaaggttgttggagtgtttctggatgctgaggttggcatctctaatggtgatactaccttgaagggaaaggctgcttgtacaaagtttact

SEQ ID NO: 2192 - DNA, 517 bp, Gossypium hirsutum
  Clone ID: LIB3825-011-Q1-K6-C12
ccgtccggctctaagttatgcatagcctgtacaagctagaaggctccgagctggcactggcgaggttgccactctagctctatgctatgaacaaacctagcttcaatccagagcgctggtcaatgctcagcttcaagatctatggaaacatgagagggctcacgcggtcaataaaatagcattacactccattatctctttcatcatgtgcgtgcaaaactgacatgtccatatctaaacagggtcagaacacgagcaaatgctgataagtgaatgtcacgcggcaagtagcatatcataataatgtatcattgatggatggttacccgctttgactaccctaacacgtgccatgatgctagggccaaaacgtgtgaggagcccaccaccatacttggtcacgatgaagggccacctctgctgacctgtataacattgggaaaaaacatggggcaacggaatgtgaacagaaccggcggctaaccctagaaaaaatcaatgcctgaaccttcactcc

SEQ ID NO: 2193 - DNA, 594 bp, Gossypium hirsutum
  Clone ID: LIB3825-011-Q1-K6-C2
cttttaagaacgccggatccgctaaaatcgccgatccccgtccgtcttccgatcatatggggctgcttgaccagttgtgggatgataccgttgctggtccccgacccgataatggccttggcaagctccgaaagcactccactttcactttccggcctaactctgccaaggaatctgatggcgggagtgtaagatcgtacggtgatgaagcgccggaggaagcgacgagagtgacacgtagtattatgatcgtaaagccgcctggttaccagagcggatcgcctccggtttcgccggccggatcgacccctccggtatctcctttttccggaggcagagaatcatatcggtttcggagaaggtccacatcggatgcatacgagaaggctaacgaggttggaccaaggagcccttgtcctcctccttacgacgtgtgagatatgagtcctctcccatatttggcgacaaatcaaatgggttttggtactgtttgcatgcttaggtctttcaaatgtgtaacttaatagtgtagtatggggtgatgtatgcaagaatgtagtctggtacttgtgtatatagagcttgtaatagtac

SEQ ID NO: 2194 - DNA, 572 bp, Gossypium hirsutum
  unsure (1)..(572): unsure at all n locations; Clone ID: LIB3825-011-Q1-K6-C3
ctggctggtctttcactgngatatgaatctgtccgtgtgattgcctctgccacaacaatgtctcttgaattgttaacagagatgtttcttgattgtgaagcgcgacagttggcttctctgactgagttacctttgcaagctaatttggcagctcatcaaaaggaggagagtaacgtgagttctaaacacactaatgctcctaactgttgtcaccaagagtgcaaatatggccaaaggggacaaggccgaggttggtctcgtggcaaggctcgtgatagcggtcgtaattggtcacgatttagaccgtaatctcagttatgtggaaaaatcgaccacttggtttaaatgtgctatcatcgttttgatgagacattttcgggtgttagtcccagtcagtcaattatggttaattatcatcaaatccaagattagggaagttcctttacttttaatccttgttcttatatgtctcattgtagttcctcataccaggctatcgtctcctctcaatctggtcatcgccagtattcgtctcctgctcatgatcaatcatggtatctagattctggggc

SEQ ID NO: 2195 - DNA, 614 bp, Gossypium hirsutum
  Clone ID: LIB3825-011-Q1-K6-C4
agcaaaatcatcactgatgaaaatttaataaattaacttaaaaacaaacttttattcagcattttaatatttttataataatggatttgtttgaagataaaggataatgcattgatatgatattcatgtgttctcagggttaaattaaacagtgttgagttctctcaatttgcttttggcatggagaatcaaaactgcaataattcatctaagttcacaaattgatatgatatgatattcacaaatcaagaaccattacaaagaacattaccagcaaggtaaattcaggtagaccccaaactgttgctctcataatctatcttagaccctacttttagaatcgatttcaaaggttttggttcctctatttcttggtcaaatgaacccattttttctgctctttttttcttcttacttttcttcttgcttgcagttgcagtcatctcctctactgtatcatttatgctaaccattttcttcggaggtcgagcttcagacattgctgcttcaataacatcctcatttttctcttcattagatgttgcagaaagaattccactttcactatgattatacattggttctggctctactttggcctgcaaacttgagtc

SEQ ID NO: 2196 - DNA, 595 bp, Gossypium hirsutum
  Clone ID: LIB3825-011-Q1-K6-C5
cgctcccgccaggcttttcaaggccttcgttcttgaactgacaaggtctggcccatagctgcccctcatgcaatcaagagtattgaggttgaagctaatcctggccctggaagtatcgtaaagatcaactttgttgaaggccttccattccaatatatgaagcaccagattggaggacatgatgaaaacaaattttcatacagttacagtttgattgaaggtgggcctttgggggacaagcttgagaaaatcaactacgagaataagtttgaggcagctgtaggtggaggaagtgtgtgcaagagctcgatgaaattttacacttttggtgactatgtaatcactgaagatgaaatcaaggctctcattaaagggagtgagggagtttacaaagctattgaagcttacctcttagctaaccccgatgcttgcaactaagatataggttgctttgaattttcatgcttcctttaaagacgggtcagattttaatgttgtgcttctgatattttctttttcatcttaaagcctaaactgtcatatgattgtttcaataagagtggtggtgctggttgagctttggtcttcttaagtc

SEQ ID NO: 2197 - DNA, 570 bp, Gossypium hirsutum
  Clone ID: LIB3825-011-Q1-K6-C6
gttccaccctctcttcgtcccaaacagctgtgtctggaactcctccatctgttggggtgaaggaacatgggaacagcaatcacctaggagattctctgggtttctacctaatgcaaagctcactggcaatcattctactctgaaggcaaatgcatctttgggcacaggtgtgcaacgcaagctggagatggttaatcaggatcttaataagaatgataaatccttgaagagctttgccaaacaaccaaggtatcgaccaccaggaagaaagagtccatttgccacatccatcaacaaggataggaatgccattggagcttcagatgtagcggagaagttggcaaatgttacaattggaaatcggcggctgaatgttgggcaaataaggcactctgaatataaaggctggggttctgtggactgcggattttaacgacatgtttcttttgccaaccctactaatacttgatcaccggaaagaaggtagcgtggaatgatgagatggtctttttaataataatgcatatcttggggtattatatattgatggagtccaaatatcgaaatgag

SEQ ID NO: 2198 - DNA, 568 bp, Gossypium hirsutum
  unsure (1)..(568): unsure at all n locations; Clone ID: LIB3825-011-Q1-K6-C9
aagagcattaccgccatggaggttgtgactgggngagacatcattgcaacaaatttggtccgaattccaaaagatcgggaaagggactcctcggatgacatctttgaggacatttgtggtgtcttaagaaaggaccttgctggggatgccattaacggttgggatggttgccccattcagatgtcggaagcgatcctggacatcgaacgcctaatatttagagacctaatcagtgaaactatccgagatctcgctgcattggcttgaaaaaagtaataacatcccagcacctcgtaggaagttggtgttctgattgcgacttgatgaaaaagagagtgccctttatattattcttcccgcacttacttttagatccctgctcttttccttttcttttctttttttcattctaattatatttatattgacccccctttttccttctaatctttcattttacctgaagtccaggcatagctaatgatcgcttttgcaagctgtaaaaaaaggtgggttaatattcgtgtccacgatggaaaaagttgttgtcaatgtcaagcactagtga

SEQ ID NO: 2199 - DNA, 563 bp, Gossypium hirsutum
  Clone ID: LIB3825-011-Q1-K6-D1
cccagcgtccgcggatggttaagagcatgaatccaaaacttgttactgtcgtcgagcaagatgtaaacacaaacacatcaccattcttcccaggtttatcgaagcctatagttactactctgctgtttttgactccctggacgccacccttcctagggagagccaggatcggatgaacgtcgaaagacagtgcctggcacgggacatagttaacatcattgcatgtgaaggagaggaaaggatagaacgatacgaagtcgcagggaagtggagggcaaggatgataatggctggcttcaagtcatgtccaatgagttcaaatgtaattgatacaatccagaagcttatcaaggaatactgtgacaggtacaagctgaaggaggatgtgggtgcacttcattttggttgggaagacaaaagcttgattgttgcttcagcatggagttaggaagttcagctctgaatgttcattgtaaactatagagttgttccagaaaaatgactttaatcctttgtgcttatgtaaaattccagagaagagtaggtattgctaattatctaac

SEQ ID NO: 2200 - DNA, 608 bp, Gossypium hirsutum
  unsure (1)..(608): unsure at all n locations; Clone ID: LIB3825-011-Q1-K6-D10
gnatatattgtggtttgattgtttgttaggttttgatattcatagggtttttaattcgaatttctagcttaagtaaggacctcatttcttctgcctcaaattaattaaatttaatggttagtatttgtaaaatttaatgtaatgtaaaatttttggcatgttattaattataaaatatttggtctttggggtttttcattgttactgcaattatataattggtttcagcatgttatataattggtttttcattgtaaaatttttgacatatatgtttcagcaagtaaatatttagggatgggatacttgtattttaagcctgaaaagtcattaataagttgaataaatactgcttataatttttgttcaattttttcttgaattttggtgaactctttttttctttaaatcacatgatctcaaatttcaatttcttttaacatttattggaagaataatgtggtctcatttgattgtttctcctacctggttcttgcttctactcgtatttctttttggatgaataaatttatttgtttaatcctcatcatcctgtacaatatcatgcttgcaagtttctgctttcctccttattgcagatttactat

SEQ ID NO: 2201 - DNA, 419 bp, Gossypium hirsutum
  unsure (1)..(419): unsure at all n locations; Clone ID: LIB3825-011-Q1-K6-D11
cccacgcgtccgcgacactgcatcaaaatggatcattgttctcgatatgtcctcctttgatttttggagaactatatctgccataaagcataacagaagagtcgacattggtcgttgctgtttctattaaaaaccaaggcattctcggaagacatgaaggctttcttctgcccagaagcagcaacgagggcatctatcatttgaagtgactttcctgtacctgagattagcaagattagggatataatcccagaaaatctgccaaatagtaattgcaatttttgagggcagctgtaggctccataatttcttgtaaaattcttttattttggtctgtaataagtaattaataggattcaaattaaaaaaaaaaaaaaaaaaaaaaaaaaaaaaaaaaaaaaaaagnnaaaaattttggg

SEQ ID NO: 2202 - DNA, 586 bp, Gossypium hirsutum
  unsure (1)..(586): unsure at all n locations; Clone ID: LIB3825-011-Q1-K6-D12
aaattctctgctttttcttattcaaactttggnaacccattgctgttaagaatatctgaaaaaatccacaggaaaaggaaaatgaacatcttcagcaaaaaacccaatcccaaagagctcttcgcgagagtaagagagaaatggcgcatgctagtagaggtatagagaaggaaataggaactttacagttagaggaaaagaaacttgttgctgaaataaaaaaaactgctaaaaccggaaatgaggcagcgactaaaactctagctcggcagctggtacgacttaggcaacagatagctaagttacaaagtagtcgagctcaaatgagaggcattgcaactcatacgcaggcaatgcatgctcaatcttcagttgctgttggcatgaaaggtgccaccaaggccatgtcagccatgaataagcaaatggccccagaaaaacaagcaaaggttattcgggaatttcagaagcagtctgcccagatggatatgactactgaaatgatgtcagatgccatagatgatgctctggacgatgatgaggcagaagatgagactgaggacctgacaaatcaggttttagacga

SEQ ID NO: 2203 - DNA, 575 bp, Gossypium hirsutum
  Clone ID: LIB3825-011-Q1-K6-D3
gaaaccctttcactaaatattgaagagcagtcaatgaaggatgctgctgcctctgctaagccggcatggagaaggccaaggcctccatgcagaaaggtggaccaaatgaagacaagagaccctaatgagaaagagatggcgagggaaaggaaagaagagagacaagaagatgcagagctgaggaaacaagaggcccgccatcataacgccacagctggccatgctggtggtggtggtattggtggcactggctacaccacagctgggtacaacataggcgacactggtggctatggcggtaccggtggacatgacaaccgtgggtaccccaccgcaggtagtgggtatgatacaggcaggcaagatgacctcagcagtatggggtttggcggagatacagagggtgcttacggtacaacggggaaccaagacttcccaaatgcggcgtctaacaatgctgggactagaaggaacacccgcggaggtacccaggatgatccttattatcgatcctattaaatgaaaggagcgagtttttgtgcttctgctactgcctttgatcctgtgtttgttgt

SEQ ID NO: 2204 - DNA, 615 bp, Gossypium hirsutum
  unsure (1)..(615): unsure at all n locations; Clone ID: LIB3825-011-Q1-K6-D4
gacacagaaaagctactaaaacatcgcatgcataaattcagaaaactgggtggcttcgaagaaatgcccaggtagatcccaagaaaaggtcaatatngaaaaaggaggaccaaattgtttgtacaacccctaatgaggagttggaaggtgaggttgaaaagctgaaacagcaaatcttgaaagccaaggaatcatccagcaagcctcctgagatggctctgaaggacatgatagaaaaattgaaaaaggaggttgatcatgaatactctgaggccatcaaagccacaggcttgaaggacaggcttgatatgctgagagaagaagtttcaaaagtaaattcaagggaccaactcatgaatcctgctataagggataagattgagaagcttaaagatgaattcaaccagaagctatcggcagctccaaatcacccaaccctacaatataagcttgacatgctgaaggagttttctaaagccaagagtctctcagatgctgctacactgaagcaagaagttaataagaaattcaatgaaatcatgagtcggcctgagataaatgagaagcttgaagcattgaaggctgaggttcaaaattcaggttcatccagctttg

SEQ ID NO: 2205 - DNA, 598 bp, Gossypium hirsutum
  unsure (1)..(598): unsure at all n locations; Clone ID: LIB3825-011-Q1-K6-D5
ntggttaaaaacaaacaacgggaaacctaggtcgtcagtcgtcatctctttagcgaaagtaacaaaaaaaaaatggcacatggtggctacggtaagcggcgcgtgggggagggcaagcgcgtagggaggcgatcaaaaggacctggcctagacaagaaactaaagcctaaagccgtttctcttaagaaccagatacgctccattgaacgcatgctacgaaaggatcttcctcctgaagttagagaagctcaagagacgaaattagaagggcttaagaaacaagaagaaatacatactcgacttgctgtggaacgaaagctattcttgcgtgatcggaagattaagttttttgaaagaagaaagattgaaaggcgaataaggcggttggagaagcagcaacggatttcgccaggtcaggcacaagacatggagattgctgaacagctgtctaaattaaaagaggatcttgaatatgttaggtttttccccaagactgagaaatatgtatccttatttacgggaggtgatggttcggacctaattgataagagaaatagattgcggaagcagataaaagccaacttagttgctgctgctg

SEQ ID NO: 2206 - DNA, 577 bp, Gossypium hirsutum
  unsure (1)..(577): unsure at all n locations; Clone ID: LIB3825-011-Q1-K6-D6
naaaaaaataaataaaaaaaaacctcagaaaaagggctccaaccctcggagctccggcctcgtggccgtcctggctcgtcccagggtctggcgtgtgtggtctccacgcgcttaatgagccgccaccagagccaccgtatacggtggttagggtttcaaaaaccctcccttttctttgccaattctcaggtacttgcgaaaaatccggcaatggcaaaggtctgacaatggtccactggtggcgttgatctcggcgtgacttggggcctggaatcatggccttgacggggtagttggaacagcaggagctgaagagtcatgaggcttggcttctggaaccttctgtttgcggcgcaaggagaaaggcagaaaccctagggtttcatgccttggtgtaacaagctgggccacttgggcccgttttgtcctgggtccacttgggtctgttgtaatgggtcttagttttagtgtatctaggtaggatgtaatagtgggcctgctggttattgtaactgggtaaggtctcttgtatttgggcctgccgtttaagctttttgatttgggtaaaggactgtta

SEQ ID NO: 2207 - DNA, 606 bp, Gossypium hirsutum
  unsure (1)..(606): unsure at all n locations; Clone ID: LIB3825-011-Q1-K6-D7
gnaactaaaggaaacaaagccttcttcttagcactccgccgcccgttatctcatcgcaatcatgatcatcccagaaaagaaccgcagggagatatcaaagtatctctttcaagagggtgtttgctacgccaaaaaagattacaacttggcaaaacacccagaaatcgatgttccaaatcttcaagtaataaagctgatgcaaagcttcaaatccaaggaatacgttcgtgaaacttttgcttggatgcattattactggtaccttaccaacgatggcattgaatttttaaggacataccttaatctcccctctgagattgttcctgctactttgaagaagcaaactaggcccggtggtggtcgtcccatgggtccttctgatagccgcccacgtggtccgccacgctttggcgacggtgagaggcgattcggtgacagggatggataccgtggaggtccacgaggaggcggtgatttcggtgataagggtggtgcgcctgctgattatcagccttcattcaggggccctggttcaaggcctgcttttggtcgtggaggcggtggttatggtggtgccggttctgcaagcggcgcaggtcttccatg

SEQ ID NO: 2208 - DNA, 590 bp, Gossypium hirsutum
  unsure (1)..(590): unsure at all n locations; Clone ID: LIB3825-011-Q1-K6-D8
cgagnagaagccgacgccgccatggttcacgtcagtttctaccgcaattattgggaagacatttaagaagccaaggcgtccatacgagaaggaacgtttggatgctgagttgaggcttgtaggagaatatggtctccgatgtaagagggagttgtggagggttcaatatgctttgagtcgaatcagaaatgctgctagggatcttcttactcttgatgagaagaaccctcgtcgtattttcgaaggtgaagctcttcttcgtaggatgaacaggtatggacttttggatgagagtcagaacaagctcgattatgtcttggctttgaccgttgagaacttccttgaacgccgcttgcaaacacttgtgttcaagactggtatggccaagtcaattcaccatgctcgtgtgttgattaggcaacgtcacatcagagtcggaaggcaggtggttaacatcccatcctttatggtgagggttgactcccagaaacatatcgacttctctctgataagtccgttcggaggtggccgtcctggaagagtgaagagaaagaatcagagagcagctgccaataaggccgctggtggag

SEQ ID NO: 2209 - DNA, 602 bp, Gossypium hirsutum
  unsure (1)..(602): unsure at all n locations; Clone ID: LIB3825-011-Q1-K6-E1
ngacatattaagtacgcgatggaatgtcgcaaagaggcgnaaaanacgacacaatgaaggggcgttgcctggtttcgatcctgcaacgaggtatattagagaagggaaatggacttgtgcgccggttccgcctgcggtggctgatcggagggtcgaaattacagggccggtggagaggaagatgatcatcaacgctcttaactcgggagctaaagtgtttatggctgattttgaggatgcactgtcaccaagttgggaaaatcttatgagaggtcaaataaacttaaaggacgcagtggaaggaacaataacgttcaacgacaaagcaaggaacagggtttacaagctgaataatgaaatagcaaggctatttgttcggccacgaggttggcacttaccggaggctcatattttcatcgacggggagcctgcaactggttgtctagtggattttggcctttatttttaccacaattatgccaatttccgcaacactcaaggtcaaggctttggacccttcttttatcttcctaagatggagaattcaagggaagcaaagatatggaatagtgtgtttgataaggcagaaaagaggcaggcat

SEQ ID NO: 2210 - DNA, 605 bp, Gossypium hirsutum
  Clone ID: LIB3825-011-Q1-K6-E2
ctagtggataaggatgaccatctctatttctggttcccgttgttggctggcttatcagaactcagctttgatccaaggccagaaattaggaagagtgctttacaagtgttgtttgaaactttacggaaccatggtcacctcttctcactacctttgtgggaaagggtgtttgagtctgtgctttttccaatatttgactatgtgcgtcatgctattgatccatcaggtggtgaatcgcctgggcagggaattgttaatgacattgatgaacatgatcaagatgcatggctctatgagacgtgtacattggcactccaattagttgtagatctttttgtgaacttctataataccgtcaatcctctcttgaggaaggttctttcgttacttgtaagttttatcaagcgtccccaccaaagcctagctggtatcggaattgctgcatttgtacgtttgatgagcaatgcaggcgatcttttttcagaggagaagtggctggaagtagtttcttcattaaaagaagctgctaatgctacacttcccgattttcctttcattgttagtggggatatcaaggttggaagcaatggtcatgctttgaacag

SEQ ID NO: 2211 - DNA, 578 bp, Gossypium hirsutum
  unsure (1)..(578): unsure at all n locations; Clone ID: LIB3825-011-Q1-K6-E3
cggccgcgtgggttatttttagagttcatgagnacatggatgccgcaaaattaaatctggtttttaacttcttcttcatttttcagttaaaatttgtagtttttgcagctgtgggtggtggtggatatagcagaagtgacttcccaccgggctttgttttcggtgcatcaacttcagcctatcagtatgaaggtgcggctgataaagatggtaggacgcctggcatatgggatacttttgtccatgctgaagggaattttaacgaaggcaatggagacgtagcttgtgatgggtatcacaagtacaaggaagatgttagactcatggtagatacaggcttggaagcctacagattttccatttcatggtcaaggctcatccctaatggaagaggacctgtcaatgtaaagggcttgcaatattacaacaatcttattaatgaactaatcaaaaatggaatcgaaccacatgctacgttacatcattacgatctgccacagacactcgaagatgagtatggaggatggcttaatcggggaattgtgaaagattttacagcatatgcagacatatgcttc

SEQ ID NO: 2212 - DNA, 574 bp, Gossypium hirsutum
  Clone ID: LIB3825-011-Q1-K6-E4
gctgcagcagccattgctgattatagtcaaaatccaactggacaagctgttaggaaatgtatgcactgtgagataactaagacacctcaatggagggcagggccaatgggtccgaaaaccctttgcaatgcctgtggtgtccgatacaagtctggcaggctcttccccgagtaccggcctgctgcaagtccgacatttgttccgtctgtacactcaaattctcacaagaaagtgctggagatgagaaccaaaagttgtgcactagcgcccaccacaacaatggttgccaacaatttaccagagttgattccaaataaaagcaacccagcattggattatatatgagtgtcttactccgtacacatccaatcatgagtatggaaagtgttggaaaaatcgaaggtagtatatcggatacatacttttatccgatttacacccgagtccaagtagtataggtttgttattttatttatctcttcgttctttgttctttttcttgtacagggttgaaatggggggaatagagcaatagatgaccaatatgtttaaataatagggagagattgttatg

SEQ ID NO: 2213 - DNA, 577 bp, Gossypium hirsutum
  Clone ID: LIB3825-011-Q1-K6-E6
cttgatagaaaataccagttcatttaggcgccccagcatttcctatcttctttcacatctatataacgctgaattctaaaggcagctggttcgccgttcgttcaaatttttattttaagaaaagatatgcctcttcttttatctcattaaagattaatgagacaaaattcccagcgaaattagagatatttttaaataaaaaattatccattttggcgcattcaaaaccctaatctgtatgtttgatcggatttcgcagcagtgttatccggagtgtaattctttctgtcattgattgtctgcagggaaagaaaaagtcaagacattcccaaactgctccactctcttcatctctctctctcacgggcattccttcctggtttagaattttatctgcttgctggctcatttgaccagagctttgtggttcagttgactatggagctagaaaataacaaaaatgaagctgacactaaggcggaagacttggcaaaatcagaatcatctgaaaagaaaagccctaatttattgaaagccaaatctgatattgcaaagtcagtggctaagaatttcttga

SEQ ID NO: 2214 - DNA, 554 bp, Gossypium hirsutum
  Clone ID: LIB3825-011-Q1-K6-E7
cctacgcgtccgcccatgcgtccgcttagccacgtcctccaggtacagttctgatatttaccccatggattctggcatgctatatcctgaagtttacgttatattttctgcagttcgcccacctgttggtttcttctttctgcagtttttacagtttttatataactgattctccatttggatgattggcgagggtcaccttgtcagtcgttcgtaaatggagcataaatgggtagtcagagttgaaatctgagtttcccgaagttgagaatgaatgtcgaatgcgcgactgacatgggtatgatcaaaatgttttagttgtatacatttgaagatcatattatatgcatacctctgtttgaatacgttggagacaaatctgaaaaaatgcatatcaaacaccaaattggatgaaacttcaattccttatccaatttgtgcgatatattgaaccgatttagataaagaaactagattgaatggtattagtctttatactttgtgaatgaaagttgtggatttaactgtcctttaatttgaacaattttagtctt

SEQ ID NO: 2215 - DNA, 597 bp, Gossypium hirsutum
  unsure (1)..(597): unsure at all n locations; Clone ID: LIB3825-011-Q1-K6-E8
cggccgcgtgggcgngaaatgaaagccatccgatcggttcgagctcagccaccagcagttttcactccatctctgcgagcttctttaagtcatcataaaagttcagtgatcagcttcaggccaatcatcacaagttgttccaagcaaccagaaagcatggagcagaaagacgaaaagcctgaacaaaaacctggggatgtcatgtctgagtcattcggagagggatatgctacgagatcagatgaagaaggatttggaggaatttatggagagaacgagagtatantctgacatanaaaaaaaacaaggagattcatggaagtcacccagcttatgacaagacgcaggggagtgaagtgaaggagaaggagaaagccaggaatcaaactcacgcttcctcttaacccatggatggaaaacccaactatgttcacaagtaccctcctccattttgtttcatgtgcgccttaccttgcattagtttattatcttcagttttttactgcagttctatatatgtaagggttattacacggcttaagctgttaccaaactttctcctaaacaaacatctttagctgtatctgtgaaagccct

SEQ ID NO: 2216 - DNA, 321 bp, Gossypium hirsutum
  Clone ID: LIB3825-011-Q1-K6-E9
gagcacatcaaaggaggaagtgaaatatgcaacgaggaccacacacactgcagtatcccacaagaccacagtagatgctcactattctctaactcttcctggcacaacggacacacagtctccatggactattttctacgcgtcaaattaccatagtgaggcaccagattgttgaacagcctccatacatgaattttaatttttccaggaatgttcgaatgcccataaatcagtgtaaaatcctttgtaatacgcaccactagtagactgatgtaaattgctttgtaaacattctgtaatgagaacccgatacccactcct

SEQ ID NO: 2217 - DNA, 550 bp, Gossypium hirsutum
  unsure (1)..(550): unsure at all n locations; Clone ID: LIB3825-011-Q1-K6-F1
ggnaaagttaccaagaaaaaaagggtctcaaagagttaaactctggggggtttatagaactgtctgaagaagaacagaagagggacgaggaaggagataaaggggagagtgtcacgtgcctgtcacatgggtttatatcggtaatcggacggcggagagcgatggaagacgcggtgaaggtggcgattggagtgatacaagggtatgattttttcgctgtgtacgacggtcatggtggagcaggagtcgctaacgcttgccgtgacaggatgcaccggttggtggtaaaggaggtgcaggaaaggacacgtggtggtggtggtggagggaagggagtaggatggngagaaggtgatgtcagcttgtttngagaagatggatgaggaggtcaccggtgttgagtgtgggacgacggctgcagtcgatgaggtcatggaaacgatgggatcaacggctgtggtggtgttggtaagcagggaagaagtagtggtcgcaaattgcggtgactcgagagctgttctctgtcgtgccggcaccgccgtggctttgt

SEQ ID NO: 2218 - DNA, 604 bp, Gossypium hirsutum
  unsure (1)..(604): unsure at all n locations; Clone ID: LIB3825-011-Q1-K6-F10
gaaaacttggcttattttcagtgcttcaatcagatggctttagaagctcttaactccccaacaaacgctgctgctccttttcacttccaagataccaatttacactgcctcgatgccttcaccaagcgtaagcgttccaagcgaccacgcttcgacgatgaccatgttcccaccgaggaagaatacctcgctctctgccttgttatgttagcacgcggcggtgctcctcgaaccacctccactaccttgactcaccaaaaacttggcacctacaagtgcagcgtttgcaacaaggcctttaattcttaccaggctttgggtggccacaaagccagccaccgtaaactttcaggagccaacgatgaccactcaacgccaacgacctcatccgccgttggatcaaacccaagcggtaggtcccacgagtgttcaatctgtcacaaaagcttccctactggccaggccttgggaggccataagcgacgccactatgaaggtggggctgcgaataccggtagcattacatctgaaggagtgagttcaacctcaaccaataccacccnaccgngactttgatctgaatataccagctcttcctgcattc

SEQ ID NO: 2219 - DNA, 586 bp, Gossypium hirsutum
  Clone ID: LIB3825-011-Q1-K6-F11
gaagtaaaatcccatcattgaccttcgagtgatccattttccattcacggatttcatacatgcggagcagtatttgaaagctccatatatctgcgcatattacaagcaaagctcatgatgctttaaaagaaaaactgcttgaacaagataggataacttgtttctaagataggataacttgtttctaatattctaattttcttcatttcattaaacgttcttgacttgatggttaataggttttccgtggacctgacgattgggccaatgaatttggtgctgaaagattgcaaaaagagtctgtcgatgatcaatgggtcaatgaatgctcaaagttgcatcttgatgactgggcagaagaatttggtcgtcaagttggtgggggggctttgggagatagttcgtctgataactgggcaaattcatatgatgactaagactggtagccttgaagaagttcactttataacctctcttaattctacatgaatgttttggatgtgaaaacttgtaggttcctcagcggtcggacgcttcaaggggtgtctttgtattttctgatatgaatccatatgttggtcatcaa

SEQ ID NO: 2220 - DNA, 563 bp, Gossypium hirsutum
  Clone ID: LIB3825-011-Q1-K6-F12
ggcagctaatggctgtgatcttgagtatgttgcttatgaatttttcactcaagtgtttgtactgtacgaagaagaaattgcgaactccaaagcccaagtgactgcaattcatctgataattggggctctccagaggatgaatgtatttagtgtcgagaaccgagatactttgacacacaagaccacaggatattcagctcgactattgaagaagcccgaccagtgcagagctgtttacgcatgttcacatcttttttgggttgatggtcaggacggcattagggatggggagagggtcctgctgtgcctaaaacgagcattgaggatcgcaaatgctgctcaacaaatggctagtattgcacgagatagcagtgggccagtcacgctctttgttgagatattgaacaagtacctctattactttgaaaaagggaataaacaaatcaccgctgctgcgatccaacacctgatagaattaatcaacacagagatgcagggtgattctgcaacctcagatgcttttcttgccagtaccttgcgttacattcaattccagaaacaaa

SEQ ID NO: 2221 - DNA, 577 bp, Gossypium hirsutum
  unsure (1)..(577): unsure at all n locations; Clone ID: LIB3825-011-Q1-K6-F2
gaaatggaaagcgagacgaagacaanaaacggagaaataaattaagaaagaaaagaaaagagggaagaatggagggagaggtggaatcacatgcgcattagttcactgtcgttctcctaggtcctcgtttgcttgttctaattcttgttaatcatcatcatattcctttttgctcgtcatggcttgaaaataaggaaatgtcggcccctgttgttgacgtcaatgatccggttaccggtcacatcatttccacaacgattggaggcaaaaatggagagcctaaacagaccatcagttatatggctgagcgtgtagtcggcactggatcttttgggattgttttccaggcaaaatgcttggaaacgggtgagaccgtggctataaagaaagttttacaggacaggagatacaaaaatcgtgaactgcagttgatgcgtgtgctggatcatccgaatgtgatttccttgaagcattgtttcttttccacgacaacaaaaaatgagctttttcttaacttggttatggaatatgtaccagagagcatgtatagggttttaaaacactacagcagtgcaaa

SEQ ID NO: 2222 - DNA, 564 bp, Gossypium hirsutum
  Clone ID: LIB3825-011-Q1-K6-F3
ctcaatttctctctcttttttttctctttatttttcgttctcaattatattaagtctctcagttctctcgatctcccgttgtttttcccaaattttgcttcgattcggttgctttactcattctgggctgtgattttttggttcatgattataagctgcaacaaattacaacaacaatttattgaagcagcatgggccaaaggaatatgcgaagccctattgatttagaaatcgatcaacaagcccaggaatacctccagcatgaaccttgcatctatttgggtgggacgacgaactacccatcacctgatatcccaatgaccatcacagctccagggaacacaactaaccttgatgcgcatcccttacctgagcattatgacaacagtatgttttatgggatccccatgtaccctggtgttcagcatcctcatcattccccaaatcttgatcttggtatcgggagtgcctcgaacttttatgttccctatgtgcctaccccttcatccagtgttcctataaatcatggaatcccagaccagatgccatcatccagcaactatc

SEQ ID NO: 2223 - DNA, 619 bp, Gossypium hirsutum
  Clone ID: LIB3825-011-Q1-K6-F4
cgacgcgtgggatttactagcaatttcttcaagttcttttctttgtttttttaatcaatggctgaccactacctccaaaacactcaaccaatgactcaccaaatggtgaaagccgctactgccgcaacagccggtggttccctcctcattctctccggtttaatcctagctggcaccgttattgcgctcaccatagccactccactcttcgttattttcagtccagttcttgtccctgctctcattgcaacagctctcctagcaacgggtttcgttgcctccggcggtttcggtgttgcagctgtcacggtcctgtcctggatttacaggtatgtgacggggaggcacccaccggctgcggatcagttggatagtgcagggatgaaattggctagcaaggcacgggagatgaaagatagggcggcacaactcaccggtgcggcggcttcttaaattagttctctactgcatgcttttgtaaaggagctgtgcaaaagttcaggatcaagtggccataaaccgatccttaatgatgttgttgttatgttgttgatgatgaaaagatgtttttttctaaatttaaaagcagcattagaaaacttaactttggggggatgat

SEQ ID NO: 2224 - DNA, 582 bp, Gossypium hirsutum
  Clone ID: LIB3825-011-Q1-K6-F5
tttttcactttccacacacttaacttaattaagcaagctcgtaagctgttttcatcaatggccgaccgtgaccgctcttaccgatttgaccaggttgttcgtggtgatagaacgaactatcaaagcggaccatcaacaacccaagttctaaccgtcctcaccctccttcccatcggcggcactctccttgcattagccgggctaaccctcaccggcaccgtcatcggcctatgcgtggcaacgccactcttcgtcatcttcagcccggttctgctcccagctgccatcgcggttttcatggctgtggccggtttcttgtcgtccggggcttttgggttgacgggactgtcctcgctctcctacgtatttaaccgcttcagacaggcgactggcaccgagcagctcgacgcggaccgggccaagaggggcatgcaagatatggtggggtatgtgggacaaaagactaaggaagctgggcagactatcgaaaacaagctcatgagggtggtaggacatgaatatgaaccatggaaggttgctttgcttgcttgtaaaatgtactttaagtgtgtttcattttcg

SEQ ID NO: 2225 - DNA, 584 bp, Gossypium hirsutum
  Clone ID: LIB3825-011-Q1-K6-F8
ctcggctcataccaatcaatcaaaatccccaaaaaaatttaaaaaaaagagctctcagattttcagatctgcttctagagccgccaggtctctcctttcagcatccaaggcttctcgcttttactctgaagggcgagctgtagctgccgctgcagcagtttcacttggcggtaaagtgcctcttttggcttcagcttatggaagtactgcttctgccaatgcatctagagcatggctttcaggagtttttgctcttccagtggcagcttacatgcttcaggagcaggaggttcatgctgcagagatggagcgcaccttcattgctatcaagccagatggagtgcaaagagggctgatttcggagatcatctctcgttttgagcgcaaagggttcaagcttgtggctatcaagttggtagttccttcaaaggagtttgcccagaaacattatgatgacttgaaggaaagaccctttttcaatggcctgtgtgaattcctcagctcgggccctgttcttgccatggtctgggaaggagagggagtgatcaaatacggccggaaactcattggagcaacagatcctc

SEQ ID NO: 2226 - DNA, 558 bp, Gossypium hirsutum
  unsure (1)..(558): unsure at all n locations; Clone ID: LIB3825-011-Q1-K6-F9
caaaaccctnaaccctgcctttcccttcctcaacatccaaggacggactgaaactctccgagagccgagacctgacccgaatcgaacgcattggggctcattcccacatacggggcctaggcctggactcctctctggagccccgtgacgtctcggaaggaatggtgggccaagcacaagctcgtaaagccgccggtgtcatcctccaaatgatcaaagacggtaaaattgctggccgtgctatcttattagcgggacaacctggaactggcaaaactgccattgccatgggcatggcgaaatctcttggccttgaaacccctttctcgatgctctctggcaaggnaatcttctcccttgagatgtcgaaaaccgaagctttaatgcaagcgtttcgaaagtccatcggagtaagaatcaaagaagaaactgaaataatcgaaggcgaagtcgttgaaatccagattgaccggccggcagtttctggggcggcttcaaaaactgggaaattaacgcttaaaacgacggatatggagaccgtttacgatttgggggcga

SEQ ID NO: 2227 - DNA, 586 bp, Gossypium hirsutum
  Clone ID: LIB3825-011-Q1-K6-G1
catcgtggtattgccttcgttcaatttgctgttgccgaagagctaaccgtgcaattgagttgaagaatggttcttcagttggaggtcggaaaattggagttaaacatgcaatgcaccgtgcttcattggagcaacgacggtcaaaggcaacacaagatgatgcgacaaagacaaagaatgacaaagatggtcttcttacttcagctgtagaagcacatggttcagacctgccaaaattagagaaacccgtgcaacctaaaaaagcagcaacactttgttctgatctagctgataaagagaattgttcagagaagcagagggttgctaggactgttgtatttggtggtcttcgtaatgctgagatggcagaagatgttcaccgacttgcaaaagagattggcactgtttgtgctgtaacttatcctcttccaaaagaagagcttgaagaacatggtcttgcacaagatggatgcaaaatggatgcttcagctgtacttttcacaagtgtcaaatcagctcataccgctgtggcaatgttacaccaaaaagagatacatggaagcattgtttgggcacgccagctagg

SEQ ID NO: 2228 - DNA, 595 bp, Gossypium hirsutum
  unsure (1)..(595): unsure at all n locations; Clone ID: LIB3825-011-Q1-K6-G10
ngacttttctaaaacaatctcttttcctcgtctaaactaaaaccaccatagccatggcggtgatgtcaaagcaagatccatcaccagcttttgtagaaacggtacaagaaatcatgagactttacagatcacttccaccaaggccttcaattgaagacgttgcagcagccaaatccgttctcaaaactgtagaaaatgaagaaaaaatcaagcttgaggagatctcaatggaacgaccacctgaagatgtccctgaggaactcttctccgttctgcaacaggtgaggaagaccatggtgttgtttcaaagccaccaacaaaaaaaagaggccctttacttggttgaagctgacaagatgtttgagacgtttgatgggttgattcaaagggcttcttttctggtttctggggatacccaagatgaaaaggtgactacttttagggaacaagtaaggaaatttgatagagaagctgttatcagtgatgacagtttggtgaagagaaaggaagatggtgatttggataaagatgatgtaaagggtttggttagatgttcttcttcaaaggcttctttcttttcaggtgaaaatagcag

SEQ ID NO: 2229 - DNA, 570 bp, Gossypium hirsutum
  unsure (1)..(570): unsure at all n locations; Clone ID: LIB3825-011-Q1-K6-G12
gcttggcctgcgattggttttcattacaattcatcctatgaagtggggagctacgctaatgaactcttttctgttcaatgtggggcttattcttttgtgctcaataagtgtcatacagttctgtgccaccgcatttgggtactatgctcaagcaactgctgcccaggaaatattcggccacacattgcagtctcttcgtggaattaaatatttgtacaagtataatgtatttcaaatcgcattcattgttttagcggcattgaccttcgtgtattatgttgcctttggatggagaagaaaaaaacctagcggcaggttccagctttcctcgtaagaatgttcccctagaagacaatgcagcctctcaaataatcatatttctcttttatatcatccctttcagaggtgtttgatatgctcggatgcttacggctgtggaaggttagagagaggcttttttctcgctagttaaattggttgcctgaaggaggagcatgttgagtgccgcaactgcttctctttatgcttgcttgcttttcatctcctttngtatggagtttctggttatta

SEQ ID NO: 2230 - DNA, 595 bp, Gossypium hirsutum
  Clone ID: LIB3825-011-Q1-K6-G2
cggccgcgtggggcggagcccaagcgaatcggcacctcctccattgatacgacttgtactatatgggatatcgagagggagacggtggatacccagcttatcgcccacgataaggaggtttatgatattgcctggggcggcgtcggtgtttttgcttccgcctctgctgatgggtccgttagggttttcgacctgcgcgacaaggagcactccactatcatttatgaaagttcggagcccgatactccgcttgtacggttggggtggaacaagcaggacccgagatatatggctactataattatggacagtgctaaggttgttgttttggatatccgcttcccgacactgccggtagttgagctgcagaggcaccaggctagcgtcaatgccatcgcatgggcaccccacagctcttgccacatttgcaccgccggggatgattcccaggccttgatttgggacttgtcctccatgagtcagcctgtggagggtgggcttgaccccatccttgcctacaccgctggggctgaaatcgagcagttacagtggtcatcttcccagcctgattgggttgccatcgccttctccacca

SEQ ID NO: 2231 - DNA, 586 bp, Gossypium hirsutum
  unsure (1)..(586): unsure at all n locations; Clone ID: LIB3825-011-Q1-K6-G4
gttcaccctgntgcattcttccaggcccttcatcttcagggactatcaagagcttgcagatcatgctgcagcatcattcgagtgtgttcgagacattgttgtggcatcccatatgattggacacatgggtgatgatactcttgatgacccattttctgatagatacaagaaaataggatgctcaatttctccactggataaagattccgaggactacaagatgatcctcaattatgtgngaaaaaacttatgaacctgtcaagcttgcagacattgaatatgggatctcagttgagaacatcttcaatgtggaaactaaggaaggcccctcgtttgatgaagtaaaaaagctgccaaacaagagactcctgtggtgcggtactcggagctcgaacctgttaaggcatttgcataaaggcttcctgccagcaagctgttctctaccagttccaggatatatgttcgggaagggcatagtttgttctgatgctgcagcagaagctgccaggtatggcttcactgctgtagaccggcctgaagggttcttggttctcgctgtgttttcacaaggtgaagaaattgtgga

SEQ ID NO: 2232 - DNA, 373 bp, Gossypium hirsutum
  unsure (1)..(373): unsure at all n locations; Clone ID: LIB3825-011-Q1-K6-G5
cggccgcgtgggcggacgcgtggngaaactgtaagctaagagagagtaactgtgattgtgcggcataaccttcgctgcaatttagttttgttttctgtctggttatattttgttagcatggatgctttttcacccatatgatgtacgttcgtttttagacgtttgtgttttgatgatgatcatgatgtactacaatcgacatcaaaacacaaacgtctaaaaacggncgttcatcttatgggtgaacaagcttccgtgctgacaaactataaccagacagaagtcaactccaaaacgcagcgaaggtactgccgcacaatcacagtaacactctcttagcctacagattcccacgcgttcgcccacgcgttcg

SEQ ID NO: 2233 - DNA, 584 bp, Gossypium hirsutum
  Clone ID: LIB3825-011-Q1-K6-G6
ttttatttttaaaaaatccatttaattatacatgtttttcatgcacgaccttcatcttgttcatcagtatcgttcttaaaactggatccaatccaaatccaaattcaagaacaaaagacccaaagtaaagatatggagctacgaacattccatcataatcttattaaagggtttatgttattatctttgataagcaattggtactcgagattcgtggtgagaaaagaacagcttgacggtaacatcgacggagaagattaaaggaacccatgatagtgcgattgggaactttgggatacctcaatatggaggaagcatggctggtgttgtggtttaccctaaagaaaaccaaaaggcttgtaaaagctttgatgactttgggatttcgtttaaatccaagcctggttctcttcctacctttggtttggtcgatcgaggagattgcttatttgctttaaaggtttggaatgtacagcaagcatgcgcttgtgcatggcttgttgcggatgatattgaagaagcattaataaccgtgggcaatcctgaagaggacagttcatctgccaaatacatggaaaatataa

SEQ ID NO: 2234 - DNA, 590 bp, Gossypium hirsutum
  unsure (1)..(590): unsure at all n locations; Clone ID: LIB3825-011-Q1-K6-G7
atctcaggtagtgaagtagaaggaggtggtgtcggtggtgatacatctcatcgaacacaggctnaaacatccatcgggaagtgagngaaaaacaagtatcttcacggtcagtggccgaccactcatctgttgacaaacatggtatgtcaacaaggactgcccaaaatcaaaatagtgctaatggtgagatgggaggtgttattactgatcacaagttggatactgagaccaaggatggtaatcaacatcatgagctattaccgcataaggagcacatgagggaagtttcaaataaatctaggtctggaacggagcgaaccgggggagaagaccaggaaagaactggcggaagaaatgacactgcagaaaccggtgaatggagagatgagggagcatcacgtaagggtagcggtgtggttgggcgaaacttggacattcgggaaggacctgttggccagtcacccaaagaagctattaaaatagacaaaaataagttgaaggctgcgcttgagaaaagaaggaagtcgcgtggggaaacgatgaagaaaaaggatgtcatggacgaagacgatcttatcgagagggaacta

SEQ ID NO: 2235 - DNA, 405 bp, Gossypium hirsutum
  Clone ID: LIB3825-011-Q1-K6-G8
gcgagaaatccagcggtggcgaaggcttcgatgatggcggtgacggtcccggccttgactgcattgatggcctcgattcggggaactagacagacactccccaaagcttccagaatcctttacggcgcgagggaaaaaaaagagaattaggaagaaaccctaaggtttgatgtgtgtttggggctcattgggcctgttaagaatttgggccatgactgtattggtgtattgggtcactgtaacgtgctatggggttattgggtttgatttaggctaacgggatgttgggttattttttttggggtgtatttgggttgttgggtagtaacagtgggcctgctgggtagggtcttgtaattggactttttaaatggacattttaaataaataaatacttatttattt

SEQ ID NO: 2236 - DNA, 601 bp, Gossypium hirsutum
  Clone ID: LIB3825-011-Q1-K6-H1
tcgaaacacatctgctctctctaaagatcgtcatggcctcatccactttcaaactaaccattcatctaccactctcagcatccatcatagtctgaagccaagttacaaatcaaccatactaaaggatggatgatccagaattagaatgggaaatccaagaatcatcaactgggtatagtgagaatggcaaactaagttggttgatgagattgggaaggaaaatatttgtcactggaattgttatatcatctgcaccacttgtcttccctccaattatggctatttctgctattgggttcgtctgttcggtcccttatggagtcttattagtaagctatgtttgcactaagactttaatgagtaggttacttccaatgccttcgcgatctgccccattattgttggaatatggaaaagcatgtaatggagaaggagaaggagatggagaaggagaaggagaaggagaaggagaaggagaaggaggaggaggagaagaaactaatggagtacaaaatgaagttattaaaggagatattagcatagagagggaggaagaagagttaaaagaggacattattgaagaaattgaggctagaattga

SEQ ID NO: 2237 - DNA, 583 bp, Gossypium hirsutum
  unsure (1)..(583): unsure at all n locations; Clone ID: LIB3825-011-Q1-K6-H11
ccccgcgtccgagcatctcagttttcttttctagnaatgaatggtcggattgggggtttttcctttttccattaagctgtcgtgaagcctggcggtgctgaacccttaagagcaaanagaaatggagaaacaagtggaaaactccagcaggttggtgcttgtcatatatccatttcaaggccatataaatcccatgctccagctagccactatatttcatgcaaaaggctactcaatcaccataattcaccctgaattcaactctccaaacccttcaaaccatcctcaattcaccttcatatccatcccagataagctgcttgagtccaaagtctccctctcacccggggattttatgaatttggttttggctctcaacaacaactgtgcagcaccgtttaagaaatgcttgaaacaaatgttggatgacgagcatccccatgaacgtattgctggtgtaatatatgatggtctcatgtacttcgctcaaacggtcgccgatgatcttggtttaccaggcattagcatgcgtcccactgcagcagcaatgttactttttgctgttattcctcaaattgagcaa

SEQ ID NO: 2238 - DNA, 585 bp, Gossypium hirsutum
  Clone ID: LIB3825-011-Q1-K6-H3
aaaatgatagcttgaagatctaaagggatttttttttcttttttagttgaagatagaaaagaaaagaacaatggggtgttcattttcagggttgaatgctttatacgacgccgtaaatggtggaggggacgtttggatcaatgacaacaggttcaggatcgtgaggcagttgggtgaaggtggattcgcttatgtctatttggtgaaggaagtcatatccgacgcctcttcagcttcatctgttggcttagccaaaaaagtcaaggacccttctcatctttccgatgatggaacttatgcaatgaaaaaagttctcgttcagaataatgagcagttggaattggttcgtgaggagatccgtgtttcatccttgtttagtcaccctaatctgctttcacttcttgatcatgctattattgccattaagcctacacaagaaggatcatggaatcatgaagcatatttgttatttcctgttcatttggatggaacattactggacaattccaatgctatgaaagctaaaaaggaattcttttctacctcagatgttcttcaaatatttcagcagctgtgtgcagggct

SEQ ID NO: 2239 - DNA, 608 bp, Gossypium hirsutum
  unsure (1)..(608): unsure at all n locations; Clone ID: LIB3825-011-Q1-K6-H4
gccggntatagttatggacagccttgctgttcatggccttggtttggtgcatccgaagaaggttttcaacttctacaatgagcttcatgcctacctggcttcatgtggagttgatggtgtgaaggtcgatgtgcaaaacatcatcgagacacttggtgctggacacggtggtagagtatctcttacccgcagttacgttcaggcccttgaagcgtcaatttcccgaaacttcccggacaatggatgcatagcatgcatgtgccataacactgatggaatctacagcaccaagcagaccgctgttgttagagcttctgatgacttttatcctcgtgaccctgcttcacatactatccacatttcctcagtggcttacaacactcttttcctcggagaatttatgcaacctgattgggatatgttccatagcttacacccagctgcagattaccatgctgctgctcgtgctgttggtggatgtgctatctatgtcagtgataagcctggcaaccacaatttcgagctcctgaagaagctggtccttcctgatggatcagttctccgcacccaattgcctggcaagcctaccgttgactgtcttttcgctg

SEQ ID NO: 2240 - DNA, 579 bp, Gossypium hirsutum
  Clone ID: LIB3825-011-Q1-K6-H5
cccagcgtccgcaactgtgtttcaagcttcttctttttactttccttttggcttttcttgtcgtacaaaaaaaaatgtctgatctaagagatgtgcacggcaaccccattccacttactgacgagcatggcaaccccgttcaattgactgacgaacatggtaaccccgtttacgtctctggtgtagccgccaagcagacagatatgtatggtggtcagatgggatatgatcccactctttccgccgctactgagtatcagcagcaacagcagctccggcctcagtacctgcagcaggaggaacagcagccgcagtatcagccacagcacctgcattacgaggtttccaccacagaagagattcagcgctccaacgcctccagccctagctcgtctgaggacgatgggatgggcggtagaaggaagaagaaagggctgaaggagaaaataaaggagaaactaacgggtggaaagcataagacggaggcgggggaggaggggcaatcacaaaccgtaacctacgttgccaaaaccagaatcacaacaaccagcaacgcaacaacgccgccgcctgagcagc

SEQ ID NO: 2241 - DNA, 583 bp, Gossypium hirsutum
  Clone ID: LIB3825-011-Q1-K6-H6
ggaaaacagaaagcagagccgcatcactttttgctagctaagctactgtgggagttattgttcttcagaacagcttctgcagtagctaataatatcgttatatattatataaattttatacatcctttttaccctacaactccatatataagcaagtaaaaataaatatggctcgctctgtttcttcctttaagctccttggtgcttctatttttgatggtctttatgtctccatatcaaggagaggttactcgggtgcaccgccggcggcagtgacggctagctttggtaggcctggggcgatggggaaagtggaacgaagagatgcgatgaaagagtcgtcgtcgtcggagacaagggcttattcttcagcttgggcgcctgaccctgttacggggtattaccggccggagaattgtggggctgagatcgatgcggcggagctccgggagatgttgttgaatcacagggttagatcacagtagaaacttgccaccgcatgtgatcaccgtagcagagcagagccataatgttttgcagatgtttgggtgcctttgtattttgttttggttttgagttcaaa

SEQ ID NO: 2242 - DNA, 582 bp, Gossypium hirsutum
  Clone ID: LIB3825-011-Q1-K6-H9
ggaccgtgggcaattggaagtgaagttgaaatggataaattaaattgtaaagggcgtcggagcaacagcaagagctcagtcccagccccagccccagcggtttgagtggcttgttttttgcttttaaccatttgcggttcaattcctttgttcgattgttcctcttgcagcttggccatcagcagcagggtggatgtgagatttgttacagtgaaacaacaaaaatggatatgtatcatccaagttcaaggctctcatcacaagaagaaatgcttaataatctcaatcgcaaaggtataggagagccttacctcgtcttgacttccgatcctaagcctcgtctccgttggactgctgacctccatgaccgattcgtcgacgccgtcactcaacttggtggccctaacaaagctacaccaaaggctatcatgcggacaatgaatgtgaaaggcttgactctttttcacttaaagagtcacctgcaggtttcttcattcttttcaatttttacctagtcaatttttttttacaaactcatagtttttgttagaaatgattctcttctggacatatttatactgt

SEQ ID NO: 2243 - DNA, 491 bp, Gossypium hirsutum
  Clone ID: LIB3825-011-Q1-N6-A11
ggtagaataaatatcagatatatcaaattagatttgatattaaatatatatatatacgaaaatacacaaataattaagaacaaatacttgaaaaaaaaaacaaatatgttatttatatccagtacatcacacaaatatcaaaattacaacaacataaacatgagggacaatggtagattctgttctttgatcacatcagtttcacctcgtaattgctgttaagaaacgtatactcaaaagatacgatgattcaaacgaagacccggggaactgaatcagcaggcttacaatccaccttcctgagtttaaggatcagccctttcccaccaccatttgccaatggatgaatcccatgtgttggacccgtcaactcagctctcttcgccctttctttctcaaatgataccccaaatcgcttctccacatctcgaccgagttcttcatagagctgaccatctctagtgagagccatcatcaattgaggtaaccca

SEQ ID NO: 2244 - DNA, 461 bp, Gossypium hirsutum
  Clone ID: LIB3825-011-Q1-N6-A12
aaaaaagaatttttttttggaaaaaaaaaaatagaataacaaatattttaattttttcaataaaaaaaaaaaaaagaaggacgggggaaaaaaaaaaaaaagcggggcggggggcgggggggggaaaaaaaaaacaaaaaggggaaaccaaaaaacccgggaaaaaaaagggaaaaggggggggggggggaaaaaattttccaaaaaaaaaaaaaaaaaaaaaaaggaagaaaaaaaaaaaaaaggaaagccggggggaaaaaaaggaggaacaaaaaaaaaaaaaaaaaaaaggggcgaagaaaaaaaaaaaaaaagggggggggggaaagggagggaaaaaaaaaaaaaaaaaagggggggaaaaaaaggccttttaaaaaaaaaaaaaaaggggggccccttttgaaaaaaaaaaacggcaacccgggggggggggcctccccgcagggggcgaaaaa

SEQ ID NO: 2245 - DNA, 575 bp, Gossypium hirsutum
  Clone ID: LIB3825-011-Q1-N6-A8
ctcccccccccccccttttaaaaaccaaaacactaacatatttaaggacattatttaaaacaaacacttgaaagtaaactttatgaattttctattatttgatttcttgtcccttaataaatatcaaaatatatccctactaacttttattaatatttcttcttcttcagacctcggttctcgattcaactggtttcacatacaatctgattttgatctggcttgattttaattgggattgttgtttctaaacctaccttagcttctgttcttgcacttctctactgctcttggtgcaagtccaattgcctcagatcctttcataattcgtaagcgtttgcacgaatcaacaaacatctcccatggaacatctccaacaagcatccaatctccatctttgtcttcataagtaggaacatactcagaaccattcaaaaggtctatcaatttgctctcattcatgaaatctttcattccatgagacccacagttaccaatagtgaaggagctgaacattttgctcaaggcatcagagagttgttggtaactcttgtatagtttcaagtccactttgc

SEQ ID NO: 2246 - DNA, 564 bp, Gossypium hirsutum
  Clone ID: LIB3825-011-Q1-N6-A9
ggcattcgaataagttgaagtttaattttggaatcatctgaagttaaaattaagaagataatggaacattagtatacacgttatgccagtcgtgaccacgactgcatctatccatcagcaatccagcattgtccagaaagggagaatgaaaatgttgacaaagtttgttttgtttttgggtctgatttgatttgatttgatttggtgttctgcaatgcacccacccaccctattatttccaagaagaaccacctagtctaatcacctctttaccactgttgtccctctttgctatcctttcaaaccccccatcatctccctttgtatcacttacatcaccgtacagatctttcagcttcgccaaattactggatgccttgcctccctcttttgctggacttggaagtcgatcataatgactgttcccacgttgctcactctgacttctgctcctcctgtttccgctcacactcggacttcggcttctgctcctgtatcgcctactttcatcagcgtaccttgaccttctatcataatcatgtcttcgctccctctccctctccc

SEQ ID NO: 2247 - DNA, 575 bp, Gossypium hirsutum
  Clone ID: LIB3825-011-Q1-N6-B12
tcgcgatctagaactagacgcgcgcgtggacccaccaattactgaccgacccctgcctgcatgccaactatctctatctatagtgagattaaagctagctggactcatggatatagatagctgctgtctgaaagagatagccgttcacaaacacacacacactacaaaccagccgcatacatagagaagccagccgggcgtgacgagtgagcgaactaacatacattgattggcgctcactgactgctctctattcaggaaacaaacctggccagctacatgaatgaatgaatcaaccaacgcgcagagggaggctgcgtgttgatcgccagcgagggtggtctttttaccaaccagacagacaacaaacaattgatcttcatcgactggctgtgacagagagagatgaagcaagccacgcacgcttgcccgaccaagcaagaaaacattctgatggatggtaacgaacggatataacaaaaactagctgccgtatggatcgatgccactaactacatatatatacgaacgaacacgcaggactgactaatggatggcattgattgcacccacat

SEQ ID NO: 2248 - DNA, 372 bp, Gossypium hirsutum
  Clone ID: LIB3825-011-Q1-N6-B8
gggtcccccgttttaaaactttcacacaaattattattttagcttttaacatggaggggaacggtaggatctttcgggcccgggggggaaaaaattcccggggggcccccctgggggggggaaaaaaaaaaacttttataaacccgaggggccttttaaaaaaaaaacagagggcttatccctccgggaaaaccccgccgctttatatggtttggccccatgggttggaaaaaaaaggccccccgcccttggggggtttaaaaaaactccatttccggccccgaaaaaaaaaccacccttaaaatcaaggcccccccaaagggttgggaaaaaaaaaaaccctgggtgttaaacaaaaggggtgggttttta

SEQ ID NO: 2249 - DNA, 539 bp, Gossypium hirsutum
  Clone ID: LIB3825-011-Q1-N6-B9
gaaaaaccaacagctccccatttaaggagcatgggagaacatattaaaaatatctacttgtttaaaatctgttcaacaacaaaagagaggggcatgcatgcatgatcaaattatacatatcaagtttttattttatatttgaaccaaggctgaggctgaggctgctctttgcctttccattccattccgttcctttgggttgtttaaagtgtttccctttgacacattgcttcacaaattgtttgattcctttcttgggcccctttttctcaacatggaccgcttccctcttcttctcttcttccaattcttcctccaactgcacacacagtttgagtaggcggtcctttacttggtccagcctctgaaggagcgttcctttgagctgagtctccaccatgacatgatcaatgggacgacagtacttctccagggacttggcggttggggagaaatcgatagatgaaggatgaccctccgtacatgtgctgcccaacgtcccacttgatggggtggatgcgctagagctccttgggctt

SEQ ID NO: 2250 - DNA, 578 bp, Gossypium hirsutum
  Clone ID: LIB3825-011-Q1-N6-C10
aggagaatctcaaatttatttatatataaatataattgcaaagttaatttttttttcctttaacctcgaatgaatgaatctcaaactacttttttttccgttaacctcaaatgaatgaatctcaaacttcaaaataaaaattctgaaaatttatactagttatccaaaccttttgttgtaaagctataatttgtaaagcagcttatcatccaggacaccagttctaaatgcatcatgagaccaataatcagaagctacaatttcagttgggcaagcaaccaagactagcttcatatcatgcctctagacaggatacatgctttggcttccccggtcccgctgtcccatcaactcaaatattgccccatccaagctattataggtaaaacaatatctgggaccttctatgtcagcaacaacaccctaccgggaatccatctcccatcacaatatcttgttttctactttttcatgagcgccaaatgttattgaagacagaaaaccatttcatgagtctcgacagaacaacaccaaccattccatttgttcccctgcctaaggcaaaggtttctcaacca

SEQ ID NO: 2251 - DNA, 547 bp, Gossypium hirsutum
  unsure (1)..(547): unsure at all n locations; Clone ID: LIB3825-011-Q1-N6-C11
agaaactgaatcatcttcaattactacaacaaattttcaaaatgaattgtctttcaaaaaatacaagaatggttggcacggcaccgcattttctcggaaattataaagaagagtgaaattaagtgagtgatgcccagtcaggatatgggcattcgtaaacccattccggtccagtgtaacgcacacagtgtagccataatccttcttcatgcccatcatacccgtttggagctaaattaggacagtgcgtacacataggatcgatgctgaaatcttcactacagtacttgtattcttccttatgactctcacaactggtttcaggagaacctccaaaaagagctgcagctctatcagcagttgttcctaacgtagagcgattaacaacatcgtccgaaagataaagcatgtcattggctattggatgacctgtacactgcaaatgcacacgaatctagaaagtatggttntcgtgtccaaagaggcgtgtccaaaagtatccgcattccactagaacaattacgaacgtctcctttaaccgtgttaa

SEQ ID NO: 2252 - DNA, 306 bp, Gossypium hirsutum
  Clone ID: LIB3825-011-Q1-N6-C8
gccacttcgtaaacaagatagcccgagctcgtctacaaaatgatacctcttgtccctgaaaaggctggacaccaaaaagactaggtaaaagaatcttttacctccattaatttatacactttgattctatcaacaatctgaacaaccttacacaacccatcaaccaaacaatctatatgcaaccaaatttgaatcaaagcccatcatattcatatacttcaaatgtagagctgcccctttaatgttacctgccctgcacaatccatcaaatattataatgagtgtatacttatgacactccaaccc

SEQ ID NO: 2253 - DNA, 560 bp, Gossypium hirsutum
  Clone ID: LIB3825-011-Q1-N6-C9
tttttttgttttttttttttttttttttttttttttttttttttttttttttttttttttttttttttttttttttttttttttttttttttttttttttttttttttttttttttttttttttttttttttttttttttttttttttttttatttttattttttttttatttttttaaaaaaaataattttatttttttaaaaaaaaaaaaaaaaaaaaaaaaaaaaaaaaaaaattaaaaaaaaaaaaattaaaaaaaaaaaaaaaaaaaaattttttttaaaaaaaaaaaaaaaattataaaaaaaaaaaaaaaaaaaaaaaaaaaaaaaaaatttaaaaaaaaaaaaagtggttaaaaaaaaaaaaaaattttttaaggaaaaaaaaaaaaaaaaaaaccctttttttttttgggagaaaaaaaaaaaaaaaaattgttagcgctgaagaggaaaaaaaaaaaaaaaaaaaaaaaggggggggcatattataaaatttaaaaaaaaaaaaaaaaaaaaaaaaaggagggggggggggggttcaaaaagaggggggg

SEQ ID NO: 2254 - DNA, 367 bp, Gossypium hirsutum
  Clone ID: LIB3825-011-Q1-N6-D11
aaattgaatcctattaattacttaagaccgaccaaaaaaaaagaatctcacaagaatggagggaacctacggctgccctaaaaaatagcaattactggttggcagactgggtggggttatttccctaagctggctaaacgcagggacaggaaagtcccctcaaaggatgcacgccccggtggctgggggtgggaaaaaaaaagcctgcctgtcttcaaagaatgcccctggttttaaaaaaaaacaccacccaccaaggcccacttgtttggtttgctggaaggaaaatatagccctccaaaaatgaaaggaggacctattgaaaacaatgatccattttcatgcagggggaaccgacgcgtgggcc

SEQ ID NO: 2255 - DNA, 561 bp, Gossypium hirsutum
  Clone ID: LIB3825-011-Q1-N6-D12
acggtaaccaagagcaatcaatatttacaatctcaattccagcaaatatttgcagaattacagtgcacaatgcgttaacttcggaaacatgaatgttcagtcatatctacaaaagtagtgcgcataggtattaattcaagggaactcaatactaatgaaggaaaggttggggttcagtgtctttagctcatggatttctaagagctgccaaccgcttctcaagctcatcaacacccgaactgccaacaccttcagtattctttcctgcaatcctacctttaggagccgatgacaactgtgaggcaacatcaacaccaatttcgtctaaaacctgatttgtcaggtcctcagtctcatcttctgcctcatcatcgtccagagcatcatctatggcatctgacatcatttcagtagtcatatccatctgggcagactgcttctgaaattcccgaataacctttgcttgtttttctggggccatttgcttattcatggctgacatggccttggtggcacctttcatgccaacagcaactgaagattgagcatgcattgcctgcg

SEQ ID NO: 2256 - DNA, 559 bp, Gossypium hirsutum
  Clone ID: LIB3825-011-Q1-N6-D8
ggtgaactataatttaaacattttaatctcaaaataacaaaattgctcaatgtaacataaaatccgagacaaatacaaatgcgaacatccactacataaaaggtcttgaaacaaaactcaaaccatgtctaataatgtaggaaatggtaagttcccatcagaggctcttttaggagtgccctattgccaatactagcttaaggtttactcgtcttcctcttcatcgccatctccaccagcggccttcttggcagctgctctctgattctttctcttcactcttccaggacggccacctccgaacggacttatcagagagaagtcgatatgtttctgggagtcaaccctcaccataaaggatgggatgttaaccacctgccttccgactctgatgtgacgttgcctaatcaacacacgagcatggtgaattgacttggccataccagtcttgaacacaagtgtttgcaagcggcgttcaaggaagttctcaacggtcaaagccaagacataatcgagcttgttctgactctcatccaaaagtccatacctgttcatccta

SEQ ID NO: 2257 - DNA, 563 bp, Gossypium hirsutum
  Clone ID: LIB3825-011-Q1-N6-E7
tttttttttttttttttttttttttttttttttttttttttttttttttttttttttttttttttttttttttttttttttttttttttttttttttttttttttttttttttttaaaaaaaaaaaggggaaaaaaaaagggggaggaaaacccaaaatttttattaaaaaaggaaaaaaacaaaacccaaaaaaataagtttttttaaaaaaagggggaaaaaaaaaccaaaaaaggggaaaaggaaaggaagtttcacccaatggggggggggaaaagcatttttaaaaaatgggcccaaacggataaaaaaaggggggggcaaaaaaaagggccttaaaagggaaacaaaaaaaaattttggaaaaaccccaggggggggggccattcaaaatttattttaaactggggaaaaccaaaatttaaacctggaccccccattaaggcccctttaaaaaaaaaaggaaagggggcccccccccaaaaatccaaaggggaaaaaaagttttaaaaaaacggaaaaaaccggaaaaaaaaaaaacccacgggggggccgacccgg

SEQ ID NO: 2258 - DNA, 549 bp, Gossypium hirsutum
  Clone ID: LIB3825-011-Q1-N6-E8
tttttttttttttttttttttttttttttttttttttttttttttttttttttttttttttttttttttttttttttttttttttttttttttttttttttttttttttttttttgggggcggaaattaaacccttaatttaaaacggaaaaagggcaaaaaaaacaataacgggggggggggggaagggtttagggcttcaaaaaaaccaaaaaaaaatgttggttaaaaaaaaaggtgggaaaaaactaaacccgggaaaaaccccctacatttaaaaaacgggggaaaaaaacggaaaaaaaaaaaccaaggcggggggggggcccaaaaaaaaaaaagggggggggggcctgggaaaaaaaggggggtttcccaccccggggaaaaaaaaaaacgggagttgaatcccgggttttttccttttcctaaaataaaccccccggggtttgggaaaaagggggggaaccccaaaaaaaccccttggtttttttaaagaaaaaaaaacccccggccccccaaaaaaacccccaaaaacctttttaatgg

SEQ ID NO: 2259 - DNA, 540 bp, Gossypium hirsutum
  Clone ID: LIB3825-011-Q1-N6-E9
ttttttttttttttttttttttttttttttttttttttttttttttttttttttttttttttttttttttttttttaggagtgggaattgggtttttattaaaaaatggttaaaaagaaaataaaatttattcaactagggggggggggaaaaaaggattccaaaaaagaagaaaggaaaaaaaaaaacccgggaaaaaaaaaaaggcacggaagaaggggggaaaaaaagggggggggccacaaaggaaaatgggggaaaaaaaaaaaagcaagggaaaagggggaaaaaagggggcaggaaaaagaaaaaaaaagggaacaaaaaaaggggcccggggaaaaaaggaagggggggggggcaaaaaaaaaaaaaaaaagggcccccttagagggggccgggaaaaaacggggggagcgggaaaacccggaaaaaaaccaggaggcgtaaaaagggtccccaaagggaggggggggaaacccggggaaaagcaggggaaaagggggggccccgggaaaaatggtatgggggcccaattcc

SEQ ID NO: 2260 - DNA, 571 bp, Gossypium hirsutum
  Clone ID: LIB3825-011-Q1-N6-F11
ccagtagaagttttcatatataagaaatgaaccttgcaaaatacaccaacatggctatatcaagccaaaaaaaaaacaaaatatagcggtacaagaaaatagatcctaaaatatgatggtattcacagggcattagacaagattaaaaatgatttagatttaggtggaatagaaaggtaaatggtcaaccttgccaggcaaagaatcataaccaaagatgctgaacagatggctgagctagacaagcagtcacatctcttaatagaaattcttgtagtattaaagaacacaaaaacaatgtcttttggtgtaagaatacacacgaactatccaactctgacaaactagagcaaagtggattacctgctggtcatcatcattttcagctgggttattcctagaaatctcaaaccttcagcattctcaggatttttcataacttcagcctctagggcaagcgctgcttcactcaaaagtcctttcctcaatagctcttgaccttcttttaaaggattttgatgaccaacatatggattcatatcagaaaaacaaagacaccccttgaagcgtc

SEQ ID NO: 2261 - DNA, 565 bp, Gossypium hirsutum
  Clone ID: LIB3825-011-Q1-N6-F12
gaactcgagatagagaccattttataaggcgtttagttcgatagtaaaatcaaaatactctccaacttcaaccatcaactatgcaaaactaaacaacatggttgcccctcctcacaacgataattctttacattcccaaaaatttacttacaatttaatggattcaaatttggcacccattacacctcctctttgtttctggaattgaatgtaacgcaaggtactggcaagaaaagcatctgaggttgcagaatcaccctgcatctctgtgttgattaattctatcaggtgttggatcgcagcagcggtgatttgtttattccctttttcaaagtaatagaggtacttgttcaatatctcaacaaagagcgtgactggcccactgctatctcgtgcaatactagccatttgttgagcagcatttgcgatcctcaatgctcgttttaggcacagcaggaccctctccccatccctaatgccgtcctgaccatcaacccaaaaaagatgtgaacatgcgtaaacagctctgcactggtcgggcttcttcaatagtcgagctgaatat

SEQ ID NO: 2262 - DNA, 575 bp, Gossypium hirsutum
  Clone ID: LIB3825-011-Q1-N6-F8
aaatgggaaaagtgcagtatttccaccctatattaaacaggtgaaagggattattattttgagtctgaagaaaagaaaaagaattatttttttgagcactagtttaactataacaaaaatcaaagcttttggctcaatgctcctcacctccataaaacgcatttattctaaaaaattatgcctctaacccacacctgatgtgggactaaattttcctgaactactactgattaacttgaaaaaacatgccctcatcagttgtttccatagacccatttctcagcgttgcttgtatagttaaccaactcttgtggcttgaaccacaagttgatttcatgcttggcagtctcaggaccatcactcccatgaattatattccttccgacaaccacggctagatcacctctgatggttccaggctctgatttttgaggatctgttgctccaatgagtttccggccgtatttgatcactccctctccttcccagaccatggcaagaacagggcccgagctgaggaattcacacaggccattgaaaaaggtctttccttcaagtcatcataatgtttctgg

SEQ ID NO: 2263 - DNA, 569 bp, Gossypium hirsutum
  Clone ID: LIB3825-011-Q1-N6-F9
gaaaacggaagttcagttttgttttaattcaaaaattcatccggacgtaaatccaacactttcatttacagatactaccacgggattaagacccggtatggcataaaaattcactgtgaaactaccaaataatagttgcagtagcgccatgggataaccataagtcaaggaactatcaatcatgtatggcatcagcatccccaccatcaacaattgatgcttcattgaacatgtattctttttggtactccatcaagtactgcgttgatctccttacatccagaaatagactgtaaacacgagtgatgtcctgcacttccacaaccatcccctttcgcttccggcaattcaatgcagaagccgtgatcagatggatagcatatctcaaggaggtctcgtgcccaattttggtcaacagttgttttgcatcttcagacatctctacatcttcctcttggcacctgatgtctagaatcttacgaatttcatcctcagaataaggctgagtagtgatgattagtagtctatcaagaagatcaattggaattccatgaggggatttgtaattt

SEQ ID NO: 2264 - DNA, 562 bp, Gossypium hirsutum
  Clone ID: LIB3825-011-Q1-N6-G10
aaaagtagaatttggatgctatagaatagatgccaaaagatttacaattgtaggtttttcacctcacttgaatctgaaaacacttgcaagcaatcaggattttgaacttcgcagaaaagctcaccgatctcacaaataatttacaaagtaatggaactggcataaaaaaaacacacatcttgacaagaaaccaaaacatttttgagatatttacaaggggataaaaagaaaaaactgtagtagtaattcattggttacatgttgtcgtccgtatttgcggtccggaacggccaacaaatcgagcaaatcctgaaccaaaaacccttctccttctttggtggtgctgccttggtatccctcttggcaacaagatcagccatgaactcaacaacagcctgagcacccaatttgattacttctcttggtggaacttccaagggagtctcatcagctcggaaaactctcaatttcgacaataatctgaaagaatcgggtaaaactctgatctggttgtcacttatgtccaactcttcaagcatctcaaggtttccaattgatcttg

SEQ ID NO: 2265 - DNA, 525 bp, Gossypium hirsutum
  Clone ID: LIB3825-011-Q1-N6-G12
gagtcaactgtcaaagacaaggaaactcaattacatgcccaacccaaatgcgttaagtgtaacatttaacaaataggaaagaaaaaataataacagaaactacatacaaaaggagatgaaaagcaagcaagcataaagagaagcagttgcggcactcaacatgctcctccttcaggcaaccaatttaactagcgagaaaaaagcctttttttaaccttccacagccgtaagcatccgagcatatcaaacacctttgaaagggatgatttaaaagaaaaatatgattatttgaaaggctgcattgtcttctaggggaacattcttacaaggaaagctggaacctgccgctaggtttttttcttctccatccaaaggcaacataatacacgaaggtcaatgccgctaaaacaatgaatgcgatttgaaatacattatacttgtacaaatatttaattccacaaaaagactgcaatgtgtggccgaatatttcctgggcagcagttgcttgagcatagtacccaaatg

SEQ ID NO: 2266 - DNA, 153 bp, Gossypium hirsutum
  unsure (1)..(153): unsure at all n locations; Clone ID: LIB3825-011-Q1-N6-G7
aagtgactaaaacataacatttcaaacataagtgactaaaatgtaacttaagataaacaaaaataactattttgatagtttaccctactattaatatagatcaatttnaataccattatactattagnnaaaagatcgaatnnaaaatcaaat

SEQ ID NO: 2267 - DNA, 404 bp, Gossypium hirsutum
  Clone ID: LIB3825-011-Q1-N6-G8
aaataaataagtatttatttatttaaaatgtccatttaaaaagtccaattacaagaccctacccagcaggcccactgttactacccaacaacccaaatacaccccaaaaaaaataacccaacatcccgttagcctaaatcaaacccaataaccccatagcacgttacagtgacccaatacaccaatacagtcatggcccaaattcttaacaggcccaatgagccccaaacacacatcaaaccttagggtttcttcctaattctcttttttttcctcgcgccgtaaaggattctggaagctttggggagtgtctgtctagttccccgaatcgaggccatcaatgcagtcaaggccgggaccgtcaccgccatcatcgaagccttcgccaccgctggatttctcgc

SEQ ID NO: 2268 - DNA, 563 bp, Gossypium hirsutum
  Clone ID: LIB3825-011-Q1-N6-H11
gataataaatacattttcaatcacatagcgtttaccatatcattgtgcagactagaaacgctaaccaacaaattaatatcactgattgtcatgaactagaaaccatgaagtatacaatagactcccaactttaaaattaactgcagaaaacgccattaaagaacaaaccaaacaggaaaaagctactacttaatgttagagcatctcctcaagtgatcaaacggataagatacgctttgtgaactcatccaaggagctcgatgaagagccgccttctcttagacaaagttctgttttccccttagattccatagctttatttctcatctcctttccttctatattgagtagtagtgttttaatagctccttctatctttcccctctccaattcattctccaattccaggcctatattccatatataacagatgtacctcatgttaagaaactggtccccgaaacaaggcctgcataacatcggtaccccttcggagacactctcaagtgttgaattccatccacagtgagtccaaaatccgcccactgcacaatgcgccaaca

SEQ ID NO: 2269 - DNA, 572 bp, Gossypium hirsutum
  Clone ID: LIB3825-011-Q1-N6-H9
cattcctagtttggaattcagagattccataaatttccaataaaatcagcatacgtcaatatattctaagagactgacatgtttttgctattttagagcactgcataagcaactttggatttacaattttgagacaaactctcactaataaccaatagatatatcaccatcttttttcacttgatactataataataacttgagcaaacataaaagagtagcactcattttccatctctacattccatatccagttagcccttggggattaaccctggtatcaccccatatcacagatcctgttgttgcctccatgttgaccatctttttcttcccttcaacaggtgatccctccattgttaatcctcctggactctcctgtgaagttaggcagctttcagtagaaccatcgcccctctgtgaatgcagaccggatggcatttcttcttcctggtcgcatgcattctccacctcagcggattgggaggagtaaaatcccagtggatcaacagaataatttctcagcatcttacaaccaaattccaggttatctgtttcggtaactgcaccac

SEQ ID NO: 2270 - DNA, 615 bp, Gossypium hirsutum
  Clone ID: LIB3825-012-Q1-K6-A1
gcagacagcattgcaaagtccgatgatgaggctgttgctcctgagctgagagcatttgttcaagaacactggtcggaggcagctttcttggatggattaaagcaagggcaacaacattacatgaagctgatgaggattttgaagaggggggaatctccaatttgcttaagggatctgccagctcctttgagggttgtaattgcatacatgccactgtacagggaatgtgttgaggtgggtggtcgtctgttatcgcaaaggctgagggggcagcttgttgaagctgttcgaatgcttggaggtgggtctttagaagaagtaagtcaagccggagagcttctagctactttggagcatcaccttcctccatttttggttcgtgctcccagtgttggttagacctcttggattttcgcatgcccttgaccctatattatcccatgtgccatacgtaataatatcattttagcagttagtacgtcacaaagcttctaagtttgtcaaatttccttccatcgtgtgatttgcagcgcttcttctatggcacgtatatcatatagtaggtatagatatgttgttcatctataatgcaagacagagagcaactattttcgc

SEQ ID NO: 2271 - DNA, 519 bp, Gossypium hirsutum
  Clone ID: LIB3825-012-Q1-K6-A10
cttaaaaaccaaagctttctcttttactctaaaaaaccctgtaggttttagcctccacagtaccaccatcaaattcggtagtcggtaatgcgtgaagagagtctccgactccgctcaagccatactcagagacttagtcgcctgtcaacatcaggagaacgaagggaaaagacctaaaccgaggctccaatcgatgaaccaaaggttcatttgagcacgtctttgatgtggcctagtagaggagtgcacgacgcggagggacgcgcgacgtgcggtgcttgggaaccttcacggttgcagcggctgagggtgttagatgctagagttttcattgttctttaattctgttgggctggtagggttgctttgggtttaagtctgatgggtttagggtttgggtaatggtttgtattgggcttaaagattggattaagtatgttttgttaattgccttgggttttaaatgtattgggccctgtgtataaattgagcttaagaagcaatataaataagacacca

SEQ ID NO: 2272 - DNA, 590 bp, Gossypium hirsutum
  Clone ID: LIB3825-012-Q1-K6-A11
aaaaaaactgagagctccttttaggccctctctcgttctcctttcctcctacctgggcaccagcgagctcgcgcggtggctctgccgtagctccgccgtggctccgccgtgccggagagcaataaaagtttttaaaagatacctttttaaaagcttccaaaaaaggttttgtttcaaaaaaaaaagagcaaaagaaaaaggcaaatcgcaagtaaaacgaccttcctattcgtcgcactcccctaaccctcgtcgaaacccgaatgggttttgtgacatttgggttactagaggttcccaatcgcgtcggtggatgaaccgaaggtgaggtttttattactgttaatgcacttcatttcgaatcaaaacagaaaagaaaaaaaaataaaaataaaagaggcacctttgagagtatttgatttctctgtttttttgtgaatctgttttcttttttttctttgtattgattttttgttcttgatctctgtgtgtacattacattttttttctttggcttttgtagccgaaagcaaaataaagaaaaaaagaaaaaatacaaaaatctgctccttttttttgtctctgttttg

SEQ ID NO: 2273 - DNA, 375 bp, Gossypium hirsutum
  Clone ID: LIB3825-012-Q1-K6-A12
cggccgcgtgggcggagctgcattttctacgatggcaggattcttcatcttttgttttgttcatctatgtaacaagtaaagtgtggtatgtctagtatgctttgcctcgggacggtgggattacaatttctagccaacaatggtagtcataaatgtatcgtagaaattttaaactttgagttctaagtatcaatgatgaaaatgaaaccctaacagatctccaaaagaggattgagatacaccatgattttaagagagatacagaaagtgcatatgaaggtgcatttactttatttgaaccctgtatagagtgttgtctttactacctactcatgggcgaaagaaatatgaaattatgcaaaaatatgttgagcc

SEQ ID NO: 2274 - DNA, 548 bp, Gossypium hirsutum
  Clone ID: LIB3825-012-Q1-K6-A3
taattacctgaaacccaggggatgtgtgaccaagtatatgtgataatgctcaaattatttctaagtatattccatatattttaggggaccagagcctcataccatgtattgagtattttttggacgctggtactttgggaagatgaatgtccaaatgacataggttgaaagttgagacttttttccagcatcataattttcactcaatttgtgatctgtaaatgccattttattttcctagttcagtatgtatataagcaagtattctaccttagtttcttgacattgaagtattcttttctaccttagtttcttgacactgaattattctttgctgattattatctttcttctagcacaggtattctcttcacaaattttagtgaccatttgcttttgcagagcacatctcgttaagtaaaacgcttagattctattaccagctcacctgtttatgctcaatttatagaagcatttgatggcttctcatccattcgtgcatacatagcttattatcgggttgccattgttattgggtagggccatgg

SEQ ID NO: 2275 - DNA, 502 bp, Gossypium hirsutum
  Clone ID: LIB3825-012-Q1-K6-A4
cagctatagtcaagcgaatgcggcatctagcgcgaatgtccatgtatgagcaataaagaccgattcaatcctatatatatactgccaggcgggcccatcccggtataaagtagagcacgagattaccaagattgcggggcgctgacaatgctaatcatgggagaacctactaggaggcctccatgaactgagacctccttacacgtcaacgaactagaacagatgctgtcatgctatacaaggaaaagaacaagacactactgttagagaagcgagtgatatatgcttctaacaaagcaagggctgatgtgaggaagcgcgtgaaaggacgggttgtcaaagacagcgatgcctatgatcatgatccattgagtccaaccagaagctgatgagagtacaaatctttctaaaccttgggtattattacctaaaaaccggagcctgctgtacgataaaacattgatggagccccagcattagttggcaagatccggctgaacca

SEQ ID NO: 2276 - DNA, 584 bp, Gossypium hirsutum
  unsure (1)..(584): unsure at all n locations; Clone ID: LIB3825-012-Q1-K6-A5
ggcaatttcgggtcctccaaggtttgcttcaaggcatcctattcttaggggcatcaatgagttccgcttatctatcttagaagcaaaccccacactttcgttctcccacaccattgtgacgctngagaaaatttaccttgtcaccaacggaagaggaacgcttacgttcttgacacatngaaaacaaagagtcctacaatatagtaccgggagttgtagtcaaagtcccagcaggaagcactgtgtacttggctaaccaagacaacaaggaaaagctaatcatagcagtgcttcaccgccctgttaataaccctggacaattcgaggaattcttcccagctggaagccaacgccctcagtcatatctccgagcctttagtcgtgaaattcttgagcctgccttcaatacacgaagtgagcagctagacgagctgtttggtgggaggcaaagccgtcgaaggcagcagggacagggaatgttccgtaaagccagccaggaacaaataagggcattgagccaagaagctacttcaccaagggagnaaaagtggcgagagattcgccttcaacttattgagccaaac

SEQ ID NO: 2277 - DNA, 539 bp, Gossypium hirsutum
  Clone ID: LIB3825-012-Q1-K6-A7
gcgatcaccaatgctgtggctgtgtactaattatacgagcggcgcatcgtggagtttggctgcgaatcatgctgctaagattcaactattatgatcgcttgaacttgtgctctattcaaccgatcctcattcaacggaactgtctataatacactctgtgagtacagatagacaatgtggttgttgaccttagagatagtgtggaaagcgtacgtattgtaggatgcccaatactgggaaagctgtcaacagactaaaaggagcctactgcactataattttgtttcacttatgtcaccctgtatggacacattgtaccaactgtgaatcaggacactaggtctaggttgtgcgacataacaaacctgaagacattcctagctatatagaagggaagaatgcgagcatatagagagagaaactcacatgtgatggtatgatcctggccataactgaacctgcatgatgtaacacacatgttaaatacgaagtgagtgtatgttacattgccaatacaagatattaaagcgtgaaatatc

SEQ ID NO: 2278 - DNA, 590 bp, Gossypium hirsutum
  Clone ID: LIB3825-012-Q1-K6-A8
acactagtaagaatcagaatcttgggggagcttccatgaaaagttggctggaggagcaggaggtggaggtaaaagtgggattggttctaaggatccttttggttctttggttgatttttcatcaaaaccgtcagggtacccttaattcaggaagtaataaaggaaataaggcaaatgttgcacacgatgcatttggggattttcagaatgcttcaaaaccgagcacaactgcatttccttctagcagtttcagtgcatttgaggattttcagaatgcttcaaaaccaagcacaatggcgtttccttctagcggttttggttcaacttcgaataagaaggattctggtttgaatatggataattttgggatgcctgcaaagaatgttggatctcaaagtcaaacatctgttcaaagctcgggcggtgatcctctcgatatgttcttctcgtcatcttcagcttctggaggttctgctcaagcatctggtggaggtggaggtggagggcatcaattttctgaagttgatgattggggatcggattctgagtttggaggagcaggaggaggaaataatggtggctcaacaaca

SEQ ID NO: 2279 - DNA, 576 bp, Gossypium hirsutum
  Clone ID: LIB3825-012-Q1-K6-A9
ggagacttggtttacaaaattggggttagtgactcaggaaagatggttctttgcacaggtggtcaggaagataggcgataatgcatatcaaggaactacatggcaaatcaagtttgaactcgataatgttgatcgggaatggtatctacaaattgcgagtggcacttgcatcagctactctagctgaattgcaggttcgggttaacgacccaaattcaaatcggcctctgtttacaactggactgatagggagggacaatgcaatagcgagacacgggattcatgggatctacaagctgtacaatgtggacatacctggtactcgatttgttaaaggggaaaataccatcttctttaaacaaccaagatgcaacagtcctttccaaggattcatgtatgactacatccggttagaaggtccctcaactccatgttaattcaggattctgttacacacttattctatatattcatcgttaccattcatatatgttaggatccgtataatgttatatcttgggaatgatgattaatggatgtatctgaagaggaattaaactacacaattgattgaag

SEQ ID NO: 2280 - DNA, 545 bp, Gossypium hirsutum
  Clone ID: LIB3825-012-Q1-K6-B1
cgtataatcccaactaaacccccctttttttaatcctttaacctatcccaattagggttttaccaattttttaatattatatgaatggctacagggcaaattgaaggtgaagaagcaaagaacaataaggtttataccaggaaaaaccacaataaacccaaaaattccactttcatccctcatcaaactcttgctaccactactacaactgatgataacaactctcagcagttgcccctccaacccttcgatgccgtggcgtcagatgattcttctagtcatagtaggttgcagcagggtgtacggaatgttaccaatggggtttcaacatctgggtatgtaaaatatgataatcttgtttcgattagcttgaatgttttgtcaaagaatgaggtgagaggtttgaaggggaagctagtgaacttgaacaagttcgggatttagttaagaaatttgaaggtaaagaaagtaggcttagtgggggatatgcgaattctcgggtttcggggaatgagaatgttgatagaggtggtggggtgttttag

SEQ ID NO: 2281 - DNA, 600 bp, Gossypium hirsutum
  unsure (1)..(600): unsure at all n locations; Clone ID: LIB3825-012-Q1-K6-B10
gccgatgcctatagaattcgtgacggacccagacgaccaaggttcagccatggnaagtcgacgatgttgacacaccggagatcttcggcgaaggcttcatcgcttccgacaacaagctcgcctatgccgatttcttcaacaacttcgaagacgattttgatgactccgatatcgactaaaaaaagaagaatcgtttcaaagcaaacattacaccagggactgtgttgattttgttggctggaaggtttatggggaagagagttgttttcttgaagcaactttatcagggttttcagccaatatggcattgatggtagcacttagaaaccttgcatccctcattgcagcaggcaatgtgcctgtgaaggatgaaaaaattgccattttctctgatgaactaaaccatgcatcaataattgatggtattcgtcttgctgaaagacaaagaagtgtagaattctttgtatataaacactgcgacatgtcccatctccgtgaactgttatcaaattgcaaaatgaagaaaaaggttgttgtgaccgataggttagtcatgtttctacagatgttcattacattgtcatttctctatcctataaa

SEQ ID NO: 2282 - DNA, 578 bp, Gossypium hirsutum
  Clone ID: LIB3825-012-Q1-K6-B2
gcagtgttgccctgactgcaaagctgcgcttgttgaacctgcattatgccttttgtgtggtagattgtgctctccaagttggaaatcatgctgcagggagagtggatgcatggttcatgcaatgaactgtggtgctggtattggtgtatttctgttgataaggagaacaacaatcctactgcaaagatgtgcgcgtcaagctccttggccttctccatatttggatgcatttggtgaagaggatattgaaatgcatagaggaaaaccgctacttgaacgaggaacgttatgcagctctaacttacatggttgcttctcatggccttgatcggagttcgaaggttctaggccaaacaaccattggtacctttttcatggtttaacttggtttcatgttagtggtggtggttaaatctttggcttctttcatatgtctccatcttctagcaagacatcaattgcatagaaactggttctacaaaactgaagattgccagtatcctgaaattattgcaaactaaggatcttggacagtgatgtcagcatgtggcgtttttggcttgacatactggtaatca

SEQ ID NO: 2283 - DNA, 110 bp, Gossypium hirsutum
  Clone ID: LIB3825-012-Q1-K6-B3
ggtaactgtaacctgcccaacaactccctgtatatccggacgccgatgagctcgattcgggactcaaaacgatcgggtccttcccgccaattgcgtgggctggggaggca

SEQ ID NO: 2284 - DNA, 594 bp, Gossypium hirsutum
  unsure (1)..(594): unsure at all n locations; Clone ID: LIB3825-012-Q1-K6-B4
tgnaccacttctgggtgccgacatttcttcatttggatttttaggccagatccctcgtaatttcagtctttccgatcttacagctgatttttctcagagttcagatatactggagagctacccccggtcacctttcttagcgcctgataatgaaacatttctggattctcgtgaaagagagcatcaaggcgacaacaaaaggttggacaccatatcagagggattgagttatgacgattttcgaagcgaatagctctacgtgttaatggtatttgctttacaaatatttactttatattttcatttatctgctgtgctagtacttgttttggaatttacttgcccattcttttgagactagtttttgctggtgctaagattcttttctgccaccattatgtgttttctcagttttatttaatttgtcgataaaattttcttttatgtaggtactaatttgtcaatagactttatcccatgaaacccatttcctaatgagtaaggtccaaggtgttcaagttccaggcaggcctattttactgttttaaaataataaatataattctatattaatatttatatatttttataatt

SEQ ID NO: 2285 - DNA, 577 bp, Gossypium hirsutum
  unsure (1)..(577): unsure at all n locations; Clone ID: LIB3825-012-Q1-K6-B5
gngacggaagagagttctcaacaagaatagccaacaatttagagaaccttattctgaaagaggtccagagacggtaatgtcagctaatatgttttaacacgaaatgggaatctttttttcaactagaaggggtttgtttgtatagctgacctagcaagtttcttcatcttagattgctgcatttattgccgagcctgttatgggagcaggaggtgttatacctcctcctgctacttattttgagaaggtgagcttttaatagctaattatttctatacacttgaaataactatttcttttgctttttggtaccatcaacgtttcaacctgtttctccttatttactggaatattcaaataggcaatgctagtgcaaacttagtttgattcatacaaaagcattaataatttactgcaatttttcattttttttcctagtgcggtatctttcaaaagttctctgcagttttgactgatataacacttcaaatatcatgcagatacaagctgttgtgaaaaagtatgacatactttttatcgccgatgaggttatttgtgcatttggaaggcttgggac

SEQ ID NO: 2286 - DNA, 399 bp, Gossypium hirsutum
  Clone ID: LIB3825-012-Q1-K6-B6
gttatagagggggcgcgggcgctataaaagctacatattttaatacgccggcgtgcgattcgatacctcttgtatcgagtgacccagatgaattccactcgacccttattaacaagctccatcatgcctaaactgttgttgctctctattgagcctccgttgagaacgtaccactttcgtctgctcgagctataaataaaacgctcgaaccgatatcccttgcctcacagttgctcaaacaacatggacaaggagacactccttctagcatctcatttagcgcaactactctgaaggatccagcgcaacgtatgaggtacactccacagcgctcttcaacacaatattcagattatgttgaacttgtttgtcatcctgaacccactgtaaacatggatc

SEQ ID NO: 2287 - DNA, 559 bp, Gossypium hirsutum
  Clone ID: LIB3825-012-Q1-K6-B7
gttgggtaactctgggaaacagttagagatagttctaaattttcttgggctggtggagaagttcttctatctctcaggcaaatatgacatggagctcactgttggtgatgccgctatggagaactctctgttagtagctatcggacatattgagtcagatctaccagaagcacccgagaaggcaccccgccctcctcctcagcccgaatatccatactcaagatatggacccaaagcagagataacacacatcttcagggctactgaaaagcgcccaccttaggagctttcccttgctttcctggggcttactatgttgccattgcttggatttttgatagcgctattacgtttaggggtgaatctgaagaactttcccaccaaacccttacctgccacatttgccgttcttttccatgttggcattgcagcagttctattgctctgcgtgtctatctgcgagaagttggatctatcccaaacactgaagatacttggtttcttgggaggaatccttgtgctagctgggcatagaatcctatcccacctggccgctgcg

SEQ ID NO: 2288 - DNA, 574 bp, Gossypium hirsutum
  Clone ID: LIB3825-012-Q1-K6-B8
caggaaaggaaaccggagggcaaagcttagctctaaccaccaccaccatagtccattcaaatcttaaccttgagcctactgttttggctcagctgaggtctactcacataaccgcacacgaaccagccatacaccaagtcactgaaaatacaaatgtcccaactctgaaaaccaaattctcgagaaacgcacgtccacaaacagtgtccgagttttcatggaaacggacggaaaaaaactattcgaccagggaggagtccatgcaccggctgaggatctttgcgaagaacttggtgagggctgctgagcaccagctgcttgatcctatggctgcgcatggagtgactcagacctgtgatctatctgaggaggagcatgagagcctttacactggttacaagggccccaatgtggcggctccattattgagggatggtgtgggcggggaagcagaggcgtgggaggttgatgggttgcctgagagctttgattggagagagtaaaggagctgtaacacaggttaagatgcagggtacttgtggatcatgttgggcatttagcaccacatgagcta

SEQ ID NO: 2289 - DNA, 588 bp, Gossypium hirsutum
  unsure (1)..(588): unsure at all n locations; Clone ID: LIB3825-012-Q1-K6-C12
gtcaagtgtgtagaaagcgttcaaaggagttctatgcaaacaaaaacaaaacacagnaaagcttacatggatatactcacagcggtatcgtcttgtattttcgcattctcataatttaactgtatattgtttttctggatatcgttctaatgattacttttgtcgtggcaatagctcttttatgttttgactggatgacaaatggcaacaggcaaaaaccaactacactctgcggtccaagaacaatttgcaggaggcacataatgactagctcctacctctaccaatgcttgtgcgaggcattgcagcagcgaataaggatgataacatgcagttgacaccgtatgtgctatgaatccgaattcaggtgtgatttttagatattttatgtgcaaaaaaagtattagagtgtcttatgtttgtatgtttgtgtcaagcacattatagatagaacctgcaataggatcaactaattagatcgatcaaaagctacgccctattttgccatcgtctactcgcatatttgcatatacttaataattattctcgtgttcaactaattaatctaaattttttatctaattgatc

SEQ ID NO: 2290 - DNA, 59 bp, Gossypium hirsutum
  Clone ID: LIB3825-012-Q1-K6-C3
tgcgcttcattataggttaacgactcaccgcctctacggaaccacccaccccaataaac

SEQ ID NO: 2291 - DNA, 593 bp, Gossypium hirsutum
  Clone ID: LIB3825-012-Q1-K6-C4
tgtgcctttatgctagtgttactgtggttgagagcttgatgatggccatagccagtattgtccctaattctctgatgggtattatcataggcagcagggtattcagggcaatattcatgcttgtttctgggtacttcaggctcccgaatgatatcccaaaacctgtctggcgttacccaatgtcctacatcagcttccatttctgggctctacaggggcaataccaaaatgatctaaagggattgctattcaagaaccagtccccacagacttccccagatccctggtgaatacatactggaaaacgtgttccaaatcaatgtaagacggtccaagtggatcgatctgagtgttatattcagcatgatcataatatatcgaatcatattcttcttgatgataaagatcagtgaggatgttacaccatggatcagaggtttgatagccaggagaaggatgcaacagaagaatggaatacagaacacgacggtggcacctgatggtctcacccagtcaccttccttgagaacatacgtagctaccacaagggataaaagatagattttaggttcatgcttcgcatgctatcctca

SEQ ID NO: 2292 - DNA, 570 bp, Gossypium hirsutum
  unsure (1)..(570): unsure at all n locations; Clone ID: LIB3825-012-Q1-K6-C6
cccgggctcgcacccacgcgtcccgcaatagacaacaagattttgactccttatggcttgtgttatctcacagaaaggaaagaaaaatcccatccccttcatttgcttctttatttgtcgcattcttactttcttaaggcagaaaaacaaacacgatcattgccggctacactcccaaacactcaactctccttcctctcataaacaatttttgcccaattcttcaagaaaaagaaaccctagctaaacatggactgctcccaaactagaaatgagacctctcggaaacacgggcctaaagctcagtagcgtgggcttcggagcttctcctctcggcagcgtcttcggttccgtttccgaaagcgacgctgtcgcctccgtcctcgaaaccttccgcctctgaatcaacttcttcgacacctcttcgtaattctaaatttcttcacttnaactaactgggttcttggcttatatttaattngatgaatcatatgttngtatattatgtatgcatgcatgcatttttctgtctctttaataatttggaaggttctatgggatcggacattg

SEQ ID NO: 2293 - DNA, 564 bp, Gossypium hirsutum
  unsure (1)..(564): unsure at all n locations; Clone ID: LIB3825-012-Q1-K6-C7
agnacactgaanaaaaagaagttggaagaatcacacaaaacagtgagtgtcnaatggaatcaacatgcacatagccgagaaagggaaggtccattgattctcttccttcatggcttccctgagctctggtactcatggcgcaaccagatcaacggtttagccgccctcggctaccgtgctttggcgcccgacctccgcggttacggcggaacagatgcaccagattccgtcgccgattacacttgctgccacgtggtgggagacctcatcgcgcttctggacacggtggcgccgcaggagaaggaggataaggtgtttgtcgttgggcacgattggggtgccatcattgcttggtacttgtgcttgtttagaccggaccgggttaaagctttgttcaatttgagtgtgctatttattccttatgatcctcggtttaaaccggtcgagacttggaaagctttctatgggaaggatcactacatcgtccggtttcaggaacctggagtaatggaagcagagtttgcagagattggtgtaggacgagcagttttggagctgttatcg

SEQ ID NO: 2294 - DNA, 571 bp, Gossypium hirsutum
  Clone ID: LIB3825-012-Q1-K6-C9
atcccttcttttcttcttgagtttcctttgtaaatcatttcaagctggcgattgaaaatcaagaacaccactgttcgtgaaatcaagcccaagaacagcaaaataatgggagctggtggtcctgatgaagaacataataggtggccgccatggctgaaacctttactgaaagaacagttctttgttcagtgcaaacatcatgttgattttcacaagagtgaatgcaatatgttctgcttagatctgcgttaatggcgctctctgttctttctgcttagcgtatcacaaggcatcacttgctatatccaggttcagtaattatccctttaaattgctttcatggttcatgttgtgccaaatactatttacccttcttttcatttgagtatagactttttacaagcatctttattaatatcatcagcatccacaacaggcgttggataaaatttctctgcacttactcagttttgtaaacagatatgggtggtcttcactaccacgatgttataatagtatctgatatacaaaaatacctagaaatattttggagttcaaacttttataatca

SEQ ID NO: 2295 - DNA, 585 bp, Gossypium hirsutum
  Clone ID: LIB3825-012-Q1-K6-D1
aaaaactgaaaaggcggccgaaaagaaaaatagcttttccgttcagccatggatcttcttttcaaagcctactccaacacttcagacgatgaacccgaacccgaacccgaccctgaacccaaacctgtaaaccatcaccacctccctttccgcccttccaaacggcccaaacccgaatacctatttcccacattggatcttcaaaagagagaagaagctccgcttcccggcaggtacatatcgaaaagggaacgagcacttgctggtgcggtttcccaggctcatgaaccgaacccgattcaccgggatcatcatgtcatcaatcaatcagttcttggaagcatttcagaactggatctaccacatgatgttctttcattgatgcggcataaaccaaagggccgtacacagctaagtcaaattcctggaaagctttctgtagctctgcatgggcatgcaaaagctgttaatgctgttcattggtcaccgactcatgttcatctacttgcttctgcggggatggatcaaacaatctgcatatggaatgtatggagcagaggtcagaaaaaagctcgtgtgtttagc

SEQ ID NO: 2296 - DNA, 595 bp, Gossypium hirsutum
  Clone ID: LIB3825-012-Q1-K6-D10
ctcatcaagcttaagttgtttgtatattcggatggaagattggtacttgagcactgattgaaagtttgagggtctgtactctaactaaaagtacagagaagtttaggcgtgttttcttagtgatggacctggaaatttgaccaaattatgtttaaaacaaaaacagttctttcttggatgcacaacaatgatagaaaattcttggcttttgagttcaattgtggtaacacaaattcctgaaggtaaaacatttttttgtgctgttgggaatctcaatgtttttatttaagttaaagctacttgcaattttgttatatgcagggaaatgaatttgttgagcagaatgcttctaatattggtggtgaaccaaatgaaatccgccgcttcgaacaattaaggaatgaactgattgagcttgagaaacgtgttacaacaagtgctcagacagcatatgaggaggatattaaggttacagatggttatcctggctctattaatgatgctggccatgctcaagtggttgaggttcagaagaaggaaagtattattgaaaaatcattggtgaagataaaagaaacaagcacggatgtcttgc

SEQ ID NO: 2297 - DNA, 514 bp, Gossypium hirsutum
  Clone ID: LIB3825-012-Q1-K6-D11
aaattgccaaattcaagcaccttaaaccaaacggaagcagacaatagatcagtagcatagagcttaaactaaagcaaagtcataagaaaaactttttcaaaaaatataaaacaagcatatagcgttccaactccaaagaaaacactactgaactcagaagtagccagccacatcaaaatagaaagcagattgaaaacagtttccttgagatctaaactaaaccaggagcactggcagagaaagtagctgctcgatttgccgagcttgatttgtcttgtgaccataatcacctgtaatcatcttcttccattccatcataacgatcacggtcagaatattgatcataacgatccccgtgagcatccagatcatattctcctcgaccccgatgatgatcatagtattcatagtgttggtcatctaggtctgaccgcctatgcccatgatcatgctgttcataccacccacgatcctcatctggctcaccatgatcataatccctctcactgtgccg

SEQ ID NO: 2298 - DNA, 568 bp, Gossypium hirsutum
  unsure (1)..(568): unsure at all n locations; Clone ID: LIB3825-012-Q1-K6-D2
gcagattcccgtgggaaatnntgctgggccccattgttgcnnttaatggaaaagagtactcggttcctatggcaaccacagaggggtgcttggtggctagtactaacaggggctgtaaggctattcatttgtctggtggagctacaagtattctattgaaagatggaatgactagagctcctgttgtaaggttcagcaccgcgaaagggcagctgaactgaagttttatttggaagatcctgagaatttcgatactttggctgttgtttttaacagatcaagtagatttggtaggcttcaaagtataaaatgtgcaattgctgggaagaatctatatttgagattcacttgcagtactggtgatgctatggggatgaacatggtttccaagggagttcaaaacgttttagatttccttcaaacggatttccctgacatggatgtcatcggcatttccggaaatttctgctctgacaaaaagccagctgctgtaaattggattgaaggacgaggcaagtctgttgtctgcgaggccatcattgagggtgatgtggtgaggaaggtcttg

SEQ ID NO: 2299 - DNA, 588 bp, Gossypium hirsutum
  Clone ID: LIB3825-012-Q1-K6-D4
tccaagcccatcattgagaggcataatgatgtagggttttcttgtttcaaggatctttctcttaatagacctcaactatgcttatttccttcaaaagagttgctagaatccggttcttgcatttgctttctttgcaacacaagcgtctgcaccctcttctttcatcacaggactcgcaggtggagttggaaacggtggaaactcaacctgaacaagaaattccatcaaagactgttaatgtcagattccagttagagaaggagtgctcctttggagaacatttttttattgtaggtgatcatccaatgttagggttatgggaccctgacaatgctgtaccactgacttggtctgaaggacatgtttggacagtagagctggatgtacctgttggagtatcaatccagttcaaattcattcttaaaactagcactgggaaccttttatggcagccggaccctgatcggatatttgaatcccgtgaaactgagaccaatagtacaattgttgtttgcgaagattgggataaagctgaacatcagaaaattatagaggaagaggcattaactaatcaagacggacctcttc

SEQ ID NO: 2300 - DNA, 554 bp, Gossypium hirsutum
  unsure (1)..(554): unsure at all n locations; Clone ID: LIB3825-012-Q1-K6-D5
ccccgcgtccgccccgcgtccgcttttcttgggcccttgtaatgcatatgaccctggncataggaggatttactttgaatcttcggaagatggtcattgggaagttatagacaccgaagaggcattgcgggccttattggcagttttggatgacaggggtaaacgtgaagctcttcttattgaatcattagagaagcggggaacttcactacgtcaagaaatgtcaagtagacatttacatgatgcagaaatcaggcacacaccgtcttattcacctgaaatggatgcagtcagagaagatagctgttctccagtttctgatgttgacaacctcagcttgacggtggccatgaatgcatctttaacctcatgcggtgctatagttcttcatgctggaaagaagggagcagaacaaaatcgaatgtggagacgtcttcaagaatttgatgtgtggatatgggattgcttttacttgaaccttaatgctgtaaagcacaacaagcgttcttatcttgattctcttaccagatgtgaaagttgtcatgatttgtact

SEQ ID NO: 2301 - DNA, 601 bp, Gossypium hirsutum
  Clone ID: LIB3825-012-Q1-K6-D7
ggtacctcacaggctgactgtgctgttctcattatcgactcgaccactggtggtttcgaagctggtatctcaaaggatggtcagacacgtgagcatgctttgcttgcgtttacccttggtgtcaagcagatgatttgctgctgcaacaagatggatgcaacaactccaaaatactccaaggcaaggtatgatgaaattgtgaaggaagtctcctcatatcttaagaaagttggttacaaccctgacaagatcccatttgtcccaatctctggatttgagggtgataacatgattgagaggtctaccaaccttgactggtacaagggtcccactctccttgaggctcttgaccagatcaatgagcccaagaggccttcagacaagccacttcggctcccacttcaggatgtctacaagattggtggcattggaactgtccctgttggtcgtgttgagactggtgtccttaagcctggaatggttgtgacctttggcccctctggtctgaccactgaagttaagtctgttgagatgcaccatgaagccctctctgaggctctccccggtgacaatgttggattcaacgtcaagaacgttgctg

SEQ ID NO: 2302 - DNA, 565 bp, Gossypium hirsutum
  unsure (1)..(565): unsure at all n locations; Clone ID: LIB3825-012-Q1-K6-D8
aaatgaacagcctttgaacttgtaagaaaagaaaacaaanagaagttaaagcagggcatgatggaacatgggcagctcatccaggtctcatcaaaacatgcatggaagttttcaccaacaccatggggaactctccgaaccaaatcgaaactgtcaagcgcgaagacgcttccaacttaactgaagacgatttattacaaaggcctcgaggtgttcgtacgatggaaggccttcgtttgaacactcgtgtcgggatccaatacttagcagcttggttaaccggttcgggttcggtcccgctttataacctaatggaagatgctgcgacagccgagatcagtagggttcaaatctggcagtggttgaaatatggtgttgaattagacggtgatggacttggggttcgagtgaaccatgtgttcgggcgagtggttgaagaagaaatggctcggatcgaacgtgaggtcggaaaagagaagtttaagaaaggaatgtataaagaagcatgcaagatttttactcgccaatgcactgcttcaactttggatgagtttttgacacttga

SEQ ID NO: 2303 - DNA, 601 bp, Gossypium hirsutum
  Clone ID: LIB3825-012-Q1-K6-E1
gtatacttcaaaagctcatctgtcaccccagagccccttctctccgccgaatctcctttttcccccgtaaaaaatgtctctggtggccaacgaagattttcagcacattttgcgtgtcctgaacaccaacgttgatggaaagcagaagattatgtttgctttgacctccatcaagggtatcggaaggcgttttgccaacattgtttgcaagaaagccgatgtagacatgaacaagagggctggtgaactgactgcacaggaattggacaatctcatgacgattgtggcgaacccgaggcagtttaaaatcccagattggtttttgaacaggcagaaggattacaaggatggaaagtattcccaagttgtgtccaatgctctcgacatgaagttgagagatgacttggagcgcttgaagaagatcaggaaccaccgtggtctgaggcactactggggccttcgtgtacgtggtcagcacaccaagactactggtcgccgaggaaagactgttggtgtgtctaaaaagcgttgaattcttcataacataatctatagtatgacgaggcagatatttatttctttgcttttaagcgatgtttgc

SEQ ID NO: 2304 - DNA, 116 bp, Gossypium hirsutum
  unsure (1)..(116): unsure at all n locations; Clone ID: LIB3825-012-Q1-K6-E11
naaaaaaaaaaaaaaaaaaaaaaaaaaaaaaaaaaaaaaaaaaaaaaaaaaaaaaaaaaaaaaaaaaaaaaaaaaaaaaaaaaaaaaaaaaaaaaaaaaaaaaaaaaaaaaaaaaa

SEQ ID NO: 2305 - DNA, 602 bp, Gossypium hirsutum
  Clone ID: LIB3825-012-Q1-K6-E4
gtcgtctagaaattctaggggtcttttttttcctaatctaagaaagaagaggaagaatcaagcttggttttctctcaggatgtcagaggcaccattcagaccctagggaaaagcttatcgagtatcagaaatattttcaaggcatccacaaacacacttacttgaaaggtccttacgataagatcacatctgtcgccattcctgccgctctagctgcaagttccttgtttttaatcggacgagggatctataacatgtctcatgggattggaaaaaaggattgagagctctcactcgtgaaaatgagcctgggactgggtgacaattggctagtttacgaaggagaagaaaccatggcgattcctcgactttcagtcaagaaatcactgaacatctttaacaacaagtgcttggcttacgttaccgccggcgagagtgatggtcggaataacaaaacaatgtacgagatcgaggggtcttattcccgacggcgttgcgccgtgttggatgacaggcggaggttagcggcagagataaagcggaaagagggtggcagaggggtcgccttcggaaccgacattttccgccttgttgttcagcct

SEQ ID NO: 2306 - DNA, 588 bp, Gossypium hirsutum
  unsure (1)..(588): unsure at all n locations; Clone ID: LIB3825-012-Q1-K6-E5
ggccaacanatgaggaactacgaaggaaaggctgctngatatacagattacgccgctcagaaggcaaaggagacgaaaaactcagcagcccagcggacaaaagaaaccaaagacactgtaacaggtaaagcttctgagtatacagattatgctgcccagaaagctaaggacgcaaaggacaccacagcaaaaaggcttccgagtatacagactatgcagcacagcaaactaagggtgcaaaggatgctacaacggggaaagcgactgaatataaggattatacagccgagaaagccaaggaggcaagagataccacagcccaaaaggcttctgagtatacagattatgctgcccagaaagctaaggacgcaaaagacaccactgcacagaaggcttccgagtatacaggctatgcagcacagaaaactaaggatgcaaaggatgctacaatggggaaagcgactgaatataaggattatacagcccagaaagccaaggaggcaagagatactacatcccaaaaggcttctgagtatacagattatgcagcacagaaagctaaggatgcaaaggatgctgcaattggaa

SEQ ID NO: 2307 - DNA, 259 bp, Gossypium hirsutum
  Clone ID: LIB3825-012-Q1-K6-E6
ttatacactgatcgcgcaatgcatccggatgatagcgtgtgtataagatggaggttggagggacggatccctgacattacggtgtggagacacactactggttcggttaaacgacctaggtatgcttctttgttgatatgtgggatggcttgttgggccacccatcaactggcctttgagtcaggggctgctgctataatgatggttgctgatctaagttcaacaccgaaaactctggcgggattgctcattggaagga

SEQ ID NO: 2308 - DNA, 594 bp, Gossypium hirsutum
  unsure (1)..(594): unsure at all n locations; Clone ID: LIB3825-012-Q1-K6-E7
cgnggggtctcctcacaaccaccgtaatgggtcgtgtcattcgagctcaacgtaagggtgccggttcggtcttcaaggcccatacccaccaccggaagggtcccgcccgtttccgcagcctcgacttcggtgaacggaacggttaccttaaaggtgtcgtcaccgacgtcattcacgaccctggacgtggggctccgttagcccgcgtcgttttccgccaccctttccgttacaagaaacagaaggaattgttcgtcgccgccgagggtatgtacaccggacagttcgtgtattgtggtaagaaagctacccttgtggttggaaatgtgttgccccttagatctatccctgaaggagctgtcgtttgcaacgttgagcaccatgttggtgaccgtggggttttcgctagagcttctggggattatgctattgttattagtcacaaccctgataatgataccaccaggatcaagcttccatctggttctaagaagattgttccaagtggctgtcgtgcgatgattggccaagttgcaggtggtggtaggactgagaaacctctcctcaaggctggtaatgcttatcacaagttta

SEQ ID NO: 2309 - DNA, 595 bp, Gossypium hirsutum
  Clone ID: LIB3825-012-Q1-K6-E8
cggccgcgtgggtttagatgacatacaaaatgtgcccatttgcagaagcaattgatacttgctgctattgatatggttgatgcaaattccaaaactggcagatacatcgtttactcaacatgctccatgatggttccagagaatgaagctgtcattgactatgcactcaagaagagagatgtcaaagtagttccatgtggactcgactttgggtgtccaggatatatccgatttagggagcatcggtttcatacccatccttagaaaacacaaggcggttttatcctcatgtacataatatggacggtttttttgtggcaaagttgaagaaaatgagcaattcaaagaagaatcttgtaagttctgatggttcagaaacagtagagcaaacccagaggccagaggagatccatagtgatgaggacaacaaaaaagagcttgaacaacaaaagatgaagaaacaaatcccgaaagggaaaaagaagagcttaaaggcgaaagggttatctggaaacggaaaggttgaatcaccaccaacattgaaaaaccgggacagaagcgaaaatgggaaggtagaattggcagcgacatcgaa

SEQ ID NO: 2310 - DNA, 550 bp, Gossypium hirsutum
  Clone ID: LIB3825-012-Q1-K6-E9
gcgggtggctttagcgagccaaaggcaccagggtcttcttaaacttagaaggatgcagagggaccacagctagggaaaaagtcctttaagagttcaagcctgaaagtgcttgactgatgatgccaagctggattatttaggaaacgattcccgggacatgccgtttggttctggaaggagaatgtgtgccggattatctctcggtgaaaagagttgtattcctccttggcagcaatgatccatgcttatgattggaacttggccgacggtgaagaaaatgactagattggcttatttggaattattatgaagaaaaagaagccttataattcttggttcctacaccaagaccatcaaatctccagcactatatgaagtaactttactattggatttcttttataccactttattgcctctttgtcatgtttaagcaacaattctaaataataagcttggctatatggagaacaataatgtgttaattagacatcataaacaataagctcttccccgaccttaggctatacaatgatcctgggattttaag

SEQ ID NO: 2311 - DNA, 506 bp, Gossypium hirsutum
  unsure (1)..(506): unsure at all n locations; Clone ID: LIB3825-012-Q1-K6-F1
aaaattactagcttctttgtggttggatatgtttgcatggaaggccggataaccatgattggttccttatatatgttgataatattttagttaattttacttcctagtcaaatttgttctcaaagttggtgtaaaaactgtaaatgggaattcatctaaatcttgtattgggttctaaggtaccaaaacaacttttttctacttaggattatatgctctgttaaatttcatttcatgtatatcatatttcaagagtttgtgtcgtatttttatttgtttgcgttaaaaaaaaaaaaaaaaaaaaaaaaaaaaaaaaaaaaaaaaaaaaaaaaaaaaaaaaaaaaaaaaaaaaaaaaaaaaaaaaaaaaaaaaaaaaaaaaaaaaaaaaaaaaaaaaaaaaaaaaaaaaaaaaaaaaaaaaaaaaaaannnggggggngccccgttaaaaaaaaaccaaatttccccccggggggttgaaaaataaatttttttttttttggggccc

SEQ ID NO: 2312 - DNA, 603 bp, Gossypium hirsutum
  Clone ID: LIB3825-012-Q1-K6-F10
ttttatttatctcactcgttctagtctcttcctagctaaaaccagcccaaaatcccatagaccggccaccggaaccgccgtctaccgctgttctccgccttggggcgcccctagcagaaatctttatcccaatccatctaggggatcccgtttccttctcttttcacattacctagataaattttccccaaacaaaaaccctaagaagccctcgatctagattgaaaatttggtactgccacctcctcaagtctacgtttccttttggaaatcatctcctagctgctaaaccttcttggcttttctggtttgggattttttattacgggattttctttgatcgaggttgggattgaaaattgctggctgaagtataattattttttgttgttgttggaaattgcttgccgtcgattctgtaggtattaacagcaactatgtcagggaattctagttgcagtgtctacataggtaatttggatgagagggtaagcgacagagttctgtacgatattcttatccaagcaggaagagtagtagacctgtacatccctcgagataaggaaaccgataagcccaaaggatttgcctttgttgaatacg

SEQ ID NO: 2313 - DNA, 565 bp, Gossypium hirsutum
  Clone ID: LIB3825-012-Q1-K6-F11
ccccgcgtccgggggacggtttattctcatacagcaacctcacagttcccagcccttactcatccaaaaggaacccactgaaggctgatctttagacttttttcttttcagaaacaaaaaccaaaattaaaaaaatgcgagcttggttctcaggcggcagtagtgggaatgaggaggagcggggaaaagaaggtcatctcttttatcagattggaactcatatgctgcttcaaaagaagcagaagagggaactacaactgtgtttgggtttgatcttgagtctgctgcgaggtccgccaatgatactgtcactggtaccttcaatgttgtttcaaaaggggtgagagatctccctgggaatctccaatctgccacaagtagtgtcccttcaggaaaagcattcatctactttggtttatttctggcagctggggtctttttttgtttttattgcttttaccatgtttcttccagtcatggtgctcatgccccaaaaatttgcaatttgctttacccttggatgtggctttatcattggatcattctttgctctcagaggcccaaa

SEQ ID NO: 2314 - DNA, 57 bp, Gossypium hirsutum
  Clone ID: LIB3825-012-Q1-K6-F2
cggccgcgtgggcggacgcgtgggtttttatctctcaaaatagaatcttttagttat

SEQ ID NO: 2315 - DNA, 561 bp, Gossypium hirsutum
  Clone ID: LIB3825-012-Q1-K6-F4
gtttcttccttgtttttcttttcctttgttattctgctatctttagtcctttagttacgctgttttctctcgtttgtgtgttggcacttcgtataggtgcaggtgacatgggcggtcatacgcgtgcgatgaggctgaaggtggtggtggtggccattggtgaggagtgcggcggctgaaactgggggctagggtctagctgaaatgttgttgtggtaggactgggcgttttaggagcttgttgatacatatatgggccttgaggtatgttccagtgcctagaaattatcatgtaaatggactattggacttttattatccattattttttggttttaaataaaaaatatgaatatatgctagaataaagtagtgtgttctattttactgctctgacagattgctatttttggttgatgttttgttttagttttatcatgttacatattgattcttgtattcttagtattttacatacagctttgtttttgttataccatgaatataattgggacaaataaactttgaaatctaaaatcaaccggctttgtttttataaac

SEQ ID NO: 2316 - DNA, 566 bp, Gossypium hirsutum
  Clone ID: LIB3825-012-Q1-K6-F5
cctaaacccaaaatttccccaatcaaaccctttgccgtctccctctctcttttcgatcgacagcaagcagaaagataagggatttcattttgaaatcaaacccgattgaaggctacctttggcgagtccatcaaatcaaggaactctcatttacttgttcttttgaaccctagactttagcatgctgacattggtaatcttagattgttgtgcttctctctctttttggggttttggggctatttgggtttttgaaatttcgaaatgtgatttagggttctgaactatgtaactaaaatattagtgttcatcttagttttataactgctagcagtaagtttatctacttgcatctgaacgaaaatcaaataaacagtgatgcatggaggtcatgttgcttgtatggataattaggatttgtggacttcgaaaattatgtttatgaaatgtgtcatgtctggctaatattacattttggttgcaaaattttcttaatatgttgtaagctctgtattcacaaattagctcttcttttgagtggttcctacatttccttgctttctggt

SEQ ID NO: 2317 - DNA, 561 bp, Gossypium hirsutum
  unsure (1)..(561): unsure at all n locations; Clone ID: LIB3825-012-Q1-K6-F8
cganagtgagaaactattgatctgagccaggttgataatcgagtttctataagaggttgatcctggcattccaaaatttgaattgtgtggctgaatgatctatggagactaagggagggagaaagaagtctagtagtagtaagtcattattctacgaagctcctctcggttacagcattgaagacgttcgaccaaacggtggaatcaagaagttcagatctgctgcttactccaactgcgctcgcaaaccatcctgatattcgtaacgcaagtgcgcccttctgaccactgttaaagtggtcaatttatttttatttgctttattacttagtattagtatctatcttcggccggcttcctcccccgctctccttgcaactgttttctttttatctacgatctcctcacttggcgcctgtctactttctttgtttctaagaaaccctgttctggtatttccttgggcgacttcacaatggcggtatctgtaattggatttgagggttatgaaaagaggctcgagatttcattttttgagcctggtgccttggttgaccctga

SEQ ID NO: 2318 - DNA, 598 bp, Gossypium hirsutum
  unsure (1)..(598): unsure at all n locations; Clone ID: LIB3825-012-Q1-K6-G1
anagttggagcaacgggtggaaaagctggttttgaaagggtaaagagaacacttgaagcattgatgacaaggagaaagacctgaagcaccagagcctgagccagagcctactactgaagttctcttcctttgcagctatgaaggctgtggaaagacctttattgatgctggtgctttgagaaagcattcacacattcatggaagaaagacaatatgtttgtcactgggagggttgtggaaagaaatttttggatagttcaaaacttaaaagacacttcctcattcacactggagagagagacttcatatgcccacatgaaggttgtggtaaggcattctccttggatttcaacctgaggtcacacatgaaaacacattcacaagaaaactaccatatctgtccatacccagattgtggaaagagatatgctcatgagtacaagctaaagaatcacattgcatcacaccatgaaaagaacacgacaccagaagtggcaaaatatgccccacctttagagaagatagttaaaactccaaagcctactggtggcgcctatggttctgcatcatctgatcgcccttatgctcgcccttatga

SEQ ID NO: 2319 - DNA, 607 bp, Gossypium hirsutum
  Clone ID: LIB3825-012-Q1-K6-G10
gttggccgccgaagtccatctcggtaccaaaactgtgacttccaaatggagcgttacgtcttcaagcgtcgcaatgacggaatctacatcatcaaccttggcaagacctgggagaaacttcaacttgctgctcgtgttattgttgctattgagaaccctcaggacatcattgtccaatctgcaaggccctatggtcagagagctgtactgaagtttgcacagtacactggttgtcatgcaattgctggaaggcacactcctggtaccttcactaaccagctccagacatcgttcagtgaacctcgtcttcttatcctcacagatcccaggactgaccaccagcccatcaaggaagcagctcttggaaacattccaaccattgctttttgtgatactgactcaccaatgcgatatgttgacattggtatccctgccaataacaagggaaagcacagcattggttgccttttctggctgttagctagaatggttcttcagatgcgtggaacgattgctcctggacagaaatgggatgtcatggttgatctattcttctacagggagcctgaggaagctaaacagcaagaagaggaggaagcaatcgctg

SEQ ID NO: 2320 - DNA, 571 bp, Gossypium hirsutum
  Clone ID: LIB3825-012-Q1-K6-G12
acaaaacaagaacactaatgcgtataagaggcggcggagagcgtggcgcttttaggcgcggcttcggtggaggaaggggtgaccgtggtccaagaggcaggcgccgtggccgcaggacgaagagagaaatgggtacccgtcacgaaactcggccgtttagtcaaatccgggaaaatcacgtccctcgaacaaatttacctccactctctccctatcaaagagtaccaaatcatcgaccagctcgtcggcccttccttgaaagacgaagtcatgaagatcactcctgtccagaaacaaacacgtgcaggccagcgcacgcgtttcaaggccttcgtcgtcgtcggagacggaaacggacacgtcggattgggtgtcaagtgcagcaaagaagttgcgacggctataagaggggcgataatattggcgaagttgtcggttatcccggtgaggagaggttactgggggaataagatcgggaaaccccatacggtgccgtgtaaggttaccgggaaatgtggatccgttactgttaggatggtgcctgctccgagagtgcggggattgtggctgc

SEQ ID NO: 2321 - DNA, 574 bp, Gossypium hirsutum
  Clone ID: LIB3825-012-Q1-K6-G3
gtacactctcacttctcatcatgccttctgtacatctcttctctcctcttaagcgattctgttgctaaaatgtgggttagaccattcgctgatcatgggatatattcaaatcttaactttctggctctggacttcatctcgtgaatatcattttgcccttcgacaagcgatagcttctgcgacaaaagaagaagccacccctctatgaaattctgtacaagagatgagaaaatggtatttgctgtctctgaccacgatccctgacgccggttggtggttcctctcgtcttaagccccattaaaatttatttttactacctacccaggtgggtgattccatttaacatcaaccttaggatcattatgggtatttttaccagtcccatcaagttcatgtaaaaaactttgaatatattttgctgtctcgtgacctgatctatttgtgttttcatgtattcgagcgttacgatctccccaaatggcccaaagcacaccaaaaaagattctgcactgatctcgagagagaaaatcaaagactttggtggtccattgtttctgcttccacaccacatcg

SEQ ID NO: 2322 - DNA, 602 bp, Gossypium hirsutum
  Clone ID: LIB3825-012-Q1-K6-G4
gtgaagttttcctttttcgagcttttgttgaagattggctatggctatggcgagtgtgcaactcgagagacaaactagcatacaagacagtccaaggagtcctgaagcaaagcttgggatgcaagtggaggatttgtgggatgttcaggaaccagaacttagtcctaatgaaaagctcaacgcttgttttgagagcatccctgtttctgctttccctatttctcctcaagggattgagataaaatcggatgcgagtctggccgaggctgttcaaatactagctcaaaacaagattcttagcgcgcctgttgttgatgttgatgcgcctgaggatgcaacatggatggacagatatattggcattgtagagtttgcagggattgctgtatggattttgcaacagtcggaaccatcttcacctagaagtccttcatctccgaatggagccgagtttgctataactgctaatggaatggtctctgctgcaggactcggggctttaggccctgaagatgcttcaattacttctggagacttttttgaggctttaacttcctccgagttttataagaacaccaaggttcgtgatatctcggggtcat

SEQ ID NO: 2323 - DNA, 477 bp, Gossypium hirsutum
  Clone ID: LIB3825-012-Q1-K6-G6
ggtatggtggcgcgggggatgtaaaaaagcctaattatcttacattgttcgccgtccgattcgacaccgacggtaccgcattgacgcggctgagtaccgcgcgatccttaagaacaagctccatcaagcctgcgctgctgttgctctctctcgtgcgattggattgtgaaggcagcaaggttacgaactgcgccaagctgaaaaatcaagcgcttccatctggtgatccgatgttcgaggctccttaaagacacaggaacagggtgaacctgatgctggtattgcggctgttttaactacacaaaataaaccagggacacaaattaaccaagcatcaagagggtaattaagagaagattaacattatggcgaacttgattgagatactgcaaccactgaacacatggatccagactcatacacaagcgtaatcatataatgctggcaaatcaacaattcatccagacactctattag

SEQ ID NO: 2324 - DNA, 599 bp, Gossypium hirsutum
  unsure (1)..(599): unsure at all n locations; Clone ID: LIB3825-012-Q1-K6-G7
caactctaatatacatattgccttgctggtattactgctgcttnctggaatatcagcagagttgggtattcctttgactcatagaggcattgcaaatagcgttaggtttctcacaggtcactcaagaaagggggaaccgatcctctttttgttgctgagaatgccgctgaccctgattcgactttagtggtttacatgggcttatccaccctcccttctcttgcacaaaaattgatacatcatggcctaccaccagatacaccagccactgcggttgagcgaggaaccacacctcaacagcgcatggtctttgcaaaacttaaggatcttgcagataaaatcaaaacggcggagttagtatcaccaacgctaatcataatagggaaggttgttgccctttcaccattttggccgcagtctttgacagaagcatcccgtctggttgaagtttaactaaacggacatctatgagcagcagcttaaaaggttacaaatatggatttgggattttaataacaagtgagaggtcaatttcaaggctgatctaaggtgtaggccaaagcagcattttggtcctccttggacttgtcaatgtcaac

SEQ ID NO: 2325 - DNA, 577 bp, Gossypium hirsutum
  Clone ID: LIB3825-012-Q1-K6-G9
gatcgaaagctcggaacaccattgacaatgttaaagcgaaaattcagggacaggcagggaattcctcccaaccagcagaggtcgatctttgctggaaagcagcttgaggatgggaggacactcgcggactataacatccaaaagagtccaccctgcacttggttttgcgacttcgaggagggatgcagatatttgttaagaccttgactggtaaaaccatcaccctggaggtcgagagctcggacaccattgacaatgttaaagcgaaaattcaggacaaggaggggattcctccacaccagcagaggctgatttttgccggaaagcagcttgaggatgggaggacacttgcggactataccattccaaaggaatccaccctgcatttggttttgcgccctagaggagggatgcagatatttgtgaacactttgactgggaaaaccatcaccctggaggtggagagctcggacactatcgacaatgtgaaacctaagattcaggacaaggaggggattcctccagaccagcctaggtcgatctttgctgggaagcagctggaggatggtcgaacttt

SEQ ID NO: 2326 - DNA, 591 bp, Gossypium hirsutum
  unsure (1)..(591): unsure at all n locations; Clone ID: LIB3825-012-Q1-K6-H1
ctgaatnacagccgtcgttgatgaccgtagtgttgaccaaaactttgaccggcaggtatcgctgccaaggttctcgagtggtagtagctatgctgggagtttgttttccgctacgacattggatggcaacttgtcgagtgatgttaaagatacatggactaaggagacatcatcgaccaccgtgccgccgaccggggaagtcgaggcacaggaggaagctaaagataacttagcgctcaagtcaaaggaaagttattatttacaggttatgctggctaggaggcttacttctcaagcaagtctactcggcgaacctttgcttttacaatgcagtggaccggatgtcgtcgatgcagaaactgtttcttatcgtctttgggttagtggctgtttatcatacaacgataagatatcagatggcttttacaatattcttgggatgaatccatatctatgggtaatgtgtaatgagttggaagaaggcagacgcttgccacctttgatgtctcttaaagaaattgaaccaagcgagacgtcaatggaggttgtacttgttgacagacgcggtgattcgcgcctcaaggagcttga

SEQ ID NO: 2327 - DNA, 581 bp, Gossypium hirsutum
  Clone ID: LIB3825-012-Q1-K6-H10
cggccgcgtgggtctgtttggccggtgagaaaaagataggaaaaagtggaaaaaaacaggaattcgttgtagagtttgaatcgttccatttttattttcgttctgaaatttttcatgtgtttcgaattttattttcacctattctcctctactgtttctctgcagtcaaactagaaattctaagaaactgaatttccagcggaattagcacctggaatgggagtttcctgatccaaaatcaaatacttgaatcaaaattaaattcttagttcgtactttcaaaatcatttaattcttgattgttaatgcgatgacaatcgggataataagctccgctttagcaaattcagagacgattttagcctctgatcatggctcaatagtttcaataaacttattcgttgcgcttctttgcgggtgtatcgtgattggtcatttactagaggaaaatcgatggatgaacgagtctattactgctctggccataggagtatgtactggagttataattttgcttacaacaggaggaaaaagctcacgtcttctagttttcagtgaagatttgttcttcatttatttgc

SEQ ID NO: 2328 - DNA, 595 bp, Gossypium hirsutum
  Clone ID: LIB3825-012-Q1-K6-H4
ccttgaagctgctgattctctttcccctagcagccaacaaatttaggctggggagaacgcttttcggccctttgatcttctcttgacttaggtttcgactaagtaagaggagatccatggcatatcctccaggtaaactcctattttccttttttattcaaaccttcgaataaagaaaaagatcaacaaaacaaaaaaagaaaaaaaaagatccaatcgaaagggaacgcccagagatttgagtctggaaatcacctttagaaaaatagttgctttgtattgcttgagtttttgtattttttttgttgcgtatttgtgcgtaaaaaaatacaatgagcagaggctttggctttatagctgaaacagaaataagaaatattcaaaaataaaaataaaaataaaaattgaatacacattctcattttgctgttgtcttttttgtatgtatttgctgctgtggtttgttctctttcgcaggtacgggtgctgtgctggcgtacggaggcttggcgtggttgctggaggcgttgtacggagcgtacggcgctgagggagggctgtggcgtggctgctgaacgttggggcgtacggaggc

SEQ ID NO: 2329 - DNA, 597 bp, Gossypium hirsutum
  Clone ID: LIB3825-012-Q1-K6-H7
cttgtatagatattaaggttttaggtacccccactaggaagaaatcgctgcatgaatcccaattacatggattttaggtttccacagatgaaagcgcatccgtggcacaaggtttttcacaaaaggatgcctcccgaagcaattgatcttacttcacgactcctgcaatactcacctagtcttctctgtacagctcatgaagcatgtgctcatcctttctttgatgagcttcagagaacctaatgctcgcctaccaaatggtcgacctttaccaccacttttcaacttcaaacaggaattatctgaggcttcaccggagctgattaagaagttgattccggatcatgtgaaacgacagatagggctccaacatttcatgcatccagccagaacataaaacttcaaaattgatacaagactcggtatctcctagtcgacatgggacacaaaggaaagtactatcattggataaccaccatcgatctgagcctgtctcaacggcatgtaagtctcaagcagcctcttttgctcctttattctatatgagtattagctgtttgtgaaaatgccttatttgttatatgtacatgtaaacat

SEQ ID NO: 2330 - DNA, 543 bp, Gossypium hirsutum
  Clone ID: LIB3825-012-Q1-N6-A10
atatgaattcggtatcttttttttggtgttttatttatattgcttgttaagcccaatttatacccagggcccaatacatttaaaacccaaaacagttaacaaaacaaactgaatccaatctctaagcccaatacaaaccattacccaaaccctaaacccatcatacttaaacccaaaacaaccctaacagcccaacattaattaaagaaaaatgaaaactctagcatctaacaccctcagccgctgcaaccgtggaggttcccaagcaccggacgtcgcgcgtccctccgagttgagcactcctctactaagccacataaaagacgtgctcaaatgaacctttggttcatcgattggaagcctcggtttaggtcttttcccttcgttctcctgatgttgagaggcgactaagtctctgagtatggcctgagcggagtaagagactctatttacgcattaccaactaccaaatttgatggtggtactgtggaagctaaaacctacagggttttttagagtaaaagataaagcttttggtttcta

SEQ ID NO: 2331 - DNA, 563 bp, Gossypium hirsutum
  Clone ID: LIB3825-012-Q1-N6-A11
aaattaaaatgtccaattaaaattacagcccaaatgaacaaatccctaacccaaaaatacatggcccaatggcccaaaacctagacctaggatcggtcaaacagaagcctagggtttctctcgcgccgctcccccccacgttcagcctccaagcgccatacgaccaccagcgcctccgtacgatgccagcaaactccgtacctgcaaacaaatgcaaaaacaacagcaaaacagagacaaaaaaaaggagcagatttttgtattttttctttttttctttattttgctttcggctacaaaagccaaagaaaaaaaatgtaatgtacacacagagatcaagaacaaaaaatcaatacaaagaaaaaaaagaaaacagattcacaaaaaaacagagaaatcaaatactctcaaaggtgcctcttttatttttatttttttttcttttctgttttgattcgaaatgaagtgcattaacagtaataaaaacctcaccttcggttcatccaccgacgcgattgggaacctctagtaacccaaatgtcacaaaacccattcgggtttcg

SEQ ID NO: 2332 - DNA, 367 bp, Gossypium hirsutum
  Clone ID: LIB3825-012-Q1-N6-A12
gctcaaattatttttaataattttatatttctttcgcccagaccctgtagtaaagtcaaatacatccagggttaaaataaagtagatgtaactgcgaatgcaccttctgtatccactcaaaatcatggtgcatcaaaatccttttttggagatctgttagggtttgattttcatcattgatactagaactcaaagtctaaaatttctacgatacatttatgactaccattgttggctagaaattgtaatcccaccgtccgaggcaaagcatactagacatgccacactttacttgttatatagatgaacaaaagaaaagatgaagaatcctgccatcgtagaaaatgcagctccgcccacgcgtccg

SEQ ID NO: 2333 - DNA, 567 bp, Gossypium hirsutum
  Clone ID: LIB3825-012-Q1-N6-A8
aaacaaaatgaacattgtacatcatcaccagaaaagaaaacaccatccaatacaataccataaactgttgtaacagagttcatatacttctacccgaagcatacaatgaaccgaaccatatatatttgttccgaaagcatgctccaaagctatctagaaatatcaaagacgagccaattccaaatcacaaacaagacaagatataatattgaaccatgaaaaccctccgcaactagacatattgaaagacacatgtatccagggaaaaaggttattattcccccttaattctgttcatagtatgaggggaaaaaggtatcaacctacgtgaagaaagctaatacaaacaaatgaatcataaagaccttctagtccgccattttagccaagcgatggacagtacttcttgcaattctattaccaggatcaatcttcagaacggttctcagatcttctgccccaagcttgtatttctccatgctttcgtacaagagtgcacgctgtacgaggacagacacattgctctcatcgtgctctaacacctttgaacagtcagctacagccttc

SEQ ID NO: 2334 - DNA, 562 bp, Gossypium hirsutum
  Clone ID: LIB3825-012-Q1-N6-A9
gccagaaacacagcacctgcttattttctgataaaaggaactattcttttacataaaacaagtacattacatatatgtataaaatattttagctacggacaaatctggctctcttccatcaatttgtagtttattccttttcaatacatcactaatcatcattcacaaatataacattatacggatcctacatatatgaatggtaacgatgaatatatagaaaagtgtgtaacagaatcctgaattaacatggagttgagggaccttctaaccggatgtagtcatacatgaatccttggaaaggactgttgcatcttggttgtttaaagaagatggtattttcccctttaacaaatcgagtaccaggtatgtccacattgtacagcttgtagatcccatgaatcccgtgtctcgctattgcattgtccctccctatcagtccagttgtaaacagaggccgatttgaatttgggtcgttaacccgaacctgcaattcagctagagtagctgatgcaagtgccactcgcaatttgtagataccattccgatcaacattatcgag

SEQ ID NO: 2335 - DNA, 562 bp, Gossypium hirsutum
  Clone ID: LIB3825-012-Q1-N6-B10
agactgaaatgggtttactacatccattgtttactacctgagtttattgcttctataaactcaaattagaccttgttgaggaaatataacacattctaataaagtaacaggctaatggatattttacttctaagtagtgacttaattgatttaattcactcactgccactgaaggtggtctctcttcttcaacaggtctttcatgcaagaacctacctctgagtagtgactttcaaagtagacttggtttctgaggataagtgcctagaaagagtttttgatgcaggagtatctgcttaagcttctactctatttcacagaaaagagaaagattgccaacatatgaatttctgctagctttcaaggctttcttttcacttcctacaataagagatattattggactggaaatggcaattccagtcaaagcacggaaatcctctactcggttccaaagttctcttcgacgccaggtctctctttttaccacaataacagcagctgctaagttgtatttattttgttagcaagaaggcaaatgctacaattacatctgcggata

SEQ ID NO: 2336 - DNA, 541 bp, Gossypium hirsutum
  Clone ID: LIB3825-012-Q1-N6-B11
cgccgaggcggcgcgtgctgaatcccacgatcgaggcgacgacgtctccacgggcgtatcaaaggcccgggcttgggccgccgccacgacccgcgtcggtccacgccccgagccgatcggcggaccggctctcgccgttccacatccgaccggggcgcatcgccggcccccatccgcttccctcccgacaatttcaagcactctttgactctcttttcaaagtccttttcatctttccctcgcggtacttgttcgctatcggtctctcgcccgtatttagccttggacggaatttaccgcccgattagggctgcattcccaaacaacccgactcgtagacagcgcctcttggtgcgacagggtccgggcacgacggggctctcaccctctccggcgcccctttccaggggacttgggcccggtccgtcgctgaggacgcttctccagactacaattcggacgccgatggcgaccgattctcaagctgggcttttcccggttcgctcgccgttactaggggaatcctggtaagtttcttttc

SEQ ID NO: 2337 - DNA, 583 bp, Gossypium hirsutum
  Clone ID: LIB3825-012-Q1-N6-B7
cctactacacttgcccttgtgggagttactaccactaggattcgtaataaagaacttaaatgtcgccaaaatggacctacaaaatttgagttaaaatgtacaacgactaattaatttgtcctttctcaagctcaggcaaatttcaacttggctgacccagaggacaggtgggataagattctatgcccaacaaacacaaggattcctaccaagaaaccaagtatcttcagtgtttggaataaatccaacttcacccagaaaaaacacagagcaatagaactgctccaatgccaacatggaaaaaaacggcaaatgtggcaggtaagggtttggagggaaagttcttcagattcacccctagacgtaatatcccaatcaaaaatccaagcaatggcaagatagtaagccccaacaaagcaagggaaagctcctgaggtggacgcttttcaagagccctgaaaatgtgtgttatctctgctttgggtccatatcttgagtatggatctacgggctgatgaggagggcggggtgccttcatgggtgctcttggtagatctaactcaatatgtccgatagctactaa

SEQ ID NO: 2338 - DNA, 552 bp, Gossypium hirsutum
  Clone ID: LIB3825-012-Q1-N6-B8
cataatcatcactttaatctcatattgatcaatttacatatctgtcactgtcttcataatcagtccttcaatagaaaaccatatatgttgattaattcaatgcacaaatgtcactttttatcactaggaaatataattgaaaatccctatactaaacaaactgaatacgataatttcagtcgacttgggttgccaccgctgagaccattgggtcgattccacacatggaatgacctcgacaaaggcgataatagccatgttctccccaccgcttgccccatgagttctttatgatccaatagggtagattcccaagtcttagaattgaaaacccttttgccccataacccactagtaatactccatggatgatccacctcttcccacataatattgggcatgacacccctcctatgccaggtttgcatgaagatagcattcaacccaacggctaaagggccacgaatgactaaatttgcggggatctgattttcatcgatggggatgttagtgaaattcacaacttaaacagctactttctctgggatgaac

SEQ ID NO: 2339 - DNA, 320 bp, Gossypium hirsutum
  Clone ID: LIB3825-012-Q1-N6-C11
ataatgtaacaaaaaattgaatgggttaccaagtagcaaataatcccacactaatacgaaacaaaacaaaaaaaagggtacaattatagaccctaagaaataaagtacacaaatataaaattcatttagttgatgggaattacatatataaaacttaaattactttccttttaatgacaccaaatgagtaaccatggctaaaccctgaaagaccaaaccttgttgcagggtttgcacagccaagttcatgcatttgatccctgggttgtacaatgtggtggtttcttgcttagatcatatggtgatgcagtcataatcct

SEQ ID NO: 2340 - DNA, 562 bp, Gossypium hirsutum
  Clone ID: LIB3825-012-Q1-N6-C7
ataaataaccatattatatcttatatagaagcaacaatatattacaaccttaataaagaattcaaacctcgaaagaaagcctaaacctgatttatattttaaacaaaattaatatttttacccaaaactgttttttatatctaacatttggacttaaaaaataaaaacaacaaaggtacaacatggtttttttttttcctatttttactaaatttgatattattattatttaaatttaatggaacttggagaagaagtcgaacaataattgattgatttgatcaggtatttcttggtggatccaatgagaaactccattgatgacaagagcttcttcaagaaagggcacatccctgttgaacccaccgttgtgaatataatccttcataccaggcattgtatacacaagatcaaggtcccccattgcaaactttacaggtaccttgatctggcttttccaccatggtgcagatagttcccagtttcgatcaaagttgcggtaataattgagggcaccggtgatgccggttatttggaattgggtggcatagtaatccgcgtc

SEQ ID NO: 2341 - DNA, 540 bp, Gossypium hirsutum
  Clone ID: LIB3825-012-Q1-N6-C8
gatcacgaacgaagtgattgaataaataaaaattgatgcaacgcaaaaattcctcggaaattgaactaactaatttttacaaagcaaagcatattgaatgtacttgcatcaattcaaaaccacggatgccaagttggatccatcatgcataaatttctaggtagtaaggcggcatcgactaactcggtaacacccctctgcaccgactgaggtgggtccattacattctcctcctcttctgaaaagcactgtggtgctattccgctaatccggccgataacattctccacattggtagtaaccttgtgtttgaagtctgtagggttcatactaccccctccggcagaaggggcaaggggcatcccaagtggtcttctccaagaccatgaaagcaactcatcacggaaaaacatggctagctgataccacaaatgctgagtttgtttgggcgagaccacagcctgcgctgcagcacacattgcagatacaataaggccttccacaccaaaatgagagaagaatgcttgcatgttccttgtc

SEQ ID NO: 2342 - DNA, 564 bp, Gossypium hirsutum
  Clone ID: LIB3825-012-Q1-N6-C9
aggaataaaaggttgactttatcaatattcagaagttaaaaaaagtagacaaataaaaagatcatattagatcccttcaaaaaacttacaaactgaaatcaacttggtttgcaataataaaatatttaataacaataaatcagaccagcaactgtttttaaacccaatcacacataaatatatacacttccaagatcatatatatatatatgatttatcaccttccttcactacatcagcaactcattaacccatccgaggtcaagatcatgatccaaaacgacaccgtttccattgtttttctcatcatcaccaccaccattgaaatattcaccagaaccagaaggacttaccattgaaggagctcctttgaatgaaacatcaagccatggaatgtttgtatttgcagtaggcgccattggtgaagttacttcggataaattcatggttcctaaacaactcattacttcctttaacaaaacatcatcgtaactggttgtcatttcggttccaaatatactgatacgatcaccaccgtaccttggtgttctttgctggtgtttt

SEQ ID NO: 2343 - DNA, 552 bp, Gossypium hirsutum
  Clone ID: LIB3825-012-Q1-N6-D10
atgtggatacatcatcttattacaacaaaagacctagacttcattaccgacaaagttacggtacaatatttaggctactcttcacattgcctcaaatccagtattccagtactccatgaacgaaaaaaaaacacatttaagatgattgccattttaagtcatgaaatatttcaaggactaatttcacctggttacctaaaaatcgaaaaccaacatggggatatttgcacaaaactgccttacgggaatcaagtttaatacctatgtaacaagctaggtatgatatttatgctccaacttacggagtgttaacaggttgtaaatgttgacatttgggaattctagctgatatttaaatattaaactttatattatttccttggagagtttatagtattttgtatatatcgggtaaatcaaatcaatagagaatattatcatttttccttcaaattctcctggcttgacagaggtaatccccaaactgcgatggaggaccaacagcccaaaaaaaaaaagagaagaaataaaaaccatttaattgaagccatt

SEQ ID NO: 2344 - DNA, 574 bp, Gossypium hirsutum
  Clone ID: LIB3825-012-Q1-N6-D11
tcgcgatctaggtgaatttttttgtttcacatgaccccttgataagttacttgaatatggtaggatgtagaactcgtctccagaaatagttgatctttccactctttaggttttgttctaccattaagaagcatcctataaaaggtatccctggtaaggggctcattatgttgtttctcattccccaatatttttacaatcctagtccaaagatgttactttattcctgcaaagcaaagctgaaaaattatgttgagcggagcaattgtgcattgtgccttttcgccttcattttcgagcatcaaaaggtggctgacatctgctctttttcgtgctgtgggtaaaacaaaattgggagtattagcatctctttcttttgttatttaaatttttagcccatccttttcctgctaataaaagctttacttttggcttttaaaggctatcaaaaacatatcagcagttgagaaggtgttctggtattttctagtctataactattttcaattttttaaaaaaaatatttcctggtaaggggagtttagtttgttcaacaattggtaaatatgccatg

SEQ ID NO: 2345 - DNA, 556 bp, Gossypium hirsutum
  Clone ID: LIB3825-012-Q1-N6-D12
aataaaataaaattaaaaatttaaataccatttttaagaaaaaaaccaataaaaggtaataaggctaagcttagaactaaaaggtaagcttattaatacatatatatatataatattacctaactgcttatctctctatccattttcattctcttagcattcggagcatccgaaacgttgttctgggacaatgtatcatgttggaaagcacaattgactccattcctgcatcctctggcagtgttgaagtacaaacacggcttcattatccttgtcttcgaatctctcgatttggggttacttgttacttctaggttcggttttagctggtgattgtatcggctatcgaaactctgtgtcgttcctggtctttctcctccatgctgctgaattaagttcttgtaatagttttcatctttcttctgcggaactccgacagcaggaatagggccttgtttatttgagggcgctactccgaccccatttgaccaagcataaaacgaaccatcagaagtagcagcagaggattggggtggaagatggaccggaaacgttc

SEQ ID NO: 2346 - DNA, 400 bp, Gossypium hirsutum
  Clone ID: LIB3825-012-Q1-N6-D7
atcaaactagcattctttgaaggaattcaactacaattgacacgggaaaaagcaaacacacaatccgtgggcagatgccagtctcaaccaaatgaacacatatcaaaattggtctaaaaaactgttaagtaccagactacatagaaaaccaaaatcaaaaggctttgatactatcaaatgcaatctcatttcttcttggcagcagatttggtgaccttagcaccggttggatccttcttctcaacgctcttgatgacaccaacagccacagtctgacgcatgtccctgacagcaaaccgtccaaggggtgggtactcagagaaagtctccacaaccataggcttggtgggaaccatctttatcatccctgcatcaccattcttcaagaacttgggctcct

SEQ ID NO: 2347 - DNA, 563 bp, Gossypium hirsutum
  unsure (1)..(563): unsure at all n locations; Clone ID: LIB3825-012-Q1-N6-D8
aaagccaaacgacaacaattttataaacctagtgacttgaatgaaaactttcgaataatacattanaaaaccaacactngaaataaaacatcatctacaataccttattggaaccatttcccttaaaaacccacagtgaaaatgacgattatgattatttgcttatttagcaatggcactattttttttttcactcaaaccccatagttctaagatttcatggaagcttcatcaaagcttagaagaaacatcctttggatgatgaatgacaatgtaattataagcatcaagtgtcaaaaactcatccaaagttgaagcagtgcattggcgagtaaaaatcttgcatgcttctttatacattcctttcttaaacttctcttttccgacctcacgttcgatccgagccatttcttcttcaaccactcgcccgaacacatggttcactcgaaccccaagtccatcaccgtctaattcaacaccatatttcaaccactgccagatttgaaccctactgatctcggctgtcgcagcatcttccattaggttataaagcgggaccgaac

SEQ ID NO: 2348 - DNA, 567 bp, Gossypium hirsutum
  Clone ID: LIB3825-012-Q1-N6-D9
agaataaagtaaagggattgttatttaagattttcagcagtccaagtacataggtatacaatcaaagtttctttatataaaatcaagaaggaaccatgtctttgttcatcatatatcattctcaagtaggcaacggaaacaattaaacaattttttgtagcagcaaccaaataccagtggcccaaccaaccacagcatcgtaaaacagattcatgaattggtatagattcatgaatcgttttcagcagtttccttccttaacgcctgaagtctttctttcagtttcttactctgttcaaaattagccttcctcttcaaagctttctgccaaataaaaacatcctgtttcaaacagagtcacgacaatgatactagaaactgaatttccccctagagctgagaataactcacttcctgccggaaacagcgatcgagctttatctttaattctgtacattcaccgaagaatttagttattggatgctctaaatgacacttttggaattcctcgatgatttcagcacacataggatgcctgtgtaaagtcagaggagggtgcattttttc

SEQ ID NO: 2349 - DNA, 450 bp, Gossypium hirsutum
  Clone ID: LIB3825-012-Q1-N6-E11
gggagcgggggggggaccggggaatgggggggggggcccggggggggaacaaatttcccaaaagggggggggaataaaaggggggggaaaaaagggaaaaagggggtcccggggaaaaaatgtaatccagcaaaaaatcaaaaaaaaaaaaaaacggaaaaaaaaaagggaaaagcggggggggcaaaaaaagggaacaaaaaaaaaaaaaggggggggggcaaaagggcgggttaaaaaagggaaaaccgggggggcaaagggaaaaaaaaaaagggcaaacccaggggaaaagggggtttgggtattggggccaaggggggttttttttttaacaaggaaaaggggaaaaagtggttggccctaaaacgccgggccctgaaaaaaagaaaaaggggggccaacgggggtggccccagagggaaaaaaacctggtgggggggggaaaaa

SEQ ID NO: 2350 - DNA, 574 bp, Gossypium hirsutum
  Clone ID: LIB3825-012-Q1-N6-E12
ctcaaactatattgtattcccacatcaggcaattttgttccatattccaagtgtacaatgctcttatccaactaaattactgattatgagttttatgttcaactatgctgccatgccgttgcattgccacaacaggctcactgcaccgggaacaccggaacgatggagctgccgcacatcgtgttcgtaggcagtagtagcaatacctgtgctgacatgggagagcaagatacggagttgtcggacttgcccggcaaatgggacaagtcgaatcgtcctctgtagaacttgaagatttgttcttcgagaacgggtgaagaacgcttttaaccgttgaagagtttagaagagggagaagcagcaacagcatttccgagaactcattccacactaactggcgattcatgtactcaaagctaactgctcgattcatgttagggctttcatagacaagcctagctcttaacgctctttcaatgaggttcctataccttcctgtgtaaagaaataagagtaggttgccaaatgacgcagccttataaagcccttcaatacgttgcatcaaaccccaaac

SEQ ID NO: 2351 - DNA, 581 bp, Gossypium hirsutum
  Clone ID: LIB3825-012-Q1-N6-E7
aaaaatccgaatcaaaaacaaaatcattgctcaaacaactcaaaacagtaccaatatctgataattcaaacacattttcaagcataaaggtcttaaacactcttgaatgtaaaatctgaagaccaaaagaactaaaattacagcaagtaatatcctaagcctaagcctaagcctaagccttgtcagctttggcagctgtagcagcagcttgtcctctgagcctaccagttctcctagcagcaataagaccaactttctgtccaggaggagcatcacgcctaacagtactagcatgaccgatgtgttgatggttaccacctccatggggatgctcaacagggttcatagctacaccacgcaccttaggccagcagttcctcttcactctaaacttgtgataagcattaccagccttgaggagaggtttctcagtcctaccaccacctgcaacttggccaatcatcgcacgacagccacttggaacaatcttcttagaaccagatggaagcttgatcctggtggtatcattatcagggttgtgactaataacaatagcataatccccagaagctctagcgaaa

SEQ ID NO: 2352 - DNA, 564 bp, Gossypium hirsutum
  Clone ID: LIB3825-012-Q1-N6-E8
aaactaaacaaaaataataatataatatatcaaatattctaccataaccgtaatctgtcctagttttactcaagattcaagattaaaaaggcaaaataacagtcgttgctaaaataaataacaaaattaaactaagaaattaaatgaaaacaaaactttgattaaattgtaaacattcatgcagtcatccagttttagttctcaaatcactgcatgctgtaagcataatggtaccaaaagaagcatcatattccactcttgtctccctttggttgcttctttttccccctcattgcctttctcttctcttcccttgcttttgagatttcctctttagaaggaaattttcttttcctctttttcgatgtcgctgccaattctaccttcccattttcgcttctgtcccggtttttcaatgttggtggtgattcaacctttccgtttccagataaccctttcgcctttaagctcttctttttccctttcgggatttgtttcttcatcttttgttgttcaagctcttttttgttgtcctcatcactatggatctcctctggcctctgg

SEQ ID NO: 2353 - DNA, 564 bp, Gossypium hirsutum
  Clone ID: LIB3825-012-Q1-N6-E9
agaataaaagatttgttgatttcacttaatacacagtatcattgtattgccctagggtcgggaagagctcattgcttatgatgtataataaacacattattgttcaccatatagccaaacttattacttagaattgttgcctaaacatgacaaagaggcaataaagtggtataaaagaaatacaatagtaaagttacttcatatagtgctggagatttgatggtcttggtgtaggaacaagaattaaaggcttctttttcttcataataattccaaataagccaatcaagtcattttcttcaccgtcggccaagttccaatcataagcatggatcattgctgccaaggaggaatacaacatcttttcaccgagagatactccggcacacattctccttccagaaccaaacggcatgtaccgggaatcgtttcctaaataatcgagcttctcatgatcagtcaagaacctctcaggcttgaattctaaaggattttcccaaagctgtggatccctctgaatacaccaaatgtttaagaagaccctggtgccctttggtacgctat

SEQ ID NO: 2354 - DNA, 482 bp, Gossypium hirsutum
  Clone ID: LIB3825-012-Q1-N6-F10
cacccaaaaaaaaaccggccttccagttcaaatttactgccaaatgggcggccttacccctccaaaaaatccaattttggaaggggggggaaaatataaaatacccccccccaaggaaatgggagtgggaaaaacaaacaaggcggggcccaaaaaaataccttacaaaaaaggctggcttaaccccttcggactaaaaactttacagcctttttggttggaaaaaccccaacagcccaatttaaagggcatcaggaaaaaatttcccccccagggagcggccataaaaaatttcagaaaaggggatttaaaatggggccactggggtaaaagcgacgggacatagggcgactaaggctttcccatgtggccccaaaaacccttggccggttttaataatccaaaatctttgttttgggacccatccccataaaaggggggggaaaaccccagggggggggggcccttggttgaaaccccca

SEQ ID NO: 2355 - DNA, 504 bp, Gossypium hirsutum
  Clone ID: LIB3825-012-Q1-N6-F9
ggtccattagaaaagaccagaacattacaaaccagataagctgcaaatccctggatcatcttcacatacatcaaaggaagatgaaaagatcacccccaaccatacttacattaactaaatttagaaaaaggaacgagctgattattactcgctttcaaacaacaaaaccaaattacatattttagctagttttaaactacagtccctttcaaaccctaaatccagttacagcagtgccggtcttgggccctggttcatcccccggggcatgcatcccatagtcggaatctcgataccctggtccgtaccgactggtgaacacaccggcttggatcaacaacacatacaaaagttgagtgaatgcaaggattattatgaatgcttcaagtatcctaaacctccatcctttccatcctcctatatttatatgcttacaagcaaacccaaaggctaatgcagttagagcccaagcaataagtgcagaaaaaccagctgcagccaaac

SEQ ID NO: 2356 - DNA, 551 bp, Gossypium hirsutum
  Clone ID: LIB3825-012-Q1-N6-G10
aacaaaaatccctaaataatgtctataaaaaaaaaactatttaactaaatcgtgccagaacacacaattccattgttcgacatagctcatattttaaaagcaaaccaaaacattttttgtcaaaatcataataaatccctctcattcccagccagtagcagcaggggccgacacatcgataggagcaccaggggtttgtgctggaggagctgcagcatcccacacatcggaagtaacggcaactgcaacttgatcaccccagttaccagcagggacaccagagataggtgcctgaaccatatcagcagaccattgatcacctatttgtgcgggccattggtcagctgctaaagcacccattccataatcagcagcagggagtccataatcaggagcagcgattgcttcctcctcttcttgctgtttagcttcctcaggctccctgtagaagaatagatcaaccatgacatcccatttctgtccaggagcaatcgttccacgcatctgaagaaccattctagctaacagccagaaaaggcaaccaatgctgt

SEQ ID NO: 2357 - DNA, 554 bp, Gossypium hirsutum
  Clone ID: LIB3825-012-Q1-N6-G11
gctacaacgtgaattccaaacaaaatttactcaaaaactacttaccagtcatatacattgctagttatcattattattgttgttactattgtcagggtaattttgctagtataactaagtccaatatcttcacatcaagactgtcatctatccttacaatgccatccgtgccatctaccccgattagcttgccagtgagaccacgtagtgagccacccatgattttgatcttgtccgacttcttcgggggtatgatttccatctcactgggcatggcgattactgtatccccactgccacttgatccaagggccaccttacatgacccatccggaagcacctcctggataacgccaagtgtctcatccccagatttgtgcacattgaccaaaatatctggcacgaaccatggtccttcactctcaggacctattacaggagacatagcatcaagaccaccagttcctggtgtcattggctgccctccaggtgtacccggaatatagggtcccgagcttggtgtcataggctgaccacttggtgttgatggcata

SEQ ID NO: 2358 - DNA, 367 bp, Gossypium hirsutum
  Clone ID: LIB3825-012-Q1-N6-G12
gcccggacacttttatcaattaacaaaccgcagaactaaatttttttacaaaaaactttggcattaacaaatccctccagaaaaaacgctacaatagggggaaatttctgggaccaattccttaatttcgattataccaaaataaacccaacgggcgaaaaggcccaattttcccagaaacccctgggggagggggacccttatgatatctttacaggcagccttggggttccagagccgggaaaaaccaacaaggtgccatttttttggctgggctcggacatgattcggcagaaaaatgcgcccggctatctgaccgaaagacggccataatatactcatactaaagcccctgggaacaccccaa

SEQ ID NO: 2359 - DNA, 546 bp, Gossypium hirsutum
  Clone ID: LIB3825-012-Q1-N6-G7
aaaataaactagtattggaaaaagtatccaacaatattttatttgtcaaattaatagtcaaaaaagcatcaatgttacaagtgtgaggcagtagagcaattggctctgtcccatcaaataaatgtaaaagaaaaaaattacaactggtcacaaaagaaatgacgaacaaaattcgcaatgaaatttggtggctgctgctgcgtcttgttgacattgacaagtccaaggaggaccaaaatgctgctttggcctacaccttaaatcagccttgaaattgacctctcacttgttattaaaatcccaaatccatatttgtaaccttttaagctgctgctcatagatgtccgtttagttaaacttcaaccagacgggatgcttctgtcaaagactgcggccaaaatggtgaaagggcaacaaccttccctattatgattagcgttggtgatactaactccgccgttttgattttatctgcaagatccttaagttttgcaaagaccatgcgctgttgaggtgtggttcctcgctcaaccgcagtggctggtg

SEQ ID NO: 2360 - DNA, 579 bp, Gossypium hirsutum
  Clone ID: LIB3825-012-Q1-N6-G8
acaaaataaataaaaattaaactcaattaatagtccaacgtccagaattattacaatagcctaaataaacccagacccgatacccattacaagcccaaacctaaattaaatataacccaaatcaaagcaagcctaataggcccatctctttaacagtttcataaaccctaggtcaccccacttttgtgtcgcaactagacaaccccctcatgtacggcctccgtgcgcccaaagactggctccgtacgctccagcgctccaacagtcatgctccacgtcaagcgccacgtaccaccgcgccaacgggctctgtacctgcgaagaaacagacaaacaacagcaggaaggaaggcttccactacatagagcaagaacatcctgaatttgccgcgccagttttggagtcagcttaccattaataaattcctcatgaggaactctagaaccggaggtgctcaactcatccagagttaaaacatttccctcagcaaaattatcagaaacaatctgagctctcaaacgaggtgcaagctgattcagaccctctaacacacgcaacagtgccaatatagtataagt

SEQ ID NO: 2361 - DNA, 573 bp, Gossypium hirsutum
  Clone ID: LIB3825-012-Q1-N6-H10
aaacaaatatcataaatctatataatgtgactttattaatgtatcaatatttatatacatataaaataccttaattgttgactcttaatgtaaaatctactagtaccttttcattgccattgatgaccattttgctcggtgggtgatccgggaacgaatggaacgaaacctcttccaccgaacacaggtcgcatgaaggcatcgtcaaattttctccagtagtaatgcacagtgttggaaggagttgtcaagagcattctcaagctagtcggtcgacatgcattacggttgttttggtcagcttcgggttcgccttcattgccaagaagtggtacaatgaatgatttcggagtagatggttcagacgaaagcgtcctcatgagatgttttggagaaggaagtaagagtctcactaatggtttagtcatcaatccaaaaaccactgtgctgaaaagaacaaccgagattgtgctggttatcatcatcgcatttcctcgcaactgcgtatgacctaagctggtaaactgattgtaagcaagtgccattgagacagcaccacgcataagaccagcc

SEQ ID NO: 2362 - DNA, 207 bp, Gossypium hirsutum
  Clone ID: LIB3825-012-Q1-N6-H9
cgagtaaactcatctttacttatcatcaaatgcactctatacaagctaagttttatttaaacatgtactgaaacaagttctatcctaaatttgggaaatttacacaacttcttgaagggggggatgtgtagctgcttgcattctaaggcaacaaactatttatagaaccaactactagcattctttattttcgaacaagcttttgca

SEQ ID NO: 2363 - DNA, 571 bp, Gossypium hirsutum
  unsure (1)..(571): unsure at all n locations; Clone ID: LIB3825-013-Q1-K6-A10
gcccgaagtaagtcatggttaagcataacaatgtcgtgccaatgggcacttcaagaaacactggcagaactatgtgaagacttggttcagtcagccagcacgaaggctagaagaagaatttcaaggcaaaagaaggctgtgaggatctttccaaggccaactgctggaccccttcgccctattgtccatggccagactttgaagtataacatgaagttgagagctggaaagggtttcacccttgaagagcttaaggctgctggtatttcaaagaaacttgcaccgaccattggtatcgctgttgatcaccgccgtaagaacaaatcacttgaaggtcttcaagccaatgttcagaggcttaagacctacaaggccaaacttgttgtcttcccaaggcgtgctcgcaagttcaaggctggtgattcaactgccgaagagctcgcaactgcaacccaagtccaaggaccatacatgcctatntctcgtgagaagccttccgttgagctcgtgaaggtcacccgagacatgaaatcattcaaggcatacaacaagctccgtgttgaacgtgcga

SEQ ID NO: 2364 - DNA, 186 bp, Gossypium hirsutum
  Clone ID: LIB3825-013-Q1-K6-A11
ggcaatttggagctgatggcaacgaatgtttcattaattataaaccagttagagtgtcatagaatgttcatatatagctttctgtattgtccttttctttttctttttttccttttaaggctgtaaaaatttctacactatactctgtaaatacaaacaatctactctttttatcatctacacttg

SEQ ID NO: 2365 - DNA, 579 bp, Gossypium hirsutum
  Clone ID: LIB3825-013-Q1-K6-A2
ctcattctcttttgatcttcttggtttctgtgtttggcgttgtacggaaatactttctccatagcaatgcccgaacgactgaggaatccgaacttcacaatggacaccaaccacaagcagaaccggaaccggaatcaaaagcggaatctcaacccgaatcgaaaacggagccaggaccggaaaacaaaccggaggaggcactgaagctggaacctgttgtaaccggtgcggatccgaacacgaaggaggaggacaaagagagctcgatccaatccaatgacgcggccacgccgtcatccactgaccaaaatgctcggccgcagctgcgaaaagatgaagggaatcggactttcacgatgagagagttgctaactgaatttaaaagtgacgaagaggaagtaggctctccttacactcgagaaagcacgcagagacaatccaaccaaaacagtgctgcaatggagttggtcagtagtgtcaccggtgctgatgaggagggccagtctcgccaacgggttcttgtgtatgctgccaagaggtatgctgctgctctagagaaaaacccagaagatatgatgc

SEQ ID NO: 2366 - DNA, 513 bp, Gossypium hirsutum
  Clone ID: LIB3825-013-Q1-K6-A3
tattacctggacccagggtgtgtgcctcgtatatgtgtatgctcaattttttctaagtttttccatatattttggggaccaggcctcataccatgtttgagtattttttggacgctggtactttgggaagatgaatgtccaaatgacataggttgaaagttgagacttttttccagcatcataattttcactcaatttgtgatctgtaaatgccattttattttcctagttcagtatgtatataagcaagtattctaccttagtttcttgacattgaagtattcttttctaccttagtttcttgacactgaagtattctttgctgattattatctttcttatagcacagctattctcttcacaaatttcaatgaccatttgcttttgcagagcacatctcgtgaagtaaaacgcttagattctattaccagctcacctgtttatgctcaatttagagaagcatttgatggcttctcatccatttctgcatacagagcttatgatcggattgcc

SEQ ID NO: 2367 - DNA, 610 bp, Gossypium hirsutum
  unsure (1)..(610): unsure at all n locations; Clone ID: LIB3825-013-Q1-K6-A4
tggaattgctagcttatttgggacaaagncatgcctgctgctgattcagactgtcaagtagcagcagctgctgagggctcatctgttggactggtcaatgcaatccagccagcatgcagcaatgcggcatctgccgattccatgatgagcaataaaaccgattcaatcctatattttactgccaggcggccccatcccggagagagtagtgcaggagattaccaagattgcggggcgtcgtcaatgcttctcatgggagaacctccttggtgtcctccatgtactgagacctccttcacgtcagcaactagaactgatgctgtcatgcgatacaaggaaaagaagaagacacgaatgtttgagaagcgagtgagatatgcttctcgcaaagcaagggctgatgtgaggaagcgcgtgaaaggacggtttgtcaaagccggtgatgcctatgattatgatccattgagtccaaccagaagcttttgagagtacaaatctttttaaaccttggttattattacctaaaaaccgaggcctgctttacgataaaacattgatggagccccaacattagttggcaagatccggctgaaccacgttggctgccatg

SEQ ID NO: 2368 - DNA, 585 bp, Gossypium hirsutum
  Clone ID: LIB3825-013-Q1-K6-A5
ctgcttctttcttctcttggtacttcattatttttcctttcacttcctttttgtgaaaaaacattgaaacccttttcaagacgcaatagaagatgtgtggaggtgcaatcatttccgatttcattgccgtgaaacgcggtcggaagttaaccgccgaggatctttggtctgaacttgacacattctccgacctgttgggtctggattacggaaatggaaaagaccctttcactcagttcgacaacaccaaggccggttccaaagccaagaaccttgaaaaagtgacaaacgagtcgactcagaagacaagccgggggagagagaaagaagggaagactcagcgaactcgaaagaacatttacagaggaatcaggcgaaggccatgggggaaatgggcggctgagataagagatcctcacaaaggtgtccgaatctggctcggtacatacaacacggctgaagaagcggctcgagcctacgatgaagccgccaagcgcatccgcggggacaaagccaagctcaacttccctcaaactccacgcctaactcagcctcctgctaagaaaaggtgtatgatggctcctg

SEQ ID NO: 2369 - DNA, 101 bp, Gossypium hirsutum
  Clone ID: LIB3825-013-Q1-K6-A6
tccgaaaaaaaaaaaaaaaaaaaaaaaaaaaaaaaaaaaaaaaaaaaaaaaaaaaaaaaaaaaaaaaaaaaaaaaaaaaaaaaaaataaaaaaaagaaaaa

SEQ ID NO: 2370 - DNA, 583 bp, Gossypium hirsutum
  unsure (1)..(583): unsure at all n locations; Clone ID: LIB3825-013-Q1-K6-A8
ngacaatagtaagaatcagaatcttgggggagcttccatgaaaagttggctggaggagcaggaggtggaggtaaaagtgggattggttctaaggatccttttggttctttggttgatttttcatcaaaaccgtcagggacccttaattcaggaagtaataaaggaaataaggcaaatgttgcacacgatgcatttggggattttcagaatgcttcaaaaccgagcacaactgcatttccttctagcagtttcagtgcatttgaggattttcagaatgcttcaaaaccaagcacaatggcgtttccttctagcggttttggttcaacttcgaataagaaggattctggtttgaatatggataattttgggatgcctgcaaagaatgttggatctcaaagtcaaacatctgttcaaagctcgggcggtgatcctctcgatatgttcttctcgtcatcttcagcttctggaggttctgctcaagcatctggtggaggtggaggtggagggcancaattttctgaagttgatgattggggattggattctgagtttggaggagcaggaggaggaaataatggtggct

SEQ ID NO: 2371 - DNA, 506 bp, Gossypium hirsutum
  Clone ID: LIB3825-013-Q1-K6-A9
ttttaaaacactctgctctctatttacaaatacgccgccgtctatcggagctcagagagtatttgaaggtgtgtgaagccggttgttttccttatgcagtaacacctatgctaattttgatcgaattcattttccgggcaatgtgaatggtggttgtttgaatacttctagagaattagtttgtgttggggtggatcatgggggctgcatgttgtgttgctgctagagacaaaactatcgtaaatggatcaggtagtgaggttttacataggaatatgaggtattctccaacttggagttttcgttgggataaccgaggacgtgtagctggtgaagacacttctataagttggttttcggatgcagttagtcggaatgatggatcagagatcaaatatgaatctgcatgtgcatcagaggatggaaattcatccgagagttttcagtctcgtacgtggcaaaagtccccaacttttgaaggaactgctggacatgcaagaactcct

SEQ ID NO: 2372 - DNA, 594 bp, Gossypium hirsutum
  unsure (1)..(594): unsure at all n locations; Clone ID: LIB3825-013-Q1-K6-B1
gcggcgctgcacagcttccccaanaacccatcattctcagattttctctcagtgaaacgatgtccactgtcggagaagctgcttgctcttacgctgctcttattctttatgatgatggcatccccatcaccgctgagaagatttctacactagttaaagctgcaaatgtctctgttgaatcctactggccaagcttgttcgctaagctttttgagaagtgcaacattgaggatctcataaccaatgttggagctggtggtggtggtgccccagtagctgcagctgcacctgttgctgctggcggaggagccggtgctgctgctccacctcctgctgaggaaaagaaggaagaaccggaggaagagagtgatgacgatatgggattcagtttgtttgattaggtgtgttttggtcaattactagttatatcacatgaaggtagtaacgcttttagagttgtattgctattggtatttgcatgttgattagaaatattacgtttttgttgaatgaaagttgacactaagtagctctttctttgtgatctgtttttttgaatcttcctatatatagaagtattatagattctagacc

SEQ ID NO: 2373 - DNA, 548 bp, Gossypium hirsutum
  Clone ID: LIB3825-013-Q1-K6-B10
ctgatttttttttatcttctattttccagagtttgtgagaagaaataagcttttcactaacattttaacttgatttaaccaagttgataaaaaggttatgcccagtatggaaaatgaaggttctgaagtctcacgagctgaagaaatcaaaaaccaagctaatgaagcatttaaagcacacagatatggtcaggctattgacttgtacacacaggcgatagagctaaatagtcagaatgcagtgtactgggccaatcgctcacttgttcacaccaaattggaagagtatggtagtgccatacaggatgctactaaggcaattgaagtggatcctaaatattcaaagggttattacagacgaggcgcagcttatcttgccatggggaagtttaaggaagcactaaaggattttcaacaggtcaaaaggatttgtcccaatgatcctgatgctaccaagaaattaaaggagtgtgagaaagcggtaatgaaattaaaatttgaagaagcgatttctgtacccgagtcggagaggcgttctgtagctgact

SEQ ID NO: 2374 - DNA, 586 bp, Gossypium hirsutum
  Clone ID: LIB3825-013-Q1-K6-B11
gtaaaagcgaaaccctagccactctctgctcactcgccatgggggcttataagtacgtgtcggagctatggaggaagaagcagtcggatgtgatgaggtttttacagagggtgaggtgctgggaataccgccagcatccatcaattgttagggtcaaccatcctactcgccctgacaaggcacgccgcttgggttataaggccaaacaaggttatgtggtttaccgtgtccgtgttaggaggggtggtcgcaagaggcctgttcccaagggtatcgtgtatggtaagcccacaaaccagggtgtcacccaattgaagttccagcgcagcaaacggtctgttgctgaggagcgtgctggccgaaagttgggaggtctcagagttgttaactcgtactggatcaatgaggattctacttacaagtactttgaggttatcctggtggatgttgcacacaatgctatccgcaatgacccaagaattaactggatctgcaatccggttcacaagcacaggggaacttcgaggacttacatctgctggtaagaaaaaacagggtctccatggaaagggtcatttgcaccaca

SEQ ID NO: 2375 - DNA, 589 bp, Gossypium hirsutum
  Clone ID: LIB3825-013-Q1-K6-B12
acaaaaaaaagacaaaaatggcagtaaggagcggcggagagcgtggcgcttttaggcgcggcttcggtggaggaaggggtgaccgtggtccaagaggcaggcgccgtggccgcaaggacgaagaggagaaatgggtacccgtcacgaaactcggccgtttagtcaaatccgggaaaatcacgtccctcgaacaaatttacctccactctctccctatcaaagagtaccaaatcatcgaccagctcatcggcccttccttcataacgaagtcataaagatcactcccacgcacaaacaaacacttgcttaccagcgcacgcgtgtcgaggccttcgtcatgtgcagagaccaatacggacacgctctaattggctgtcctgtgcatcaaataagttgctacggttataagaggggcgatattattggctaaagtttttcgattatccccggtgaggagaggttactggggggaataagatcggggaaaccccatacgggtgccgtgtaatggttaccgggaaaatgatggatcccgttactgtttagggatggtgccctggcttccgagaggtgcgggggatttgtggct

SEQ ID NO: 2376 - DNA, 554 bp, Gossypium hirsutum
  Clone ID: LIB3825-013-Q1-K6-B2
aatgttagaacttttaatggaataacctgtttgattttttatttaacatatagggactaatttgctattttttaatagggttaaaatgtaatcccattgtctagactatgtttgagtttttggttcaagttttataggccatatttattttggtctaggtggtctaggtccggactggatatagatttgatggtactttccggtaatagttatttatgtgtattatttatacttgtaacttaaaaaccttaaattacttcttgaatttgaatattttattaatttaatgccatcaattaccgtaaactaaactccattcactcccatcttttgctataaagcattgcttgaataactgtgttgttcttaaaagggtggttgtgatttttacacatgttttgagggtttttcaatttcttattattgtgtgtgtgtgtgttttttttttgcttatttcagaaaaggtatatccaagttttataatggcaaatcaaagtccttcactagtcttgttgatgctggcactgcttcctctggtaaagaatttgcaaaac

SEQ ID NO: 2377 - DNA, 528 bp, Gossypium hirsutum
  Clone ID: LIB3825-013-Q1-K6-B3
gtacactctcacttctcatcatgccttctgtacatctcttctctcctctaaagcgattctgttgctaaaatgtgggttagaccattcgctgttcatgggatatattgcaaatcttaactttgtggctctggactccatctcgtgaatatcattaagccctttgacacacgatggctactgcgacaaagaaaaaaaccacccctctgtgacaaactgtacacacacatgacaaagagatgcttttggctatgtgtataccaccatccctgtacgcccccagaggcccgccttttactgtcaggcacccatagcaaggcattttgactacctacccacagatccattagcataaaacaatgacctcaagaaacatgatgtatgcgtagagaccacacccctggcgaggatgtgtgacgactaaatctatatttcccgaccgtcaaaagctgatcaaagcttatcttcaatgcgatgaacccttcaatctccctagatcatcccctactggcggctatgcagatatgcaaa

SEQ ID NO: 2378 - DNA, 573 bp, Gossypium hirsutum
  Clone ID: LIB3825-013-Q1-K6-B6
gggatggtggcgcggtggaggtaaaaaagcctaataatcttaatcgtccgccgtccgattcgacaccgacggtaccgattgacgcggatgagtaccgcgcgatccttaagaacaagctccatcaagcctgcgctgctgttgctctctctcgtgcgtcggttgtgaaggcagaaggttcgtctgcgcaagctgaaaatcaagcgcttcagtcgggatccgatgttcgaggttcctcaaagacacaggaacagggggaacctgatgctggtatttcggctgtttcaactacacaaaaaaaaccagggacacagatgaggcaagccacaagtgggtcatcaagagaagattcagatgatggtgaacttgaaggagatactgaaaccactgaaaacatggatccagctgatgcaaagcgtgctaggagaatgcggtcaaatcgagaatcagccagacgctctagaagaagaaagcaagcacaaatgaatgaacttgaaacacaggttggtcaattaagagctgagcattcctcattacttaagcgtctaactgacatgaatcacaagtatgatgaag

SEQ ID NO: 2379 - DNA, 559 bp, Gossypium hirsutum
  Clone ID: LIB3825-013-Q1-K6-B8
caaaatgaaaccaggggggcaaagcttagctctaaccaccaccaccatgagcccttcgaatcttaacctgcagcctaattcttgcgtgcagctgcgctctcctcaaagaccccaaaagaaccaaccatgcaccaaggcactgaaaattcagatatcccaactctgaagaccaatattctcgagaaaccacggccacaaacagatacgagttttcatgggaaacgtacgtgaaagaactatgagaccagggaggagtacatgcaccgacgggggatctttgcgaagaacttggagagggctgctgagcaccagctgcttgatcctatggctgtgcatggtgtgactcacttgtctgatctatctgaggaggagttggagagtctttacactggttggaagggccccaatgcggcggcaccattattgagggatggaggaggtggtgaatcaaaggcgttggaggcagatgggctgcctgagagcttggattggggagagaaagggagctgtgcagaggttaagatgcagggtacttgtggatcatgttgggcatttagca

SEQ ID NO: 2380 - DNA, 554 bp, Gossypium hirsutum
  Clone ID: LIB3825-013-Q1-K6-B9
gtcgagagctcggacaccattgacaatgttaaagcgaagatcaggacaaggaggggaattcctccagaccagcacaggttgatttttgctggaaagcagcttgaggatgggaggacactcgcggactataacatccaaaaggagtccaccctgcactaggttttgccactgcaaggagggatgcaacatatttttaaacaccttgactgacaaaaccattaccccagcaggcgaaagctcgaacacgatcgacactgtcgaacttaacatccatgacaagagacggattggctacagaacacgcgcactgtattggtgcactaaaggcaggtggagatggggtgacactcaccgactatgacatactaaccgaatccaccctcgctcggtcttttcgccttatacgagcattcatatatcgttcaaaccttgactgcgaaaaccatcaccctgggggctccctatctgggtacccaattgagcgttttacagctcatattcccgacaaagctgggtattgctgcatgaccaacgagtggggcctttgctgggaa

SEQ ID NO: 2381 - DNA, 546 bp, Gossypium hirsutum
  Clone ID: LIB3825-013-Q1-K6-C10
caaacgcagagttgggcttcatggcggtgaaattcttgatagcgttaatcttagtaattgcagcatctctttgctgggtatcgtcggctgattcgtctgaagctgctttcgtcaaaaagaccatctctgcccacaagatcgtcatcttctcaaagtcctattgcccgtactgtaggaaggcaaaatctgtgttcaaggagttgaaagaagttccattcgttgtggagcttgatgagcgagatgatggatggaatattcaggatgccttgagtgagattgttggtaggcgtactgtaccacaggttttcattaatggaaaacacatcggaggctcagacgatactgttgaagcatatcagagtggaaaattggctaagctgttgggtattgaggtagagaacaaggatgatctctgagtccataaacaaaattgaatgtttgttgccagagtaaattttgattttattgcttttaaggtacttctttattgtacttcaactttgaactgtgaaccttatgttccataaagcaactttccgatgtcct

SEQ ID NO: 2382 - DNA, 583 bp, Gossypium hirsutum
  unsure (1)..(583): unsure at all n locations; Clone ID: LIB3825-013-Q1-K6-C11
cccacgcgtccggaacttgcttctttttcaacctacttttccttctccatgtctcataaaatggtgatggtttggcttttattatggttcctagtagttttaaagttgatgtatcgggaaatagtacgtttgggatttctcttgngatttggaaaaaaacaacaaaagcggtattgttgctgtagaatttgataccttcagagatgccaagcatggtgatttgaatgaaaaccatgtgggcattgatgtgggtagccttgcatcagttaaagctagaaatttatcctctctcaatttggtactaagcaatggagaaaaattacattcgtggattgattatgaagcaagttctaagagactagagattaggttgagtcaatctagtagtaccaggccagatgatcccttgctttcatactcaatcgacttgtcaaaactatggaatgatgaacaagtgtttgtgggcttaagttcttcaaatggcaactcttcgcagacatgctttattcacttatggagttttaagctaaggcaggttcctaattggatgcattcccaaccacttgatcctgaagctattaca

SEQ ID NO: 2383 - DNA, 468 bp, Gossypium hirsutum
  Clone ID: LIB3825-013-Q1-K6-C12
gcgtgcgttttgtttttcaagtgatagatcaagaacttaaaaaagagagaaaaaggatcgggcagacatgatggtagggccgggtatggatatgccgatcatgcacgacagtgatcgatacgatttcgttaaagatatcgggtcgggtaattacggagtcgcccggcttatgagggataagattaccagagagctcgttgctgttaagtacatcgagagaggccatgagatagatgaaaatgttcgaagagagattattaatcatagcatcattgaggcatcctaatattgttagattgaaagaggttattggtaacacctactcatcttgccatggtaatggaatatgcatcgaaaggacagcttagtggagagaattgggctgctggtcgattcaacgaggatgaggctctcttaatgttccaacaactattatgcggagtgagagatgggcatgcaatgtatgta

SEQ ID NO: 2384 - DNA, 571 bp, Gossypium hirsutum
  Clone ID: LIB3825-013-Q1-K6-C2
tccttccttcgccgcctactgctcttgtgacctcgctttcaagtgaaacagaatgggtaagggaaaagactcacattaacattgtggtcattggccatgtcgattccgagaaaatcgaccaccactggccacctgatctacaagcttggtggtattgacaagcgtgtgattgaaaggtttgagaaataactgctgagatgaacaagaggtcattcaagtatgctagggtgctagacaagctcaaggctgaacgtgagcgtggtatcaccattgatattgccttgcggaaattcgagaccaccaaatactactgcactgtgattgatgcgcctggacaccgtgactttatcaagaacatgattactggtacctcgcaagctgactgcgctgttttgattattgattccaccactggcggttttgaggctggtatctccaaggatggtcacactcgagagcatgctttgcttgcttttacccttggtgtcaagcaaatgatttgctgtcgcaacaagatggatgccactacccctaaatactcgaaggctaggtatgatgaaatcgtgaagga

SEQ ID NO: 2385 - DNA, 574 bp, Gossypium hirsutum
  Clone ID: LIB3825-013-Q1-K6-C3
cccctgcagtaccggcccatattcccggtcgccccagcgtgcgcaaaaaaaaggaaagacctagggcgctctctcaattcctccgccgaccaacagcctttcaaggtctgtgcctctgcccatccttttgactcatgtgagagtcaatcaaggcctccttgtatcgaagggctcatgatcttcgtttgttgccccgaatcgccacttagcttcaatcatggtgaaacaagcgtggattcaagggcctcaaatgcaggtgcaggtctgcgctggcgtacggggcgtgctggctgctgagtacgctagtatcgtacggagggcggtcgtggcacgacgtggttgctgttcaggaaacgctgcggtgcgaggaccccttttgtcctagggttcgccgaagcttaacttgggtttcgggctgtatgggtctgttccagttattgggcccttatattcgggctatggggctactggtttttttttgtaattggactaacgtattaatgataggagcatgcacttggacctatgctatgtaattggactttgagcatttaacggactgttatgaatgtgc

SEQ ID NO: 2386 - DNA, 607 bp, Gossypium hirsutum
  unsure (1)..(607): unsure at all n locations; Clone ID: LIB3825-013-Q1-K6-C4
gggtgcatcacctcaacctccaactgctaatggtagtgggcttgctatgcctatgtattggcaaggatactatgcctccccaaatgcgcttccacatttgcaccagcaaactttgcttcggccatcaccaggactgtcagtgcctccttcaatgccgcaaccaatgcaatatcctaattttaatgcttctttgcctgctggctctgctaacttacatagttcaagcttgcctgaaattcctccttctttacttcctgccagtacgagttcccacatgttcacatcttcttctttatcatctgccacttcatcttctctgcctcctgcaccctcagctacgctggcatcagaaaccttgtctgcttccttgcctaacaaagctccaagtcccgcacctcctccagctacactcagtgccagctcgccagcacttgctcctttgacgagttctagtccagaattaaattccattgcaccaccaattgccaacaaacgaagtgaaattcctactttgccatatcaaagtgcttctcaggttgcatcctctgtcatcggngtttcaaattctattcatgtggaaacatctacacaatcattggtaacccct

SEQ ID NO: 2387 - DNA, 262 bp, Gossypium hirsutum
  Clone ID: LIB3825-013-Q1-K6-C5
ctgggatagggcttatgaattatgagattgaagaaaggaggttgggaaactctcttgttttgagttaatagaaaataggttaatttgatgtatagaagctacaagcatgagtatcatgttatcttttttaggtaagaattggataacagcatcactctaatactctcatctttttttatttatttattaagagtaggattcattttatgcataacttttattatctaaataaaacaaattcacaatattgatttacggcttt

SEQ ID NO: 2388 - DNA, 510 bp, Gossypium hirsutum
  unsure (1)..(510): unsure at all n locations; Clone ID: LIB3825-013-Q1-K6-C6
ctttatttttgtgtaagttctgtgtttttaacttaacaatctttatgtaaaaggcggagtatgtatagcattggattgactgatatttatcttcattctttttggtgacatgatagattatttgctaaattttgccaaataaaagaccaaataattactcgctcatttagtgcacagccatacattctttaatgattgctgtatgctgtaactctgcactattaatgatatcgaaccctttctgccaaaatgagctggcattatatatacaatgagctgaaaagagggataggtttgtaatggatattcctgttgcatgaataagtacatcgaattagctttcttgagtttcttaaanaaaaatgagaggctttcttgaattagtaacaaaatcttgcgttgaggacaaagttttatcctgacttttaaaatgctatgttgtatagatgcatcatctgcattttacttgctcttgtgttcatatgtctggtggattgtgcaaattgatag

SEQ ID NO: 2389 - DNA, 609 bp, Gossypium hirsutum
  unsure (1)..(609): unsure at all n locations; Clone ID: LIB3825-013-Q1-K6-C7
caccccgntattcgaaaagattcaaactccctcgacccatttcattttggtacttgaatcactgtgaatgatggctagacctagacggtgacctttggcagtggtcgaaattttcactggagtcaaaatctggaaagcttttatcttcccggcagagaaagcaaagagaatttgggaagctcatttggattccatcagcattggctgcttactcactctaattttgccccaagtctccaaatttgatgtgctgactggttgaatcggctaacccaaccggaagccgatatgtcctcaactctgctagaggtgactcgggctgctcacgaagatgtggaacggcttgagcggctcatagtgaaggacttgcaaaatgatccacctaccacaaaagacggattgtatcaaagccaccgtgtccgcaataatatcgacaccatcatctccaccacggagaagctagttgaaatatatgacgataaagacaatgctaggaaagacgaaatcgctgctcttggaggtcaaacggctactggagttaatgtctttagtgctttttatgatagattgaaggagattcgtgagtaccacagaaagcacccggctgct

SEQ ID NO: 2390 - DNA, 576 bp, Gossypium hirsutum
  Clone ID: LIB3825-013-Q1-K6-C8
ttggctctttgtttttgttttttggtttagagagatggatcatgcagcagatgctcataggactgatttgatgacaataacacgtttcgtgttgaacgagcaatccaagtatcctgagtctcgtggggatttcaccatcttgcttaatcacatcgttcttggttgcaagtttgtttgctctgctgttaacaaggctggtcttgccaaactcatcggactcgctggggagactaatgttcagggtgaagaacaaaagaaattggatgtgctttcaaatgaagtctttgtcaaggctttagtaagcagtggcagaacatgcatccttgtctcggaagaagatgaagaggcgacttttgtagatccctcaaagcgtgggaggtactgtgttgtttttgatcctctagatggttcctccaacattgactgtggagtttccattggaacaatttttgggatttacatgataaaagataaccatgaaccaactctagatgatgtactgcaacctggtaagcaaatgctggcagctggctattgcatgtatggaagctcttgcacgcttgttttgagcaccgg

SEQ ID NO: 2391 - DNA, 463 bp, Gossypium hirsutum
  Clone ID: LIB3825-013-Q1-K6-C9
ctttccccaatttggcaaatgagtgaagatccattggcaagtgtgcccgggggcaattcatttctagactctattttcctcgttttccgacacaggttctttttgttgtttgattttcatgttggttgtaggaatgttgacacacctgtgttgtttgatatcattgtctcataaatatagcaagtggtcctacatatttagtgatcattgtaagaagaagtagaaactaaatactgattgtacatgattaggttattgatccaaagagattggagattccttttccaataaggaactcaagtacatcgacgtaagctccctacgaagaatgatactccctaagagagcagcggagggtcacttaccaatcctggagtccatagaaaggatcctcaatcaacatggacgacttagatggactgaatgtgtctagcttcgaatacagagtttgtcctgataacaa

SEQ ID NO: 2392 - DNA, 566 bp, Gossypium hirsutum
  unsure (1)..(566): unsure at all n locations; Clone ID: LIB3825-013-Q1-K6-D1
gnttttcaatggtgtttttcttaaagtgaacaaggcaacaatgaacatgcttcacctggtcgagccttatgtgacttacggataccctaatctcaagagtgtgagggaattgatttacaaaagaggttttgggaagttgaacaaacagagaactgctttgacagacaatgcaatcgtggagcaggctctgggcaagtttggcatcatctgtgtggaagatctcatccatgagatcatgactgtgggacctcattttaaggaggccaacaatttcctctggcccttcaagctcaaggcacctttgggaggtctgaagaagaagagaaaccactatgttgaaggaggagacgctggcaatcgtgagaattacatcaatgagctaattcggagaatgaattagacgttggctttatttgttaattcagtatttttggtttgttttgaaggatcctgatatgatttcttttggccttttagaaacagttttgtttaaaaggatgaatatttttcacggtgtttaccataatcttcttaatgaactctgtcaaagttttgttgcttccccc

SEQ ID NO: 2393 - DNA, 601 bp, Gossypium hirsutum
  unsure (1)..(601): unsure at all n locations; Clone ID: LIB3825-013-Q1-K6-D10
gngagttccccataccccaaaataggatttggtctcaatttctcacctccaaatgctcatccacttaaacttgtgatttccatataatataatacaaatatatacttacatgttttaatatgtatcccttttttttaatataaaaccttttttttctaatatttttcattgccaatcagtcccttattaataagtagagtatttccataactggtttaattcccttcatgcaccgtgctccatagtcttggaacctaaggactcttttaacatttcaccgaaaagatggagataacaaatgtgagcgagtatcaagaaattgcaaagcaaaagttgccaaagatggcgtatgactactatgcatctggtgctgaggaccaatggacattgcatgagaatagatttgctttcactaagatactgtttcgtcctcgtattctcatcgatgtaagcaagatagacatgaccacgactgtgttgggtttcaagatatcaatgcctatcatgattgccccaactgccttccaaaaaatggctcatcctgaaggggagtatgcaacagctagggctgcatctgctgctggaactatcatgacattat

SEQ ID NO: 2394 - DNA, 600 bp, Gossypium hirsutum
  Clone ID: LIB3825-013-Q1-K6-D4
cttctctgctgtttaggctgttcaatccagtgtcttgccgaatatgttcaaaagtacttatgaggctattacaaagggaaatcccatgtggaatcagctatcagtgccttcttccactatgtactcatgggacccccactcgacttacattcatgagcctccatacttcaagaacatgactatggagccacctggtgcccatggtgtaaaggatgcctactgcttactgaactttggtgacagcatcacaacagatcacatttcgccagcaggaagtatccataaggacagtcctgctgcaaaattcttacttaaccgtggggtggagcgcaaggacttcaattcatatggaagtcgtcgtggtaacgatgaagtgatggctcggggaacttttgctaacattcgccttgtgaataagctgttgaatggggaagttggacctaagacaatacatgtccccacaggagagaaactatatgtatttgatgcagcaatgaggtataaagatgcaggacacgacaccattgttttggctggagctgagtatggaagtggtagctcccgagattgggctgccaaaggccccatgctattgggagt

SEQ ID NO: 2395 - DNA, 582 bp, Gossypium hirsutum
  unsure (1)..(582): unsure at all n locations; Clone ID: LIB3825-013-Q1-K6-E1
tnctgtccgggttgatgaaaagaaatgtgttgagcctcccagtggnagaccgaaccgaagattaatagtcccatgccttaccatggttgggttggaccatgcaagcaggtttctgtgttgtatgaaggctttggagttggagatgcctccaactatgactctgttaaaagttttgctcaacttatgtggcctaatggtcacccacacttttctgacactattcataccctagggacgcaaatggaggagttgaacaagttaatttggttaatgttaattgatagttatggattaggggatgactcattgaagatgaactacacaacgttggtgcggatgatgaaatatatggcccctccaccaggagagtatgaaagaggactctttgctcatactgataaaccagtaagcacactcatttgtgaggatcaaatttcaggactggaaattgaggtcaatgatggtcaatggatcaagctaactaatttatctccttcttcctttgtatttgtggttggagatcccctcaaggcttggagcaatgggagattgaaatcagtgaatcacagagtgatgatgagc

SEQ ID NO: 2396 - DNA, 576 bp, Gossypium hirsutum
  unsure (1)..(576): unsure at all n locations; Clone ID: LIB3825-013-Q1-K6-E11
ctatcaccaaacaacaccttgggtttttctctgatagtaagctttatctctcaataggtgaagatacangatgaaaaatctattttagtgtagactgtaattttcactgttcaatcaagtcagcatgactcctgtgatcccatattctgttagcaacattacattcatccctggagctgcctgtacagtaaggaagaacactagtttgacaagatgcagttcatcaaggaaacacacgagatatgctttaccctctcagagattcatcctacctctatcaacctctgttacttcatttcgaaaatacggaacagggtatgccttacatggaaaactgggaatttgtttatcaaccgcagggactgatgtggcggtggaggaatctgattcttctgtgacaaaagtttccagtggaggatccgaaataccttcagatgccgttgaaacaagtgaagattcgactagccaaccagattctactcctccaactcaatcaaaacgagcaagacctgttaggaaaagtgagatgccacctgtaaagaatgaggagcttattcctggtgcaatgtttactgg

SEQ ID NO: 2397 - DNA, 574 bp, Gossypium hirsutum
  unsure (1)..(574): unsure at all n locations; Clone ID: LIB3825-013-Q1-K6-E12
gtcaagtgtgtagaagttttcaaaggggttctatgcaaacaaaaacaaaacacagnaaagcttacatggatatactcacagcggtatcgttttgtatttttgcattctcataatttaactgtatattgtttttctggatatcgttttaatgattacttnttgtgtgggcaatanngctcttttattgttntatgactggtggacccaaatggaacagngaaaaaccaactacactttgcggtccaagaacaatttgcaggaggcacataatgactagctcctacctctacgaatgcttgtgggaggcattgcagcatcgaataagggatgataacatgcagttgacaccgtatgtgctatgaatccgaattcaggtgtgatttttagatattttatgtgcaaaaaaagattagagtgtcttatgttggtatgtaagtgttaagcaaattatagataaaacctgcaataggatcaactaattagatgatcaaaagctacgccctattttgtactcgactacttacatatttgcatatacttaataattataccctgtcaactaattatcctaatt

SEQ ID NO: 2398 - DNA, 597 bp, Gossypium hirsutum
  Clone ID: LIB3825-013-Q1-K6-E4
atggcgtcctgctggagctgatcgtggctttactttccttcactataatctcaccattgcttatcatagaactaatcttttggcacgctatggtagatgatcagctaatggaaatggtggtaagttagaagctcttggatataaagaaggttatagagttgatgttgatgttccagagagcacatgggaaaaggctccaagcttccatgatatactaatctttaacacaggacactggtggtgggctccttcgaaatttgacccagttaagtcacccttgcttttctttgaaaagggtctacctgtaatccctcccatacctcctgatcttggcttggataaggttttaaatcacgtgatacggtttgtggagaaaaccatgcgaccggatgcaattaaattgtttcgcacgcaatcaccaaggcattttgaaggtggtgattgggaccaaggtggttcttgtcagcggttacagcctttgttacccgaacaagtggaaaatctcttctcgttgaaaaacaacgggacaaatgtggagacaaggcttgtgaatcagcacatatacaacgccctcaaggggtctaacgtccacatctt

SEQ ID NO: 2399 - DNA, 576 bp, Gossypium hirsutum
  unsure (1)..(576): unsure at all n locations; Clone ID: LIB3825-013-Q1-K6-E5
agcttgttaaacctcaatgtatccaccagnaaccaaaccaagctggttaaatcagtgaatgtatccaccaagaaccaaaccaagctcgttaaatcattgaatgtatcaaccaaaacgtcgaatttgtcggccaagaaccaaaccaggttttgaaaccgaccaactcgaccaaaactgcaaagccaacggtgtcgagttccattcccaagaagcttaattcaacttccaggtgaagaaactgaattccacaacaccaaaagcttcggatctgctcaaattaagctctcccaagaacaaaacaaccacgaaaacaccggttccatcttcaaaacctgaaaagaaaccgacaacagcccagattcagaaacaacaaaagaagcaacccagttgggtcgacgacgatgatgaatcggatttagtgtcggagttccgggatctaccggctaagttccagcaaacacttataccggacctggagagaatctcgacaacctcgaaagtttacatcaacaaatacaacaaagagttcaccaaacagttcaaaccatatgtcggcaacaaacatgctcccaccat

SEQ ID NO: 2400 - DNA, 484 bp, Gossypium hirsutum
  Clone ID: LIB3825-013-Q1-K6-E6
caatagacaacaaattttgctccttttcttgtgtttcttcacaaggaagaaaatcccatcccttatttgctctttattttcgcatcttacttcttaaggagaaaaacaaacacgatcattgtcggctacactcccaaacactcaactctgcttcctgtcataaacaatttgtgcccaattcttcaagaaaaagaaaccctatctaaacatggctgttcccaaactagaaatgaggacctctcggaaacacgggcctcaagctcagcagcgtgggcttcggagcttctcctctcggcagcgtcttcagttccgttgccgaaagcgacgctgtcgcctccgtcctggaagcctatcggctcggaatcaacttcttcgacacctctacgtggttgtaaatttctttgctttaactaactgggttcatggcagatatataatgataggaattatgtctggggactatatggggtctatggatgatatg

SEQ ID NO: 2401 - DNA, 600 bp, Gossypium hirsutum
  Clone ID: LIB3825-013-Q1-K6-E7
ccatcccttcattcattcatatctgcttttctttacgtttgttcattcgattttttctttgggttttctttctttttgatccttttgctattttgggtggtgaaagattgaagaattttgatcatgtcgatcgcgttggaacggatagaatcggcggggttcgggcgggtaatgaattgcgcttgcgatagttctaaattcgaatcgccgccgccggttaaggaaacgaagcagttgttattggcggagacggcggcggttgaagaggaggaggatgattggagggtttcgtcgtctactacgacgtcgtcttcgatcgggaagaacagtgatgaggtatccggaatatcatcggacggtggtgattgcgaggaaaatgaagttcaaagctcttataatggtcctttagatatgatgaattcccttgagcaggtcttgcctatgaggagaagcatctcgagtttctacaatggaaaatcaaagtcttacacgagtttggtcgatgcatcatcagcttcctccattaaagacatagcaaaacctgaaaatgcttatactagaagaaggagaaatttattagcaatcaatcatatatgggat

SEQ ID NO: 2402 - DNA, 131 bp, Gossypium hirsutum
  unsure (1)..(131): unsure at all n locations; Clone ID: LIB3825-013-Q1-K6-E8
tccgcggncgcgtgggtttttaccctgttttcgtttctcttttcctctttgctagctcttttgatctctgnaggaagctatggcggccaatgggaacggagtttcgacgacgccgaaaaagtccgttggcg

SEQ ID NO: 2403 - DNA, 568 bp, Gossypium hirsutum
  Clone ID: LIB3825-013-Q1-K6-E9
atccactctttttttcttgagtttcctttgtgaattagttcaagctggcgattgaaataaagaaaccactgttcgtgaaatcaagcccaagaacagaagataatgggagctggtgggcctgatgaagaagataataggtggccgccatggttgaaacctttactgaaagaacagttctttgtacagtgtaaacatcatgttgattttcacaagagtgaatgcaatatgttctgcttaaattgcgttaatggcgctctctgttctttctgcttagcgtatcacaaggatcatcgttttatccaggttcagtaattatacctttaaattgctattatggttcaagttgcgccaaatactatttacccttctttttattaaagtttgtactttttacaagcattttatttaattttctcagcatccaaacaggcattggctaaaatttctcagcactttctctggttagttaacaaataaagaggtgttcataccaccatgtgataagagtatctgatatacaaaaatacctaaacatatctggagtccaaacttatataaacaacagtgc

SEQ ID NO: 2404 - DNA, 458 bp, Gossypium hirsutum
  Clone ID: LIB3825-013-Q1-K6-F10
agcgactacctatcttttatatagagctacctaaattcaattgaccggccgtcgacaaacaacggactgactgaaaaataccctggccccacccaacttaattggcttgaaatacatccttctttagccagctggctaaataacaagcaggccccgaccgatcttcctaacaaacactcgcgcagactgaatagtgaaacgcaccctccctgtagccattcatcaagcgcggtgggtggggtactcacacgcagaccgacccattcactagccagctacctaccgcccgttcctttcgctttctttcctttctttctacgcacgtccgctggctctgccaagcaatctataaatggctggcttcctggatgcgaccgattgattgcctgaccgtacctccaccacaactaacttaatgagagtgatgacttacggagccatccatctgcctgacagac

SEQ ID NO: 2405 - DNA, 566 bp, Gossypium hirsutum
  unsure (1)..(566): unsure at all n locations; Clone ID: LIB3825-013-Q1-K6-F11
cggccgcgtgggtttcatctgccatcaatttgctctgaagacatgttggctatttttcacaaggcatttgctaatccaccagaggagctgatagtccagcttctcataaatctaccaanaacctaaacagcctgaagaaaccctaaatgatttcctatctcatcaccctcacaacactttctccatgagctttggcaacgctgctgttttggcttatgtccgccatgaacgtgctgcttcagttcatcagaggttgttttgtgggtttgatgacatatactgcctcttcttagggagcttgaacaatctatttatgctgaatagacaatatggtctttccaaagggagcaatgaggcgatgtttgtgattgaagcatataggacgctgagggataggggtccataccctgctgatcaggttgttaaggatcttgaaggaagctttgcctttgtgatctatgacagcaagactggaaccgtgtttgctgcactggggtctgatggtggggtgaagctgtattggggaattgcagctgatggctctgtggtcatatctgatgatttag

SEQ ID NO: 2406 - DNA, 567 bp, Gossypium hirsutum
  Clone ID: LIB3825-013-Q1-K6-F2
gttttgggaaggagaattagaaaacacttgaaatggaggacttctcttgtgcttttgattatttggctggaaaattggttctggtgggctggattctatccacggtcaaggaggagatgatttgaagcttgaagttcttgatggattgctggatgaagttgatgaagtggatgatattcaagcagcacatgatctctccagtgcatgtgaagattttcttttggatattgaatttccagaaaagttctctgaattggactgtggcctttacgaaggatcaaatttgcgtaactcaagttctgaaagtcattcacctggtggaagtagtaatagtgttggtggcatgtcagaatcatcgattgtaactgttcaagaatccaacagcaagaatggtgtgcttgggaagatggtcaattgtgataaacatcataccattaggagcgaatgtgggtgtcaggctccagttatggaaaccatttgtcctagtaaagaacatgggcaagattttgtcgagtctgatgatgaaaaacctttagtaagttttatagtgtctaataagaaagtaaa

SEQ ID NO: 2407 - DNA, 604 bp, Gossypium hirsutum
  unsure (1)..(604): unsure at all n locations; Clone ID: LIB3825-013-Q1-K6-F4
aaaagggaagcgtttagagtaacaaanaggaagctttctttnactatcgaagaaactacccattttcggtgccgatatctcttccttttcgaaggtgatatctttactgtttttctttttcttcaacttctttgctgttaaagaaacatttttcatagatttgagtcgctttttctactgttttgcgtttttaagcttgtctttgcttttttgtttgcgtttttactgttttacaaagttgctgtcttttaccatttcacgtttttcgtgtttcacgattttatcatagatttgaacccttttattctactgttctttgttgctctgtctctatgctgtataaagtagtgtgttctattttactgctctgacagattgctatttttggttgttgttttgttttagttttatcatgttacatattgattcttgtattcttagtattttacatacagctttgtttttgttttaccatgaatataattgggagaaataaactttgaaatctgaaatcaaccggctntgtttttataaacttttgtctttagtctaagattgggtctgtgcacttcaaaagtccaaacttgtcaactatttgatattg

SEQ ID NO: 2408 - DNA, 567 bp, Gossypium hirsutum
  Clone ID: LIB3825-013-Q1-K6-F5
tttccacctctcaccttctcctccttttctcgaacagctctcaaaattcccaatttttccctaagaaaaaaccctaactccatctccacatttacgcaacatgtcattcgatgaagaagagtccttcgaacacaccctcctcgtggtccgcgaagtcactgtctacaaaatcccgcctcgttccacctccggtggttacaaatgcggtgagtggctccaatccgacaagatctggtcgggtcggctccgggtcgtctcttgcaaggaccgatgcgagatccgattggaggatcccaactcggctgagctattcgccgcttgttttatctaccctggccagcgcgagagttccgtagagcccgcgctcgattcttcccggtacttcgtgctcaagattgaggacgggaatgggaaacacgccttcattgggctcgggtttaatgagcggaacgaggcgtttgatttcaacgtggccttgtctgatcacgataagtatgttagcagagagaacgagaaagaggctagtgagaaaaatgcgactgattctcttattgatattcatccggc

SEQ ID NO: 2409 - DNA, 573 bp, Gossypium hirsutum
  unsure (1)..(573): unsure at all n locations; Clone ID: LIB3825-013-Q1-K6-F8
tggttctagatcgcgagcggccgctcgccccgcgtccgcngaagcatttcgtgactcaaagctgattcgcaaggagttcaaggtggggngaaaaggtattgctatttaattctaaacttaaactgtttcctgataagttaaaatcaaggtggcttggtccatttataataaccgaggtgcatcatcatggggcaatcgaaattaggagcctcaaaactaataaaattttcaaagtgaatggtcacaggttgaaacattttcatgaaggagagcaagcagcttggttggaggagatcaatctcgaggatccatgagaaattgtgatgtcgagccaccgacttaaaagaaaggcgcttgtgggaggcagcccacatattcagggaagttttctttaccattattgtttctttccattaagttaatcttactttttaatttttcttttgcattagggacaatgcaaacattaagtatgggggagaatcaattcattgattttctaacatatttgatgcttgcaactttcatgaataagtcttgtcgaatttcctttaggaaaatatttaaataaaa

SEQ ID NO: 2410 - DNA, 593 bp, Gossypium hirsutum
  Clone ID: LIB3825-013-Q1-K6-G1
tctgaggaaaataaaataccaaccattttcttttctcattcgtttccagaaaaggttgatttagattggaaagcgaagatggtctcttccgatatcccaaacaaatccccaaaactttctaataagcttcaggtttcgattcctacgccgtttcgcttctccaatatttcatctccactttcgacttcagcttcggcttcctccacttacgattattatctccggctaccggagttgaggaagttatgggagacaaaggagtttccagcttggcaaaacgagcgcgttttgaagcccgctttgcatgctctcgagatcacattcaggtttatttcgattgttttgtctgatcctagatcgtattcgaaccgtcgcgaatggaagcgtcgactcgagtcactcaccacgagtcagatcgaactcatcgccatgctttgcgaggaggaaaacgaggacaaaacggcagctggcacggcgccaatcgtcgatctaacttcttcgaacggagtactagctcgtgagagcagctctgccgaggtctggaagcttcatggagaaacaacggtggtcagccgaaccagcaaagacagctt

SEQ ID NO: 2411 - DNA, 534 bp, Gossypium hirsutum
  Clone ID: LIB3825-013-Q1-K6-G11
ctaaaaatacaagcccaatgcccatattaataaaaaccctagaggcctgaatggcccaaaactacaccaactttcaaacacaaaaagaaaccccagccgcatgtttgttgctgccacctcctgcgcacgcccaccgccactgctcgcctatcaccggccacccatgcgtctgacgccttctgacacctgcaaacagagagccacatgcaaccaacaaagcagaaaacaacagacgaacgatccaaataaaaatataaaaaagttgtaatccggctataaaggccaaagcttatcactttttgagggaggatttttgatatttcaaaggagggaaaaacagattgtattttggatgagggatttgaggggaaacggattgtattttgaaatggggggattttttttggagatttcaaaagagaaaaacgattgtaaataggggtttttctttttttgaatacaaagaaaaaacactgtaatacgggcagatccaaaaaatcaaaaaagcaaaatagaaagaaaaggtttcgtttt

SEQ ID NO: 2412 - DNA, 316 bp, Gossypium hirsutum
  Clone ID: LIB3825-013-Q1-K6-G12
gtacgactgagacctccggcctatatgaaccaatcttacgtaccccatgcattcccaaatgatccacatccctcaacgagcaccattcagccctgtcacggttgcgcccgcgaatcaacaacccatactgtccacaacccatctgatcaccgctctactctctcagctcgcatcgcgcgcacatcgaccatttacaactgttcgattgatctctcacattatcaaacattccgaacgtaatcccaagatattatcgcatattggtaactcgtccctgtaggaggacatttgaaaactccatatgttttggtaacac

SEQ ID NO: 2413 - DNA, 569 bp, Gossypium hirsutum
  Clone ID: LIB3825-013-Q1-K6-G2
caaactttgttggtactactgcttaggtccaagtctggaaagatttatcaattttgtccgataagtttttgtatagttctttataaatttattactaagaccactgttaatagattacgacctttaatggttaagctaatttgtcagaaccaattaagatttatcccaggcaggaatattacataaaacatagtcatggcacaagaagttgtgcatttgctaaagggttttaaaggtaacatatatgggatggtgctaaaaattgatttggaaaaggcttacaatagaatcaggtgggattttctaaaggacacaccttctgaagcctggtttcctcagcttttagttgatgtgatttagactatgtttccttttcgacacttcaagttctttggaatggatctgttacagagtcttttcagtctacgcaaggaataaggtagagaggtccactatctctttatctttttatgttgtgtatggagagattgaggaatcttgttggggaggcggtggaacaaggctagtggaaaccgttgtttctttcacggagaggtctaaccttatct

SEQ ID NO: 2414 - DNA, 193 bp, Gossypium hirsutum
  Clone ID: LIB3825-013-Q1-K6-G3
tgatcgttcattttaaagggaaatccaagaatcattaacagtagatagagaacaatggcctgactaagatcgtgttgacagagatttgggtaaggtaaaatctttgtcactggtaattgttctatcatacgaaccacttctcttccctccaattctgtctactatctcgctactcagggtatccgcctgtttc

SEQ ID NO: 2415 - DNA, 597 bp, Gossypium hirsutum
  Clone ID: LIB3825-013-Q1-K6-G4
ggatgggttcctgttgttgctcttaagaggttcttaggggtattcttaaatacctcggagttctatggttatttgcccagttacctgagcttttgaaagaaacctgggatcgatcttgaaggacaatgagggtgcacttttgaacttggaccaagaacagcctgccttgcgtttctttgtgggaggctatgtgtttgccgtaagtgtccacagagttcaacttcttcttcaggttcttagtgtgaagcgcttccatcatcagcagcagcaacaacagcaacaaaacaatgctaattctcaagaggaattaactcaatccgaaataagcgagatatgtgactacttcagccgacgtgttgcttccgaaccctacgatgcctcacgtgttgcatcattcattacgcttctcacattacccatatcagttttacgagaattcctgaagttaatagcttggaaaaaaggattagcactaacacaaagtggagatatagctcctgcacaaaaaccccggatcgagttatgtcttgaaaatcatactggggtaaatgttggtgatgcttctgaaagttcatccgcaactaaaagcaatatcta

SEQ ID NO: 2416 - DNA, 581 bp, Gossypium hirsutum
  Clone ID: LIB3825-013-Q1-K6-G6
agcgtccgagtgtatgatatggtatgcaaccttttggatcagccattctttgttcaagcagtttttggatcatcgaaccgatagaatacacccgcagaaatgatgtttagatgaccatcaacaaacaacttcatcttattgcatcacgtgtccaagcatttaaggttctgttacggtttaaaaccaccttttccaatcaacattctttccatctctacaaaagtttcgagtgccaaatctttccataaaggtgaaatcaagaattttatgttgggggtcggaatataaaggagacgaatgggatggagttagaagtgactggagattcaaatcgaaactgtaatgggatgagctattttgcggttgttattctctttggtcaactgttttacacttgcgataaacacgacacgaaagaaaacatgtcatgattgccgaagaacttggtttcagagaagcaattcagaactgaaaaaagggtaagattcttttgttcttcatggagtgaaactcccagctacttgtcttagctctttgatattatcttaggctttccaatgttttctttttgtcggaacttc

SEQ ID NO: 2417 - DNA, 597 bp, Gossypium hirsutum
  unsure (1)..(597): unsure at all n locations; Clone ID: LIB3825-013-Q1-K6-G7
ctaacacanaacaaattgcttcggggattcactttaggctgcgagctcggtcatttatcgtggcagagccacaagggaaacgagtagtttttgttaatctcgatgcttgcatggcttcacaattagtgactataaaggttcttgagagattgaaagcaaggtatgggaacttatatactgaacagaatgttgctatcagtggtattcacacccacgcaggtcctggtggttatctccaatatgtggtgtatattgttacatctcttggatttgttcatcagtcatttgatgccctggtagatggcatcgagaaaagtattgtacaagctcatgaaaatctccaacctggatcaatttttgtgaacaagggagagctattagatgccggagtaaaccgtagtccgagtgcctatctcaataaccctgcatcagagcggagcaaatataagtacaatgttgataaagaaatgacccttttaaagtttgtagatgaccaatggggtccagtgggtagcttcaactggtttgcaactcatggaacatcaatgagtcgtacaaactctctgatcagtggtgataacaagggtgcagcagcac

SEQ ID NO: 2418 - DNA, 472 bp, Gossypium hirsutum
  Clone ID: LIB3825-013-Q1-K6-H10
gtttcaccaacctcactcatgtcggtcaactcgatcaaaaacagaaaaggcctctacttcatatttcactctgcgctcatggctctgctaagtgttgtaccatctttttcgatgggtccacccagttcattccctgccgagtaccactacccaccaccagtcaaaacggtctcatagctcactaccctacgctatcgtcgggggcttactacgcactatacccgatagctactgctgctatcgcttgtcggatcgaccccatatacttctgccgtaacttgctaatgaaaaaaggaaaaaacaagatcagctctttaactgtgggggctaacaagaaaggctatgcccatcgctctgaccaacccatggcttgagctcccttgggaaggatcctctacaatgacttaacgatgcgtccaatgtagaaccattattgacggaactcgttatcttggaacatgaacagctgtta

SEQ ID NO: 2419 - DNA, 579 bp, Gossypium hirsutum
  Clone ID: LIB3825-013-Q1-K6-H11
cggccgcgtgggttgaagagctacgcctaccagcaaccaactgcgtttaaatctttgtttttttattgctaaatataattgtttgatcgatctgcttgtttacttttaccttcagctttgccttttccgtcatcgctttgaaaaatcactttgatctcatcgaaacttcctcaacatttcttctccttttcttttcactccccactccccagattggctctctctgcatcttaaagattcttagtttctgctgtgaaatatcacttcttgagaatgacagctacagcagcttctggccttcaactagcttcagcaagaccctgcattgcatcttctcgcagggtatttaaggctggtgctgccaatctagatgtcaattccaaagctgtgtcatggactaagctagctagtgcttgccatttatcacaatctttggagcctttccggcgcagttttgcatcgtcttcggtaaagtttaacaaagttgtgataaaggcaatgtctgaatctagtgaaaataaaccggtttctgggttgccaattgacttgaaaggtaagagggcatttattgctggtgta

SEQ ID NO: 2420 - DNA, 599 bp, Gossypium hirsutum
  unsure (1)..(599): unsure at all n locations; Clone ID: LIB3825-013-Q1-K6-H4
ccgtccgtttaanaaggaaagcagaggggagggggagttctctgctaggattttataccctgcccgagccgctgccatgcccaccgtggagccaccgcgaaccgtgctcgaagccaggtaagtcgttcctttctttattttatcttttgtaagaaaaatgaaaatcgagcaaaagaaaaacgcgaaaaaaatgaaaaagaaaccgaaaatcaccttctacttctctgtattctttttttttttgtaaaatcagtatccctccgttttacagattcgtgtttggctttatatagccgaaataacagagaaaggaaaaatagaaatccgtcctctaattatgttattttccatttttttgtaatctaattgcttcttttttgctgttttccttgttttgcttgctgttgccgcttgtttattctgttgcaggagcatgcttggaggggcacgcgcgtggagaggcctggtttcctgttgcggcgcacgtgggaaggctggaggagcggcggctaaagggtttcagaaacctttaggatttcaggagcgttcttcaagtcaggctagggtttattgggcttggggttgatttgggttttagg

SEQ ID NO: 2421 - DNA, 574 bp, Gossypium hirsutum
  unsure (1)..(574): unsure at all n locations; Clone ID: LIB3825-013-Q1-K6-H5
ggcggccgaggagggacagcggaagttttacctccgctactacgtgggnccacaaagggaaattcgggcacgagtttttggagttcgagttcaggccagatgggaagctccgatacgctaacaactccaactacaaaaacgacaccatgatccgcaaagaggtcttcctcactccttccgttcttaaggaatgccgccgcatcatcgccgacagcgagataatgaaggaagatgataacaattggccagaaccagaccgtgttgggcggcaagagcttgagatagtgatggggaatgagcacatctctttcacaacttcaaagattgggtcccttgttgatgttcagagcagtaaggatcctgaaggtcttcgcatattttattatctggttcaggatttgaagtgctttgtattctctcttatctcactccacttcaagatcaagcctatttgaagaatgaatgatgatattgaaatcctccactatagaggggagagaggtgtgtctgtaacaattggcgtttctgcttttgatataaagctttattttccatttccttttgttctcttgaa

SEQ ID NO: 2422 - DNA, 378 bp, Gossypium hirsutum
  Clone ID: LIB3825-013-Q1-K6-H8
gacgatgcatcgcttatatgtgtacccaccaaagttcactgtccgtacaagttacaacggccggactgggaacaccctggagtgccccatctaaataggcccgctacacatccacatttcttctgatggaatggggacgagaaggcccacaccgagcgtcctctacagcatcacctcaaactactgggcaaaagacacgccccctgtgacccaacgtaaatcgcggttgatggggcggatacaggacaggtgaccactactctcgtcagctctcatacaacacctcattcggatgcattacatagattgctggatatatgaagctgttgaacgcattgagatctaattgggtatctacattatatactatgattgtaa

SEQ ID NO: 2423 - DNA, 569 bp, Gossypium hirsutum
  Clone ID: LIB3825-013-Q1-N6-A10
gcaggaaacttctcaatttaataaaatgctcaacaaaaaggattactgtcataataccaaagttttctaaagctgtctcagttcacttgacaaaatgaaaacaaaatttaaggtctttttagcaagccaaataacaaaacactgtccccaaaagggtaaccttacttcttgtcttccttctcggcctcggcagctttcttcaacctagcaccaatatgacgttcgttcgcacgttcaacacggagcttgttgtatgccttgaatgatttcatgtcctcggtgaccttcacgagctcaacggaaggcttctcacgagaaataggcatgtatggtccttggacttgggttgcagttgcgagctcttcggcagttgaatcaccagccttgaacttgcgagcacgccttgggaagacaacaagtttggccttgtaggtcttaagcctctgaacattggcttgaagaccttcaagtgatttgttcttacggcggtgatcaacagcgataccaatggtcggtgcaagtttctttgaaataccagcagccttaagctcttcaagggtgaaaccctt

SEQ ID NO: 2424 - DNA, 185 bp, Gossypium hirsutum
  Clone ID: LIB3825-013-Q1-N6-A11
caagggtggatgataaaaaagtagattggttgtttttacagagtataggggaaaaatttttaccgccttaaaagggaaaaaaagaaaaagaaagggccatacagaaagctttttttgaacattctatgacactctaactgggttataattaatgaaacattcgttgccatcagctccaaattgcc

SEQ ID NO: 2425 - DNA, 313 bp, Gossypium hirsutum
  Clone ID: LIB3825-013-Q1-N6-A7
ataaaataaaaaataaaacccatccaacaaacacccaacccaaaaacccccccccccccccccacccccccccccccccccaaaccaccccccacccccccaacccaccccccccccacacaacccaccccccccccccccaaacccccacccacccccaccccaccccccccccccccccccccccccccccaccccccccccccccccccccacggccaccaacccagcaaaaagataccgaactaaaagcctaattttcaaattaaattttgaaaaataaatttaagattaaaaagaaaaataaagcttt

SEQ ID NO: 2426 - DNA, 565 bp, Gossypium hirsutum
  Clone ID: LIB3825-013-Q1-N6-A8
aaacaaaatgaacattgtacatcatcaccagaaaagaaaacaccatccaatacaataccataaactgttgtaacagagttcatatacttctacccgaagcatacaatgaaccgaaccatatatatttgttccgaaagcatgctccaaagctatctagaaatatcaaagacgagccaattccaaatcacaaacaagacaagatataatattgaaccatgaaaaccctccgcaactagacatattgaaagacacatgtatccagggaaaaaggttattattcccccttaattctgttcatagtatgaggggaaaaaggtatcaacctacgtgaagaaagctaatacaaacaaatgaatcataaagaccttctagtccgccattttagccaagcgatggacagtacttcttgcaattctattaccaggatcaatcttcagaacggttctcagatcttctgccccaagcttgtatttctccatgctttcgtacaagagtgcacgctgtacgaggacagacacattgctctcatcgtgctctaacacctttgaacagtcagctacagcct

SEQ ID NO: 2427 - DNA, 594 bp, Gossypium hirsutum
  Clone ID: LIB3825-013-Q1-N6-A9
agcgccgctctcgatctatgttctagatcgcgagcggtcggacacaccgaaatgaagtggagattcgcattaccatcgaaaaataaaattacagggttaaagtttcatgttccattaacaggctcataacagaatttgactatctaaagattttccaatctcaccaagacactaacggaaactaatagtctacactagtgacaaattacaaccaatatacaacacaaattctatcagattttaatcctctaaatgctgcaatgcaagtagtctcactgtgataatttggagttacttcaccttgtctgcactcaattaagtacttgtcatgttgcaatcacaaaagaatcaaagcaaaacatgggcttgatacccgcttgacagaagccatcagaatgaagagtcataaagcccagaatggttttcgaactgcatccgcactgttcttattatttagtgattcatcactgctctcctcggaatcataatctttgtccccatatgacattaactgcatcaaggtgtcagggacaggatcaagtttagctttactggtaactttgatcttgtcatgcaatttcctaagtgatgtgg

SEQ ID NO: 2428 - DNA, 542 bp, Gossypium hirsutum
  Clone ID: LIB3825-013-Q1-N6-B10
gcccaacttgaactggcctttggattggattagattaaaacccccagcctgaaattagagaaagatgtagggcatcactattggaacattcggagaaagttattggcataagccatcggtttgacatcagggtgaggcacagctgagaatgtaacaatatttggctttaaatcaggggcttcgaaccgaataaatgcacccttgttacccatctgatcacagtaatttggtgcagagaaaacagtaataagtttaccatcatgctcaatctcataaccttcatcttttacttcatgagatcgcactactaaatctagattattatcctgcaaaaatctccttgtcacatctgcaccaaaagaaagacccactcccctcttgctaggccctcgtcctgggtaaggttgtggatcactccaaagcaattcacacatcaacccttcctcaggaggctcacaaaatcgatctattgctctaatgtcagagagtttcaccccatcaacactgaaaaggcctccatgaacgacaaagaccttctgatt

SEQ ID NO: 2429 - DNA, 319 bp, Gossypium hirsutum
  Clone ID: LIB3825-013-Q1-N6-B11
agacaaatgatgtgcaagtagttattctgaaaagcacgtagcaataacttcagaaattcatagcatccaaaacgaaaataaattgcatgtaaaatcaaagagtcaggttttttaaaacttccaaaaatttcaaactcaaaacgatgacttctaaaatcaacaaggataaaaagttgaacacagtaactcagcggtagcggcgaagggagagagtgttgtttctcttccaggttgccctgcgagaaggacggttcttgtggtgcaaatgaccctttccatggagacccctgtttttcttaccagcagatgtaagtcctcg

SEQ ID NO: 2430 - DNA, 567 bp, Gossypium hirsutum
  Clone ID: LIB3825-013-Q1-N6-B12
gcaaaacaactattttataaagaatccatataaaggaaaacaaaaatgttccaagccttaaacaataactgaaaatttcatgaaaaaccaaccaaacaagacataacatgtaagttaagattcttttaagaaacaaaacagaacttcatattgctaccctatgcagccaggcaggctttggaaggcgcaacttactaatgactcgtatatatacgagaactatacgtccaacctctctgcatcttcaagtacaagggtctttgccggctttcccaacagatcggtatactcttggaaaggagaccttgtgaaacgagtctctttccagaaatcgggagtcaagaaaccataagttttcagaagacactcaaaggtggccttgacaaagttaccaagagtcttggtggatcccctggaagaagtgaaaacatcttcgatccctgcaaactgaagaactttcttggggaccctagcagccacaatccccgcacctctcggagcaggcaccatcctaacagtaacggatccacatttcccggtaaccttacacggcaccgtatggggttt

SEQ ID NO: 2431 - DNA, 542 bp, Gossypium hirsutum
  Clone ID: LIB3825-013-Q1-N6-B8
cataatcattgctttaataccatattgatcaattgccatatatgtcactttcttcataatcagtgccttcaatagaaaatacatatgtgtcgattaatttaatttataaatgttactttccatcactaggaaatataatggaaaatgcctatgcgtaaacaaacggaaaccgataatttcagtagcacttgggttgccaccgctggcaccattgtgttgattccacacatggaatgacctctacaaaggcgataatagccgtgttctccccaccgtttgcccgatgagttctttatgatccaatagggtagattaccaaggcttataattgaaaacccttttgccccataacccactagtaatactccatggttgatccacctcttcccacatattatggggcatgacacccctcctatgtatgtttgcatgaaaatagcatgcaacccaacggctaaagggccaccaaactactaaatctgcggcgattcgattatcatcgctggggatgttagtgaaattcacaactttaacagctactt

SEQ ID NO: 2432 - DNA, 542 bp, Gossypium hirsutum
  Clone ID: LIB3825-013-Q1-N6-B9
agctaagctcgatttaagtataacacagtaataatgtttgaacatcaaactttattcgatacagtaactaaagatgtggttcactgaccatttcagcaccacaaaacacagtgttcattatataacacccacagttccatagaaatgaaaattacgacaagaagcagaagacacccaattagaaaccaccacggaggcgaaggacaagatgcagagtggactccttctggatattgtagtctgctaaagttcgaccatcctccaactgcttcccagcaaagatcaacctctgctggtctggaggaatcccctccttgtcctgaatcttagctttcacattgtcaatcgtgtccgagctctccacctccagggtgatggttttcccagtcaaagtcttcacgaatatctgcatccctcctctaaggcgcaaaaccaaatgcagggtggattccttttgaatgttatagtccgcaagtgtcctcccatcctcaaactgctttccggcaaaaataacctctgctggtctggaggaatcccctcct

SEQ ID NO: 2433 - DNA, 492 bp, Gossypium hirsutum
  Clone ID: LIB3825-013-Q1-N6-C10
aggacatcggaaaggtgctttatggaacaaaagggtcacaggtcaaaggggaaggccaaaaaaaaaggcccctaaaagccataaaatcaaaatttaccctggcaacaaacattcaattttgtttatggacccaaaaatcatccttggtctctaccccaaaacccaacagcttaaccaattttccaccctgatatgcctaaacaaaatcggctgaccccccgatgggttttccattaaaaaaaacctgggggacaaaacccccaccaacaatttcactcaagggatcccgaatattccatccataatctcgctcaaaaagccccacaaaaaaaggaacttttttaaaccccttaaacacaaattttgccttcctacaaaacgggcaaaaggactttgaaaaaaaaaccatcttgggggcaaaaaaggtctttttgacaaaagcagcttaaaacgaatcaacccacgatccccaaaaaaaaaaagccgcaatta

SEQ ID NO: 2434 - DNA, 563 bp, Gossypium hirsutum
  Clone ID: LIB3825-013-Q1-N6-C11
ggcaagcaacattcagtttatattataaggtaaaacctcaatgattccatcgttaaaacactgtgtaaccaagagcatacatttttcacaattggtcattagctacaagcacacacaaaacctgcaactacaattacaaaagatcatcaatttacaacataataaaacatcaatcagacacaaaaaaaaaaaaaaacccaactctaagatttacttcttgccatctttgacagcgttgtctactactactactttgaccttgttgtactcgaaatccacaccttctgcaccacactcttcaggcaccacaggtcgcctatcaccaaacatgttccataggtatagcacgcaagaagctgtcaaggctccacaagcaccgccgaagacaaacacaacaagcactttccaaaaacatttgctactcttgtgcggtgttgtaagaggtttgggattttttgtaatagcttcaggatcaagtggttgggaatgcatccaattaggaacctgccttagcttaaaactccataagtgaataaagcatgtctgcgaagagttgccatttg

SEQ ID NO: 2435 - DNA, 568 bp, Gossypium hirsutum
  Clone ID: LIB3825-013-Q1-N6-C12
aacaatatccagtgatatacttgtatcgtcttccgaaagtcttttggctcatcaggatcctcgaaaggatatgccccgaccagcattacatacaaggtaaccccgcatgaccatacatctgcaatctgatatcacaacacaatatcatcaactcatttctttactaattttcatattctaacatcaacttgcagggacgtatgactcgcttgatgttctttcgtgtgcatttgaatatcaaacccagtctagccatcaacacttgactgataagaaccagccacaagactaaagcagatccattcaacaaatcctcgcattacacatatgcgaagcaacgacataccattccaggccttcttcattggaggactgcagcaactgtcagttcacatactatgaatactaaaccgaagttttaaatcaactaaggggcaaaagccatcaatttgatgtcatttcactcaaatatacaactagaacacggtgactaacccatataacatctagctctttacgtcttaaccaggaatttgcatgtggattgtaaactggaaaccaaaactga

SEQ ID NO: 2436 - DNA, 561 bp, Gossypium hirsutum
  Clone ID: LIB3825-013-Q1-N6-C7
ataaataaccatattatatcttatatagaagcaacaatatattacaaccttaataaagaattcaaacctcgaaagaaagcctaaacctgatttatattttaaacaaaattaatatttttacccaaaactgttttttatatctaacatttggacttaaaaaataaaaacaacaaaggtacaacatgggttttttttttcctatttttactaaatttgatattattattatttaaatttaatggaacttggagaagaagtcgaacaataattgattgattggatcaggtatttcttggtggatccaatgagaaactccattgatgacaagagcttcttcaagaaagggcacatccctgttgaacccaccgttgggaatataatccttcataccaggcattgtatacacaagatcaaggtcccccattgcaaactttacagggaccttgatctggcttttccaccatggggcatatagttcccagtttcgatcaaagttgcggtaataattgagggcaccggggatgccggttatttggaattgggtggcatagtaatccgcgt

SEQ ID NO: 2437 - DNA, 476 bp, Gossypium hirsutum
  Clone ID: LIB3825-013-Q1-N6-C8
gatcacgaacgaagtgattgaataaataaaaattgatgcaacgcaaaaattcctcggaaattgaactaactaatttttacaaagcaaagcatattgaatgtacttgcatcaattcaaaaccacggatgccaagttggatccatcatgcataaatttctaggtagtaaggcggcatcgactaactcggtaacacccctctgcaccgactgaggtgggtccattacattctcctcctcttctgaaaagcactgtggtgctattccgctaatccggccgataacattctccacattggtagtaaccttgtgtttgaagtctgtagggttcatactaccccctccggcataaggggcaaggggcatcccaagtggtcttctccaaaaccatgaaagcatctcattccggaaaaacatggctagctgataccacaaatgctgactttgtttgggcgaaaccaaggcctgcgctgcatcaca

SEQ ID NO: 2438 - DNA, 560 bp, Gossypium hirsutum
  Clone ID: LIB3825-013-Q1-N6-C9
aaacaccaaaataagggataaagttggccccatcctttgacatttcatgatgaaagccttttttgttttgttgtttaacaaaatataaaacaaacagtatccatggtgatattaaagttgataaaactcatcaagtgacaagttttcaacagacccaaagctttccagagaccccatccttgaatagttggtcattgatccacccagaaaatcaagtgggcagtcatttgagaagctcaaggtggtgtcatatataaatgacatcccattatcatccatcattggatagtaatagttgctggacttagttgcctcataatcatggagaaataggtcattcactccgttcctagctatgtcactatatacatcttcgtccgaagccttcttcgcctggattacataattctggtttaggctatcttgatacaccatgatgaaatccccgagctgtaatccgtgcgtgctaacgaattccccggtattttcgagcacgtacatacggctgttgttattcggccaaaacctgtacttgaagctccatacatgcagtccatcta

SEQ ID NO: 2439 - DNA, 547 bp, Gossypium hirsutum
  Clone ID: LIB3825-013-Q1-N6-D10
acagtgaataggcagcagtagccaacattatcattacataaccttttaactcaatgaaacataaacatgttcccacagaaaaaacagacagtaattttatgccataaatgcaatgcaaatgcaatatatatctcttgagctccgggtaagttcatcctgcgatttgcttggctaaagttcctggcccataatatatagcgctctacagtctcggggccggacgaggatgaggactgtcccattctgtcacgatgtggtcacgagtgatttctttgagcgaacgacaaccgctcaatgccatggttagctcgaactcgtcacgcagcatcgaaagcactttcctcacgccagcttctccttcagcagccaatgagaacaccactggccgcccaataaatataccagaggctcccaatgccaaagctttaaaaacatcggttccacgccgaacaccaccgtctaagaagacaggaacccgaccttgagcagctttgacaacctcttccagggccatgatagtggcaggaacataatctagttggcgagc

SEQ ID NO: 2440 - DNA, 559 bp, Gossypium hirsutum
  Clone ID: LIB3825-013-Q1-N6-D12
agaagaaaaactgattccagtatgctcaatagtaacagaatttgtatccaatgaaaacagaattcaactactgcagtttatgccatatatatatatatagcatgtgctgatttcaacatatgcaaatggtaactatgaactacttacctaagtatttcttacaaaatcctaaccaaatgtatgtaacagcaatgacgtaacatacacttctacatatccatacatcctaaaagtgactacttttttgcctaagatgatgatgattcaaccattgtgtttaccatctccaacagcccttttatctcgctctgtattttggatttagcctctgatgacattgtttcctctgatgtctccagcattgatgtcagcgtctcgagcttctgctttatgtagttcagctccaaatttccaggtgccaaagactttgttgatttttcctttgctagagaaggttttttggcacttggtatttccgtcttgttatgagctgatgcagcctggtgaagtcgaagccgaaaactgacattggcagatccaaaaggactatcattttgtg

SEQ ID NO: 2441 - DNA, 486 bp, Gossypium hirsutum
  Clone ID: LIB3825-013-Q1-N6-D8
agtccaaaaaaccaaatcttgcgaccaaggcatattggatttcaagtacaagctttaacaagctaatttcgagggcaaacggatcttaaaaccaaattcctacaatatccacccattaatatgtttacaagcccatcctaaagattttaggaagtaataatagggtttgttttttcaagcttaactagaaaggaaggaaatactaaaaaaatctggtcaattctcccaactgaaaatacaattttgataaattgaaattaatgggcagtcgaaactgccatccacgatttatgaggttcttctgaagtataatccacttttttggaagcaaacaaatatcttgcctcatggacatttaaaattgttggggcaaggaggaaaggatttacttgcacaaggactgaactggcaagtttgggatcacaaattaaaatccacaaatgctgtctgtcaacagcttcctggctaacattggggatggatccc

SEQ ID NO: 2442 - DNA, 548 bp, Gossypium hirsutum
  Clone ID: LIB3825-013-Q1-N6-D9
cttcaatagaaaaaacatatatgttgattaatctaatttagaaatgttacttcttatcactaggaaatataattgaaaattactatactaaacaaaatgaaaacgatgatttcagtagacttgggttgccactgctgagaccattgtgttgattccacacatggaatggcctcggcaaatgcgataatagccatgttctccccaccgtttgccccatgagttctttatgatccaatagggttgattcccaagtcttaaaattgaaaacccttttgccccataacccactagtaataccccatggttgatccacctcttcccacatattattgggcatgacacccctcctatgtaggtttgcatgaagatagcattcaacccaacggctaaagggccacgaaggactaaatttgcggcaatttggttttcatcgatggcgatgttagtgaaattcacaacttcaacagctactttctcagggttgaacttgcattctttgcgttccccagtgtaggggtatgcattctcctccattaagcctcctgcct

SEQ ID NO: 2443 - DNA, 532 bp, Gossypium hirsutum
  unsure (1)..(532): unsure at all n locations; Clone ID: LIB3825-013-Q1-N6-E11
agaaacaatgaaaattcgtgtaaaatagaattacagaccagctttttagctaatttaataattcctcgcttatctcagtatttccattttgcacaaataaactgaagaaacagttctcaacttacaagatcaaacagtaagctttaagggccaattaaagcatacaatgaaggccactacaaaaaagaatcaagttattctctcgtccaaaattagttcctacctccattactcccactggatgccaatggaagctccttttctcatgcttcagttcctgttttggtatcttcagttgtctctccaagtgtaaatcgaacaaaccttcggacttttatgttctctccaagtgctgcaacagtttgctttaccaagtctttaaccaacagactgtcatccttaatgaagggctgttccaaaagggcaagctctccaagcctctttgaaactctgccttccactatcttctctctaatgntctctggtttagatgcgagatcatctctttgcatctccaactctttttctttac

SEQ ID NO: 2444 - DNA, 570 bp, Gossypium hirsutum
  Clone ID: LIB3825-013-Q1-N6-E12
gttgaaacaaaacaattaaataaaaaattagaataattagttgacacgagataattattaagtatatgcaaatatgcaagtagacgattacaaaatagggcgtagcttttgatcaactaattagttgatcctattgcaggttctatctataatctgcttaacacaaacatacaaacataagacactctaatactttttttgcacataaaatatctaaaaatcacacctgaattcggattcatagcacatacggtgtcaactgcatgttatcatccttattcgctgctgcaatgcctcccacaagcattcgtagaggtaggagctagtcattatgtgcctcctgcaaattgttcttggaccgcaaagtgtagttggtttttcctgttccatttgtcaccagtcaaaacataaaagagctattgccacacaaaagtaatcattaaaacgatatccagaaaaacaatatacagttaaattatgagaatgcaaaaatacaaaacgataccgctgtgagtatatccatgtaagctttctgtgttttgtttttgtttcatagaaccctttgaaaac

SEQ ID NO: 2445 - DNA, 545 bp, Gossypium hirsutum
  Clone ID: LIB3825-013-Q1-N6-E7
ccttggggaggccaacaatttcttctctctctcttttttttccatcaaataaagattaacaagggaggagccaatcataaaaagtatatcaaactccatgtaaaactataacagtcagttatattcacgtacatcagccaatgaaaaagaccgccagttagagaaattccggccaccactcgacggtgatgaaaaaggggtaatactaatactgttattatacaaagaaaccattttcgtttgtgggtgtaatggaggtagtaataacctaggactggaagttgaaaaaaaatcctcaccagcgcttgaaaaactatcagtctctgaaccactcattgcaacagcaagtgctaatgtgcttttacttgaacttattggtctaatgaactttttgctcctgtttttatcccatatatgattgattgctaataaatttctccttcttctagtataagcattttcaggttttgctatgtctttaatggaggaagctgatgatgcatcgaccaaactcgtgtaagactttgattttccattgtagaaac

SEQ ID NO: 2446 - DNA, 539 bp, Gossypium hirsutum
  Clone ID: LIB3825-013-Q1-N6-E8
cattgctccaaaattagaagtttggaccagctgccaggatttcctctgtcagcttgttgtctttcccaatcttgtaattagtgaaggtctcaaagttcttcttgaatagcccagccaatttcaacagggtttccttgtatgccttcttatcagcccaggtgttctctggatgcaagatttcggaaggcactcccttgatctcggtggggatgtctagcccgaacacctctgttttatggtaagtcgcgttcaagaggctaccagagtggatggcgtcaatgattttcctagtgtagggtaacttgatacggtttccagacccgtagcttccaccagaccacccggtgttgacaagccaccctgttgcaccatgcttctgcattttctcagcaagcatggctgcatatttggtaggatgcaacatgatgaacgccgcaccgaagcaagccgagaacgttgctgttggctccttaataccatcttccgtgccagccaccagagcagtgtaaccgctaatgaaatggtacatggtttgagcc

SEQ ID NO: 2447 - DNA, 549 bp, Gossypium hirsutum
  Clone ID: LIB3825-013-Q1-N6-E9
agattagaactcaaaattcatatctaggcaaacgatataaacatccccttgggaaaggagtacaatacatggtattttccctgtctttcacattgctcttagtcttcttgccctaaaaccagaaagaccctatttacaatttagcattttccaaaaacttatgtctatagtcactcacttaaaaaagctggctcattatcattattagtatttccacttctatataatatacataatagtagagagaggtatgtatggcgtaacactgatactaacactagcagggtaaatataaaaggatataaaccactatcttttacggcatttctttggcttaatattctatgattaatcctcccatcggtgctctgtggggaatcccttttcttcgtttggcagttcgagttggaggtggtgttgatggtctaaagctctgcactttgttgttaatcttctcatggcaactgctactgtatgaatcctcagagtctaatgctgccatgttcatacctagctgccttttcttcttgtggaaattctttgatgttc

SEQ ID NO: 2448 - DNA, 539 bp, Gossypium hirsutum
  Clone ID: LIB3825-013-Q1-N6-F11
acaacattaataaattggaattaagattgaaattataataagtttaagtatgttatttgctcattatttacaatcccaaagaaattaaaccaacaccaccaacatataacatagaaaagtacccaaagggaaaaccaacaactaggatgaaaaacagaagaaaccctagtgtttgtctagagctttggaacaacataaccatggcatctttcttatgtttaattttgcttctctctctctttaatgggaatcccagtgatcagtccaattggttgcactgcccactcgtggaatgctattaactctagtgtaaacatcaaccttgaaattagcaccacaaatcactccttcactgtctacccttggcattgccctgattttgttcattggatgctcaaagctcatcagccccccttcactgtggaacatgaatccagttgggaaaggagcaaaggatttggcacacccttctttaatgacatctaaatcatcagatatgaccacagagccatcagctgcaattccccaatacagcttca

SEQ ID NO: 2449 - DNA, 514 bp, Gossypium hirsutum
  Clone ID: LIB3825-013-Q1-N6-F12
accaaaacaaaggattctacagtgcagaatatcatattcaactcaacaagtcaacaacaaaatgacattgaatgatgtacagaatgtcaaataatattgactttagcagcttcattcatatacaaatctcaattatgagtaggcgtgtgtgtgagagagacaccaaagaataaactctttaaataaatggaagacagtaagatgttataatttttgtcttggttttggttttcccctgtcacttccttcacaatgttacaaagaaccaattttgtgtcacatttccatccgtggattgctcaataaataaaatttcatcaacccctataacgcatctcactgtaatagcaattcttctccctgcaacacttttagttgccttttagcataaactgtgaaaacaattgttgtaaccactgttaaaaggaaaccgccaacatttaacaaaatttgtggagccgataaggtgtgttgttcttgtgaagcatctgccaatgtctgtatgaggatacca

SEQ ID NO: 2450 - DNA, 534 bp, Gossypium hirsutum
  Clone ID: LIB3825-013-Q1-N6-F8
agaacaaaatagatttcatatcacttgtgcccggtttcataagtgtcaaactaagcttaaataaactagccactcatagctaataaaacagaacacgaatccaatggaaagaacatgaattacaaactagttcccggaaggcagagttcttcaaatcgtccgacttcccttctcccaattagccgaatttactagctgctactccagctccttgatcgggttgctggtcaaatttcttaaaaaaattctgcttgctgccacgctgctgtattttttctctgtttttctccacacactcttttcagctgctgtcatctctatttatgggataataacctcccacaattcaaaattaaattcgatcttatccccctttttcttagcctcacccgtcgcatgaaaatagcttcatcttagtagagttttaatttaactcttcaaagttgatttggcttctaattgattaaactagagtcggccaccgcttggcaagaaggaaatattaattcccttcttaattttgtcgcatatttg

SEQ ID NO: 2451 - DNA, 576 bp, Gossypium hirsutum
  unsure (1)..(576): unsure at all n locations; Clone ID: LIB3825-013-Q1-N6-F9
gttctaaagtaggttttaacataaaacaaacttacggttgtccataacaagccagtaaattaaagaaaaacgaaggcaaaccaaaccaaacaatgtctagcaagtattaaaaaccctattaaccgacaaaaacaaagcaaatatataaaggttccaaacttaaagcctaataaacaaagatagcccagttttgataaaggatttagcaacttctctgccaagaaactggacccgaatttagtcactcaggaaacgaggttatcattcagggacaatgaagccaattggtcggcttgattgttggcctgttgctgagcagcaacactcctcaacacctccatggcttcagctactttggccttcaaagcttctggtgattccaggagatgcaaaacctctgtttggtccatctccagaagcatgcctgtaaccttggcagctgcatcacgctcaagccgttccacaagggggtacaagctttcaccaagcatcgtcctttgctgttcaggtgtcgcatttgcaagagctgtagccaaagctggaatcggcatangctgtccgataccagcatctcgc

SEQ ID NO: 2452 - DNA, 537 bp, Gossypium hirsutum
  Clone ID: LIB3825-013-Q1-N6-G11
aaaacgaaaccttttctttctattttgcttttttgattttttggatctgcccgtattacagtgttttttctttgtattcaaaaaaagaaaaacccctatttacaatcgtttttctcttttgaaatctccaaaaaaaatccccccatttcaaaatacaatccgtttcccctcaaatccctcatccaaaatacaatctgtttttccctcctttgaaatatcaaaaatcctccctcaaaaagtgataagctttggcctttatagccggattacaacttttttatatttttatttggatcgttcgtctgttgttttctgctttgttggttgcatgtggctctctgtttgcaggtgtcagaaggcgtcagacgcatgggtggccggtgataggcgagcagtggcggtgggcgtgcgcaggaggtggcagcaacaaacatgcggctggggtttctttttgtgtttgaaagttggtgtagttttgggccattcaggcctctagggtttttattaatattgggcatttgggcttgtaatttttag

SEQ ID NO: 2453 - DNA, 551 bp, Gossypium hirsutum
  Clone ID: LIB3825-013-Q1-N6-G7
gaaccattgaagacagattttaattcatccgaaatttcatgttctgaagtggaaatcaaatgagctagacgagtttcagcattacagattcgacgtgctatagtctaatggcaactcgttacatataaagcgcaacaaaaatgaaacatctaagctgccatacgcatgtacatatagtttatctatttcatcatgctaccacaaaagcactggatgtacccgtgaaatgctgaatcgatcccataagccgtttcgcagcaccaaaatgtcttattctgtaaactcctagcgaggcagatggagggattgtccattcgatggttgcttgacttcgggggcttagtttcgaaggtcttgaccagttaaaccgaaggcagaaatcgtcatcatcataagttggaacccatgtatccttcccttggagtatctcaacaagagcgaatgtaccttctgtcatgagatcgttcctggggcaagctgaccagaagaccacagtcaccgtgctacctctcttaaaagttgagttagccggaacatcagagctgacatcc

SEQ ID NO: 2454 - DNA, 274 bp, Gossypium hirsutum
  Clone ID: LIB3825-013-Q1-N6-G9
aaaccaaaacctttttttttccaaaattaaaaagggggggaaacccaaacaaaaggggggggggttttaaaaaaacgaaaattcaacaccccaaaacttaaacaaaaccccggaatgggcccttggaaacaaaaaaaaggggtccccccccaaggaaaatttaaaggttatccctaaaggggatacttcccaaagggaaaggacaaccccttttttttcccccgcggggtttaaaaaaattgggggggcttggaaaggggggggccggccccgg

SEQ ID NO: 2455 - DNA, 532 bp, Gossypium hirsutum
  Clone ID: LIB3825-013-Q1-N6-H10
ataaaaaacaataacaaattctcttttttataagaacaaaaagtcacaaaaggcacctcaataatgcacagcaaagaaacctttgctgctaaaacaacaacctccgaagtacaaaccgtaattctgttggataatcctaaccatactggatgacactcagccaccagaaaccgatacgatatcctaattagccattcacctcttctgatacccaacaatactaattcccacccaaaaagttgaaaccccaactcaataacttaccctacattgatacaccaatatggtaaaacactaatttaaaaagaaactaactgatcatcgaaaaggatccaagaaacaaggagaaacccaaacagtttctacagccttgcttaaatcatcggactttttaccaggctattaccagctcatagccaataacgatcaggattataacaaggaagctccccaaaaaattgggtgatattaagtatccacctttatagaccccactaattgaatttacatgaatgccggctaaaccttgtcg

SEQ ID NO: 2456 - DNA, 551 bp, Gossypium hirsutum
  Clone ID: LIB3825-013-Q1-N6-H11
actgaaaacccagtgatcaattgaaattgtttagtcaaaaaagtttaatctaagatttaacagcacattaattcaggctagacagtatcaaaaaacactcaaaaattctaaaaacaaaaaggcagagcatgaacttctcaaggaaaaatggggccgctgaccgaaacatcctagacacagtatgacagcaaacgtcttgcattgaacattcggcgttgagtttgctagcagtactgatggtaaacatcttgagttaaatattcggcaatgtttgctatcagtctcccggtagctatccctaatgcttttcgccaggaatgttgaggtctttaaatatgggactgtcaactccaacacccattgcgttgagaccgttatcgacgtatatgacggcaccagtgatagccgaagccaaaggtgatgccaagaaggcagcagcattccccacctcatctgctgatagttctttttgaagaggtgcattggcgattgaatattcgatcattgtatcaataaatccaattgcttttgcagcacgacttcttaatgga

SEQ ID NO: 2457 - DNA, 344 bp, Gossypium hirsutum
  Clone ID: LIB3825-013-Q1-N6-H7
aaagaaaggggggagggtttaaaaaaaaaggaattggtttttaaaaagaaaagggttccaaaaaaaaataaatttaaaaccaatatccgcctgaaagagatttcccaaccgggggtttaatttttaggttcaaaaaaaaagggggaataattttttccatgggggaaccccaaaccccccatggggggcccctttccccccctaaaaaggggggggggcaaaaatttaaaaggggcgcccccggaaaaaaggccggggaacccggggggtttttataaattataaaagcaacgggcaaacccccgggaaaccttttataaaaaaaaagcggccccgggggcccc

SEQ ID NO: 2458 - DNA, 567 bp, Gossypium hirsutum
  Clone ID: LIB3825-013-Q1-N6-H9
agagaattcactttttcattaaatgaatagcaaatttgaaatgtgatacaatttgtttattattcatacaacaacaaaaccaagttttaactttgaaccgaacgaactatcaaaatcggtcaaaagaaaatggggcaattaaagattcttcaagttcccgaaatcctctataaacagcctcagtccgactctgtggaagtggcaatctcctcacctccgtcatgtacctgtttgctgcactagtgatcttgtcccgaatcccctggtttagaaccattgtttgttctggcgagaatgctccacctaatattaaagaagcaccagcagcagtcgtgcccatcctctgtgcaaatacagacattgcccattcgcgaagtaccactagcactgattgaagaaggcgtaatctgagattcggtgatgacaaaatagccccatttgataatagttgatcgtaagtgttcaaagaaggttcagctgcacccttgcaagcagccagaagagcccttgccacatcttcatccccaacagattcagttccagattccaccctctccaatgcagcct

SEQ ID NO: 2459 - DNA, 594 bp, Gossypium hirsutum
  Clone ID: LIB3825-014-Q1-K6-A1
gcagacagcattgcaaagtccgatgatgaggctgttgctcctgagctgagagcatttgttcaagaacactggtcggaggcagctttcttggatggattaaagcaagggcaacaacattacatgaagctgatgaggattttgaagaggggggaatctccaatttgcttaagggatctgccagctcctttgagggttgtaattgcatacatgccactgtacagggaatgtgttgaggtgggtggtcgtctgttatcgcaaaggctgagggggcagcttgttgaagctgttcgaatgcttggaggtgggtctttagaagaagtaagtcaagccggagagcttctagctactttggagcatcaccttcctccatttttggttcgtgctcccagtgttggttagacctcttggattttcgcatgcccttgaccctatattatcccatgtgccatacgtaataatatcattttagcagttagtacgtcacaaagcttctaagtttgtcaaatttccttccatcgtgtgatttgcagcgcttcttctatggcacgtatatcatatagtaggtatagatatgttgttcatctataatgcaag

SEQ ID NO: 2460 - DNA, 603 bp, Gossypium hirsutum
  Clone ID: LIB3825-014-Q1-K6-A10
tgatatctccgctcatataaccaagctagagatcccaaacatggcaccagaagcagaagacgagattaaggatgagaaaagtccccgacctcttgatgaagacgatatcgcgcttctcaaaacctatgggttagggccttattcaacgagcataaagaaagttgagaaggagattaaggaaatggcaaagaaagtaaatgacttatgcggcatcaaggagtcagacacgggattggctgcacccagccaatgggatctcgtctcagataagcaaatgatgcaggaggagcaaccgcttcaggtggcaagatgcacaaagataattaatccaaatacagaagatgccaaatacgttatcaatgttaagcaaattgccaagttcgttgttggccttggtgacaaagtttcaccaactgatatagaagaaggcatgcgggtgggggttgatcgcaacaaatatcaaatacagattcctttgcctccaaaaattgacccaagtgtcaccatgatgaccgtggaggagaaaccagacgtgacatataatgatgttggtggatgcaaggagcagattgaaaagatgcgtgaagttgttgagctaccgat

SEQ ID NO: 2461 - DNA, 606 bp, Gossypium hirsutum
  unsure (1)..(606): unsure at all n locations; Clone ID: LIB3825-014-Q1-K6-A11
gctgcaatgagaaggaatctagggctttcatctgctgatgatcaacggccagtggtaggctgcataacaagattggtgccacagaaaggtgttcatctgattaagcatgccatatatcgaacattggagatgggcggtcagtttgaacttcttggttcatgtccagctccccacattcagagggaatttgagggtatagcaaaccaattccaaaaccacgaacacattcggctaatactaaaatatgacgagtctctttctcatgccatttacgcagcatctgacatgttcatcatcccatctatttttgaaccttgtggccttacacaggttagtcacctattgcacatgttgattcacgaattctaaaagctgttgctatcgagaactctaaggatgtggacgcagctgcggagattgttctgtctgagattctgccttacgccttacctatctaaacgaaccgtggctggtagttcttcctcacggaatcgaagccctcctgtgcaagaaaatgaaggtagctttttttatgatttagttgtaaacttgtttttttctgcattgttctttggcaatntttcaagtttgtggaataattagttg

SEQ ID NO: 2462 - DNA, 595 bp, Gossypium hirsutum
  Clone ID: LIB3825-014-Q1-K6-A2
aaacttgaaaaagataagtacatgactgctcgacacaaaaacaagttaatatcacgaaagacgacagacaaaaggagcacaaccggctgaaaaatgttgacaatcccatctttaacacattgtactgatgagggcttcggtgattgttggaagctaagctgttcatcgcttcccatcacttgagtaagagctgtaaccatggctgtcatgtccgcggattcagtccatgaagttgcggctgctgcaaattcatcgggtcctttgcttttctcctccgatgtttcggatggaagcggacgttttccatgccttcgatccaccgttttttttcccaaaaaacactgctaatactatgtatagttcgcagatatgtaaaaaatggtttgctagatagctagctgcctggggtactaatgtatataaatggagagatgtgtgggattaagacaggaggggatcgacgagtatgagattgaagtgagggtgcaatatatttgggttaaactatataatgggggaaatgggggaggatatttagaagaggaaattttcgggttttattggatccgacactggacagtccttttggggctca

SEQ ID NO: 2463 - DNA, 411 bp, Gossypium hirsutum
  Clone ID: LIB3825-014-Q1-K6-A3
cggccgcgtgggaggagtcctctgcaaaccctaattcccaatcccatctaaagaaacatgggaggaaaatgtccaagcaggaaataaagaagcgaagatttcccacaaaacagctcgccgtgacaaattcctcctcaaggtgacgacctcgtttatgatgagctgcagaagagtgataccgagaagaagccgttgcctcgcgatgaggatttgcctggaatgggacaatattactgcttacactgcgaccgatattttgcgaattcgactgtgagggatgaacatttcaagacgaaacgtcacaagaaacgtttaaagcaaatgtcggggcctgcaccacatactcaactcgatgctgagttggctgcttggatgggtatgcccgataatggactggcattaatgtcaatg

SEQ ID NO: 2464 - DNA, 601 bp, Gossypium hirsutum
  Clone ID: LIB3825-014-Q1-K6-A5
ggcaatttcagggtcctccaaggtttgcttgaaggcatactattcttaggggcatcaatgagttccgcttatctatcttagaagcaggaccccaacagtttggttctcccacgccattgttgacgctggagtaaaattgacctgtgtcaccaacggagagtagaacgcttacgtttttgacacatgtaaaacaaagagttctacaatatagctccgggagttgtaatcaaagtcccaggacgaagcactgtgtacttggctgaccaagacaacaaggaaaagctaatcatagcagtgcttgaccgccctgttaataaccctggacaattcgaggaattcttcccagctggaagccaacgccctcagtcatatattcgagcctttagtcgtgaaattcttgagcctgccttcaatacacgaagtgagcagctagacgagctgtttggtagggaggcaaagccctctaaggcagcagggacagggaatgttccgtaaagccagccaggaacaaataaggggattgagccaagaagctacttcaccaagggagaaaagtggcgagagattcgccttcaacttattgagccaaacccctcgctac

SEQ ID NO: 2465 - DNA, 454 bp, Gossypium hirsutum
  Clone ID: LIB3825-014-Q1-K6-A6
caaaacttaccagggaacatgttttgctgggcctcgttggaaaacggaaatatctgtgcttggtggatggttgacattggcaaagatcatcagcttatgtgcaactactacacattgagacaggacggctccagggcatacataaggaattggaaatttcagggttgtatggatggaaagacttggatagatttgagagtgcacgagaatgaccaaacaatgtgcaagccaggtcagtttgcatcatggcctgtaactggaccgaatgctctgcttccatttagattcttcagggttctactcactggtccaaccacggatgcctcaaacccctggaacttatgcatttgcttcctggagctctatggttacttccgttgaatgtgaaattaatatgtgcatctattctgggttttccaatagcagttcctttttcaaggtttttttttttttt

SEQ ID NO: 2466 - DNA, 603 bp, Gossypium hirsutum
  unsure (1)..(603): unsure at all n locations; Clone ID: LIB3825-014-Q1-K6-A7
cttgtggatggatgatcccctcaccgggaagcgcttcagctcgactgacgatgatgaagaagttctacagcaatgggatccaggatctttaatgtactccggttgggcangaaaatccatctggaatcagcaatgagattatccaaagccaggctaatggaagcacggtccaagcctctcaatccccaaagatttccaatgctcctgttttgagaaaatgccattctactttatctcaagctgaacgagctctgaggaaacggataactgatcaggcatatcgaggaagagttaagttacacaaagagctaatgaaatcaaatttggagagccttactggagaaaacgaatcactaaagaaagaaaatcaatccttaaaagcggctaatgcttccatgaaccaaaccttgacggatcaagcaaaagagattaatcagttgaggagtgatcttttgcagctgaagaacgaccatgagaagcaaaatattcttttggaaacactttcagggcttctatctgatccattgaagctcgaaaatgagaaactgaaggaagaaaatgcgatgttaaggaagtatgccaatcttaatagtcgcataccgc

SEQ ID NO: 2467 - DNA, 591 bp, Gossypium hirsutum
  Clone ID: LIB3825-014-Q1-K6-A8
aaaaaagctacatccctctttttgtgtctgccggttttgagtctctgttctggcatttttacaaacaccctgtaaacgaaaatggcgcttccctatacccatcactatgacctttcgttctttgctctcaatttaaagaatttggctcttcgcatttgcaacccttttgttgtttacggtgcaattccagcgtttcatcttcaccattcacggagaagcactcgttgcagaggtaccaaagggaccagtgggtctacaacaacaataaccagcagcggccgtctctcagctgcgatgatgaagccgcgtcttgctccgtcccggctgatagcgactccataaggttaaatgacatcgctttgcagctgccggagctcaggaagttgctccaagttttgaaacataagagagaaagctgtggcggccaagtacccaaaaatggactgggggatgttttcctggtggggacgggacctggagatcccgatctcttgacgttaaaagctgtcaaagtcatacaaaaagctgatcttttgttgtacgataggttggtttctaatgctgtattggacttggttggccccgatgcca

SEQ ID NO: 2468 - DNA, 410 bp, Gossypium hirsutum
  Clone ID: LIB3825-014-Q1-K6-A9
caagatgtgtactgttctcgttttcgatcataaaagggatttgcaggtcctttgtttgaccgcttcagtcaaccgtaagcttcgagctatagcgaaacggttattatggcggaagctctgtgtatatcgagcgcctcgcatggtatcggcattggttaatggctcacctagtggaagaataggtggtggatgggatgctctcgcgaagctcatgtttttctgttgtggttgtgagtcgactcgcaatttcaaactgagtcggtcttctccgggtcatttcgcgggtgcgtctcggttctcgaagacttcgggtcggagcttcttgaccaaaaaagtcgggcggatctgttgttcgtcagtgacccgtgtgagcacccagtgggggataaaagagacgatttagggatcta

SEQ ID NO: 2469 - DNA, 605 bp, Gossypium hirsutum
  Clone ID: LIB3825-014-Q1-K6-B10
atttacattcaaaaccctaaagccgctcccgccgcaagcgccgacgaaaatggcagtctccgagggattggttctccgcggcaccatgcgagcccacaccgatatggtcaccgccatcgccactcccattgataactccgacatgatcgtcacttcctcacgtgacaaatccattatcctttggcacttaaccaaagacgaaaaaacctacggcgtcgcgcgtcgtcgtctcaccggccactctcatttcgtccaagatgttgtcctctcctcagattcccagtttgctctctccggttcctgggatggtgaacttcgtctatgggacttaagcgcaggaacctccgctcgtcgtttcgttggccacaccaaagatgtgctttccgttgccttttcaatcgacaaccgtcagatcgtctcagcttctcgtgatcgaactatcaagctttggaatacccttggagaatgcaaatacactatccaagagggcgatgctcatacagattgggtaagctgtgttcgtttcagcccaaatactcttcaacccaccatcgtttcggcttcctgggataagaccgtgaaagtttggaacttgaccaactgca

SEQ ID NO: 2470 - DNA, 610 bp, Gossypium hirsutum
  Clone ID: LIB3825-014-Q1-K6-B11
taaaaccctaaaaaaaacagaaacctttcaatggaaggagcacaaatggaggattttcggatcgaagagtgtgaaaatgacaacaatacacacgaagattctcaaatggaagaatctgagcaaaacaataaacacatggaggtcgcacccgccgttatttccgtccacccgacccggaactcagttgcagtcgctgtcgggtcggaccttcgtgtcttcaatctcctagaagattgtgctgtgattttggtggatgaggcaggcggggcttcacataatgattcaattagaggtattaaatatggagcaaatgggaaactctttgtatctgctggagatgacaagcttgtcaaggtttggtctaccgagtcttggcgctgtattgctactgtgtgttctgagaagagagtgagtgcagttgctataagcaatgatggtcttcatgtttgttttgctgacaaatttggagtggtttgggtagtggatcttccaggggttgatgaaactcaagctcctcttaacaagaaggcagtgccattgcttgctcattattgtagtatcattactagcctggagttttcacctgatggacattttattgtcagtgctg

SEQ ID NO: 2471 - DNA, 66 bp, Gossypium hirsutum
  Clone ID: LIB3825-014-Q1-K6-B12
ttagttttcacgacactatgtttgactgtttttttcatcgagtagagttgactcttttagttcagc

SEQ ID NO: 2472 - DNA, 592 bp, Gossypium hirsutum
  Clone ID: LIB3825-014-Q1-K6-B2
tttgcccactggatcagtagcttcgtgatgactcaactgtgacatttcacgatttgagtatctggtagcaaggcaaggtaaatcttgggttggccatcggttctcctttgcagatctgtaatacctggctgctagctttaggttcttctttagggcaaccgacgttcgcttgtatgattagagtttcagagatagagctcatggcagagttagcttgtctcagaagcagtatttaaagaaaatactacagcagtttggcatgaacgagcaaaccaaacctgcaatcgacaaaagggtcagcgttggcgcggggagtgtgtggtgagttttggaggtaaaaagccaacaattttcaacatgcgtcgttacaaagaagatccgccagtggttcgcgtctatacagtctgcgacgaatccagatatttgattgtgaggaacgttcccgcgttgggatgtggcgatgatttgctgaaactctttgctaattacggagacgttgaagaatgtaaaccaatggatgcagaagattgtgagcaatttactgatgtttattggatcaaatttcgactcattagcaatgccaggtttgcaa

SEQ ID NO: 2473 - DNA, 574 bp, Gossypium hirsutum
  unsure (1)..(574): unsure at all n locations; Clone ID: LIB3825-014-Q1-K6-B3
ggnaggtctcaactcaanaaacaaccctccctttaatccccgcttctctttgctcctttcttcacctcggaatgaagaaaatggcgactcctctgttctttttcgctacctttttgttacttcttgccacggttcacccaaggtaattgctgtgggacaaccttctgaggtcaagcttaactctcgaatccttcaggattcaattgtcaaacgagtaaatgaaaaccccaaggccggatggaaagctgccctgaatcctagattttctaattacactgttggtgagtttaagcacattcttggagtcaaaccaacaccgaagaaggaacttctgggcattcctattataaggcatggcaaatccttaaagatgcctgccaattttgatgctagaacagcttggccacaatgtagcacaattggaagaattcttgatcagggtcactgtggttcttgctgggcttttggtgctgttgaatcactatctgatcggttctgtatccattttggcatgaatatatctttgtctgttaatgatcttctcgcgtgctgtggctttttatgtggaagtggt

SEQ ID NO: 2474 - DNA, 608 bp, Gossypium hirsutum
  Clone ID: LIB3825-014-Q1-K6-B5
ggcatttaaagcacataagttgatccttgctgctcgctcacctgtttttagagcacagttttttgggcttgttggggatcctaacattgataaagtagttgtgaaagatgttgagccttctgtcttcaaggcaatgctcttgtttatttactctgacaagtttccagatatacaagagattacaggctctgggtctacgtgtatgtctaccaacatggtgcagcatcttttagctgccgctgatctgtacaatttagataggctcaaagtgttgtgcgaggcaaaattgtgtgagaaacttaatgccgacactgtggcaacgacccttgcacttgctgagcagcaccattgctcacagcttaaggccgtatgtttgaaatttgctgccactccagcaaacttgggagcggtaatgcaatcagaagggttccggcacttggaggaatcttgcccatctttgttgtcggagctattgaaggcctttgcatctgtcgaggagtgtgcaagtatgctatcaagtaagaagaggagtggcagcagtgtgtacaggatagatctagcagcagaagtccatgtggctgaaccggtgaatcccaagacaggcgtgt

SEQ ID NO: 2475 - DNA, 574 bp, Gossypium hirsutum
  unsure (1)..(574): unsure at all n locations; Clone ID: LIB3825-014-Q1-K6-B6
caaatccccacaagccaatgatcttggccttatctagacctgatccaaanaagaacattaccactcttttgaaagcctttggagaatgtcgtcctttacgagagcttgctaatcttacacttataatggggaacagggatgatattgatgaaatgactggtgggaatgctagtgtcctcataacagtattgaaactcattgataagtatgacctctatggactagttgcctatccaaagcatcacaaacagactgatgttcctgatatttatcgacttgcagcaaaaacaaagggagttttcataaatcctgctctggtcgagccttttggacttacattgatagaggcagcagctcatggcctgccaatggtggcaaccaaaaatggtggaccagttgacatccagcgggcactaaataatggtcttcttgtggatccccatgatcagcaagcaattgctgatgccctgctgaagttggtatcggagaaaaacttgtggcatgactgcagaaggaatggttggaagaacatacatctatactcatggccggaacactgccgtacctacttgac

SEQ ID NO: 2476 - DNA, 136 bp, Gossypium hirsutum
  Clone ID: LIB3825-014-Q1-K6-B7
gggtcctttgccatttttccttgtggggaataaagtatgtagccttgattgatttgatgaataggtgtgtggcatgtactaatctgcatatttatttgtttacttatgtagattttgttcatattttggtactatt

SEQ ID NO: 2477 - DNA, 572 bp, Gossypium hirsutum
  Clone ID: LIB3825-014-Q1-K6-C2
taactataatcaaggatttcctatctgcactatacacccacatttctctcttttatttgttaactgttttaagggaagggtttttggtggtgtaattggcctttgttgttttagttgaatttcccttaactgtggctagtactgctatatatgctcgacgttcaagattgagggtaactgttggatcttcaccaacttttagaagtgctgaacgtgctgaaaaagcggagggaggtacgttcttagtcctaatggtcaatatatgaattctatttgcatactttttgtcagtcttaggttatatctcccgattcattttcaactgatcatagttatatgtatgtatatatatccatccagttttaccagaagttataggaaaaataccgagctttggaggctgagagaagccagtgggaggcaaggaccaaggtacatggcattttaagcttcttatcataatatttatgctgatcgttctcctcatgcagtcatatatgtgacatttatatatattttgagaattaacaaaatggactgaccctcatgctttcttgcatgaagagcaagca

SEQ ID NO: 2478 - DNA, 608 bp, Gossypium hirsutum
  Clone ID: LIB3825-014-Q1-K6-C4
atagagggtaaataaatggttcaagaatgcccgctacttggcactaaaaacagaaggtagagagatcagatcaccttcagagctcttctcctagagtccccaaggagcctgaagtggaagctccaaagaggaagggatactgaaatcatggcattggaagatatgtcagaagcagctttggtacggacaccaaagagattgaaaacaaaattgagaaagagtccaaactcaaagtcagtatgcacctctgtagatagaagtccgcataatggactctcaattgtttcacatacaaacagcgacaaggtgagtaaggagttgagtgacgatgtgatattaaagaagcttttaaatgtgaaaaagaagtgggggaaggagaagagggtgaagattattggagggggtggtgggttagaagcatttgagttggagatggaaagactttgtagggctaaggttaggcttgagaacatgaagcaaacattattaggactagaaagtaggaaagcgaggaagttgaataaaaggtggcagcgggtacatgaagaatcggttatttatattccgattgccgagctaaaggaaaggtggtttgagtgtatgcaaaa

SEQ ID NO: 2479 - DNA, 563 bp, Gossypium hirsutum
  Clone ID: LIB3825-014-Q1-K6-C6
tcacttttgtctccgtatcttcatttcggggagctaagtgtgaggaagttttccagatgcaggatgaaacagatctatggcgaaagaacagaattctcaagggaagagagtgtgacactttttctgaaggctgtcgggcttagagaatattcccggtaccttactttcaactttccgttcactcatgagagaccgttgttgagcaacttgaagtatttcccttggaatgctgatgtgaaccgttttaaggcttggagacaaggtcggaccggatatccgttggtggatgctggaatgagggagctttgggcaactggttggatacacaacagaatacgagtgattgtttcgagtttcgcagtgaagtttcttcttcttccatggagatggggaatgaagtacttctgggacacacttttggatgcggatttagaatgcgatattcttggttggcagtacatctctgggagcttaccggatggtcacgagctagaacgattagacagtccacagattcaaggctccaaatttgaccctgaaggtgaatatgtaaggcaatggct

SEQ ID NO: 2480 - DNA, 600 bp, Gossypium hirsutum
  Clone ID: LIB3825-014-Q1-K6-C7
acaaaaaaaaaaaaaaaagtgcttagcttttggttttgtttcagtgcgagaaaacagaaagttcattttttttccatgttctatcgatcggtggtgtttccttcaatctcagaaaggaaacggaattcaaacagaagcaaaaccgacactgtaatggcttcttcttcttcttcttcggctttgaaatctcagcctcttcataacttccaattacatgaccttaaatgggccatgaaccacactggcaaccaccgccttcggaaactctccgattctttgcacaaatctcctcaacgtggagagagtggttctgagtccgacaataaccggaaggtcaatccggtatgcgaagctcgctcaaagattggacattcttcaggtttttctcctgatcatagaactggaaaatcagagaggaaattcatcgatggttctgatgttttggttgattttaactccgataagaaagttgatccatcggacgctagatcgaagatctatatacgttttccagccaagaatgacaagtctgttgacgaggttgcggatgtaggagatcagagcttgattactgaagacattgaagaattggttcccaaa

SEQ ID NO: 2481 - DNA, 606 bp, Gossypium hirsutum
  Clone ID: LIB3825-014-Q1-K6-C8
gtacgttgaggcggcagagcagcggtgtggatattgggtcaagggggaacagaaggtcctcctaagctacgtcgatatgcatctgtatcagagaatatcaatagccttgcttctcaatgcagtccaggaaatctagctcctctgaggcgaacaagcagtttgtcttttgatgagaagcttcttatacaggctctttacaaggtgttgatatatgtatcaaaagccagtcctattgtgctttatcttagggatgtcgacaagctcttgtctagatcacaaaggatttataatttgttccaaaagatgttaaagaaactttccgggaacgtgttgatcctcgggtcacgcgttgttgacctgaataatgatgacagggaatttgacgacaggttatcagccattttcccttacaacattgagatcaggcccccagcagatgaaaaacatcttgtaagctggaaatctcagctagaaaaggacatgaagatgatccaagctcaggataatagaaatcacatcatggaggtgctctcagcaaacgatcttgactgcgatgatctagattcgatctgcattgcagatacaatggcccttagtagatacata

SEQ ID NO: 2482 - DNA, 567 bp, Gossypium hirsutum
  Clone ID: LIB3825-014-Q1-K6-C9
ctgaagaaatgatgctaatgtgataaatgaagctgagataccctggactggtccaaaatggagtgatcttgatgcttcaaatgatgcaaacaactcatggactggttcaaaatggagtgatgctgaggcttcaaatgatgcgaacaactcatggactggttcaaaatggagtgatacaggtgcctacttaggggctacaaagttcagcaaggacacaattggaaaaaaggtgcctctgaaccaagattctctaattggtccatggatgagaaatggcagcacaactatgatgtcagtggaaagaacattgaggctgatgtgcagtataaaaaagttgatattgacaaggatgaacaaactccgaggaagatagaaaattctggtgttaatattggcgtatctgaaccaaaaggtgctgaagagtcgcttggtgatatggaaatgtcccctgagtggaattacaagatacagtcttctattaaaaaggaactctctcatggttcaaaaccagctcttgtcgaaacacttttacattctcaagaaaggaatataactaaagcggcctca

SEQ ID NO: 2483 - DNA, 575 bp, Gossypium hirsutum
  Clone ID: LIB3825-014-Q1-K6-D1
ttatcctttcaaattgaagaagctgatgtaaggaatttctttaaagagctggtgaagtcgtcgaagttcgtttttcctctgatgctgaggggaactttaagggctatggacatgttgaatttgccactgcagaggctgcacagaaagccctggagttgaatggggaatatttgatgaaccgtgctgttagacttgatttggctcgtgaaaggggtgcatatacaccatacagtggcaatgggaacaattcattccagaaaggtggaaaaggtcaatctcgaacaatattcgtcaaaggacttgatgcatcactcgaagaggatacgatcaggaattccttgcaagaacactttggttcttgtggagagatttctagggtggctataccaacagatcgggattccggtgctgtgaaaggttttgcttacttggatttcaaagatgagggtagtttgaacaaagctctagaacttgatggatcaaaacttaataatcaatccttgtccgtggatgaggcaaaacctaaaggcgattttggcagtggaagaggtggtggtaggagtggtggatggagt

SEQ ID NO: 2484 - DNA, 611 bp, Gossypium hirsutum
  Clone ID: LIB3825-014-Q1-K6-D10
aaagaactgctcctgatccagaccttgctacgacaagaagcacgaatgatactggtcacggagagaatgttgatggagttctcgtcaatgatgatccgagtgagcctaccatggctgagaaacttgcaagtttaaatttaatagaaaatggaaaaaatgaaaccaatgaaaaccaagaaagaaaagaaccctctactcatggtaagcctcccatcgcggattcagttatggttctgcttaagcaggcactccgtgctgacgatcatgcacttctgttagattgcttatacactcaagatgagaaggttattgcaaattcagtctcccaattaaatccatctgatgttctcaagcttttacaatctcttgtatctataactcaatcaaggggtgcagtattggcatgtgcgcttccttggataaaaagtttacttcttcatcacgctagtggaattatgtcccaggaatcctctcttcttgctctgaactctttgtatcagcttattgaatctagagtctcaacttttgaatcagctcttcaaatatcaagttgcttagacttcctttatgcaggggttgttgaggatgagtttgttgagaatgctgcaatt

SEQ ID NO: 2485 - DNA, 598 bp, Gossypium hirsutum
  unsure (1)..(598): unsure at all n locations; Clone ID: LIB3825-014-Q1-K6-D2
gngnacattggtgtgtgtaattttaccattgaagaaaatgaacaagttgcttggttttgctgaaactatgccatctgtttgtcaaatggaaatgcatcctggttggaggaatgataagatgttggaagcttgtaaacagaatggcatccatgtcactgcatattcaccacttggttcacaagaaggtggtagagacctaatccatgatgaaacagtggatagaatagcaaagaagctgaacaaaaccccaggacaagttctggtaaaatgggctatacaaaggggaaccagtgtcgtacccaaatcaaacaaccctgataggatcaaagaaaacattaaggtgtttgggtgggaattgccacaagaggattttcaagctctttgtaacatccctgatcagaagagagtgttgcacggagaacagttgtttgtgaacaagaatgcagggcctttaagaagtgtggctgatgtatgggatcatgaagattagtaataatataatcccattttacaatgttgatgttcttatcaatgaatacgacgatgatgatgatgatggttccctgtgtgtttgtagtgatgatgatatgtaaccaaa

SEQ ID NO: 2486 - DNA, 578 bp, Gossypium hirsutum
  Clone ID: LIB3825-014-Q1-K6-D3
ttttggggtgaaaaaaagttgggagtatttagcagtgcgatagtgtctccgccggacgagctggtggcggccggttgccgaactccatcacctaagataacggcggacgctctggtgaaacggttccttgagacgaactcctccggcgtgtccatgcacatcggagaccatgtccaattcgcttattctcaccataaagagtctcctttacagcccagatcatttgctgtgaaagacgaaatcttctgcttgtttgagggagcccttgataacttggggagtttaaagcagcaatatggtctggcaaagtcagcaaatgaagtgatattggtcattgaagcttacaaggcccttcgtgaccgagcaccttatcctccaaaccatgttggttggccatctaattgggagctttgctttcattgtctttgataaatccacctccactttgtttgtggcttctgatcaatttggtaaggttcctctctattggggaatcaccgccgacggatatgtggcctttgctgataatgctgaattgctgaaaggtgcctgtggcaaatctcttgcttctttccctc

SEQ ID NO: 2487 - DNA, 612 bp, Gossypium hirsutum
  unsure (1)..(612): unsure at all n locations; Clone ID: LIB3825-014-Q1-K6-D4
gttctttcctctactgtngaaagctctatacccattttttcacagtttcgctgtgaaagctctttcctgttctttgttcctcttccgtaggtcatacagtagccactaaaaatgggaagtaaaggtcgaattccaccccctcatctgaggcgtcctctccctggacctggcatggtacattctgacccatttggtctaggaattcctctccatccaggtccttttgcacattttgatatgttgccacctccagaaatcaaggaacaaaagcttgttgcacagcttgtggaaatgcagagacttggtacagaaaaccagagaattgctgctacccatgggacattgagacaggaacttgctgttgcacagcatgagttgcagatcttgcatgctcagataggagctataacatctgaaagagaacaaaaaaatgaggagccttacggaataaacagctaagatggaagcagaactacaagcagctaagcctgttaaggtagagttgcagcaggcacactctgatgctcaaaatttggtgttctctttatgttataagctggacattgttataatagaatgttctttcaattttaaaactgtatgagcaaaatg

SEQ ID NO: 2488 - DNA, 581 bp, Gossypium hirsutum
  Clone ID: LIB3825-014-Q1-K6-D5
cttcatttcctttgccactttccctactttttcaaccaaaaaaaaaaaaccttcctttctcgtagctatggcgtttagaaccttagatatcaacgttatctctgcaaaggcttgaaaaacgtcaacctcatcgataaaatggacgtttacgccgtcgtttcactcaagggtgattcatcgaagcaaaaattgaagacgctggtgcataaagattgtggcaaaaccccgaattggaattttccggtcaagttcaccgtcgatgaatcattggctaaaaacaataagcttagcatcaagttcaagatcatgtgtgaacgtatattcggtgataaagaacttggtgtagtcaacgttccggtcaaagagcttttggattcgccgggcgatggtgggtcaatgaaattcgttagttttcaggtgaggaaaccgtcggggaaacctgaagggacacttgatttttcttacaagtttggggacaaagtttcggagcctgtcggaaagaataagggtgacgatcatcctcatcatcagcctgttactgcgtatccagcggcgtatgtggcggctggatcgagttctgc

SEQ ID NO: 2489 - DNA, 402 bp, Gossypium hirsutum
  Clone ID: LIB3825-014-Q1-K6-D6
cggccgcgtgggcggacgcgtgggtaaaaaggtccagacaaaccagtccggttccggcaatgatttcaagctcgtcggattctcgaatttcgtccggtccaatccgaaatccgatcggttcaccgtcaaacgtttccaccacatcgagttttggtgtaccgacgccactaacgtcgctcgccgtttttcatggggtctcggtatgcaatttgtagctaaatcggatttatccaccggaaatttgacccatgcttcttatctcctccgttccggtgacctgaacttccttttcactgccccttattccccttctatcgccgttgctcaaaacctctcccctcaatctaccgcttccatcccttcttttgatcattcactctgccgctccttcgctgccaccca

SEQ ID NO: 2490 - DNA, 607 bp, Gossypium hirsutum
  Clone ID: LIB3825-014-Q1-K6-D7
aaacgccatggttgtcctcttcatcaaccctgtacctctcagagtcacctgttcttcttctgctagcaaacgtgttcccaaatccgaggaaagctcgtctccactgaggactgtagcttgtggccttcttgctgtatgcaccgttgccactgcctcgcctgtaattgctgccaatcagaggcttcctccgttgtcaacggagccgaaccgatgcgagcgtgcattcgttggtaacaccatatgtcaggcaaaatggtgtgtacaataagccgctcgatctacgcttctgcgattacactaacgagaaatcgaacctgaaggggaaatctgttgcggctgcacttatgtcggatgctaagtttgatggtgcagacatgtctgaagctgtgatgtcaaaggcttatgctgttggagctagcttcaaaggtacagacttctcgaatgcggttttggattgagttaatttcggaaaagcgaatctgcaaggagctatattcaagaacacagtgttatctggttcaacattcgacaatgcgccgcttgaagatgcagttttcgaagataccatcatcggttacattgatcttcagaagctttttaccaacac

SEQ ID NO: 2491 - DNA, 600 bp, Gossypium hirsutum
  unsure (1)..(600): unsure at all n locations; Clone ID: LIB3825-014-Q1-K6-D8
caagnagcaggaaaacagaaaagcagagccgcatcactttttgctagctaagctactgtgggagttattgttcttcagaacagcttctgcagtagctaataataacgttatatattatataaattttatacatcctttttaccctacgactccatatataagcaagtaaaaataaatatggctcgctctgtttcttcctttaagttccttggtgcttctgtttttgatgctctttatgtctccatatcaaggagaggttactcaggtgcaccgccggcggcagtgacggctagctttggtaggcctggagcgatggggaaagtggaacgaagatatgcgatgaaagagtcgtcgtcgtcggagacaagggcttattcttcagcttgggcgcctgaccctgttacggggtattaccggccggagaactgtggggctgagatcgatgcggcggatctccgggagatgatgttgaatcacagggttagatcacagtagaaacttgccaccgcatgtgatcaccgtagcagagcagagccagaatgttttgcagatgtttgggtgcctttgtattttgttttggttttgagttcaaaatctttt

SEQ ID NO: 2492 - DNA, 585 bp, Gossypium hirsutum
  Clone ID: LIB3825-014-Q1-K6-D9
ctcaacaatctccctgacgctgtggcagaagctaacaaagcaattgagttggatccgtccatgtctaaatcctacttgcgtaaagctactgcgtgtatgaagcttgaggagtatcaaactgctaaggctgcgttggagactggggctgctttggcaccagaagactcgagattttccaagttgattaaagaatgtgaagagcgcattgcagaggaaaatggtgagttaccaaaggagacgttggaagaggtgccaacaaatgttgtacctgcgaaagacatctcttctgtccaggatatacctgatcccatgactgttgcagcaccacccaaatcaacttacaggcatgaattttatcagaaaccagaggaagtggttgtcacaatatttgccaagggaataccacgcgagtgtgttaaagttaattatggtgaacaaatactaagtgttgctgtcaatgcacccggcaaagatgcttatcatctccaacctcgcttatttggaaagataatacctgacaagtgcagatatgatgttttgtcaaccaaaattgaaattaggttagcaaaagctgaaccaattcaa

SEQ ID NO: 2493 - DNA, 595 bp, Gossypium hirsutum
  Clone ID: LIB3825-014-Q1-K6-E11
ctttcactaaatattgaagatgcagtcaatgaaggatgctgctgcctctgctaagccggcatggagaaggccaaggcctccatgcaggaaaggtggaccaaatgaagacaagagaccctaatgagaaagagatggcgagggaaaggaaagaagagagacaagaagatgcagagctgaggaaacaagaggcccgccatcataacgccacagctggccatgctggtggtggtggtattggtggcactggctacaccacagctgggtacaacataggcgacactggtggctatggcggtaccggtggacatgacaaccgtgggtaccccaccgcaggtagtgggtatgatacaggcaggcaagatgacctcagcagtatggggtttggcggagatacagagggtgcttacggtacaacggggaaccaagacttcccaaatgcggcgtctaacaatgctgggactagaaggaacacccgcggaggtacccaggatgatccttattatcgatcctattaaatgaaaggagcgagtttttgtgctctgctactgccttgagtctgtgtttgttgtttgtttgcttctacttttttcttttt

SEQ ID NO: 2494 - DNA, 491 bp, Gossypium hirsutum
  Clone ID: LIB3825-014-Q1-K6-E12
cacacacttaacttaattaagcaagctcgtaagctgttttcatcaatggccgaccgtgaccgctcttaccgatttgaccaggttgttcgtggtgatagaacgaactatcaaagcggaccatcaacaacccaagttctaaccgtcctcaccctccttcccatcggcggcactctccttgcattagccgggctaaccctcaccggcaccgtcatcggcctatgcgtggcaacgccactcttcgtcatcttcagcccggttctgctcccagctgccatcgcggttttcatggctgtggccggtttcttgtcgtccggggcttttgggttgacgggactgtcctcgctctcctacgtatttaaccgcttcagacaggcgactggcaccgagcagctcgacgcggaccgggccaagagggcatgcaagaatggtggggtatgtgggacaaaagactaaggaagctgggcagactatcgaaaacaaggctcatgagg

SEQ ID NO: 2495 - DNA, 601 bp, Gossypium hirsutum
  Clone ID: LIB3825-014-Q1-K6-E2
cggccgcgtgggcggacgcgtgggtgaccgcaaccagcctcaaaagattcagctacttcaccctccaccccactaccgtcaaacaggaccatcaagcacccagattgtagctgtcctcactctcctccctgtcggtggctcattgcttgctttggcagcgcttacactcaccggcaccctcatcgggcttagcatcgccatacccctcttcattatcttcagcccagttattgtccctgccaccatcgccatttccatggcggtggctggtttcttgtcgtcgggagcattcgggttgacggggctgtcttcgctcaactatgggttgaagcgcatgataagggctaacgccggcgccggagttggaaaagggcaggcaaagagggggatgtgggacatggtagggtatgtgggacagaagactaaggatgtgggacagaacatggagaacaaggctcatgagggtggtggtgctgttaggacataaatggacatttcaattactgtcgtatatttgtattaagcttatatatttgctcgtcttcgtgtttgttactctaaacttattttatgtttattattatatatgcggtgtgttata

SEQ ID NO: 2496 - DNA, 438 bp, Gossypium hirsutum
  Clone ID: LIB3825-014-Q1-K6-E3
tttagtttttccattaaaaaatttaggcagaatagtattctttatgcgcccagtttgtatagtatatgttaagccaattgattgttaattgcctaattgcccgtcaaaaaaaaaaaaaaaaaaaaaaaaaaaaaaaaaaaaaaaaaaaaaaaaaaaaaaaaaaaaaaaaaaaccaaaaaaaaaaaaaaaaaaaaaaaaaaaaaaaaaaaaaaaaaaaaaaaaaaaaaaaaaaaaaaaaaacaaaaaaaaaaaaaaaacggggggggccctttacaaggaggccattgttcaaccccgtgactgggcaaaacttaggcgtttttgtagggcacccccatttaatcacttggcgctttattaaacaatgcccaaaggggaaaaaccccgaacagcccccctttaataacttttgaaaaaaaacacccttttttttggggg

SEQ ID NO: 2497 - DNA, 575 bp, Gossypium hirsutum
  Clone ID: LIB3825-014-Q1-K6-E4
gctcaacatagctagatcggggtgtctggaccagtgttcattttggggatatgaggcgtgctttatctggtatgattagatggtgttgcatgagtaaattcttttttattttagctatcacatatcaagatcaataaatgtaaagataattgaaatttattattgtgcattccttctctcattctcattccttgcaacagaaagggttcagaaaattatttgcactatttccagttttagcatttggtcttccttctttttcgtgtcagttcaaagcttttggtttcagcgattaagttcattatcctttttctccgcttttgaatttcctttctcaaacctgctttaggtaaaatttcgtcttcgttttgctcatgaagttgtatggcttaatgcattttgatgtaatgtcaaggtttatgtacttctattatgatgaaattgttaccatatttccagcatgtgaacgccttattcttctaagaaccgatccgaaggaaatgagagattatagcattctcctctatcattgtggattgtacgagcaggctctgaaatttctcaaattgtatcaa

SEQ ID NO: 2498 - DNA, 598 bp, Gossypium hirsutum
  Clone ID: LIB3825-014-Q1-K6-E5
gctgctgtcgctctcgtttgtttgcaggtacggagaaggccagctggcgtgcggtgctgcgtacggaggtacggagaggccttggaggctgctggaggcttgttgcggcgcaagggaaaccctagggtttctggtggtgttttaattttgggccattcgggccttgtattttttgggctaatgtttgggttataatgtttggattttatattttggcttatttttttgtattttcattttgtttttattttcatacggccccggcataatttgggccttacaactagtatggattaaaacaaggaagtggccattagaggtaaagagattgctgagaaggatgttgctggggcaaaaagatttgttttgatggctgaaaacctgtatcctgtgctcggtggtcttcctcagttgatttttgctcttgacgtatacatatctgccgatgaaaagatcaatggagaagttgactggtacagagtgcttggtgttcagccatatgccgatgaggacaccatttggaaacattacatgaagctggcttttattcttcatccggacgaaaacaaattcgcaagtgcaggagctttcaaacttc

SEQ ID NO: 2499 - DNA, 541 bp, Gossypium hirsutum
  unsure (1)..(541): unsure at all n locations; Clone ID: LIB3825-014-Q1-K6-E6
gtcctgttgaacttagcaaaatggaggtcaagtgcccngaaatgaacctcagacggatgcgataggctaccctaatgctttagatcatcagttgcagttaccggttgctgttccaactgagcaagtgcactcaggcccacaagctggaggatttaatgataatcagtctaccagatacccgggacaatcagagcttgtgaattcgaattctcgtagtcaatttgacagcacgcaatttttgcaatatgatcagctggttaacaattcagagcaaccacaaagctcaaggactaataataatgctgttgggctggctcttggtcctccacagtcatctaccttgggattccacaatgctatttcttcaatgcagccatcaaatcttaatccctttgacgattggtcgaacaatagagataagggagtcgaggacttgttttctgaggaggagattcgcctcagaagtcatganatgctcgagaatgaagatatgcagcatcttctccgnctcttcagcatgggaggtcaccatgctactgtg

SEQ ID NO: 2500 - DNA, 578 bp, Gossypium hirsutum
  Clone ID: LIB3825-014-Q1-K6-E7
cttcaaacacttcgaatcgttttccaattactctgacaagagcaaatctttgttaaaaccctcactggcaagaccatcaccctcgaggtggagagttcagacaccattgataatgtgaaggctaagatccaagataaggaagggatcccaccggatcagcagaggcttatatttgctggcaaacaacttgaggatggccgcacgctagccgactacaacattcagaaagaatccacccttcacttggttcttcgacttcgtggcggcatgcaaatctttgtcaagactctcactggaaagacaattaccttggaggttgaaagctctgacacaattgataatgtaaaggcaaagatccaagacaaggaagggatcccaccagatcagcagaggcttatctttgctggaaagcagcttgaagatggtcgcaccttagctgattacaatatccaaaaagagtccaccctccacctggtacttcgtcttcgaggtggcatgcaaatctttgtcaaaactctcactggaaagacaattaccttggaggtcgagagttcggataccattgacaatgtgaaagc

SEQ ID NO: 2501 - DNA, 602 bp, Gossypium hirsutum
  Clone ID: LIB3825-014-Q1-K6-E8
attttgtttagttttatgaattttttatgatatgggtttctttaattttagggtaaatttaaggtttttatctacgggtaccttaaatttatgaagataataaagagggttcatttgtgatttaaaaaaaaaattaagggtttcttggagccatttgtgatggatgaggaaacatctgatacaatgaaccttgatttgaatctgggtccggcacctgagaccgggtccgggtcgttgttgaatgaaggtgtgaatttgaatgccttagacgagaacccgttcgataggatccgggctgcggttaggcgtaggagatggagatggcatcaggttcaacttcctgctgcaactcagagcttgtcggttgaatttgatcaatttacgggcaattctgacggtccaaatacattacaagcaggtgagggtagcgttacggctgaggaaagaacgagtgatgtgccgaaagtgtgtgaaaccaccaatgggtttttggaagatgaggttttagaagataaaaaggatgatattgagaaaggtgttagcaatgatgggagttttttcgattgtaatatatgcttagatttggctcgggaacctgttgt

SEQ ID NO: 2502 - DNA, 180 bp, Gossypium hirsutum
  Clone ID: LIB3825-014-Q1-K6-E9
ccgcccttttttttttttttttttttttttttttttttttttttttttttttttttttttttttttttttttttttttttttttttttttttaggggaaggggaactggttgcaaaaaggcccggttttgattgagcaggggggcaaacccaaacttcaaaacgtgaaaccggggaaaaa

SEQ ID NO: 2503 - DNA, 616 bp, Gossypium hirsutum
  unsure (1)..(616): unsure at all n locations; Clone ID: LIB3825-014-Q1-K6-F1
ctctctttggcccatctcttggctttggagagactgagaggagagaatctcaattaccctttcttcatgcatctattctttcttgtattcctctgaattttcttcgttttgtcttattaaccaattttatccaacatccatttccagttgcangaaaacccatttcatattcaagtgttttagaaggattaaatggcntgaaaaaagtttcccacttcttcaacatggctacaaagatgtggtttttagtgattcaggtgtcaagattgttgaatgttctttttctcttaagagagttagtttgaaagcaaatgggttttttgctagtgttaatcaagctggaatgggttttgccatctcaccaaaccctcaaattccactccagagtactgcaaagttccattttgccagtcttgtttcaatctctgagcccgggtatctggttttggatgatgaacttgagattgctgagaggttagtggagaagaagaagaagaagaagagtgggtttaagtttagaattaagattgggaatgcgtcattaaggaagttgatgagtggggcagtcgcaggtgcggtatcaaggactgcagtggctccattggagaccattaaa

SEQ ID NO: 2504 - DNA, 605 bp, Gossypium hirsutum
  unsure (1)..(605): unsure at all n locations; Clone ID: LIB3825-014-Q1-K6-F10
ggnacaaccattccggttcccatccacgtttacctttgttttgagagcattctccacactcgaaggtattggctacatacttgatcctaatttctcctttgcaaagattgctgcaccttatgcacaggagcttttagatattagacaaaggcagcgaacagggagccaactagtgcaagagataaggaaacaagctgatgatgccaggtcttacaccatgtctatgccatacagagttcagcgaatagaggaaatccttaaacaacttgagtcgggagatttgagactccgagtccgggtgctagagtctgagagagcagcacggaaggcaacaattctgcaaatggcaaccatgtacacagtactaggagggaccctgctaaacctaggtgtcaccttcagcagtcagggaagccaaattattgcaaacggatcattcgttggagcaggagttttcttgacactttttcttaggtcaatgcaaagggtgaagaagcttgataaattcgagaagatgatatgatcttaaaacccataaggcaaaggatttatttcatgtatatgctcattgatcagtcagttaactgccttattcgcatcaaatt

SEQ ID NO: 2505 - DNA, 462 bp, Gossypium hirsutum
  Clone ID: LIB3825-014-Q1-K6-F12
cattgtgggcacatgtgcacgtgctcaaaagtgccaatgagctggtcctgttggaggaaaagtccatgtgtcgggcaccggtagttgaggtcattcgtgcctactcaatcctttaatatgaagagtatttatataaaaagaacaaaaggaaaacagaaacccagaatacgattttatataaaattttcatcagttctttttcttaaaaagaattctggaccactccaagtatcccattttcctcatctctcatttctttaatttaaccctttcttgggtcccttcccctgtcgtgatttgagtacataaattgagtgtatggttgaaacggaaagtgtcattatatgttactaatccttatagaactttcgagtgtaaaaatcgttaattataattgatgcaaggattgatggattgtattttactttggaggatataagatcatattcaccgtagttcttt

SEQ ID NO: 2506 - DNA, 613 bp, Gossypium hirsutum
  Clone ID: LIB3825-014-Q1-K6-F4
atatcagtttagtttaagagcctacctaatttgtagcaatagcagcaatataaagacgatttgccaactgcttcaaactggatgagaaggtgtggagaatgatatagatgtagatgacagcacttcagtagaggaagtctgaatcaatttggtcgctgtactaaaagattatcttcagttggaattgttggcttgggcaagatcggatcagcaatagcaaaaagagccgaagctttcaactgctctatcagttaccactcgagatctaagaaaccaaatacaaagtacaaatactactcaaatacaaagcctagataaccaaaaggaaaaatgcttagaagaagattacgagatttaagtattgtccaaaatactccaaattccaaagaaggaaatagtgaacagcagacagttgttggatctttgaatgtgccagagacactcatggtcagcctgttggatctgaagctcgacttttagcaggctatttgggcattttagcatgaaatgcaaatatgtttcccatcaactacgaatcatggcatcacatgcctgatagcaacaaaaatcaggctctcgctaatattaaggagagatttgctttagaagtctc

SEQ ID NO: 2507 - DNA, 485 bp, Gossypium hirsutum
  unsure (1)..(485): unsure at all n locations; Clone ID: LIB3825-014-Q1-K6-F6
ctttttgtttgtatccgtgtctctcgggnaggcttaattttctctccacaataatggcggaatccaanagcaagtttgaatccataagggaatgggttgtcgatcacaagcttagaactgttggttgtttgtggcttagcgggattgggggttccattgcttacaactggtctcaacctcacatgaaacccagcgttaagatcattcacgctaggttgcatgcacaagcccttacattggctgcattagctggtgctgcagtagtcgaatactatgatcacaggagcaagccgaaaggcgatccatatgcgaagtaccttccacactcacacaaagagtaggtttgtcttgatagattaagcaacattctcatcacattcttttcaactgtttaccttatttacataaacataaatgcggggcttgcaagtggattgatattaagcttttatcctgagaatctaaacaaaacacgtgtttgtttt

SEQ ID NO: 2508 - DNA, 606 bp, Gossypium hirsutum
  unsure (1)..(606): unsure at all n locations; Clone ID: LIB3825-014-Q1-K6-F8
attgggagcatgttgagggcggtgcaagaaacgttcgggcatgccaaagaggccgtcgtaggtaataagggccacgaggcggaggatttcactggtcgaggtacagagaagacatgggagatgaaagataaagctggtgagtacaaagactatgcaactgacaagacaaaggacgccgcagagagggcgaaagaggcaacggatgctaccaaggaaaaggcttctgagtatacagattatgctgctcacaaggcaaaggaaaccagggactccaccgcccacaaggccaaagaatcaaaggattcagtaacaggtaaagcttccgagtatggagattatgttgcccagaaggcgaaggaatccaaggatgcggcgaccggtaaggcggctgattatgcagattatgcttctcagaaggccaaggaaactagggactcggcttcccagaaggcgaaagaagccaaggataatatcacagggaaggcttccgagtataaagactatgcagcagagaaagccaaggaagcaaaggacatgacagccgagaaggcgaaggaagcggcggngaaggcaagagaggggacggaatatgcggcagagaaagct

SEQ ID NO: 2509 - DNA, 496 bp, Gossypium hirsutum
  Clone ID: LIB3825-014-Q1-K6-G1
agcaagagtctcttaaatggatggtggttaagcgcgcgaagcttatgcccgtgcgaactggcatgggccaggcactggactattatggaggagacgcggggaggcgacttgataacccggtgcgcggagcacctgacaggggcggaccgttacatcatatctagatgacgtgtagcaaatatgcaagggaaacattagaacgccgaatagtggtatggttccatgtaacacggaacttgcacttgtgatagaatactctaaaacacggaggaagtacatgttcgtactgcgcgtgcagcacgagcttcaaaagggaataacattaaaattcttgaaccgccattcggtagctgacagccacttaaagtagactgtagacttcggaatgggcctgattaagagttatcttttgtgttgaactgacatccaacgctgcaaactgcttacactgatgtttacacaactgtcataacagcacttgacgtgtggtgcagtg

SEQ ID NO: 2510 - DNA, 606 bp, Gossypium hirsutum
  Clone ID: LIB3825-014-Q1-K6-G11
cactcacccaaacttgaacattcaactcggtaactcactcacctccccaaaaaacccccactcccatcatcacctttaactcgtgttccactcacgggtctactcaatctctacttaataaaaaaaaccctactcctttgggctaaatcacaagactcacaaggaaaccagttgggtgaatttaatggcgacaaacacatcctctttaaagaagaaaagtgagcaagtcctagacggttcggatataatggagttggttgaaaaccaagaggtgttcactagtttcgtggaccataagttcaaagagcttgataaagacagtgatggtcacctctctgtgaaagaattacaacctgctgtggctgatattggtgctgctctcggtttgcctgctcaaggttcttcacctgattctgaccatatttactctgaggtattgaatgaattcactcaagggaaacaagaaaaagtgagcaagaccgagtttaaagaggttctttcggatattctattaggtatggcggcgggtttgaagcgagaccctatcgtgatcctccgtatcgacggtgaagatctttcagagttcattaacggtccgagttatgc

SEQ ID NO: 2511 - DNA, 270 bp, Gossypium hirsutum
  unsure (1)..(270): unsure at all n locations; Clone ID: LIB3825-014-Q1-K6-G12
agttccaagnacaccaaactgaaacaaagtggcaccacaactggtactcactgataaaacctcgatttcaattatatcccaaaagctccctccttgattttgttatctagattagaggtttctagccgccgaactcttaacataataaaaaaagatatgtacagtgataatgccattgaaggtgaagcacanntagatcatgaaaatctatggggagtgtttaaggttgatcgtagtgtttggaacaattaatccaattttgtttttggg

SEQ ID NO: 2512 - DNA, 614 bp, Gossypium hirsutum
  Clone ID: LIB3825-014-Q1-K6-G2
gtgattgttcatatcccaaatccagccatgtgggtgtaggccttgtccttggtaaaagcatggaaaaacgttttctgaacccttaacactgtaattgctcgactagttgatctacttggtgacagccaaggttctcacagtgaagcagcacttattgagcgcggtcagggtgaacaatcggactgagtgtgcgaaatcgaaagttctgctgaagcaatccgttattgtgcatgaaaacatgctcacttgaaaaacaacctgctgaccaattacacatttaattgtgaccatatgctgaatgataggggccacactgctgtttatttgatatatgctaacgctctaatctgtataatcatgcggaggtctggtaaagacatactggaactgaccaacactgggacattagtattggggcataacgatgagcgtgatttggggcttcacttgctgaatgttgctgaggttgtcgaataggcctgcaccaatttgttgccaaacgttttgtgtgactacctctataatttatctgaaatcttctgaaagttgtacagtaaccccgagtgcaaggttatcagctcagatatggaaacgagtcaactactattatgtga

SEQ ID NO: 2513 - DNA, 572 bp, Gossypium hirsutum
  unsure (1)..(572): unsure at all n locations; Clone ID: LIB3825-014-Q1-K6-G3
gccttctgctagtgatttcanatgaactacanacaaatcatccaagttctatggaaataaatgatgagctcaaatccccagaggatggacagaaggctttagaaacactaaacagaatggttcagctaacaatttggaagtcttgaatgagcaaaatgaaagtggcttgattccttcaaatgaaaagagggtgacatatgtaaagcctaaatcaaatcaattggttgcaacttcagattctgatcatacctctatttttgatgttgataagaaccaatccctttctgcttcctctgatggctattacaagaaaagaaaaaaccagctaattaggactgcccttgagagtcatatgaagcaggcggttacctcgtctgatgacatctccaactcagtgagagaaatagctgctaaggttatttccagtagaacttttggtaagagaagatccaataaagttgtagcaaagacccataaaccttccaaattctctctggtctggactccacatagtgcaaggttatcaaataatgatgggagttcactatgttacccgaaggtccgcccgcaac

SEQ ID NO: 2514 - DNA, 606 bp, Gossypium hirsutum
  Clone ID: LIB3825-014-Q1-K6-G4
gagacatccttggatggtgcctagcctgcccatagctttctgactctgatacatagggtgcgcagactgagagtgttcatatatggaaaactgcactatgagtgctagaaggcttctcaggactctgcatctacacatggaggcgggcggcgatgcctatttataagacgcacaaacggggcacaggggaccaccatgttctgcaaggcatcatggtcggcggaaaaaaggtgcacgtatccgagatgtacaaagggtgctgaagggaatactcctttctgtcccggccatggagggggaaaaagatgtgcatttcaaggtggtggtgtttgtacaaagagtgcccatggaggaaccaacttttgtgtatcgcatggtggaagtaagaagtgtgacatgcctgaatgcacaaagagtgcaaggggacgtactgactattgcgctcaccatggccgatgcaaaagatgcaagtttgaagggtgtggcaaaagtgcacaaggcatcacggatttctgcaaggcacatggtggacgaaagaggtgctcctggggccatcctgtgtcagaatatgggaaccaaccttctggtccttgtaactattttgca

SEQ ID NO: 2515 - DNA, 372 bp, Gossypium hirsutum
  unsure (1)..(372): unsure at all n locations; Clone ID: LIB3825-014-Q1-K6-G5
cggccgcgtgggcggacgcgtgggaaactgtaagctaanagagagtaactgtgattgtgcggcataaccttcgctgcaatttagttttgttttctgtctggttatattttgttagcatggatgctttttcacccatatgatgtacgttcgtttttagacgtttgtgttttgatgatgatcatgatgtactacaatcgacatcaaaacacaaacgtntaaaaacggncgtncntcttatgggtgacaaagcatccntgctgncanantatatccagaccgatatctnttctaaattgcagcgaaggctatgccgcactatcccagttactctctcctagcttacagtttcncacgcgtncgcccacgcgtncg

SEQ ID NO: 2516 - DNA, 570 bp, Gossypium hirsutum
  Clone ID: LIB3825-014-Q1-K6-G6
ctcttttcttcagcgggtgagagagaagaaatcttaagaggccgaagatgccagctggtcacggtctacgttctcgaacaagggatttgttcgccagaccctttagaaagaagggttacattcccttgtctacttacctcaggacctacaagatcggcgactacgtcgacgtcaaggtaaacggtgccgttcacaagggtatgccccacaagttctaccatggtcgtactggtcgagtttggaatgtcacaaaacgtgccatcggtgtcgaagtcaacaagcaggtgggaaacaggattatcaggaagaggattcatgtacgtgttgagcatgtacagccttcgaggtgcgctgaggaattcaagctcaggaaggtgaagaatgatcaactcaaggcagaggctaaagcaaagggtgaggtcattagcacaaagaggcagccagaagggcctagacctggtttcatggtggatggtgctacacttgaaactgttacgcccatcccatacgatgtcgttaatgatctcaagggtggttactaaatctactctgttttttgtttgcggtatt

SEQ ID NO: 2517 - DNA, 227 bp, Gossypium hirsutum
  Clone ID: LIB3825-014-Q1-K6-G7
cgattcaccacccgatccgcaccaaaaacagaccattcacttcaaccgagtcagaagcagcagaatttgttgttgccatgctcaagaacgcctagcgactgataccatgaagaaatttaggtaaactaatgaaataaaatgtgttttcaatctgaaattattcttgttaagctgttcaatacagtgttaaatgtacatatttatagaagcagataaccaccttcctt

SEQ ID NO: 2518 - DNA, 135 bp, Gossypium hirsutum
  Clone ID: LIB3825-014-Q1-K6-G8
cccacgccgtccgaaaaaaaaaaaaaaaaaaaaaaaaaaaaaaaaaaaaaaaaaaaaaaaaaaaaaaaaaaaaaaaaaaaaaaaaaaaaaaaaaaaaaaaaaaaaaaaaaaaaaaaaaaaaaaaagagggggggc

SEQ ID NO: 2519 - DNA, 609 bp, Gossypium hirsutum
  Clone ID: LIB3825-014-Q1-K6-H1
gttcacatcaactttactatatcttctcatttttggatcaatttctcctttcgcgctttgaagttgatttcttgaagatgggagcggaaaagaacttcattgacatggaggagggaactctggagatcgggatggagtatagaactgtatctggtgttgcgggaccattggtcattcttgacaaagttaagggtccaaagtatcaggagattgtcaatattcggttgggggatggaacaactcgacgtggtcaagtcctggaagttgatggggagaaagcagttgtgcaggtctttgaaggaacatctggaattgacaacaaatacacaactgtgcaatttacaggggaggtattgaaaactcctgtgtcgttggatatgctagggcgcatatttaatggctctggaaaacccattgacaatggccctcctattttacctgaggcatacctagatatttctgggagctctattaatcctagcgagagaacttatcctgaagagatgattcagacagggatttcaacgattgatgtcatgaactctattgctcgtggacagaagattcctcttttttctgctgctggtcttcctcataatgaaatagctg

SEQ ID NO: 2520 - DNA, 591 bp, Gossypium hirsutum
  Clone ID: LIB3825-014-Q1-K6-H10
cgacgacccgttcgggacgcaggcagcgaatcttgaatctccgccccacgtctatatatacatgagaaacatgactgacctgttgttctcctatcatttttttatctgggtaatgttagagaaacataatggaattgagcttggatttgagttcggtttttgttccaaaaaccataaccgagtttctcaaagaagctttgaaaatcaaagatgggttccaaagatcatcaaagattagtgattatgttaaaagattggaagatgagatgaagaaaattgatggttttaaacgtgaacttcctctttgcatgcttctcttgaaagatgggattgagagattgaaggtggaagaagtgcagtgtaaagaaacgaacgacggattgccattgaaggaaaatgatgacagtgacaagacaaactggttgagttcagtacaactgtggaactctgatttcaacatcgttgatcataacaagaaaccgaacacagtttcagagctgaaaccgagaagtggcagagaagaagaagaagatatgtctgaaaacccaattaaagtttgtaacagtaaaagcaggggaggggcttttgttc

SEQ ID NO: 2521 - DNA, 456 bp, Gossypium hirsutum
  unsure (1)..(456): unsure at all n locations; Clone ID: LIB3825-014-Q1-K6-H12
gccaaatggaaaggttatgccccatcctcnctgccacacctctcaattgctgtcaaattttccgaactgttgaccaagattgacagacgatctggcaaggaactcgagaaggaacccaagttcttgaagaacggtgatgcaggtatggtaaagatgattcccaccaaacccatggttgttgagactttctctgaatacccaccacttggacgttttgctgtccgtgacatgcgccagactgttgccgtcggtgttatcaagagtgttgagaagaaggacccaactggtgctaaggtcaccaaatctgctgccaagaagaaatgagagattatttgagagagaattatatcagttttcattacagctttggacaattatcttaaatttggactttagaatttactttttgtgagactttttgatttgctttttaaacaaatcctagttttatatttc

SEQ ID NO: 2522 - DNA, 56 bp, Gossypium hirsutum
  Clone ID: LIB3825-014-Q1-K6-H2
gcttcttgtatcgcagagcggcacgcggctcgaagggataccagagcttaaggtac

SEQ ID NO: 2523 - DNA, 595 bp, Gossypium hirsutum
  unsure (1)..(595): unsure at all n locations; Clone ID: LIB3825-014-Q1-K6-H3
nncggtcctgcnnttctgctgnnatatcaagnntctgctgnaanaaagccnnagtaattttatttgatgaaaaaaaagatagtaattgttggggtgttccccaaattctccggtcaagagtttgacaactatatggctcttgctgagaaattgcgttctgattatgaatttggtcatactttggatgctaagtaccttccccgtggcgagtcatcagtgactggccctgtcgtcagacttttcaagccttttgatgaactctttgttgacttcaaggattttaatgtggaagctctagagaagtttgttgaagaatctagcattcctcttgtgactctctttaacaatgacccaagcaatcaccccttcattatcaaattctataacagtccccttgcgaaggctatgttgtttgcaaatttgagcaatgaaggagttgattccttaaaatctaaatttcgtgaagttgctgagcaatacaaaggacagggtatcggtttccttttgggagatcttgaggccagtcaagctgccttccagtttttggagttcaagaaagccaatacctttcaatcatcattctgggaaaatgatg

SEQ ID NO: 2524 - DNA, 554 bp, Gossypium hirsutum
  Clone ID: LIB3825-014-Q1-K6-H4
gcttaaactgcagccccataacaaagagatgacctgcttattgttattcttccagaaataatggctctctttatggtataaattttctggtctgaaatttgtttctttaaaaaagatcatgctgatctctgaatcattctatttcccttgcaggtgatttcgaaaaggatttgtgagactgatcttggtattgtttcccagtgctgcttgactaaacatgtatttagaatgagcaaacaatatttggccaatgtggcattgaaaattaatgtaaaggttgggggaagaaatactgttcttgttgatgcaatatcacgaaggatacctcttgtcagtgaccgtccaactataatttttggcgctgatgttacccatcctcaccctggggaggattcaagcccttctattgcagctgttgttgcctctcaagattggccagaggttacaaagtatgctggcctggtttgtgctcaagctcatcgtcaggagctcatccaagatttattcaagacatggcaggatcccgtaagggggactgtttctggtggcatgat

SEQ ID NO: 2525 - DNA, 523 bp, Gossypium hirsutum
  Clone ID: LIB3825-014-Q1-K6-H5
cggccgcgtgggaaaaaaacaaagaagaaaaactcgacagtgaaaagaaaaggaaaaaaaaaccttcaaactgctctctgattcttttaaattgtttttttgatatccctcttttttggtttacaaatgtattcctcagtttttatagccgaaagaagaaaaaagaagaaaaaaataatctctttttacaatttttgctatattttcggtccttctagtgctatccgtggttcgtttgcaggaataacgtgcatggtgggtgcggggcgacgtgcgcaacatgtggggcgacgttggggcggttactgcggcaccagtttgctgctactgcttagggtttctgctgtgttgtgtttttgctgagggccacactgtagttaggctaggctttaggttagtgggctaggtattggatcatttgggtttaggttatttgtaaaaatggactgtgttttttttttttgcttttgtttcttttttatgtgcatttattggagcccgagcttaaaattgattattaaaa

SEQ ID NO: 2526 - DNA, 531 bp, Gossypium hirsutum
  Clone ID: LIB3825-014-Q1-K6-H6
gtattcttggctactgatgtgcagagatggtgatactgcgataggtcgaaagttgagagatggacactcctatggtaatcatgtagaggggaagacctaggcttgtgttgctaatggtaaaaaaaatactagctccatattattgcttttgatgtaagtaagcttcataaaagaactaaaggtgtaaagaaaactgttactgttgtcaacaagggttccaagccggaccctaacaaaaaggctacaaagtagaatagactttgggatgatgcacctccggaggaaaaactggactttactgatccaccggatggaaatggaagtggaaatgacaatatacacattgttgcagcaaatcatggcgaaagtatgatggacatagaacagattatcagcagtgatagtgaaggtgaagtagatgacaacgtgcagaaggatagcaagcctgaagctaagaaaaagggttggttttcttctatgttccagagtattgctggtaaaggctaatttggtagaagaagacctacaacc

SEQ ID NO: 2527 - DNA, 578 bp, Gossypium hirsutum
  Clone ID: LIB3825-014-Q1-K6-H9
ggcgcgtgggcaagttggaagtagaagttgaaatggataaattaaattgtaaaggtcgtcggagcaacagcaagagctcagtcccagccccagccccagcggtttgagtggcttgttttttgcttttaaccatttgcggttcaattcctttgttcgattgttcctcttgcagcttggccatcagcagcagggtggatgtgagatttgttacagtgaaacaacaaaaatggatatgtatcatccaagttcaaggctctcatcacaagaagaaatgcttaataatctcaatcgcaaaggtataggagagccttacctcgtcttgacttccgatcctaagcctcgtctccgttggactgctgacctccatgaccgattcgtcgacgccgtcactcaacttggtggccctaacaaagctacaccaaaggctatcatgcggacaatgaatgtgaaaggcttgactctttttcacttaaagagtcacctgcaggtttcttcattcttttcaatttttacctagtcaatttttttttacaaactcatagtttttgttagaaatgattctcttctggacatattat

SEQ ID NO: 2528 - DNA, 566 bp, Gossypium hirsutum
  Clone ID: LIB3825-014-Q1-N6-A10
gaaaacaaatccagggaagcagcattgaacaagatagaaccacatacatgtgttttacgagttgagagtgtggcaccaaaatttgggttaattgtaaaccatgtattttggggttgcactaaacttttgatatcccttgatgaccttgttcaccgcatctaggaaatctttctctgtcactgtttttcttcgagcccgaatagcatacattccagcctctgtgcacacacttcttatgtcggccccggtagaatttgggcaaagtcgggctaaaagttcaaatctaatatcacgttcacagttcatcgttcttgtatgaattttaaatatctgtgttcgactctccaaatcagggagaccaaactcaaccttacgatctaatcgtccaggacgtaataatgcaagatctagcgtgtccggcctgtttgttgccatcaggactttgatgtttccacgagcatcaaagccatcaagctggttgacaatttcaagcatggtacgctgaacctcattgtctccacccacaccatcatcaaaacgtgcacccccaatggcatcaacttaat

SEQ ID NO: 2529 - DNA, 533 bp, Gossypium hirsutum
  Clone ID: LIB3825-014-Q1-N6-A11
acaatagaatcataggtaattttgcataaatatcttcagagtaccaagaataatttgtcacaaaattataaaacatgttaaaaaaaaaaaaaacaggtagcagacaagctatttgttactttttgtctgccttcatcttggcaacagaatcatcttcatcatccatttaaaaaaaaagtttaacttgtaaaaaagagggtcaaataataacaagttgtagcaattccagccattgaaagaaatatctacttggttttgttactgttgctcctctccgggttttcagagtagttaaactggagccagcttaaaattgaggatagccacgagattgacccaaaaaatttggaaggagcaatgggtttctgccacgtcttttattaataaagacattgaagatgctagttcaccagcacaccaaaaaacttgattgcatcatttcctgtacccattaaccgaagtgcatacactcttaggaaacccatcatagccaaaaggagaaggataagcacccgcttctattatcatctcgg

SEQ ID NO: 2530 - DNA, 568 bp, Gossypium hirsutum
  Clone ID: LIB3825-014-Q1-N6-A7
aattagaacattgaggtcatatagatagaaagaggcctgctcatagatacatacatacatactatgaaagaggattcagtatatgtacaaaaaaagaagaaaacaaaagacgaatacaacataaaattcaaagaccataactgatgaaggaattaagtagaacccgaagtgaataacatcgtgatggccagaccacctccatggataaatcaatgcaggcatatcatcaaaaagtatttcagcttatggttcttgctcaaccttcctgtcattgtcagcaataatctttccacataaagcatcattctgaaccttgagtaccttattttcaatttttagctttgcattctcctccaaaatctgcggtatgcgactattaagattggcatacttccttaacatcgcattttcttccttcagtttctcattttcgagcttcaatggatcagatagaagccctgaaagtgtttccaaaagaatattttgcttctcatggtcgttcttcagctgcaaaagatcactcctcaactgattaatctcttttgcttgatccgtcaaggtttggttc

SEQ ID NO: 2531 - DNA, 556 bp, Gossypium hirsutum
  Clone ID: LIB3825-014-Q1-N6-A8
atccaacaatattttatttgtcaaattaatagatcaagaaaagcatcaatgttacaagtgtgaggcagtagagcaattggctctgtcccatcaaataaatgtaaaagaagaaaattacaactggtcacaaaagaaatgacgaacaaaattcgcaatgaaatttggtggctgctgctgcgtcttgttgacattgacaagtccaaggaggaccaaaatgctgctttggcctacaccttagatcagccttgaaattgacctctcacttgttattaaaatcccaaatccatatttgtaaccttttaagctgctgctcatagatgtccgtttagttaaacttcaaccagacgggatgcttctgtcaaagactgcggccaaaatggtgaaagggcaacaaccttccctattatgattagcgttggtgatactaactccgccgttttgattttatctgcaagatccttaagttttgcaaagaccatgcgctgttgaggtgtggttcctcgctcaaccgcagtggctggtgtatctggtggtaggccatgatgtatcaattttt

SEQ ID NO: 2532 - DNA, 558 bp, Gossypium hirsutum
  Clone ID: LIB3825-014-Q1-N6-A9
gtattattaggtctacttcattcaatatatgtatatcaaagtacagaaaaagggggccaaatgaccccaaatacaaatctgaagaaaacgatatgaatgtctgaccaaaatgaagtcatatcggatgaaaacatgagggtagcctttgtattgtaaaactcggagtctccggcggtcgtatattagtggcaagttaagcaattaattggtgggcgtccacccccaccgtgtcttaaaacattaacgagctcctgctccccgtgccatttgtcaccttctcatgcttcttatatgcttccccattgaaatcgccgccgtcctcatcctcatcctcctcttcctccacctcctcgcagttttcttcttccgacgacagtggcactagccaacaagtcccatgcaagtggccgttcacgcaaacgaaatactccaacctcccgtcacgtgacccgagtcgccgggcggcgctcttgggaacgagccgagccgccgtcatgctccaaactcgggtcccgcagtaaggacacctaacccggtcgtcgaacgctacttgccgtc

SEQ ID NO: 2533 - DNA, 559 bp, Gossypium hirsutum
  Clone ID: LIB3825-014-Q1-N6-B10
ggatgaaaacatattcttcaaatggttttgtagaattcaactcaaaagctttgaaacgggtaattaaatatatctaaacttaatactaggaaaccaaaatagcgcttaggccccaacgcctaccaatatccccatccgaatacattaagataaagaaacgactcaaagatccttccaaacatttttaaacaaaatcttaaaaaaagactaagaaccagaaggcaactgatctttgccgaatagttgctattatgattgcaacaccatcatcatcttaataacgaccaattccccaaactctgataacaccatctgtatacccactgaacaacgtgcttccatctgcactccagttcaagcttgtgcaatatatcaccttctttttgtttgcgttgtcagtggctgcagatgtctcagcctcggccttgaggtcaaccttcaagtcttcgactatgctcttgctttccaaatcccagatcttgatgctctgctccgttgcagcacaaagccagtacctattaggactaaagcaaagcgagtgaattacggcaccagcttc

SEQ ID NO: 2534 - DNA, 553 bp, Gossypium hirsutum
  unsure (1)..(553): unsure at all n locations; Clone ID: LIB3825-014-Q1-N6-B11
accaaaaaaaaaaaaaaaaaaaaaaaaaaaaaagggcgggccgcccttcttttttttttttnttctttaatcattcccaacttttattgatttataaaactgccctggctaaccctataacattacaacaggaccaaacttttttttatatggtacaacagtccgatcttgaaaaaaaaaaaagttgaagcaaacaaacaacaaacacagactcaaggcagtagcagagcacaaaaactcgctcctttcatttaataggatccataataaggatcatcctgggtacctccgcgggtgttccttctagtcccagcattgttaaaccccccatttgggaagtcttggttccccgttgtaccgaaagcaccctttgtatttccgccaaaccccatactgttgaggtcattttgcctgcctgtatcatacccactacctgcgggggggtacccacggttgtcatgtccaccggtccccccatagccaccagtgtcgcctatgttgtacccagctgtggggtagccagtgccaccaataccaccaccaccagcttggc

SEQ ID NO: 2535 - DNA, 65 bp, Gossypium hirsutum
  Clone ID: LIB3825-014-Q1-N6-B12
gctgaactaaaagatcaactctactcgatgaaaaaaacagtcaaacatagtgtcgtgaaaactat

SEQ ID NO: 2536 - DNA, 137 bp, Gossypium hirsutum
  Clone ID: LIB3825-014-Q1-N6-B7
aatagtaccaaaatatgaacaaaatctacataagtaaacaaataaatatgcagattagtacatgccacacacctattcatcaaatcaatcaaggctacatactttatttccccatcaaggaaaaaggcaaaggaccc

SEQ ID NO: 2537 - DNA, 560 bp, Gossypium hirsutum
  Clone ID: LIB3825-014-Q1-N6-B8
gaagcaaacaagacatgacagttttgttctgtttttagtctgtacatgaaaaaacaaagggattcaaaaaccagttacctaatttaaacttatgtctttttttttattttctctaaatccaaatttaagctctaataataataagctttgtgtcgcttttgcttattatataattattgtcattcttaagcaacactgatgatgttattgttatctccactgctaaagtttggcatcacctgaaatggagaatgcctggaagttgaagatgatgatgaatccatttgatcggattgcaaagacagcttgagtgacagcgataaaggatccgtcgcaggatttaagtctgtgttgagatcggatctctgaagagctgggaaatttggaaccggacggatgagatttgccgttggaacattgttattcaattgattcccctgtgctattgtgagattttcagtcggattctgaattggaaccggcggaactacctggttaaaggccatgggaaaaagtcgccggcataatgggaaacacattggtttcagatggctgagttg

SEQ ID NO: 2538 - DNA, 56 bp, Gossypium hirsutum
  Clone ID: LIB3825-014-Q1-N6-C10
tttttttttttttttttttttttttttttttttttttttttttttttttttttttt

SEQ ID NO: 2539 - DNA, 493 bp, Gossypium hirsutum
  Clone ID: LIB3825-014-Q1-N6-C11
atgcttggtttttaccgggaaaaaggggaccaacaaccccggggggaccaggggggacaaccgggcggcccccccgggcagcccgggaagacggcgagagggggggggggggggagaagggggggcggggagaaggcgagaggagggcgggggggaaacagaaaacgggcgccggggggacaaaagagagagccaacaaaaaaaaaaaagggagcgcacaggggaaaaaagggagaagccaaagggggagaaaaaggggcaaaaaccaagcgggcaaaacgcaggaaaaagcggggggaaaaaaggaaaaaaaaggggagcaaagggggaaaaaagagacggccaacagcggaaagagggggaacccccaacccagcgaaagggggaacaaccggaccacgcagaaacggcaaaaagggcaaaaaacccgcccaaaaggggcaaaaaaagggggaaaaaaggagcaaaacccggaagcccaacggggcaaaaa

SEQ ID NO: 2540 - DNA, 480 bp, Gossypium hirsutum
  Clone ID: LIB3825-014-Q1-N6-C7
gggaaaaaaaaaaaccgggttttttttaccggggaaatttggggggggccccctcctttggcccttttgggccgaaaccaaaacaattttaagccccaagacccccagttggggggggggggaaaattttctaaaaatggcccccctaaaaactggcccaacgggaaacatttaaggccccccataacctgggggggcgggaaaaaatttgggtttccctcccatgggcccccccttccattatggggggatttttttggggggggggggggcccccctttttatgggggttttattgggggccatttgggttcccggaaccccggccaatctatacgggggtgcccctcgccaagttcaacattaattcccgggggggggcccctccaaaatccaggaggggggtggcttaatctttgggcgggaaacaaaaaacggggcccgttttggggttgcccccccttttaagggcccccattt

SEQ ID NO: 2541 - DNA, 574 bp, Gossypium hirsutum
  Clone ID: LIB3825-014-Q1-N6-C8
gccgccccccccccccccccccccccccctctctttttcttggaatacaaagctgtgtgatatagaactaagatttccacgcctttgttttggcttgaaatataacagacactaatggtatgtagtactttatcaccctaatccctttaacaagctctttaagttaatacactcgtacgggtacaacacaaaccactgtaaaataatattacaaaccttttcttgtatcataacaggacttggctagcaacaaggatagatagattctcaggttggcttttgcttctcccggttagcatcgatttgctggcttgttctttagtcagtatttcatctggtcgtcaatgaaggatgacttcaatcatggtttctctgttaaaattcttcttgcggtgtctgtaactgtaaaacgaaccccttcataggaagtaagatagttgctccttttttcttgaacccccttctccgtacaagtcattccactgttttaactcattcattccagctccctcagatgcgaagctagccgccacctgattctttgcttgcctgaaatcttccatagacaatggcc

SEQ ID NO: 2542 - DNA, 570 bp, Gossypium hirsutum
  Clone ID: LIB3825-014-Q1-N6-C9
ggaataaaacacataaatatcaattgaaaagattagcatttttcagaggtgctgaaactagataaagaaaggggacaaatgacaaaagatgtaatagcctggataactgtaaaaataatagcacaaaaagacataaccatccctatttctttcagctcttctgaaacttttccacatatgcctgtacaagtttgctaagctttggttttgaaaatgacagatattgatcaattttttcaggtgtttgcggaatattagtcccttgaactgtagcaatcactttgtcaacaaccttcttcacaatgtttttgtaagcctctttgccaatttgaccttccttccatgtcggtttgaggagatccttgacaaactcaacgagtgcaaatttaaatgcacgaattcccttactatccttgttcttcttggcctcatcagtcttgtcatcagcatctccactctctgatgggccattctccccttcagctttcttggtttcctcaactccttcatttttcttctttgcctcggaacttgcaacaggctccagctgatttggcttatggctatcaa

SEQ ID NO: 2543 - DNA, 538 bp, Gossypium hirsutum
  Clone ID: LIB3825-014-Q1-N6-D10
gaagcaaatccaagctctcaaagctcttaagatgtcacttttcttatgcaaatgaaatcatgttaaagaacaatacatgctcataaatagtaccaaaaaaagggtttagagaaagttttactattacattcctgcaaatatgatgaaaattgcaaattctggagagatactaaaattgaaaaggacaatgggattttcggtatttgttcgagaaaggaacaacttccatcaaagaatcccggttatagcaacagtacctgaaagttggcatcaaatcttcctctcctacgagtacgtgtgcttccccatcagatgcttcatcaagtgcttccccatcttcgttctcttgatcatcagtttccattgcatcttccggttcctcttcatcactttcatccgtgtcctcaaatattactggaattgcagcattctcaacaaactcatcctcaacaacccctgcataaaggaagtctaagcaacttgatatttgaagagctgattcaaaagttgagactctagattcaataagctgatacaa

SEQ ID NO: 2544 - DNA, 572 bp, Gossypium hirsutum
  Clone ID: LIB3825-014-Q1-N6-D7
accaaaaataactgttttccagtaccatttttaatctcaacatgaaaattaaaaaagaaaaagaaagtaagaacatagaatatatatgtgtatataaatcagtcatcggcaacccaactcaactcttccttcagcacggatgcttgtgttggtaaaaagcttctgaagatcaatgtaaccgatgatggtatcttcgaaaactgcatcttcaagcggcgcattgtcgaatgttgaaccagataacactgtgttcttgaatatagctccttgcagattcgcttttccgaaattaactcaatccaaaaccgcattcgagaagtctgtacctttgaagctagctccaacagcataagcctttgacatcacagcttcagacatgtctgcaccatcaaacttagcatccgacataagtgcagccgcaacagatttccccttcaggttcgatttctcgttagtgtaatcgcagaagcgtagatcgagcggcttattgtacacaccattttgcctgacatatggtgttaccaacgaatgcacgctcgcatcggttcggctccgttgacaacggaggaagc

SEQ ID NO: 2545 - DNA, 546 bp, Gossypium hirsutum
  Clone ID: LIB3825-014-Q1-N6-D8
aaagtggtaatttagtgaattttctgctttagcttaaagttaagcacactacactctttataagaaatactaccgatattaagaaaaagatttgaactcaaaaccaaaacaaaatacaaaggcacccaaacatctgcaaaacattctggctctgctctgctacggtgatcacatgcggtggcaagtttctactgtgatctaaccctgtgattcaacatcatctcccggagatccgccgcatcgatctcagccccacagttctccggccggtaataccccgtaacagggtcaggcgcccaagctgaagaataagcccttgtctccgacgacgacgactctttcatcgcatatcttcgttccactttccccatcgctccaggcctaccaaagctagccgtcactgccgccggcggtgcacctgagtaacctctccttgatatggagacataaagagcatcaaaaacagaagcaccaaggaacttaaaggaagaaacagagcgagccatatttatttttacttgcttatatatggagtcgtagggtaaa

SEQ ID NO: 2546 - DNA, 573 bp, Gossypium hirsutum
  Clone ID: LIB3825-014-Q1-N6-D9
agaaaaacaaatacggtcacattcttcattgcaaagcttaaaagtgttggaaggttttaccaaagtataactacacaaactccaaaagaaagctttaaaacgaagggtacaaaacaaagtaaaaggaaaaagaaaatccatctacctctacttaggagcaattttggacaatcaagcacagccaagtgacgcattgtaattagattgcagagaaagtatccaacatttggataatggaggccaaaacagcataccattgagaacaaagagctcagtactcccacttcttcagttccataccatccggaggacttccttccaccttctttacaccaacttctttccagtttgtcgaaagaacagtcccatttgattccacaaaggatttctgcatggcccttcttgcatcctcgtcagcatcctgataaatgtcgcggaaaaatttattcaaagctgcatcaccatctagcttttcatctttctcctcctttttcacttgagcttcgattttatcccaatcaaccctttttggtttggaggatgggtacgatggtctttgatttgcagcaacag

SEQ ID NO: 2547 - DNA, 559 bp, Gossypium hirsutum
  unsure (1)..(559): unsure at all n locations; Clone ID: LIB3825-014-Q1-N6-E11
ctctaatattcccaattttcttgatttactagactgccctggctaaccctataacattacaacaggaccaaacttctttttatatggtacaacagtacgatcttgaaaaaaaaaaagtagaagcaaacaaacaacaaacacagactcaaggcagtagcagagcacaaaaactcgctcctttcatttaataggatcgataataaggatcatcctgggtacctccgcgggtgttccttctagtcccagcattgttagacgccgcatttgggaagtcttggttccccgttgtaccgtaagcaccctctgtatctccgccaaaccccatactgctgaggtcatcttgcctgcctgtatcatacccactacctgcggtggggtacccacggttgtcatgtccaccggtaccgccatagccaccagtgtcgcctatgttgtacccagctgtggtgtagccagtgccaccaataccaccaccaccagcatggccagctgtggcgttatgatggcgggcctcttgtttcctcagctctgcatcttcttgnctctcttctttcctttc

SEQ ID NO: 2548 - DNA, 568 bp, Gossypium hirsutum
  Clone ID: LIB3825-014-Q1-N6-E12
accacaaatctaatatattagtatattacccattatttcacaactaggagaaaaagaagaagataaaatcaacatgcacgaaaatcgcaaagacgaaagacttctcgaaaatgaaacacacttaaagtacattttacaagcaagcaaagcaaccttccatggttcatattcatgtcctaccaccctcatgagccttgttttcgatagtctgcccagcttccttagtcttttgtcccacataccccaccatatcttgcatgcccctcttggcccggtccgcgtcgagctgctcggtgccagtcgcctgtctgaagcggttaaatacgtaggagagcgaggacagtcccgtcaacccaaaagccccggacgacaagaaaccggccacagccatgaaaaccgcgatggcagctgggagcagaaccgggctgaagatgacgaagagtggcgttgccacgcataggccgatgacggtgccggtgagggttagcccggctaatgcaaggagagtgccgccgatgggaaggagggtgaggacggttagaacttgggttgttgatggtccgctttg

SEQ ID NO: 2549 - DNA, 553 bp, Gossypium hirsutum
  unsure (1)..(553): unsure at all n locations; Clone ID: LIB3825-014-Q1-N6-E7
gaacatcgaagttgacgattcataatagcgtccaaagacaaacttaaaatattaaaacaaagatctaatagcagtacacccatggaaagttcngaaaaccacatagctaataataatcccagataagcttccagacacattatttaaaaccaaaaaaaggccaccaacaacggcaaacaatccttacctagaaaccaccgcgaaggcgaaggacaagatgcagagtagactccttttggatattataatcagccaatgtcctgccatcttcaagttgcttgccagcaaatatgagcctttgctggtctggtgggatcccttccttgtcttgaatctttgccttaagattgtcaatggtgtctgaactttcaacctctagagtgatagtctttccagtaagagtcttaacaaagatctgcatcccaccacgcagccgcaacaccaaatgaagggtagactccttttggatattgtagtcggccaatgtcctaccatcttcgagctgcttgccagcaaagatgagcctttgctggtctggggggataccctcctt

SEQ ID NO: 2550 - DNA, 554 bp, Gossypium hirsutum
  unsure (1)..(554): unsure at all n locations; Clone ID: LIB3825-014-Q1-N6-E8
ggagctgaaaaatctttacatatgagaagggagagcaatataaatggggctgcaattaaaaagaatatttattgaagcaggtccatgacattgtgaaatcctttttctagtttcctagttcaatcgtctcctcctatgcgcccgagagtcaccgctgtcgacatccgagaccctcaatacatcgtttcttcttctagaagacgaagccgaaagtgaaaccacagaatctatctcgacggccgtgtccatttgactctccgagtttattacagcagcaatgcttgagaacgagtcccgatcatcgacaactgctgctggtgcttgctcctgatttcttcccaccgggttgcctcggaatattgcctcaaccatcctttcagctgaattgagtgccgatgatagagaagtcagtcttgcagctcttcgtaagtgtgattgccgttgaaggtacaaagagtgaatccgggaggacaccacgtcggtacttgttgtactactgggtgtcaagtcaacatcatcgaggggcacaactgcgttntgctctccacgtaatc

SEQ ID NO: 2551 - DNA, 567 bp, Gossypium hirsutum
  unsure (1)..(567): unsure at all n locations; Clone ID: LIB3825-014-Q1-N6-E9
atggggactgcagcagttctgttctcttatatacgctatatgtggctgcttcaagtaaccgcatttctaaagggagaatactttttttctttctttttttcttgcgatgtaggcaagggtgaatgggaactgattgcagaaagtcccggttttgattgagcaggcggtcaagccgaagcttcgaaagcgtgaagccgtggagaaaaagaaattctaggtctttgaccttctttctatcgacttggcttaaggtggtcaagatccgggcgcatagccaacttgaaagaaggtttctgaaccgtgatgaaatccgtttcgttgctcactagaactggttctattcgaatttcgttccagagcgggggaagaacagccagtggagtgggattgcagtagaggtcttttcttttcctgttcacgaatcccattcaggttctcggtaagacgagggtacgatttcatctgttggaggcgtaactgcagcagttagctctactctaaaggtggttccgttctcctcggatgagaataggtagctgntagaatagtagtagcggggtgactttc

SEQ ID NO: 2552 - DNA, 533 bp, Gossypium hirsutum
  Clone ID: LIB3825-014-Q1-N6-F10
actgaactggaattttccttttctactgttgaaagcatcttttattacatatctatatatttcccagcagggaggcatttccctcgcctttttttcttcttcggatgcttaatatgaaagtcaaatggaacatcctcaaatatgagggaaaaaatacataaaaatttaatttgatgcgaataaggcagttaactgactgatcaatgagcatatacatgaaataaatcctttgccttatgggttttaagatcatatcatcttctcgaatttatcaagcttcttcaccctttgcattgacctaagaaaaagtgtcaagaaaactcctgctccaacgaatgatccgtttgcaataatttggcttccctgactgctgaaggtgacacctaggtttagcagggtccctcctagtactgtgtacatggttgccatttgcagaattgttgccttccgtgctgctctctcagactctagcacccggactcggagtctcaaatctcccgactcaagttgtttaaggatttcctctattcgct

SEQ ID NO: 2553 - DNA, 466 bp, Gossypium hirsutum
  Clone ID: LIB3825-014-Q1-N6-F12
aaaaaaaaacggggaatatgatcttatatcctccaaagtaaaatacaatccatcaatccttgcatcaattataattaacgatttttacactcgaaagtttataaggattagtaacatataatgacactttccgtttcaaccatacactcaatttatgtactcaaatcacgacaggggaagggacccaagaaagggttaaattaaagaaatgagagatgaggaaaatgggatacttggagtggtccaaaattctttttaagaaaaagaactgatgaaaattttatataaaatcgtattctgggtttctgttttccttttgttctttttatataaatactcttcatattaaaggattgagtaggcacgaatgacctcaactaccggtgcccgacacattggacattttcctccaacatggaccagctcattggcacattttgagcacgtgcacatgtgcccacatctg

SEQ ID NO: 2554 - DNA, 558 bp, Gossypium hirsutum
  Clone ID: LIB3825-014-Q1-N6-F8
atcatgaaactataacccatattctctctattaatttttgggtggcttttatttatacatcatttcctggtattcctgatcaaacgagaaaaaaagcctccatagcggaacagatacaaaagcagaagcaaaaccatggaaacaaaaacaccacaatagtccacccaccctatatatatatatactctcacatacaccaaaggaatgtgcagtgctttaaagatcacagattggttttgtccgatcgatcataaacaccttcatcattcacacgccccacgtcgttgaaagtttggccactcatctgatcagatgctttcagtgtagaagcaaaagctcctggtcgcgtatcttcaactttcaccaccaccctctctgaaaccccacgaccaccatcattacctttcagcttcatctcttccattttctgtctagctgactccgttgtttcgctcaacttttccttggttctatctgcagtttcggatgccgtgtgcttcgtttcttcagtttttccagtgaggaagcccatggccttcctagcagcatcagcagctg

SEQ ID NO: 2555 - DNA, 398 bp, Gossypium hirsutum
  Clone ID: LIB3825-014-Q1-N6-F9
aaaaccgggggaaaaaaagcaccccaaaggcctgggtttttaaaaaattttaaaaggtaacttaaaaccccccccccaaacaaaggaaggcccctaaaatggggaaaaaaaagcgggggtaaggggggggcccattgaaaataagggccccaaacaaaaaagcgggaccccccccattttaattaacaaatggggggggcggaaaaagccccttgcccccctggaaaaaacttaatccaaccccccaggggaacccccccggtttttttttttttttgggaaaaacctggggggggaaaaagattgctaaaaacagggggagaaactgttcctgaaggacccaaaaactttaaaagcagcggccctaaggaagttcggggggggccccttcttggggg

SEQ ID NO: 2556 - DNA, 565 bp, Gossypium hirsutum
  Clone ID: LIB3825-014-Q1-N6-G11
atggtaatatatttttattagcacgatacaaaccagtgaaactgcacataattcaacttaaaagctactaagagttttttaacttaaaattaaccaaaatttattgtcccttttttcttttgtcacccttaatattagcgatatgcaactaggatgatggtttcagtaacgatgaggatgatgcgagaggctcgtgaacgacagaattcgaagaaatcgagatcgggttgccttctaactgcagcatgacactccctaagatctccgtcaatagtttcttgaactcatcttctttaaccgctttcccgtcgtccgcgtttatcatgtctaaagcatcggcaacgaccttgtcgatctgttcaactgcacctattggaggtaaactggcagaaggtgccactacgtctagcacaacgcgcaagtactcctttgatactttaccgttacgatctttcgggacattctctaaagccgtattaagcaacttgtctagttcgaacttgttggatagtagtcttttaatgccgctcccatcgaaagtgttctcactatgggcgacgattac

SEQ ID NO: 2557 - DNA, 274 bp, Gossypium hirsutum
  Clone ID: LIB3825-014-Q1-N6-G12
ccccaaaaacaaaatgggtttaattgttccaaaccctacgatcaaccttaaacactccccatagattttcatgatctatgggcttaaccttaaagggctttatcacgggccataatctttttttattatgtaaaaagttcgggggctaaaaacctttaatttagataacaaaatcaaggggggggctttggggatataattgaaatcggggttttatcagggagtcccagtgggggggccacctttgtttaagttgggggtttttggaactgat

SEQ ID NO: 2558 - DNA, 257 bp, Gossypium hirsutum
  Clone ID: LIB3825-014-Q1-N6-G8
gggacccggggggggccccgggggcccccccggaaatccgggaccgggcccgggaggggacccacttttccctaaaggggggcgaataaaagctgggggaaaaaagggaaaaagcggttcccggggaaaaaaggtaaccccctaaaaatcccaaaaaaaaaacaacccgaaagaaaaaagggaaaacccgggggggccaaaagagggaccaaacccaaataaatgggggggccccaacggccccttttcaaagggaa

SEQ ID NO: 2559 - DNA, 569 bp, Gossypium hirsutum
  Clone ID: LIB3825-014-Q1-N6-H10
aaaaaaactataaaggaacttgtcattctcttcctataatccatcaatagaatagcacaaactgattccatattagagcataaactaaaccagtccatgatatctgcaaaaatctcttcgaataatcgccctctgctagtgcctaaaacaggatatcaatttcgaattgctctacttgttgactaaattattctcactaactcactataattatcttcaattttccccatgtttttcttttttttgtaaaaattgatgggattaagctatcttactatacattcaatctctcctggcttgtgaactccacttctccaactaaggccatccgatttttcgtcgtcttcgccgtccatactgtcaccgccggtactcgacattcctttagccaaagcactcacggtgaggggacattgtggagaaccagactgtgatttcatgttctcactgcactggtttcgagctgaagaaggcggaagttttcggatatggagtctatatttctgcaaatggcttttcacttcatcattggtgagatcatcaacttgcatcacttctttaatctgttt

SEQ ID NO: 2560 - DNA, 461 bp, Gossypium hirsutum
  Clone ID: LIB3825-014-Q1-N6-H12
gaaatataaaactaggatttgtttaaaaagcaaatcaaaaagtctcacaaaaagtaaattctaaagtccaaatttaagataattgtccaaagctgtaatgaaaactgatataattctctctcaaataatctctcatttcttcttggcagcagatttggtgaccttagcaccagttgggtccttcttctcaacactcttgatgacaccgacggcaacagtctggcgcatgtcacggacagcaaaacgtccaagtggtgggtattcagagaaagtctcaacaaccatgggtttggtgggaatcatctttaccatacctgcatcaccgttcttcaagaacttgggttccttctcgagttccttgccagatcgtctgtcaatcttggtcaacagttcggaaaatttgacagcaatgtgagaggtgtggcagtcgaggactggggcataaccatttccaatttggc

SEQ ID NO: 2561 - DNA, 570 bp, Gossypium hirsutum
  Clone ID: LIB3825-014-Q1-N6-H9
cattcctagtttggaattcagagattccataaatttccaataaaatcagcatacgtcaatatattctaagagactgacatgtttttgctattttagagcactgcataagcaactttggatttacaattttgagacaaactctcactaataaccaatagatatatcaccatcttttttcacttgatactataataataacttgagcaaacataaaagagtagcactcattttccatctctacattccatatccagttagcccttggggattaaccctggtatcaccccatatcacagatcctgttgttgcctccatgttgaccatctttttcttcccttcaacaggtgatccctccattgttaatcctcctggactctcctgtgaagttaggcagctttcagtagaaccatcgcccctctgtgaatgcagaccggatggcatttcttcttcctggtcgcatgcattctccacctcagcggattgggaggagtaaaatcccagtggatcaacagaataatttctcagcatcttacaaccaaattccaggttatctgtttcggtaactgcacc

SEQ ID NO: 2562 - DNA, 516 bp, Gossypium hirsutum
  unsure (1)..(516): unsure at all n locations; Clone ID: LIB3825-015-Q1-N6-A1
aaacaaaaaatctaaatcttaatagtccattaaatgtccatttacagactttgacccaatcactaacccaatacccaaattaatatcctagcctaagattacacggcacagaggcccaaaggttaaaacaatttcagaaaccctaggtttcttaggtgcgccgcagccaacgccctatgtacggcctccatgcgcccaaagcctggctccgtaccctccagcgctccaccagtcacgccccacgtcaagcgccacgtaccaccgcgccaacgggcctccgtacctgcaaagaaacagacaaacaatagcagcaacaatagccaatacgaaagcaaataaagaaaaattgnattttttttattttgaacattcggctataaagccagggggaatcgattgtatttnttttacacacatatgcatagagaatagaagagcantaaaaaattattgaaagatgatttcaagcaccttatatttttgttcttcgaatctgtttcatttttttttcttttc

SEQ ID NO: 2563 - DNA, 280 bp, Gossypium hirsutum
  Clone ID: LIB3825-015-Q1-N6-A10
tctatcctactactcgtgtccctaagggggacgcatgacgaccgcagtacttctattaaatatatccgactatgcgcgcagtactatttactaatactcggtgattctgactgataggctaataagcataacctactgcacggtatatttataccactgtctactaacctacacacattgagcactttagtaatttaacgtacattatatatctaaaactaacaactaatttcaaattcacatcacatacggaaaactaagcttgctgatcaatatctaa

SEQ ID NO: 2564 - DNA, 482 bp, Gossypium hirsutum
  Clone ID: LIB3825-015-Q1-N6-A11
agattcaacgtctcaacttagatgatttcatgcacaatcattttccgcctgttactgttgtcgttgctaccgggctttcccctactgcttgaactgctaccgctcttgccaccacctcgattactactttgatgtatcggcgggctttgtagttgcgatcccggttgttgcagaacatatccaacccggccatcgggtaaaagcatcggcatcattgacatgccagtaggtgttggtcctcttccatagattacaggctggggaaggcctgcaacaccgtatcctggacctagagcaccataggcacccccaacgggaccatacccgacctgagggggataactaggaagaaaaccagaattctgagaacttgaaccccctgaggtcttttgatcagtttgtggctttgcaagaaaacactctacaacttgtccatccaattcatatttttctgagctcttggatgctttcatggcacaaga

SEQ ID NO: 2565 - DNA, 359 bp, Gossypium hirsutum
  Clone ID: LIB3825-015-Q1-N6-A12
aaagtctcagcagtggataaatatttaaattattgaacaacaatggattaatttacacaaacatccatgaaaagtaatgaaaaaatgaggtaagtaggaatttttccacatgttccccggttctgtcgtgttcgaattttcttatagctgaaaatcatgtacaacacaagacaatttttgtagcgagtatgcagggcataatatgtgcctaaagatctatttttccagcggtttcctcatcctccgaggcagcatattcatcttcacttagttttttgtcacttgacttcacttcttctgctcctacaacatcttcaggcttgacatatttctcacagtcttctggtccacgaaaagag

SEQ ID NO: 2566 - DNA, 557 bp, Gossypium hirsutum
  unsure (1)..(557): unsure at all n locations; Clone ID: LIB3825-015-Q1-N6-A5
tttttttttttttttttttttttttttttttttttttttttttttttttttttttttttttttttttttttttttttttttttttttttttttttttttttttttttttttttttttttttttttttttttttaaaaaagaaaaaaaagagggggtaaaaaaaaaggaaattaaaagggggggggttgaaaaaaaaaggggaaaaaaaagggaaaaaaaaaaaaaaaaatttttttaaaaaaaaaaaaaaaattccaaaccggggggaaaaaaaaaaaaaaatttaaaaaaaaaaaattttaaaagggggaatggcaaaaaaaaaaattttaaaaaaaaatcaaaaaaagggaacacaaaagggccttttatttttaaaaaaatttttttgggggggaacaaaaaaaaggggtcaaaaaaattcccagagaggggggggggcccggaaaaatgcggagagaagccggaaggggaaaaaaattcaaaaaaagagggggaattaaaagggggggaaaaaaaaagaaaaaaggatnncccgggggaaaaatgttaaccag

SEQ ID NO: 2567 - DNA, 420 bp, Gossypium hirsutum
  Clone ID: LIB3825-015-Q1-N6-A6
aaaaagaaaaaaaaggggggtttaaccaaaaaaaaaaaaaaattttgggcaaaaaaaaaaaaaaaataaaggaaaaaagggggggtaaaaaaaaaaaaaaagggggggggggggtcctaaaaaaaaaaaaagggggggaaaggcccaaaacggaaaacaaaaaaaaatttcaaaaaaaaaaggggggttttttttaaaaaaaacgggggttttgggaaaaaaaaaaaaaaaaaggggggatttttaaaaaaaaaaaaaaaaaccccaaaagggggggtaaaaaaaaaccaacgggtgggggatgaaaaaaatcccgggggaacggggggggcacccggaaaatccgggacgggccccggaggggcaaaaatttttcttaaaagggggggaaaaaaagggggggaaaaaaaaggggaaaaa

SEQ ID NO: 2568 - DNA, 177 bp, Gossypium hirsutum
  Clone ID: LIB3825-015-Q1-N6-A7
gatgaagttaaagaccatttcaattgaaagccaaatctccaacacagttctaccacaaatgactaattacaccccattcataaaccatacattcaagccacgaaaatgaagatgtcatatgatgataacccattgccaaagtcctcatttccttatatattcacacttgcaaatccc

SEQ ID NO: 2569 - DNA, 554 bp, Gossypium hirsutum
  unsure (1)..(554): unsure at all n locations; Clone ID: LIB3825-015-Q1-N6-A8
gaagcattaatctaacataaataaaaacagaaaacaacagaagcaaacaagacatgacagttttgttctgtttttagtctgtacatgaaaaacaaagggattcaaaaaccagttacctaatttaaacttatgtctttttttttattttctctaaatccaaatttaagctctaataataataagctttgtgtcgcttttgcttattatataattattgtcattcttaagcaacactgatgatgttattgttatctccactgctaaagtttggcatcacctgaaatggagaatgcctggaagttgaagatgatgatgaatccatttgatcggattgcaaagacagcttgagtgacagcgataaaggatccgtcgcaggatttaagtctgtgttgagatcggatctctgaagagctgggaaatttggaaccggacggatgagatttgccgttggaacattgttattcaattgattcccctgtgctattgtgagattttcagncggattctgaattggaaccggnggaactacctggttaaaggccatgggaaaagtc

SEQ ID NO: 2570 - DNA, 547 bp, Gossypium hirsutum
  unsure (1)..(547): unsure at all n locations; Clone ID: LIB3825-015-Q1-N6-A9
aagttcaaacaagacaacttcaagcctcaaaggaatcaaaatgtccataaaaacatagttacgtaaaacattcaaaatgtgaaccaaaaatcacacttctttttttctttttaccagggaacaccaaaaatagtcgtgacattatactttgtgatcttaatgagttttgtttctcatccaaaaagagaacatcaaaaagctgatgcataagaatagcagtgtcttaccccttgtaccagggaaccatccaaaaattgacattgaaaatgcaaaccaaaaatcactttgcagtcaagatcttgatcacggatgcagtcccaatccgatgcagagcaacaatcgaatccccattttggcataatccctttgccttggcatgctgaatagcaaactccaatgcttcctctgttgtctcttcatgagaagctctggcagatccagcatataaaactgggatcaaaccccgatacactaagctgtgccttgctggagcttcatcactgcacgaccaatcgaacgaatcantntggatttcggggacaaccat

SEQ ID NO: 2571 - DNA, 195 bp, Gossypium hirsutum
  Clone ID: LIB3825-015-Q1-N6-B1
cagaaaacaaattcaaatagcaatttaactgtaaatacagcatctaaagctcacatacattaggtttcctcgagtaccaaataacccaataatcatacattagacttgcataaatcaaataggtaggttacaacttgcaacttttatgatcataactacaatgcggcaataacttcttcccctctaaaagtttag

SEQ ID NO: 2572 - DNA, 557 bp, Gossypium hirsutum
  Clone ID: LIB3825-015-Q1-N6-B10
caaaaggaaatgagggtcagattaaaaagtcaaccataatttcagatagaggtttgatagcaggagtcataagcaacaattatgagaaaaaaagtcggtagaagtttacaatatctcaaactgaaatgtataacaaggcaaggcttaaatagaaaaaagtttaggctgccgtctcctttttaagtttagctagctcctgcctaacgattccagccttcttaatctttgccaacatgagcttgaacctatcaaaatcattaagcgatgcccgtcttttctggacgatcagcttcctgccccatgaactgttctcccacttgctcttcacatcagctttttccatagcatcaatcaaggtcttcttcttaggaaccctattaatatcaatcttgatatcagtgagagtcagtcttttaaagttcatttggcttcttaccgtatcaggtgcatcaacaagagccctgttttgatcaacgacatcgacaatgacaacaagcttgccgtagtcctttccgtagttaaccaaagctactcttccaatttccacgtacctcttg

SEQ ID NO: 2573 - DNA, 547 bp, Gossypium hirsutum
  Clone ID: LIB3825-015-Q1-N6-B11
cttctaaacagctagaatatacttcatttatattgtagacatagttacaacctaacttccaaaatgacagatctatgccattgcacactaccttaacaaaccaactgcaacatttcatagtaggctacaacagtgccatttaaaacaaaagcgccatagttcaagaccagattcctttgaaaagtggagtagtagatgcagtgtccccaaaagtcctcaccaaatccgaacaagaaggatctgcttccccttcagtctccagttccaaccccagttctttatcaatatcatcggatgccgatatgagtagaaactcacatccttcgtagttcaaaaagtcgggtggatcagccggatggtatcgggtattcccaaaccgggcttgcaggtgagcagggaaggctgcctttcgtttgtttccaactcccctaaactgggaattgctagcttgtgatgggttcttgatttgtatcaagaaggagccttctcgctcgatgttaagtgattcttggggttcattctcttcttcttttggtggagggaattc

SEQ ID NO: 2574 - DNA, 547 bp, Gossypium hirsutum
  Clone ID: LIB3825-015-Q1-N6-B12
gggactgaaaacttttctagcaccccggaattcaataccttcacagcttcctcagatttaatacaagaaggtgtcttgtattggttgatagaagccccctttgatacataaaagtccataagcgcatcaaatgttccatgctttaccactcttacctctaatgctgcaattttattggcctctctaagggacttatatgtgaaatccaatgattcttctactatggagcagcattcttccattatcttggcatcaagttttagccatctattcctttctttgaacttgagttcccaaaacaatacataccggcctggtatcgatgaagtctccgcatagctactgaatgtcatcagtacgaaaccaagtggttcaagatggcgttttgcgttcccgatggccttcaagaggtcttcctcgcttgttttgtccatatcaatactcaaaacagtattccgtcgttcgacaaactggaactgcggagagttgttatggaaaccggttaacttgagaacgtccccaactcggtatcgatacaggcccgcga

SEQ ID NO: 2575 - DNA, 569 bp, Gossypium hirsutum
  Clone ID: LIB3825-015-Q1-N6-B2
gaaaataaatcaatatttaatttcggatcgtgttgaagttgaattatattggggtatatcgggtcggaattggggcagacaaaaaaccggtcgtcccgcccggcccatcactatttgtatatgtaatttccactacaattaaagcttaaaagactaacaacaatgaacccaaatatacgaggaaaactttaatgtctcacaagaaattactacaaaacttaacccaaaaaattctaatgataaagttgtcggtctcaaacaaaattttaaaagttttcataaactaaaagaaaaccaataaattactcatcatcatcgtcaatgactttggtgcccaagcctttcagtccttcagctgggatttcagcaacagttaccaaagagtagagctcttcctttgcatcttcgtcatcgtttctcctccgagcaatacgaaccctaatccttcttgggacacttcggatccctcggctccatatgtgcttgttcagcttcacgtcgactcgtacatcctttgtccccatggctttttcggcaaatttcctgatctcctttatagccttgggagc

SEQ ID NO: 2576 - DNA, 547 bp, Gossypium hirsutum
  Clone ID: LIB3825-015-Q1-N6-B3
ctctaattattcccaacttttattgatttatagaactgccctggctaaccctataacattacaacaggaccaaacttctttttatatggtacaacagtacgatcttgaaaaagaaaaagtagaagcaaacaaacaacaaacacagactcaaggcagtagcagagcacaaaaactcgctcctttcatttaataggatcgataataaggatcatcctgggtacctccgcgggtgttccttctagtcccagcattgttagacgccgcatttgggaagtcttggttccccgttgtaccgtaagcaccctctgtatctccgccaaaccccatactgctgaggtcatcttgcctgcctgtatcatacccactacctgcggtggggtacccacggttgtcatgtccaccggtaccgccatagccaccagtgtcgcctatgttgtacccagctgtggtgtagccagtgccaccaataccaccaccaccagcatggccagctgtggcgttatgatggcgggcctcttgtttcctcagctctgcatcttcttgtctc

SEQ ID NO: 2577 - DNA, 554 bp, Gossypium hirsutum
  unsure (1)..(554): unsure at all n locations; Clone ID: LIB3825-015-Q1-N6-B5
aaacctcataattctttcattaatgaaaatgatctcatctgtatctttgcaaataatgtaaaacccctttttatcaacaaatctatacatgcaaaattgatgccaagcaaagtttcaatattttgaaaatgctcaaattaatcgtcttttgaatcctctcctagaaggtcttcatatgaaacagggaccctaattctatcatgaacagatttgcgtgttccttcggcactgaactcttctgtcgggtcattaggaataagtccagcatcttgtggaacacttgctgcagttccattcgagagtgtagtttcttgagaagagatctctttcctctgtgctggtgcttgtctgacatattgttgcttaaagtgcttctcaaattccttggcctttttcattatttctcgataagcagctggttctcgtgcttttatgatattccataatatgccaccacctgtccgacatcgtcggccatcagcagtcatctgacctccacaagattgaattgcatccacctgagaactttangtttcatcatacctcccgatatg

SEQ ID NO: 2578 - DNA, 552 bp, Gossypium hirsutum
  Clone ID: LIB3825-015-Q1-N6-B6
acccaaaacaagctagatatgcattattaagtctcattatctcaaaacagctgatggttttggtccttcaattatataaaacatttaaaaatgaaacataaaaagacagccagccccaagacattgcaaaaactacatcactacatacatgacgagcaagttctggctcaaacacactataaatatagttgctcattccagttctgagattctaccgactcaattgccagattgacgcaactccggtcgcacaaaatcagcatcgggggtcactgaaatgtcaaccgtcggcctcaattgagcacagacttcgatggcaccatgcactgggtctgacaagaagttgctgagaagatcttggttgatgggagtgcccttgtcgacagccaccaaagcctgttgggttaggatgtaatcaaaccgtggggcccatttcctggatcccaatcgtgctgtggtagagcagttatcaaccatgaaggaaactccacgagcatgcataaatggatttaaggaatccactgcctctatcacactctcgttgatgatctc

SEQ ID NO: 2579 - DNA, 538 bp, Gossypium hirsutum
  Clone ID: LIB3825-015-Q1-N6-B7
gagaataaaattcgccaatttgttcattaagaacaataaaattgaaaccccaagggttcaggaaacattagtctcgaatgcatttcaaaacagaagtagtttcgaataaacggcagtcagaaaggataaggctttagcagccagcgttttcgaacaaaaaaaaaatgtacacatccgccttctatttcccttatttaaacaaagaaaaaagcggggccgaagtgctcttttacactcttgaataacatcattaaacataaacaaaacccccaaaataaatgaacaggtctgttgctggcattgccaacaccacctagattattttcgaaattactcggcagaaattaaggtatgtggatttgattaggctgcggattccttggcaatcttatctgccttcgcaatcacttcctcgattcctccaaccatgtaaaacgactgctcgggcaggtcatcatactttccatccaacacaccctggaagctggtgatgctctccttcaactccacatacttgccaggggcaccagtgaacact

SEQ ID NO: 2580 - DNA, 551 bp, Gossypium hirsutum
  Clone ID: LIB3825-015-Q1-N6-B8
agaggggaacaactcacgtaaataagtaaaatatcttctaatgtaacaaccaaaccaaaataacataagagcatagggctcaatgaaaacctccaaacaaaatgaaaacaatccttacaacattttaaacaaaatctttaaaagggtttgaaaatgctaagagaagcaactaaaagtatcactacatgttccttcatactatatgattactcattggaaggcacaacatgcatgcatgaatgttggtcttagtatcgaccaattccccaaactctgattacaccatctgtataaccactaaataaggtgcttccatctgcactccagttcaagcttgtgcagtatatcaccttcttcttgtttgcattgtcggtgacatcagatttctcagcctcagctttgagatcaaccttcaagtcttccacaatactcttactttccagatcccagatcttgatgctctgctcagtggcagcacaaagccagtacctgttggggctaaagcaaagcgaatgaataacagaaccagcatcaagactgtaaagcttctt

SEQ ID NO: 2581 - DNA, 474 bp, Gossypium hirsutum
  Clone ID: LIB3825-015-Q1-N6-B9
aaataatattttttttttttttttcttaccaatttaaattaaaaaaaaaaatattaggaaaagtttttttgttccccaatttcccccatggaaaaccaaacaaggaacccaataaagaaaaaaaacaaaacttgtttggatcccccaaaaaaaaaaaaaaaaaaaaaacaagagaagagagcttgcatccccccccaaacgcgctttaatataaggcaaaaaaatgccactaaacgggaaaaaaaaaaaaaaaaggaactgttggggtcccaaaaacaaaaggctttggaaaaaaaaaaccaccgccccctttatagcataacagaaaactgtaaaaaaaaaaaaaaaaactttctaccttaaaacaaaaagaaggagggggagcaaaaaaccccttaattttttttttaacccagaggggaaccaaaaaaaaacaaagggggaaatggttttaagagaaaaaaacatactttt

SEQ ID NO: 2582 - DNA, 298 bp, Gossypium hirsutum
  unsure (1)..(298): unsure at all n locations; Clone ID: LIB3825-015-Q1-N6-C1
atatgttaatagatagaatgtattaaataatttaaaaaaaaaaaagaaaaggaaaggaaaggaaagatgaaagtcaaaagnaaaaatgtgaggaaagggaaaagggggaggaaaaataaattaaaaggcaaaacaataagggaggggagggggaggggaaggcaaacaaaaaaaaaaaggcggcaagnccaaaaaaagaaagggaagaaagaaaagggaaaggggaaggaaagacgtcgggagaaaaaggnaaaggggggagaaaaggggggggggaagcctctacaaagagggaaag

SEQ ID NO: 2583 - DNA, 554 bp, Gossypium hirsutum
  Clone ID: LIB3825-015-Q1-N6-C10
aacgaatcattcaaaatcttatgtataaagaatttattggaatggggaaaaaacatggaaaattatcaaaaacactcgttagtttatatgtctacaccctacactgactgcaatttccttttcaatacctcatatccctgaatttagctccatctccgttgatcctcctcttcgtcgacgggagtataccatgacggtcttcgtttcgagttacttaacctgtagttcaacaacacttcttcatcacaaagtgctgtagtagccaccaatacaagagtcttcaaaaccggaccatttgactcgctgtttctcgaaccccatctgaaccaaaaactgccgaatctcctcatgtttacttcttcagcgtttccaaatgataaatttggaatgtaagctctcatgtctttctcagtcagtgggaagtcgtaaggacagatcatcacgttcggcaccgtatctttagcagggtgattggcaaaatgagccaaggctaaagggttcctacgttccaaaacttcaccgttccccactcgcgagctctccaaagcttgcta

SEQ ID NO: 2584 - DNA, 576 bp, Gossypium hirsutum
  Clone ID: LIB3825-015-Q1-N6-C11
caacttaatttactctgaacttcattttaaaacaaatcaaacattaacagattgggtcgggtcaaaacccgtcaatagaataataaaataaatatataataaatagaagacacatattattataatttaacaaatgaatgtccaatccaataaacccaccctgaaaattcttaaatacaaatatattctctctctcaagtattcctcaaaaccaattcacatatggaaatgaagtaattgtgaattgtgatgaaatcatattattgaagtaaaaaaaaaaataaaagaaagcaatttagatcaccacatgggggcaggggcaggggcttcaacggctgttgcttggctagaaacagggccaggggcaacaccggagctcaatataagctccaccatgctccgccgtgggttcgatcgctgagcgttgcaaagatcaggcaaaaatacaccttctccggcggccaagttgaagtaaaggtcaacaatattgggacacttctggtaacaagcaggggtacaaagcttggcggtgaattgttgatcgagaagagaatctgatgaaatgccgacggagtt

SEQ ID NO: 2585 - DNA, 538 bp, Gossypium hirsutum
  Clone ID: LIB3825-015-Q1-N6-C12
aatcgaagacaagacaaagcggtcgctttgcttctcgtcttaaaaaagctttaatatttcaatgtaataaaatagtaaaataagtcgtacattgaagttaagccataaactattccagaatatatagtacaacttctggttgaaaatggggctataagaaaaaaaggatgacaaaatcttatcatgaagcttcaacattccgattaaatgcatcgttgggtttcgatcaaaacgatatgatctctcgtttcttatcatacccggaaatgcctcataacaagattccgataactacattaattagtttttatcggttcaacttactaattttcgttagtcgtttaaaagagttgtcaacagcaaatcttgaacgaatccggctctccccgtggcttgctgaatccttttttcgcgttcttcgtagctcaatgacggatccaaacttgatttccacatgtgtgctggtgccatattctttgtggtggtatcttcgaaactagttacaacggatttcgtaatttcttcagcttctgatgcc

SEQ ID NO: 2586 - DNA, 556 bp, Gossypium hirsutum
  Clone ID: LIB3825-015-Q1-N6-C2
aaacataacagttaacaatataataagtagataaccatataaagtaagaaacaggacctccgagttttatacgctgaggacagtaagcaagctaccgcagaagggggtccaaggaaccctaacactttgcagagtggaagccatgcaaaaccacaagctctaacaacctaaccgtcacaaaacgaacaagtaacctaaatccttttttgctcactgaacctatttgaaactatagtatttgaatatttgtttgccatagatgctgtcatttcagattttgcttcagttcccactttaatctccatttgcataaggtgaatcacgaagagaataacgatatggaggcgacctgctgtaactccgaccacgacgaggtgatatgctgcggcgccgaggagatcttcctggactatagctcctgcgcccatgcccataacttggactcctacggcgacgaggactggggcttcgacgccggccacttcccaggcctcgtgatccataacgcgagcggcattcgcgagcaaagtgaccaggttcaccacactcataacac

SEQ ID NO: 2587 - DNA, 548 bp, Gossypium hirsutum
  Clone ID: LIB3825-015-Q1-N6-C3
ctctagaaaggatttacctatcttacgccattcaacttcaaatgcaaaatacatgtagcaacaaattacccatctacaactattaatttccaaacgtcaaaagaaaccaacaccatccagagttacatttttgcttaaatgaaatttgcatttaaaaagcattaacataagatgatcaaacactatcacagcctactttgattatgctatcctcccaggatttttcctactcatcatcttcctcgtctccactgccttcatcatcatcttcttcttcatcattcacctcagatacagacttctcagattcctcctcatcttcttggggaccctcagcctgtctcttattgtaggctttcatgttcttttcatactcgacctttcgtttctctgccttatcaacataaggtcgcttttcagcttcagaaaggctcttccatttatctccaccagctttgccaacttacagcagcaacggacttgtttttagggtgctccttcttgtattgctcgcggaactcctccctcttcgattgtggtttttacaa

SEQ ID NO: 2588 - DNA, 355 bp, Gossypium hirsutum
  unsure (1)..(355): unsure at all n locations; Clone ID: LIB3825-015-Q1-N6-C4
aggtaaattgaaagggggatcaaaaacacacaaaaaatccttttaccaacgtttgtttttggaacacgacaaacaaaaaggcggggaaattaaacaaaaaaggaccccaacccaccccgaaaacaaaaggaaaacccaaaccaaagaacgggggaaaacgaaaaaaggcccccaaaaaccacccngaaaagaaaagggaagggccaaacgcccaaaacgaaaaaaaaaaagggcccccccaaattaaaaagcccccaaacaacagnaagggcccggcgccccatcgcgncggaggaagggccgacaccataataccaacccagacaaaaaaaaagaggaccccccccaccataag

SEQ ID NO: 2589 - DNA, 305 bp, Gossypium hirsutum
  unsure (1)..(305): unsure at all n locations; Clone ID: LIB3825-015-Q1-N6-C6
aaagggggatattgtttttttttttttttttttttttttttaggagggggggggggaaaaaaaaaaattaaaagaggggagggggaagagaaaaatattataaaaaaaaaggggggaaaaaaaaagggggggaaatatagaaaaaaaaaaagggggggggaaaaaaaaatattnggaagaaaaaaaaaaaaaaaaaaagggggggaaaaaaaaaagaaaaaagggggggggaataaaaaagggaaaaaaaaaaaaaaagggggggggataagaggggtttttttnaagaaaaaaaaaaggggggg

SEQ ID NO: 2590 - DNA, 574 bp, Gossypium hirsutum
  Clone ID: LIB3825-015-Q1-N6-C8
agaacgcaacactatctttgcaccacaaaattgatacaattccagtactatcaaagattaaaaaactatccaatcagacaaaggtggaggttagttaacaaaagctagaaagtccaaagagtcatgagggtttataaaattatcccccacaaaaccagtaaacatcatccccatcccctatatatatataggttctttcttggaccggtaggactaggctttgttttgtgaaagaaaaaattgatccaagaagcctcccaaaaagtttttactctttgcgagaatagcaagcaagcttcggagaaggatgtcgacacacttattagttaataatcccgtcctttgtattgcatttcaggttggcaatacaccacttgccgttgcccaagtaccatctgctgcccatactgaggtccatttggatgaaaatatgcttgcggtgattgtattggtgccacttgtgggttgaatataacaggttggtgcccaggaaaggagggcccaatcccaaaactaacaggcatgtgcatatgtggtaaaggagacatctgtgtctgatagtagaaagaaccat

SEQ ID NO: 2591 - DNA, 558 bp, Gossypium hirsutum
  Clone ID: LIB3825-015-Q1-N6-D1
aataacaaacacatgcttttattagaattgtataataacagtaaataaagtcataaattaattaattaaaggaaaggtcagcatataacatgtgacataaaaaccaacgtcttcaaatccataaatatatataaattaaaaaaaaagaaaaagaaatgcttcaagtccctattattagaccctaaattagccattttcttctatatatttgtagatatatattatattatctgtataagctaaaactaaaattatctttctttgtcggctccttttttgagttttcttctacgttgtgtttaataaaatggggcccttcctccttttttcttcaaaacgcgttttttggtttaggtggtgtatagcgactaccaagcataaggggaagtcaacctctctttgcgcttttccagaaatctttgcagcgactttcttctagcaattggcaaatctccattacgagcttcgaggaggttttgttgatcacttgaaggatttgcagcctttgatgagtctacagattcaatgttttttgagctttcttcaacggcaagtttg

SEQ ID NO: 2592 - DNA, 567 bp, Gossypium hirsutum
  Clone ID: LIB3825-015-Q1-N6-D10
gaaaaaaacagtacattctaaaatgattaatctgttcctaaatcaggagatcagagttaagtactactttgtaaagtcccaaatggtgaaataccgtgttggcacgaatctattctcaaaacacattaagcgtacaacaaaatttatatattatacaaactcgggataattgaaacagtgttggaatgatctcaacctgcggattgagcaataaataagtggaaaatgtgaagccgtgttaatggtgcaatctcaggcatcaccaaaaccaactgtagcggctatccacagccttcataacagtcggaactaagggcattcgtccaaactcatccacaaacttgttgacacattctgttcttctttcactatgacctcccaggctgctaatgccagttgaaccgatctcaaatattttccctttcacccaaatgggaggagcatctgtggcatttgcaacaagaaatgacatcgcaatatcttcacaattcctgttcttggttatgtattctttaagtgatgcaggcatctcatcagtgtaaagtttgagatacttcttggtggaaa

SEQ ID NO: 2593 - DNA, 537 bp, Gossypium hirsutum
  Clone ID: LIB3825-015-Q1-N6-D3
ctgaaaagcaagtagcaataacttcagaaattcatagcatccaaaacaaaaataaattgcatgtaaattcaaagagtcagttttttaaaacttccaaaaatttcaaactcaaaacaatgacttctaaaatcaactaggataaaaagtctaaggaacacagtaactcagcggtagcggcgaagggagagagtgttgtttctcttccaggttgccctgcgagaaggacggttcttgtggtgcaaatgaccctttccatggagacccctgtttttcttaccagcagatgtaagtcctcgaagttccctgtgcttgtgaaccggattgcagatccagttaattcttgggtcattgcggatagcattgtgtgcaacatccaccaggataacctcaaagtacttgtaagtagagtcctcattgatccagtacgagttaacaactctgagacctcccaactttcggccagcacgctcctcagcaacagaccgcttgctgcgctggaacttcaattgggtgacaccctggtttgtgggcttacca

SEQ ID NO: 2594 - DNA, 562 bp, Gossypium hirsutum
  Clone ID: LIB3825-015-Q1-N6-D4
gttccaaaataatgtaccaaccaattcccgatcaaacaagtttgggaccgtctactctaatcgggttctggcaatactagtctaaattgaaaaccgcaagattgttctaaaagtaggttttaacataaaacaaacttacggttgtccataacaagccagtaaattaaagaaaaacgaaggcaaaccaaaccaaacaatgtctagcaagtattaaaaaccctattaaccgacaaaaacaaagcaaatatataaaggttccaaacttaaagcctaataaacaaagatagcccagttttgataaaggatttagcaacttctctgccaagaaactggacccgaatttagtcactcaggaaacgaggttatcattcagggacaatgaagccaattggtcggcttgattgttggcctgttgctgagcagcaacactcctcaacacctccatggcttcagctactttggccttcaaagcttctggtgattccaggagatgcaaaacctctgtttggtccatctccagaagcatgcctgtaaccttggcagctgcatcacgctcaagccg

SEQ ID NO: 2595 - DNA, 566 bp, Gossypium hirsutum
  Clone ID: LIB3825-015-Q1-N6-D5
ccagaaaagaacaaaagatttattgcttgggattttaatttacaacagagttccacatgtagtggtttgatcagttacaatgacaatccatgagcctcacaaatccatgcatgaattgcacctctcctatcctatctaatcacttatgaaaccttgaaaaaaaaacactagagacagatcagagaccaagcagtgatcaacatacctcaactgtcggtcttattcgagtttacaagcacgaatctgttggatcttcttctagctacctactgcacagagaaatttccttttgcttactggctcttcatgcaagactacaacatctctcaccttgtcaaacaactcctctagcttctccacactgagctttctatagtccaatgtcttcttataccgttgctgatatatttcttcgaaacaacccaagaaaatcctgcaggaataactcacaagaatttcctgcaactcatatttgaattgctcaagattatcatcagtcttcctctgatcccgttcgtcaactaccactctttcctcatcggagaactcgtcagatgagccagcac

SEQ ID NO: 2596 - DNA, 539 bp, Gossypium hirsutum
  Clone ID: LIB3825-015-Q1-N6-D7
gaggcaaagcttgtgtagagcctaatcactgtaaaaaacacattagtatagtagcagaatgcagagagacaaagtgttttactttatttctagcaatcttaaagatctaattttagataacgaaacagatggctaacattttagccataaaattacatcccctgtatgagagactccactttaactatgataacttggaacaacagtgcactggtgacggtggttcaacaaccaaaggcttgatccctccttcacttactaatcagaccgagctgcgaaccgctcaaccttcttatcgttcaaattaaggccaaccatggcctcaccgagcccacagctaacttccgcaagcatgttggggtcactgtagtgagtgacggcctgaacaatagctcgggcacgcttagccgggtcaccactcttgaaaaccccagatccgacaaacactccgtcacaacccaactgcatcatcaacgccgcatccgccggtgtggccacgcctccggcggcgaactgaaccactggcaacctccccagct

SEQ ID NO: 2597 - DNA, 558 bp, Gossypium hirsutum
  Clone ID: LIB3825-015-Q1-N6-D8
acgttaaaacaacataaatgaattatggaagtcataattacttatatcaaacatctccattgttagcttttaactgcagagaagcataaactgacatcaaacatctccattttccacctagctattttaaagaaaaacactgaaacacttccattttacatgctacttactactaacgactacatgactgatgacacacgtgacatgactcgaatacctccttaaaatttagttttagctacccataaacatccgctgctttcctcccacaacgttggatttttatttcttccttcttttttacttatttagcccctctgcttcgtcgcgaacttgtcctcattgattggaatcccctcttctgccgcacgttctccgcccgacttctcgacggtgctcaacccacctttacgacccatttcttgatacccttcccttcctatctggtccctcctcgcctgccctccccggctcctccctccagcaaggttttcttgagcttcaacgcttttgccaccggttccaccagggacgacggtctttccttcccttgcccta

SEQ ID NO: 2598 - DNA, 538 bp, Gossypium hirsutum
  Clone ID: LIB3825-015-Q1-N6-D9
ccctagccactgcataggaaaaaaatgtgaaaggaaaaactatatcatttcagaatccttgaggaactgttattaatacaaactctttactaagctacgctaatgcataagggcaacggcggcctcctgaatgaaaggctgcgtgacatgcacgaattgttcggcttcccgctccacctcttcccaacaccgacgagctccttttccctcattcatcttcttcacgaatgcaacaaaccgtctccaattgcccggatgaaagagcgatgggttcatcctcaagtacgtaaatgcacacatctctctatcaactgctgagccatcgacattcaacgatgaagctcgtaagatctgctcgtgggcgtattcatcataacggggaagtgcattctccccggcaagtggaacttgtgctgctcctgttgctaaagcaacttgcttcactagcttctccggtgcacacaaggcatcttggggctgctcatgatcccgcatctctatgcaagtgaagttgaaaacggcaccatgacgtgctagc

SEQ ID NO: 2599 - DNA, 448 bp, Gossypium hirsutum
  Clone ID: LIB3825-015-Q1-N6-E1
ccacataaaaatggatcatatctgattgtttctaatgaaaaatcccaatccaaaatgaaagataaggatgatgtttgcagttttaaccgtatcctcaggcactccagtaccattgtagatccaacaaatgccaaaaagtgaaaagtttaatacatgagccgttcctttcaaaacaaagatttaaggatcgagcaatccctactaaaggaatcatacaaagatggccctacccgcaaatgactaacgcttatctctatcctcattgctcatcgtttcactttccctttttcttgcccttttcaaataacgaaattgttacaatggcaaaaaggaactggagaaaaagagtcatgatgcaacgagatcaggtgtttcagcctcaattgataaccaagcgttatgtactttgcccatccaattatccaaccggtcacgcaaggatttgatc

SEQ ID NO: 2600 - DNA, 555 bp, Gossypium hirsutum
  Clone ID: LIB3825-015-Q1-N6-E10
aaaattaaagctttctgaatgaatcataaagacatccgaaattctatcgttattacagaacaaaaaaatgagttagcaaataacatttatcttacaattaggtcgttgtgtactatgcttataataataaaattctaaactcagcagaataaaacgcgtcttcaaaagtaataccctaccacccatcaacacacatcatatcataacaaacaaatccaatattgcttctgcttcagcatttaaacctcgcttcgtactcctggggttgcataaataaggctgatattgatcggcctgcaaaccacctcatgtgcattgcacgttgagctttacctgccgcttctgcggagtcaaatcgcagatagacgcatccggcactgttcttgtctacatatatatgcttcaccctgccatatttgctgcattcttcttcgacatcctctttaatatccaaatcaaaatctggttccgtctcagttgcaggatcaaacatattctttagcagcaaacattcactgggctggccaacaagaataagggccgttataaacatga

SEQ ID NO: 2601 - DNA, 452 bp, Gossypium hirsutum
  unsure (1)..(452): unsure at all n locations; Clone ID: LIB3825-015-Q1-N6-E11
ccattccccagctgtaggctagttaactaatcgtttctttcaagaggaaagttacaccaaaaacttgaatcaaatctatccccacaaaatcatggttcaattccatatttcttgacccaaaatgaaaaatatagtatgtttggaagttttaatcacatttttccttatatatagagagagaaagccattatgcacaagggcaaaaaatcatcaagacacaaaggaatcatgtcaatgaacccacccctcatcgctggcattaatccaaacaattatatacttgtttcatctctttttctctcagcaggtgtaccttgaaacctagtagaggagtgaaccatcctaggcaggtttcttcgtggcttgacctttgctttggacccccactcccttctgaccagttagcctnctactggatggtgcacgtgccactgatgaagcaactgcagctg

SEQ ID NO: 2602 - DNA, 545 bp, Gossypium hirsutum
  Clone ID: LIB3825-015-Q1-N6-E3
gggggggggggtagactaccagttgaccaataccatcaaaaagaaaaatgaaaaagaaaaaccatctgatatactacgcaattgacactccctgaaagaagatcggcctcccagaaacaacaaatctgggaaaaccttaaccaataaattgacaaaacgtgaagaaataatggaaaagagcggctggtgaaaagaaatgaacaagaaagtggttgagacgggcatcttctgcccaagaatctgccagtctcaccaaaccaaaatcacaaactatgtgcacttgaacctcaaccttatgaggttcaatcaactctacgaccatatgaaccaatgaatgctgtaaatgaaatgagactttcatcaaaccacttctaaatgaatgaaactcaaattttaatccaaaactcaactcatgatgcaacagtggcagcagatgccttctccattttctcctttccaatctctgctctcctctgttcagcatgctgagcaacaccgttcgcaagagcttgataatgaaaatccagtgtctgtgtaaggttctg

SEQ ID NO: 2603 - DNA, 531 bp, Gossypium hirsutum
  Clone ID: LIB3825-015-Q1-N6-E4
ggaagtcaaatatctccttttaagtatagtcttaagagatacaagagtcttcattgctgcaagttatttaattaacgcttatataactagtaggaaatagccgaccaaaggcagctaatcaagggttgtggtgaccagggagcttctccttgatcttatccatcactcctttcttctcgtggtgctgctggagatacgtagccccctgccctggggttgtagttgaggtggcctgagattgatgctctttgttacctggtatcttctcctttagcctctgtttcagtcccttcttcttcttccccgttccttcgtcttccgaagatgagctcgagctagaggaacttccagtacgatggagtccatgatggcctccgtgatgatgtccaccgatccctaaaattccacggccagtctcctgagtcgggattgggttgccgtactcgtttgtccggcgagtgggttgccatatgcgtcagtttgcgtaacttcgggagcagaatattgattctgaaagggtgccatgatttt

SEQ ID NO: 2604 - DNA, 572 bp, Gossypium hirsutum
  Clone ID: LIB3825-015-Q1-N6-E5
ctcgttcaataatacagcccatataatttcagaggatcattacgattccaagtgctgatgaattgcattgaaaacaaaaccaaaacccactacgataactcacattgcatctatgtactgtaaacctgcaaatataaggtacagagaacaatttttatgaacttatcactgctgtccctcgcctgactcgtgctttgaagcttccttgatctcatccccagcctcatccgtgatgtcagatgtccaaagggtcaggttgtcccggagaagttgcatgatcaatgtactatctttgtaagattcctcacccaaagtatccaactcagaaatagcctcatcaaaagcctgttttgcaagattgcaggcacgatcaggtgagttgaggatttcatagtagaaaacagagaagttaagagcaagtcccagcctaattgggtgagtaggagcaagctcagcaagagcaatatcctgagcagacttgtaagccaacaaagtgctctcggcagcttccttcctctcagcaccagtcttaaactcagcaagatacctgtgataatcacccttcatcttaa

SEQ ID NO: 2605 - DNA, 504 bp, Gossypium hirsutum
  Clone ID: LIB3825-015-Q1-N6-E6
atggaaaaactcattgataacttaataaccaattttatttaagagtacaatgagttaatttattttttcactcgaacataaaagcaagtaggtcattacacacaaaagcagcaaatacaaaaatggcaaaatgcatgcgacaatcattgggaaagacgttcattgggagggcttaggccttaacattatcttgctgatatttggcaatgagacctttgacaaagggaagtagtttgtcttttggaggcaaactttccttaacaatgctgcaatttgcgaaatcttcaaaccattggaataattggggaaatttgtcagctgacagcagattttgccccataatttcttgagtgaccctaatgaaatacccaacagagctagcaacaatatctaccattccaatggtttctccaccaaagaatttctttccattaagcgcactttcaagcgttttcagatactcgcaagcttcattcgtcactttttctcgctcattctcggcgc

SEQ ID NO: 2606 - DNA, 443 bp, Gossypium hirsutum
  Clone ID: LIB3825-015-Q1-N6-E8
ggcaaacctccatatgaatatatatattatcatgtgatggccataagagaaacatacttacagtactacccagaactgcagaagaaaccttggatgatatttacatgatatatgggttatagcttcttcccagaagaaacaaaatttggggaagctatttgagtaggaaactaagtaacgacccttcgagtcaagtatgcctcttggaagaagatatgatacgctgtaaaaacccgaaatcaatcagcaggttgctttgtcattgatatagactctataagagggcaaaggcacaacgtttcgaatttacagtgaaaagaaacttcttgactagaatctataggaaccatcattccatttctgtaaacgaattttggatcgaattcgacttgtatgttcggagaactggtgccaacagagtgacagctacacccacgcgtccg

SEQ ID NO: 2607 - DNA, 535 bp, Gossypium hirsutum
  Clone ID: LIB3825-015-Q1-N6-E9
caatcacagtggaaatccactaggatagacaatattgatataatgtggagagtgtatcattaataaaatgtaaacagaaaaggaaagtccctgcaagtatcaccaggataactgcaacttgtttctggaattctcctcttaattacagtcagtatgtcagcctgcaatgagattgatatataatgagaaatcgacatatcatgagaacgcataaatttatagccaaaacaacaaaatggatagtatgacagacaatttgaaagaaaataaaaacattttagttttactgcattaggaatttatacagatcatagatacttcctttgttacctggacccgggtatgagtgtcggaagtatgtttaatttctttttccaagattttcatttatttggagagtgtttggaggactgtatacaccgtaaccatgtctggatatgcattgcacaggggtgttgacatgggtacttcaagaaaaatgatgagcggaaatgaaatagatggttctattaagggcaagcaactcatgctatat

SEQ ID NO: 2608 - DNA, 569 bp, Gossypium hirsutum
  Clone ID: LIB3825-015-Q1-N6-F1
aagcataagaaagggctactacaatggagctcaagcacataaacatacataagagattagaactattgcaaaatgataaattcacgttctaactagtagagtagaagcagacaaaccagtaaaacagtggttcaggaatttaaaaaaaaattagcagaacatgagcctactctgagccactgtcttcaccagggccagcggcttctttcacatcgacagtgaagctatactcctgatcacaacctaggtaagaatcacacatgaaatacaaagtgtatgccttctccgtagcttcagtgggagcagcaaattcaagtttcaccttcgctttcctctgaagagacacccttttgatagcaagcagctggttactattggtgtcaccaacaaccagccaccacccttcatcttttgctttggggtacctgggagcatcaactggtccaacctctgtcttcccctctagatccctctcgagggttacctgcaaggtgacatattccccagcccttacattgtcactatcaatcacctcgtatgataaatcgatgttggggaaacgattgcag

SEQ ID NO: 2609 - DNA, 556 bp, Gossypium hirsutum
  unsure (1)..(556): unsure at all n locations; Clone ID: LIB3825-015-Q1-N6-F11
aagtgacaaaaatataatatttntgaatataaataattaaaatgtaatatgagatttatcctttgttaaataaggaaaacagctaagaaaataataataataataaaactacaataaagagcccgaagaaattttttcccctctttcttcatcagaataccaactgcctacgaattttattacttttcccagaagcagcagcgagatcccagatggtttcgacgatcaggtctttaaatattacccgttcaatattgaggactaattcggacatctcgatggggtaatctccccaaccgttaatggcatcccctgcaaggtcttttctcaacacactacaaatcacctcaaacaagtcatccgacgagtctctctcccgaatcttttggaattcggaccaaatttgccgcaatgatggctgttctccacaccctgatttcatactacttacgagcttccatgccggcaattgcctctttcggttgaggatttcattgatggtgtcaaatataagcttcctttggagtctagacaccttggaggtgtctttaccttt

SEQ ID NO: 2610 - DNA, 540 bp, Gossypium hirsutum
  Clone ID: LIB3825-015-Q1-N6-F12
agcatcaacttacgttaattaagtattatagaaatgaaaaaaataaaaccctactcaccgcctacctttcatcacctatcaatttccaacaaacaaagccttccgtaaaagccaccaccatcgatgacggtgacaccccctcccctcccctgctcatctctctctctctctctctaatctggctgtgttttttttggtgtccacaagcaaagtcataagtaactaactgtacttgcttctcgcatgtaactctgtgactaaatctcacccttatcttcttatctagtttgtttggttgtagcagctaatatatggatacacaagctggtaggccatcgcccccccccttttttttcatgcctatcctcttattgatcacacgccctcgggtccttcatctcttacttcgaatttccccaactttttttgttgaaaacatattgatattaatacaaggaaattgaatataaatatattattaacctaaacaaaaagcacggctggaactgatcaaggaattaggagtatttactaactcac

SEQ ID NO: 2611 - DNA, 554 bp, Gossypium hirsutum
  Clone ID: LIB3825-015-Q1-N6-F2
gaattaaaaaaattatttagtaataaatatgaatatacattacaacagagaagtgcattgaaacactcgtttttaaacatgactatgaattagccatcgagcatgcacgtaaaactacaacaatcattgacgtcaatgttttattgagtaaaagtggaatgggtaaaaagttgttacctttttgaatctgtttttgcattttattgaagcgaaagccaaatttatagtttcgaaggtgcgggttcggaagttgaaagctcagcatacatgttggctatggctttcgcaaagtactccttggcttgagatcgcttgatcttgaatgttggagtgagaagtccattttccaaggtgaattgttcaggcaccaaagttacagctttagcaaattcaaagcctcttaactgtgcttcccttcccacatcatccatctcagcgagaacagcattccttgctcttggatcattgcacagctgtcgtaaatcctcatactggataccctcagatgcggcccagtctcttagaacatcaggttccactgcaactactgctac

SEQ ID NO: 2612 - DNA, 526 bp, Gossypium hirsutum
  Clone ID: LIB3825-015-Q1-N6-F3
gatcttcaactaatatcattaccttaaaaataaaaaacacaaggaccttcaactaatagaaggttttgccactttaatggctaaacatcatgaaataaaaagaaaaccagacaacaccaaaggcagaatggttaactggacccaaatcagaaaccaccacggaggcgaaggacaagatgcagagtagactccttctggatattgtagtcagctagagttcgaccgtcctccaactgcttcccagcaaagatcaacctctgctgatccgggggaattccctccttgtcctgaatctttgcttttacattgtcaatcgtatcagaactctcaacttccaaggtaatagtctttcctgtgagggtcttcacaaaaatttgcataccaccacgaagacgcaacaccaaatggagggtagactccttttgaatgttatagtctgcaagggttctgccatcttcaagctgtttcccagcaaaaattaacctctgctggtcaggtgggatgccctccttgtcctgaatcttgg

SEQ ID NO: 2613 - DNA, 582 bp, Gossypium hirsutum
  Clone ID: LIB3825-015-Q1-N6-F5
accttctcgtcggcgatcaccgtcgccaagaatggcatagtcgcaaagcttcgtcgtgccatacaccctctcagcagctatccacacaagcgtatgatgtgtaagtgtgaatagaggccaagaactagaaaatcgagggattgacccttcgtgaacgtcacaaccgatgacctatagccttgattatataaactatatggtaattgaaagactacagaagtaagtatgaacgcccaggaagttgcaaagggaaagggatttccgaaaaaccctgcaatcatacaggacgtcaggataacaggtaaggaatcgatagcagccttgagatcaaaagaaaatcattttttctttcctctcaagtactgcaacggttgggtctggttataggtaccatccattcttaactttgtcaaaaccgtcatgactcaatcatgtataggccgtaccaaggcctgatacaagggtgagccaatagcgaataaccttttcttccctgcttcctcgaccttcattcccatcctgccaagctgaggctgccagcgcattgtatctaaccacactgtggcaaatcgatacaagtag

SEQ ID NO: 2614 - DNA, 536 bp, Gossypium hirsutum
  Clone ID: LIB3825-015-Q1-N6-F6
aaaaaaaccaaagcattttctcattgccattttaaaactattacagaaaccagtttcatcttttaacataagcaaaagagatctaaaaaagaaggaaaaaaaaaaagaaacactagaattgggtgatgctccaatagaatgatccaatttccaatcagcttagcttcatcctacatccttgccttagcaaccaccatattgccttcatttgcaacctccatggctcctggccttgtccatgtttccttgaattgctcctctgtcactcctttgcccatggctgcagtcgatgatatgcctccctggactgtcttgagatatctatcataaaagttggcacctgaccatttttgatgggctaatgtgtccaccccattgttcctctcttccctctggatcttctcaacataagctagcattcccctcctcgcgaaatctctggcgaatgtgtcggtcacgagtgcatcagcatggaaaccagctagtgttatgaactgccaacagaaaccaagcttggctatccttgggatgaagtc

SEQ ID NO: 2615 - DNA, 534 bp, Gossypium hirsutum
  Clone ID: LIB3825-015-Q1-N6-F7
gaccgaaaacaaaacaagtgccaatataatataatagaagatacatacgtcaaatctagttcagactttaaacatgacagataatagcactgctcatcacaaagtaaaaattaacataatagaggcttttaactgacaaaaagagaacctctagttcagcatgttcatactagcaaactaagtcaaagcagtgctaagaaacttttatatagttttatacttacactttcatctatcccactccaaatcgaaatgctgctttgggtttacctttgaaggactccccttgatgcctttaggtgactgattcgtcaaccaatcccaacccatgatgtgaggcaatgcaaaactgaatgctgtcttcaagactgcgaattccgctgttgtaacaggtacgttaaagttctcgtttgattttagaacgttgttggtaacagtcaaagaaatcatgtagccattaccgccatcaaatgccttaatacataactttcttgcttacttggccagcattgcttgattgcattgaagggtcat

SEQ ID NO: 2616 - DNA, 547 bp, Gossypium hirsutum
  unsure (1)..(547): unsure at all n locations; Clone ID: LIB3825-015-Q1-N6-F8
aaagttaaacgtgtataattacacaaatcaaaattcatacaaaatttgtatagttcaaaagcaacttggctattaatatttaaagatactagactgctgaggacttcaaatacaaaataaaaagaaatacagttaaaagaattaaaggcatttcagaacaaatttctctttcacatatccatctctctacatataaatctaattgatgacagcaacgttctgcattttagttgttaactctgttgcgctcaagcaattgagttgagcttccatttgttttaacacagttctcaatccactgcaagcctcaacaaagggttccgaagatgttggaaaactttcaacctcttgctgtatttcattgatcctacttgacattttctccaaggccagttttatttcgtcaatctcttgaggggggtaaagacaggctccaatctcatctatctctgctccgacaccttgacatatcttcaataatttctccaaagaacccacaaatttaccattgncatttggggtttcaagtttaagcataccggggatt

SEQ ID NO: 2617 - DNA, 542 bp, Gossypium hirsutum
  Clone ID: LIB3825-015-Q1-N6-F9
aatacatgatcgtactggatgttttttttattatattttctcttcacatagaatcaattcaatattaatagtcagcatcttaaaacattcccatgtgagtaactagtatatatattagttaacttaagcactaaccggccaggggagaggaaagggattagggttatatattctttctttcttcccaacaaacttatcacgaaccaaaacaaaaaatccttgtttctcaatatctgtttcccactgaaagctgtcatcgagattgctgcttcttccctcaaagaatttagaagggtgttcttccagtgctctgatcattatcaacatcagagaccccaaagcggctaaatcgactagatggaggatcaccattgctcgcactactttggcctgaatgcttgtcaccaaatccaccagaaccaaagccgccaaaaccaccagcagtttgaccagaacgattgtccttaaatccacctgggttacctgaaccaaagtccccaaatccactagtacgtctagaaccaaaattaccaaagccacta

SEQ ID NO: 2618 - DNA, 536 bp, Gossypium hirsutum
  Clone ID: LIB3825-015-Q1-N6-G1
aaaaaaaagctgccattaaagagatgaaacaaaatttatgttttttgggtttacaattgaactttttgccagtagaaaagagagggatctaactagtttaaatcttcaacttgtcctaactacatgataacatttttctaaccactattttattgcacatcttgaacaaatatgaaccgcgttcttcccgagtattattacatcgactgtattttctgttacgaggtgtatgtcaggatgctagccgtgcatgaattttctgaatccgtttttgggggatgaatctacttggaaattaccttgaagttgaaattacttgatgctttggttataaaatggtttggtgcgcgtatctgcccttgccatttgtcatttgacttaaccgggtgctgcgagaaagaagcagcagcggcagctggttcactcttagatagtccctcagctcccgatgcctgactggtagaagaaattggctcacaatctgttttaaaaatctggtatgccacttgatcttgaggaatactcggttaccaact

SEQ ID NO: 2619 - DNA, 542 bp, Gossypium hirsutum
  Clone ID: LIB3825-015-Q1-N6-G10
ggttgatacaaaccaccggagcaacaataatccatatctatatatattttaaatatatgccattctacagaaatctatactcggaaaagatgtttctactctaaagagcatcatattgacaacctgcaactcacaaatattaagtgtcacgtttttgtaggttaaaggtctgatagagtgccacagatgtagtgtatcagaaagtgcagggggctcagcttcagtctgtgagtcctatacaaaatctaaatcctacttaatataaatgttaatttaagctatccgaaaatatgggagatggagggttggtggggaaggagcgttgcgggattcaaatgaatttctccactcagttctatccatgcatagttgatgagaatttactgccttgatttctgcagaacgctaaccgcacttgaaatatctgtcagctgttgcttaattttagctttccacttcaccaggtccttcaacatttcctgaaccagaagcaaattatcaagatctgactttgaattggcagtgacagaagaatcaggtgt

SEQ ID NO: 2620 - DNA, 537 bp, Gossypium hirsutum
  Clone ID: LIB3825-015-Q1-N6-G11
gagaaaatgttctggtttgaatagcttcccattctgtcataccattaactatcatggttaaagaagctagtacactagctacaaaaccctgtttcaataacaccaaattcaagttccgactaagacaaacgaccatggaatgcaatattaaataacattccacttgaagaaagtgctaagccttggcttttccagcttgaagagattgaatcctctgctgcaccttcaatatcgcttctctcttgctgtgttgtttctcttccaaatcttgaagagatgaatcaagccgcttcaattctgcagagatgtactcaattctcttgcgaacattcgcattggcctccgctaaatcttgtttcacaagcactggaccaatcaacttgtacacattcgcatcctcgtttaataaatccaactccttgaggactaactcgttttctcctaactgaatagtgtacttcttccggacttgatggctcttagctatatctttttgaagcttgctaagatcattggctttgttctcaaggtcgcgct

SEQ ID NO: 2621 - DNA, 511 bp, Gossypium hirsutum
  Clone ID: LIB3825-015-Q1-N6-G12
gagatgaatgcaaatttatgttgtacgctaaaatgtggctttaactgttaaaataagtagatttctcgaagtagggatgagaattcatgatgtttagatagactcaggtaataagacggcaacaagggctgcagaacacatttaacttaaaacaacttaaaaggaagaaacaaacaggcataccagattcacgaacaaccaaaacaccgactaatggagaacagactagatgggggctccagtgatggctccagttctggcttcttgcgaggaagatgcttaaaaaatgcttttaccgctccactcaccccatcctcattctccattgccttggcaagttcaacagctctctctttaacctttgggtttagcatgaattttattgcatcaatcagcttgggaagtgagaattcatcaatcggaattggtgcaggtcccactcctctagcatgcactcgatctccccagaaaggttgatcaccaaaaaatggcacaatggtcgttgggcaca

SEQ ID NO: 2622 - DNA, 538 bp, Gossypium hirsutum
  Clone ID: LIB3825-015-Q1-N6-G2
cagttgagatgccaaataaatagcttaaccagacagtattccaaaaattttgataataacaggagtaaaattagatccgaggaaatctgaaagtaatgcaaataaactaaaaaaaaaaatgaaaggtccttacataaagcaacaattagcccgtaatgatacccgccagaatatcagtcttacctcgtgcataaattgtgtaaactaagcggatggcgtcaagccatccgtctagtgattcccacgagtcagcaaccaagaaaactggaccagaggtggtatcgatacagagacctgcacctggtggtaaagtcagatcagcacatgctgatacagaaacaatatctggaatatcaactcttatagcccttttgtccatatctgttacatctgaagttcttccagagaggctccgggtaatttgtctctgatcaactctgatgacctgttgaagtgcttcatgattcaaaaagaactctgttctcttccaagcaccatgaggagccattgaatttcctactggtggtgcagtaagata

SEQ ID NO: 2623 - DNA, 349 bp, Gossypium hirsutum
  Clone ID: LIB3825-015-Q1-N6-G4
gagatcactaaacataacatatatagccataaatgcagaccgacaattgttaacattatcaaatattgaccttaggaacaatctatggtctaaaataatacctatatttttcaaaaccatacagctaaacaaaattgagcaagagtatgctcttaaaagtcataaaggatagtttactcactcgagaggaacattaacatcaccattatgaatctcctgctgcaaatatttagggaggttaccatcaaatgttcacccaacggaaacacaagagcccaaagtcttctttaccgagcttctaaagaacttaggacaggacctgggactgattacttaaccgatctctatg

SEQ ID NO: 2624 - DNA, 550 bp, Gossypium hirsutum
  Clone ID: LIB3825-015-Q1-N6-G5
aaacacaaatgttaattatttttataattgaatttaattttatttatgccagccagattgtaatggaatgttgtgatatttacaaataaataaagctatgatggtctatagaaaaatagagcagaattcagaaaagacataaacaaataactacataaatgattattattatctttcataataattccataatattactaagaaaatgcccaattttttggattccttttccttattttttatcttcgagactgcaagaagaaaaaaaaagtatttttgagtgatgatcatagtttcaagatccttcaaagctttgctcttcgtagttctaactgagcaatggtacccaagtgcacttcatcaggtccatcagcgattctcaatgttcttgctgatgcccacaggtgtgccaaaacagtgtcggatgataccccggctccaccatgtacttgtattgccctgtccagtaccttcagggccatgttcggagctgctaactgctccatccaacattcaaaagtttctactataacaaagttcattttgaacc

SEQ ID NO: 2625 - DNA, 471 bp, Gossypium hirsutum
  Clone ID: LIB3825-015-Q1-N6-G6
gggggaacagaaaggagaaattaccacatttacaattcgatttttacaggtataaagggggcaaatttcacgaacatgacctaatttttttagctacaggggggggggaaaaaaaagcagcatccacacaaaggcccccttgggggggaggacaggcgatcgggggaaaagaaaatttgatttttgggaacgcattaggattttggacgaaaaaatctcccactttggaaaggacccagtttccaggattggttaaaggacaccgggattcgacactttgcccctttgaagttgttagctggaatcggacgggctttatttcccagccaggggggggcttcgagttacaaacaccccgacccagtctttttgaaaatttccccagggggggcctgaaaaaaagctatatgtccccacggggaaaccaaactcgacctttccatccattgggaaccaccaaattgggtgggg

SEQ ID NO: 2626 - DNA, 547 bp, Gossypium hirsutum
  Clone ID: LIB3825-015-Q1-N6-G7
accaaaaatctcttctttccatatttcaagcaacataggtatacgtacacgtcactagaactagttgcctctctctggccttaaccaaaagatgcaaaataatggaatgctcatgagatgagcattaaccagcttcagagattatttctgcatacctttggatattgtacaaattaagtcgtcggattcagagcaagctctatttcttccaatgatcgcccctttgtttccacaacgttaccagctatgtacaagacagcaagagcgcacacaccagcgaatcccaagtacaccgagctgatcccaaacttgttcacaacactcaagaaatacaggccaatgacaaagttagagatccaatgcgtgccaagtgataaagccactgctttagctctaattctggaagcaaatatctctggcagaagaagagcaggcacaggcccagcaccaagtgaaaaggataaaacgtagagaacagttccgacaacggctagtgtgccagaatagggagccaagaccttccaagtgaatgacaaagaaagtagca

SEQ ID NO: 2627 - DNA, 540 bp, Gossypium hirsutum
  Clone ID: LIB3825-015-Q1-N6-G8
aaaaagttcaacgtaatgtcgattgtagtacatcatgatcatcatcaaaacacaaacgtctaaaaacgaacgtacatcatatgggtgaaaaagcatccatgctaacaaaatataaccagacagaaaacaaaactaaattgcagcgaaggttatgccgcacaatcacagttactctctcttagcttacagtttgtcctcgtactcggaaagtggggtcatctgttccttcaatcctttcctcttgcggatttcggcgacatgggctgctgcctgagagccaggttccaatgggtctgatgacatcatatcccagtgatcaaacacacattgtgggaaagcttgtcctgatgttgcagccctcaaagtgctagagaatccaaaggactcaatgacaggaaggtatgccttgatgttgtaaagtggagtgccaggtctttgcatttcctcaaatacatgtccacgcttctggttaagaacactgtaaataccaccaagtgcctgctccggggcttggatctcgaccaagtaaacaggttcgag

SEQ ID NO: 2628 - DNA, 545 bp, Gossypium hirsutum
  Clone ID: LIB3825-015-Q1-N6-G9
gctctgggtggctcaatgcctatcatttaattataaagcatgaaagtcttggctcacacggtattgaagctccaaaacactctgtagaagtatagagtcataaccagcttcaaacgaagcaactgattcaatctaaacaaaggccacgctacgatggtgttcaagaagaaaactctagcaggcagttaaaactcaggagacaaggttgtcacttaatgacaatgaagccagttgatcagcggcagcaccaccagtttgttgctgctgagccacagttctaagaacctccattgcttcagcaaccttcgcttttagagcttctggtgactcgagcaaatgcaaaacctcagtctgatccatctccagaagcatccctgtaactttagctgctgcatcaggctccagctgttcaactagaggataaagattctctcccagcatcgttctctgctgatctggtgtagcatttgctagggctgaggccaaggctcctatcggaattggctgagaaattgatgcatcacgcattggcatgccacccatat

SEQ ID NO: 2629 - DNA, 169 bp, Gossypium hirsutum
  Clone ID: LIB3825-015-Q1-N6-H10
aagcagaaatgaactttttgatgcacaaaataaagaatccaatggaatgagtgttcagtgcaagtacaaatgtgagaagaaagtcgtaccaagagggaaaagaggcaagagctagtctcgtatgttccctgtaccagtatccagcccacgcgtccgcccacgcgtccgg

SEQ ID NO: 2630 - DNA, 537 bp, Gossypium hirsutum
  Clone ID: LIB3825-015-Q1-N6-H11
caaaaaacatatattattcaagaaaaatgttagataattagcaatacctactcttctctggaattttacataagcacaaaggattaaagtcatttttctggaacaactctatagtttacaatgaacattcagagctgaacttcctaactccatgctgaagcaacaatcaagcttttgtcttcccaaccaaaatgaagtgcacccacatcctccttcagcttgtacctgtcacagtattccttgataagcttctggattgtatcaattacatttgaactcattggacatgacttgaagccagccattatcatccttgccctccacttccctgcgacttcgtatcgttctatcctttcctctccttcacatgcaatgatgttaactatgtcccgtgccaggcactgtctttcgacgttcatccgatcctggctctccctaggaagggtggcgtccagggagtcaaaaacagcagagtagtaactataggcttcgataaaccttgggaagaatggtgatgtgtttgtgtttacatcttgc

SEQ ID NO: 2631 - DNA, 133 bp, Gossypium hirsutum
  Clone ID: LIB3825-015-Q1-N6-H12
aaaaaacaaaaggccctttaagggtttaaataaattggggggaaaaaacagggggggggttttcccaaaaaacatttttccaacagaaggacccataagcgggggggaaataaaaaaaaaaaaaaaaaaccca

SEQ ID NO: 2632 - DNA, 462 bp, Gossypium hirsutum
  unsure (1)..(462): unsure at all n locations; Clone ID: LIB3825-015-Q1-N6-H2
aaaaactgaacaccctcaaagggttatagattacacatgggattaggcagaaggaacaatttggattttgatacaatgctaaccacccaattttaaaccaattaataataagggcaggggaatataaatttactaaaaaaatttaagtcggtccacttaaatccctgaaccaaaaacacctccaccactttaggggggcctcaaattataaaacgtcaccggtggcctttaactacaatccaaatgtaccttttgacggggactaatctggggggaacttaaaataatcccatactactatcaaaggggtcattggtgtttttttaagggggaaaatcattggcaagtttatttcaaaagttgaacccagaagttgccttaataaagctttctttttttcaaaagttcactttnttaaaggtcctccctcctgtggatcgcccctttggcgccacacccctc

SEQ ID NO: 2633 - DNA, 304 bp, Gossypium hirsutum
  Clone ID: LIB3825-015-Q1-N6-H3
aaacaagtacagtgtattatactgttaaaatagtatacgcctctcaaattatcacccattaagatcacccatcgaagacatgcactatgttaatctggaaaagagtaaataaaacactgggagaggtgctgattacataggttgggcaaataaatgtttagctatatataatatatagcccatctacaacctcaactactttatctcatcgtatcaaaattgaacccagagatcactgctactgaaatatcaatacttgcatgtcaaaatcttggagctccaccaatggttgcttcaggaagtc

SEQ ID NO: 2634 - DNA, 527 bp, Gossypium hirsutum
  Clone ID: LIB3825-015-Q1-N6-H5
aaattaaaacatccaaagaccttataggtattccattgtcatggcatgtattccgagttatacaagaaaaaaaagggtacataagtggtgtatcaaacatggcaaaataaatctaaaactagtagcaataatgccatctaattttaacaatagatgtttaaagttgcgaggagattttgattttaaggttgaacgaaacatcatccaactatctgttgctgcttggaaactttgcctcgtaagtttgtggcaccatgtatgttgcggtgatcatttttccagcaaaccatctcccatgtaggttccgttgtgcattgattgcaccttgtgcatcttcaaatcgtaagtacacaaaaccagcactgtccctgtccacgtgtatatgcttcaattttccaaacttgctacattcttcctgaacatcctctttgatatccaaatcaaattctggttccgtctccagggttggatcaaacatattctttaacaataggcattcgcttggacttccgattgtgtcaataaca

SEQ ID NO: 2635 - DNA, 171 bp, Gossypium hirsutum
  Clone ID: LIB3825-015-Q1-N6-H7
aaaatgccgatgagttgcttctcatttaactaagctcaggcacaaccattacatacaaaactactagaaaagaaaaataaatttgatgcaacttccataattgcgtgggaaagggggtttttgctcaatttacaccccggcaggccccatgcaaagaagggggggggggga

SEQ ID NO: 2636 - DNA, 528 bp, Gossypium hirsutum
  Clone ID: LIB3825-015-Q1-N6-H8
acttcccatctaaatcaaaatttatcacttgtttaatgaagtagcagtatatatatatatagtactaggatctcatacgtatgtacaaaagaaaaacaaaaccctatcttaatcatctcagagtctttgtattgtatactccgctcctgcaaatatgcagagttgtaatagcaaatagtaacctacaactctcttctacttcccaaataaatatgagcatcaaatgaagtctgcaattcagcaagatgatatctcatcagctcatccactatctttgttggttccatgacctcaaatacggtttccccattgccaattgatcatcatgcaaagcagcaacagcattctgatgtgccatgctcatccttcccatttcatcacccatcaccatcatactggcatcacgaacccctaaataatccagtggatgaccacctgcttgctccatactattttcatttattccattgctcctctgttgaattaaatgctcagtagagcccattgatcgataagggtttcttgaac

SEQ ID NO: 2637 - DNA, 540 bp, Gossypium hirsutum
  Clone ID: LIB3825-016-Q1-N6-A1
aattcaacatctgctcctgtttttcatataattcttgaataatagacctcagttcatcacattcatattgcattcaagtctcacattacaaaattcataattaatttctttcttctgctaaggaaatgataggtcgacctgttggaaacccgcctctgattaaaataaaaaatgacaaatcatgtttcagatctaagttattcacggccataggaattatagccatttgaattagccatgttgctcggaggcggagttcgttctggccgaggtcttgcatactctgcaaatataacccaaccttcgaggaacttgccatccattcccactcttcctttctcagcttcctctatagtggcatatcttacgaaaccaaaccctttagaatatcctgatacacgatcagtcactactctggcatcaattacacgtccgaactgagaaaaggcttctcgaagtttctccgaattagtgcgcttgttaagcccagagacaaagaggttggtacttggaggcgcttgctctcgaccaggggttccc

SEQ ID NO: 2638 - DNA, 536 bp, Gossypium hirsutum
  Clone ID: LIB3825-016-Q1-N6-A12
atcaaacttctatttcattatggcaacacatctgtttttctctgtcacaacagacctatataaaacaatttaatatagcataaattaaaattacaaaattccaaaggcttggtaaaaagtaaatcagatttcagcattaggttattgggttttcaatccaaacaaattctcgaataattttggagccatgggaggaagcttcatgggctccggtgccatgaagttgactatcttctcgtgaacatggtaccttatctttcgactctttgaggcgcaacgatcaactatttttctcttcttggtttgcagtcttttcaaggcatagaaggccgtctcagatgatgttgggtcaacagtctcaaaaaattccttcagcaactgctggtaaaattcagaatcatccagaagttcaggatcaccttcaggatgtgcttcctctccattagcattattagcagcctcagtaacggccccaaatatgccaattgttgatcttctttgttgcatttgctttatcattctagttggatccctca

SEQ ID NO: 2639 - DNA, 530 bp, Gossypium hirsutum
  Clone ID: LIB3825-016-Q1-N6-A3
aaatggatattattctataagaaagttaacaaacttatagtaattggatacagttttatcaataatgaatttctattttacaagaatataagtatacaaaaaaattaaatataaaaacaataatcgactctcaagcatcaagactagaaagaataattaatcttccgcttcttttcgattttccaatctgtgcattttatctttagtttctaatcaaaatgagtggcaccgagtcatcagttcttccatcgagtcaacccagatccaccgagttcacgattccaaaactcgcccaaaaaagtcttagccgcatccaaactaggaaaataagcaggctctaagaatacctggctcaacgaatcgaccgagccggagccggccacgactcggttccctttcgcttctaaactccccataaccaccaccaacacctgcttatatccgtaaaagaaccgttttaaagctccttcgatggcttgcaaagcttgtacgaggaagaccttattgccctcctgcttctctgagtacaa

SEQ ID NO: 2640 - DNA, 349 bp, Gossypium hirsutum
  Clone ID: LIB3825-016-Q1-N6-A4
ggggaggaacatgatcttattaaaaactattaagttcaggattaaagacccccacataaacaagctaaaaaaaacagggttgaagctgtaaaaaaaaacaaagcgttcaacgaaaaaaataaccaaatcaccccgagcaaaaaccgctggttggggcacccctttgagggggattctgttaaaaaaagttttttttcactccaaaaaaacccccaaccacaagggttgggggttccaaaatttttaaaaaaagctcctcaaagcattggtccaaatttacccgggtttttgcaccgcacccaaaaaaaagggatcccttttcccgaaaaaagacaaagccctttttttt

SEQ ID NO: 2641 - DNA, 314 bp, Gossypium hirsutum
  Clone ID: LIB3825-016-Q1-N6-A6
ctgcaatatgttgctaagcatagaaacgacatggcaacgaagataattgtcttcttaccaatgtttgttttttctacatagatacagggttcaaattaacacttcaggttcctttggtaaaaaccaaaaaaaaaaaaaaccacaaactagaaagtccaactgaaaaacaggcttgcaagttaagataaaaacgcttttgtaacactaccgcttgctttgtccatagttcacaacaacttcgccaaatccatttattaagaccaaataaaaatcatcttttggacttccctcagcaactgttggcacaatgtcag

SEQ ID NO: 2642 - DNA, 564 bp, Gossypium hirsutum
  Clone ID: LIB3825-016-Q1-N6-A7
tcgcgatctagaacagggagattatcttggaaagactgttcaggttgttcctcacattactgatgcaatacaagagtggatagaacgtggagcattgataccagtggatgggaaggaaggtcctgccgatatttgtgtcattgaattaggtggaactataggggacattgaatctatgccatttattgaggcacttgggcaattctcctaccgcgtaggccctggcaatttctgtttggttcatgtcagccttgtgcccgttctcaatgttgttggtgaacagaaaacaaagcctacccagcatagtgttcgtggacttagaggacttggcttgacaccaaatattcttgcttgtcgcagtacaatggcgcttgatgaaaatgtcaaggaaaagctctctcggttttgccatgtgccggcagaaaatattgtcacactctatgacgttccaaatatttggcacattcctttactactaagggatcaaaaggcacatgaagcactcttgaaagaactgaacctcctaaggattgcaaggaaacctgacttaacagagtggactgc

SEQ ID NO: 2643 - DNA, 543 bp, Gossypium hirsutum
  Clone ID: LIB3825-016-Q1-N6-A9
agaaactataaaagcaattgttcaatatgatccaaactcaaaatccaacataagtcaggcagcccttcgtggttttcaaatggaaagataatatgatgaaattcccccaattgctttacatcttgaaagggcaaactaccatcctcatgaataacacatgaacctaaatgccctctttgtttttctttattctctccttaatttcaatgttaaactgaaaagatgcccacagagggaaaaaggtgtaataaagacaaataggcacactttcaaagtgtaaacagtttaggatttgtgatttttcaccatgtcatcaacatccagctctacttccaacactggagaatcctttcgcataccgtaatgactgttctgaacaggaccatgatcaacagctgttcgcagacaatatataactcggccaactatgccagtcatgggaactggaccaaataaccgactatccttggcttcatttaataccttgggcttcaatttttcattgtcagccaatacccagcactggtccttttcaagaacaaa

SEQ ID NO: 2644 - DNA, 509 bp, Gossypium hirsutum
  Clone ID: LIB3825-016-Q1-N6-B11
aatgagaaaatttcccaagcgaggctgggaatcatacttgtttattaataaatcatacccttcaaactgaaaaaggcataacagtaaccgccctatgaaagcttggaagaaaaaggaaggtgcgcgaataaattccctttccctaacatcatgcaaaaaaatacatagtctcctgtaataggaaaagaccagtgagggaaagggatgccaaatacccaacaccacatttgtaccacatttgttgagtagtatgtatgtcttgctctagtcttcatattctgtctcttcgtcatcatcttcattgttttcccggtacctccatccatcatctacattgtcacggtcttcttcagtttcttcgctatcctcttcctcaaatacttgttctttgattggccactgtttcttgggtataggcaaagtcgcaggaaatggactcgagcctttctgtcgagcaacctttgccggaggcatcttcacatttggcttggccctactttgttgtttct

SEQ ID NO: 2645 - DNA, 559 bp, Gossypium hirsutum
  unsure (1)..(559): unsure at all n locations; Clone ID: LIB3825-016-Q1-N6-B12
aatacagaagggcattttcgataaaagaatcacatgagaagtttctttcaacatacatnaggaaaacagaggtattccccaaatcaacgttaaaaaagaaaaaaataataaaaaataaaagctcagccccaaaatgagcattaaaagtttatatcntgaaagcatgattagatcttaaccttgaaccgtaacctaagacaacaatagcgattatctcatctgaaaacatgatcgaatctaagaatcatgattatatatgataaaagcatctccggttttacacgttaatcgatcttgacagatgagtagataagccttgtgaaccaaaaacatgcataaaacccaatggtgcccgttagcacgaaaaatgcatatgaagcgattagcatgtatccaaaatacagcatcccagaaaccagcttagtgatctcaagcttcgtgaagaagtagaatgtagcgtagaggaagagatataacgccgaggaacctgatgtgagatatgacctccaccaccacaggtaatcttcactgcacaactggaagtagcaaagcacaatgg

SEQ ID NO: 2646 - DNA, 533 bp, Gossypium hirsutum
  Clone ID: LIB3825-016-Q1-N6-B2
aattacaaaaagctgaatattatactttcaaattaatcccatgctaagatttaaacaaatatactgatggatttctttcttccttattgagctgatgttgctagaactatgaaccatccatgaaaacagcaccatgtccactagatttgatgtatttcttgaacaaaagaaccaaaatagcaatggtaagtccgacggcagcccacgtaaataagcggtcatcaacaacggatcgttgaacccttatctccggccttcgtagtggttggttacttggtccctcaccagggatctctctcactagcctcatggcaacaggatatggataagcattggcgggagccacaggtggttcttcgacaaccctttcatttaatgttggattagggattccgggattcccggcacccacagtaacggaatcttgctgattggcctctgcctcggcttcagttttggcttcggtagggtgttcttctgaggattttgaaggactatgttgaggaacactgggagtcttgcttaacatatat

SEQ ID NO: 2647 - DNA, 554 bp, Gossypium hirsutum
  Clone ID: LIB3825-016-Q1-N6-B3
aaaataaagatgatcaaagctcgatcaccaccaccgctcttattaaaataatcataagaaagtttaggttttaagtggaaaaagaaaatataaaaaacaccattgaaagtaatggccactctttaaaagcagcatgagaattcaaagcaatctatatcttagttgcaggcttcgggattagccaagaggtaagcttcaacaggcttgtaaactccctcactccctttaatgagagccttgatttcatcttcagtgattacattgtcgccaacagtgtaaaatttcatcgagctcttgcaaatgcttcctccacttgcagctgcctcaaacttgttttcataactgattttttcaagcttgtcccccaagggcccaccttcgattaaactgtagctatatgaaaaattattttcgtcatgtcctcctatctggtgcttcatatattggaatggaaggccttcaacaaaattgatctttacgatgcttcctgagctaggattagcttcaacctcaacactcttgacggtattaggggcagctgtgggccaaacctt

SEQ ID NO: 2648 - DNA, 311 bp, Gossypium hirsutum
  Clone ID: LIB3825-016-Q1-N6-B4
ttttttttttttttttttttttttttttttttttttttttttttttttttttttttatataatgggggtttttttttaggggaaggggaacctgagagtaggaaacccaaaaaaggggaaaaaagccggaagaaaaagccaagaaagggggagggggaaaaaaaaaaacaaaaaggggaaccaaaaaaaacccaaaggtaaacaccaaataacaacaaaaaaggaaaaaaaaaaatgcaacccaggaaaaaaaaaaaacaaaacaccctcaaaaaaaaaaaaaaagagccgtaaaaaaaaaaagaggggag

SEQ ID NO: 2649 - DNA, 481 bp, Gossypium hirsutum
  Clone ID: LIB3825-016-Q1-N6-B5
acatgatcgttccaccactttaaacgatgagcaacaaaattaattcccccgccaaggggttgttcccaaataaaagagcctaagtgggggatttgaaagagcagcacccacctgaaattatcaaccaacctaggtagcaagcactcggaagttgaaccacttgcgtgaaaaaaaagattacatatataatcaatccaacgcttaacatacccccccccccaagctaataaaaaataaaggaggaaggacaaaagggaattgcccaaataagggaacaacctacctctcggcctcctgataaagaataacccagtgaatggaacacaactacatacctcagaccctaatccttagtacaaaaaatagttgaagctgaatatccctaaaaatgggcaagaacggggcccaccatagggatgtctatctggccaaaatccaccacccctgtaattatccctgggccagaacccacagccacctt

SEQ ID NO: 2650 - DNA, 430 bp, Gossypium hirsutum
  unsure (1)..(430): unsure at all n locations; Clone ID: LIB3825-016-Q1-N6-B6
gtatgaaaaacagggggtaggggaagggccccgaaccgaaaaagcaaggggggagaaaaggggaagggggggggggcaggggggggcaaggggctgagggggagaaagccagggggaagggggaaaaagggggggggaaaaaagggaggaaagaaggggcccccccccacattttaaaaaaaaattaggggggggggaaaaatgggaaaagggggggaatctgcaaaagagcaaaatacaagaaaagtagtaaaaggaaaacggttaatgggggaaaaaaaaaggggtactccaaggggcagacgaaaaaaagcgggggcaaagggggaggggaaactggtttatcagaaaagaaaaaaaaactttcgagaaaagaggggccgaggattaggggagagtaataaatntggaagggacaaaagtccaaacc

SEQ ID NO: 2651 - DNA, 496 bp, Gossypium hirsutum
  Clone ID: LIB3825-016-Q1-N6-B7
cggacaggaccaaaactgatgctactacttctcagttgtaatattctctaatttttaacccaaaacaaaaacagaatggaaaacaaaaaagatattcatgcaaaattacactcaaaaacacgttcatggtttctaacaagggaaatggtgatttgtcttgagagtttttttgagggaaggtggggggactcctgactatagaataaatcacaacggattccaagtgaaaaccattgcgtaaattgtggtggcggacatcacttgccacccaatgaggggaagtgtccaggatctgcaattgagggagcttgcacattgctggctgtgttgcctccatacccacctctgggaccacggccacggcctcgtccacgcccaggtccatagtacctttccccttcagctggcttcaggaactcattgatgctcacagactttttgactttttcttctttatcaacatccttgcgcttgtcctttttagatcccagtttga

SEQ ID NO: 2652 - DNA, 431 bp, Gossypium hirsutum
  Clone ID: LIB3825-016-Q1-N6-B8
aaacacaaaagtattcattggaacaaatcctggaaacatattaccaacactgatcaataaaaaagaggtcttccatttgcttaattgagaatacattgccctaaagtcaagaatccccgattgggcttactatcttcactgtagcaatgcaccattcccaattggcccaattctgaaaccaaaacctattccgatttctatatgcatgtaccaatgctacctttccaatggggttaagtgtaaaaccaacacctatgcacggtgggagaaagaaaccagatgaataaaagtcaaagtcaaagccgcaatgcaccggcatctttaatcaccacaatgaagaatcctttaatatgactagccatgactttatacaatcccccaaacaacctgccaccaataaacacatatctgaagctgaaccattttattgt

SEQ ID NO: 2653 - DNA, 532 bp, Gossypium hirsutum
  Clone ID: LIB3825-016-Q1-N6-B9
tttttttttttttttttttttttttttttttttttttttttttttttttttttttttttttttttttttttttttttttttttttttttttttttaggaggggaaaaaaaaaatggggttaaaacgaacaagggggacccaaatccctttcatcaaaacaaaaaaaattaaccccccagggggggggggaagtccattggaaaaaccccctgaaaagggccgaaaggcccctgcatgaaaaaacagggtgggggaaggcccccaaaactcctaacaagaacattaaaagaccgccccccaaaacaaaaaattgccgcaaaaaatatagggggagaagcggggttattcccaaccttacaggtggcccccccacccaaaaagggggggaattgggtccttaaaacccttcctttaacggatctaaaaaacaggggctggtggttgggaaccaggtcccaagggatctgaggacatcatatcccagggaacaaacccccattggggaaaaccccgcccggggggtgcacccccc

SEQ ID NO: 2654 - DNA, 557 bp, Gossypium hirsutum
  Clone ID: LIB3825-016-Q1-N6-C1
atataaaattttaatttctatttgattaattcaaatttcaaaattataatattatccaaccaatccaatataagtacaaaaccgtaatacacagtcaaataaatttggattccactggtccagccagccttttaaccaatgcatccgacttaacggttattctagttaaaaggggaaaagaagtttattgtaaatttgatatatgagcaatgtggtacaaatgccattcccctacttgggagatggaggacgaagggatattcggttttgctataacattatggtgttggggggaatttacggagcaagtatgaatgcagtgtgacagtgctaataatcgtaataaatagaaactgcatgctcaacttcaccctttacaccgcatctgcgtgaaatagaaatcattcaccttcctccacctctcatgttagagttgagtgacatttcaatctcttccagagaccggcctttcgtttcaaccagaaagtaatacgcaaaaattgctgacaacaccgacacactgccgaaaccagcataaactgaagcaactccaaata

SEQ ID NO: 2655 - DNA, 555 bp, Gossypium hirsutum
  Clone ID: LIB3825-016-Q1-N6-C10
gctctaacaaatcattttcagctaaaaaaatgaaagaacaattctgaaacttgtaacagtttactatcaagtatagcttatcctttcaagttcctttaacaaaaagggaaatcttgtattaaaaaaaaaaactagaaaagggaaaaaattgattaggaaaaaggaaaagatgaatgagttagattacattccttcaacagggagaagaacaaaaagaaagagcagaatggtaccgaataaatgatgattggatgcaactctccggggactccttttttggagggattttaactgcaaaaatacctaaaacatctcttagattggttccgggggcactgcttttaaaccccgaatccattcgcagaagctcggatcatcgaaatgtataaaactgcttttcagtttcgtccgttgttcaattgtcagggttcgaagctgaggaaatcttgcctcctgctcgtaaggaggatccttgtttgctggtatgagccgagaaacaaaatatcgagcctgagagctgccctccttgaatgccaggatcccgagtgctggaaa

SEQ ID NO: 2656 - DNA, 555 bp, Gossypium hirsutum
  Clone ID: LIB3825-016-Q1-N6-C11
ccaatctaaattttctgaatttaatactgtataatttggtaggcagggaatttcgttagttcttgtatgatttagctatgaaagcaagaaatgtatccaaaactactcaattgctgtcccaccttcatagctcaaattacaaacaaatactatttcacttagatttgggttcctagcatcataaggtgtaagaaaaattcatcctgtcctacttctacttgcataaacaaaatgccctctttgacaggctgcctaggagtccacttcctcctcaagggatggcgaaagccgcatcctctttgctgctggttgctcggataactctgccagagaatcattgacaatgatggcctccttgttttcagccacttcagaatcttgattcaattgttgcatcctctttgctgccggttgctcagataattctgcaagagaatcattgacgatagcctccttgttttcagccacttcagaatcttgattcaattgttgcatcctctttgctgccggttgctcagataactctgcaagagaatcattgacaatagcctcctt

SEQ ID NO: 2657 - DNA, 493 bp, Gossypium hirsutum
  Clone ID: LIB3825-016-Q1-N6-C2
aaaagggaggggaccaaaactggtagtttcccattaaaaaaaaaaagccaaaatctaagtccactggggggcacagccgaaaacctgacttgttttttaaaaagaccagtttttttgccctttatttattcataaaacacactatacaattaaacagcaagaggggggattgttttttaaaagtcttgcaacccaaatatgttgcttaaatattggccaaatatactcggggaaaccatcgggtataaaagtctcgttaaaaggatttttccacccttcctcgaaaagttttggatacacatttccattatagcgaccaaaaacaaacccaagggagggggcagggtagttaaatgcatccacaagggcaataacatttggacggacctgggagaaaaaaaatctcagctgttcatttgctagggcaccttgctttggggtaatgcacccggaggcaaaaaaatcaccgaaatgtttgggaaacaaaataaaa

SEQ ID NO: 2658 - DNA, 549 bp, Gossypium hirsutum
  unsure (1)..(549): unsure at all n locations; Clone ID: LIB3825-016-Q1-N6-C3
aaagaataaaacgcacatgngcgcaatctcaactagactattttttcgtttgggagacaaaccataacaaatttgcgtacagccccctcaactacaaagtattacaaaagtctacatcttttttattattattatttttactttcttggtttaaatatttaatatgagtttatctcgtcgactcggaaaccaatccctcggcaggaaccatgttcttctccatcgcgggttcagagtgtcggtgctcccattcgtatgttacaatcaacatagagggatcatccgagtctcgctcgacgtgtttcctggcggggcagccacggaaggcactgcatttataatatccccgtgggtatggcgagcctttgatcggcttttgcccgtatttcctccaagaatattcgtcagctggaatatcggcgatcttcgaactgatggccggaactctgattactttcttcaccctatttttccttcgctttgagcaatggcaattgccgttgccggatccggagatggtatcggagtggttatgttcgtggcacctct

SEQ ID NO: 2659 - DNA, 565 bp, Gossypium hirsutum
  Clone ID: LIB3825-016-Q1-N6-C4
ggaaaaagtatgtttctcaattgctaaaccctacttgtactcgaccactgtacagacacgcccaagttctattgaaaaactcttggggaaacttaacccataatataaaacgttgtccatgtaaagctcttggagacgcacacttaaacccataaccagaagagttctatccagcttccttaatggtggacaccattaccattgctgtatacaccatttaatgatccgttggatgacttgaaacagtttccgtttgcccggggcttggaagttgctttcccatttatcccatttgccattccattgctcaaatgatcagatttgtttaaaagcaagtccatttgcccacatgatgcagcgataagccctgagaaaagtgcagatggttttcctggcctggacttgaattcaggatggaactgaacaccaataaaatatggatgacttggtagttctacaatctccatccgcctaccactttcatctctgtcaacaaatgatagaccagctgcttcaagttgtgatatcatatcagggattgacctcatatctatgccgatgccgt

SEQ ID NO: 2660 - DNA, 559 bp, Gossypium hirsutum
  Clone ID: LIB3825-016-Q1-N6-C5
aactgtgaaaacagattcaaatataggggaagtttttactgtatctttatctgcctcttatcatcagagatgtttgagatgattatgtacaacaaaagacatgaacatccctttacatgaccacgtccccccatactttaacaaccatcttccccaccatcccatattccaaaagtccagtgaaactatacaaaaacgatcagaaaaccctatctcgaattcccctccttcaatcctgggcgtccatcactgtatccttttcttcaaacttcactccgaccaagaacctcatgctcacctgtttgggatcatagactgtgtattcattatactcgagagggctatcctggtgttctgaggggatcaaacggccacaagggactttgatatcatctttccaatctatatattctgattcatctggtttctttctccccagtcccttcacacacactttcttctcttccaatggcttagtatcctccggtgggttcttgagctccataatttcttcaccttgtgaaaacacagcgagaaccaagaacccttcaggcctgtc

SEQ ID NO: 2661 - DNA, 549 bp, Gossypium hirsutum
  Clone ID: LIB3825-016-Q1-N6-C6
caataaaaatatcattttatttaaataagtacacaggggtttgcctgaccatacaaatctaacacaaactaatagctccctaattcaaggaagaatacaatctagtctagtctaccatcaatattcaagacctctcaacatcattattattattattgtaaccacacgctcctgaaaggagaaatgccaatgaagtctccgaatcatcggatgccggtcgagggaactcatgaaacccaccaaagttacatgtctcaaagttcaatggtgagaaataagcagcaggatcatcaaggctgcctttgacatccaccccattttcactaccaaagttgaagaaattcatgcttccgaccacatttgttgcttcactgccatctccagggtcagatggggcagtgggtcctttagtttcatccaagggaattgctggagtgtgaccctggaaaagagctatgtgaccaaacagcttatctttcctcgaaaacgtggtgccgcacgaacatagccatttatctttaccacaatgcttctcatgagttttgagat

SEQ ID NO: 2662 - DNA, 555 bp, Gossypium hirsutum
  Clone ID: LIB3825-016-Q1-N6-C7
ttttttttttttttttttttttttttttttttttttttttttttttttttttgaaatataaaacatggaagggaagagttcaaaaatctttccctgcctttttttaactttaaccttcaagcttttgaaagaacacataaccagggggtacactcaatttcttttggtacaagcgatgctgcataatttcttttttttttcttttaacttctgacctcccgaaagacaacaatactagaaaaaattgataaacgtcatcctcaaaaaggccaaaactgaaaccaaactccctcccacaacacatacttgagggatttttcttgtttttcttgagctcaatgatgtgaaatgggacaatgccacctccaaaatcgattccccatttaggaaatatacgggtaaactattgaaaaaagctaacgctaaaaaaacggggaatgtgcatattaagctcttttccagtttatttggaaaatatttgctgagaaaaaccccccaccgaggttgatattcaggtaaatggactgaatgccccatctattttatgtcacctac

SEQ ID NO: 2663 - DNA, 515 bp, Gossypium hirsutum
  Clone ID: LIB3825-016-Q1-N6-D1
ccttcattcatctaaaatgctacaaagtccaacccaaaaatccatcaaataatcccttgtaatttcaacttctgaaactatttatatatataactagaatcaaactgaaaaagaagacggtcccagaaaagcattacataactagcaaattactaaatccaaaggtcaaaagagatcaatgacaggaggtaccatgccttccacctgaggtccattagcatatactcatcttcccctctcctgctgagtcaccgcaccattttccccaatcaccagcgtaaggggaccttgacctctcaagaattgggctacatgaatttcagtgttcgattgaattctaattattttgaagtggcccaccctattgggatggagacaaccggtcccgtttcatccccacctcaaaaaaactgcgcgttggggaacgttgacgtccagcaccactatcatacctttcagcactacaactccagctgcgatcacgtacgccagttttatggcgatcaccccaacct

SEQ ID NO: 2664 - DNA, 545 bp, Gossypium hirsutum
  Clone ID: LIB3825-016-Q1-N6-D10
agcaaaaacaaatatcataacacatgcttttactgatcaaattcacaaggaaccaaaacaataatcaggagctgggctccataattcgatataatgcaatgcatgataatcccttgtacgacatggatatgattacgcagcagaaagaaatagaattgattcaacaattctctgggtcctctcctctaggaattagcttcagtgaaaaaggtcatcatctaaatgattatatattacactagccggagcacacgtgaagggcaatacactcagtactgcataattctaccaaagaaagaatctgagcacaagactcgagttgcaccagatgagccatctgccacctgcttgctttcttctatggcaactcgaatcatccctaccaaaccccacaccgatatcagaaccactggacgtattctcccctacaacaattctgaaatttccaagtaatacagtaaagcaattaagttgcaggttctacactttcagcacccgcagggggtaaagtgttcatttctgtagttgtagaaacagctgatgtt

SEQ ID NO: 2665 - DNA, 504 bp, Gossypium hirsutum
  Clone ID: LIB3825-016-Q1-N6-D11
aacagaacaattgttttacattattgcaaaaaacagtacatgcgatggtattacagccagcacaagcgtgctacaacctaacctgaagacgactttggactagaagtatcgacagaaaaactagttgtagaagttgaggaattatggacagctcttgtgtggctgatgcttggtttagtgaaccaagttgtttacagaaattgtttgtgaggccccacatggttgcatattagcctaatgttttgtctccctctcatccatctcagcacgatcttcatgtgccttttgcttgtaagtcctctcagtccaacctcctgaactcataaacacatttctactccaacatgtcgagcacaggcaagtaaagacgactttggactaaaagtatcgacagaaaaactagttgtagaagttgaggaattatggacagctcttgtgtggctgatgcttggtttagtgaaccaagttgtttacagaaattgtttgtgaggccccacatggttc

SEQ ID NO: 2666 - DNA, 504 bp, Gossypium hirsutum
  Clone ID: LIB3825-016-Q1-N6-D12
aaaacaaaacaaactagtgctgtttttaaaaaaaaagaagctattttccttatacaactctgccctgtccaccatgacatattcatacaagtttacatggtaatacaaacttgtcgaaatgttgaggtcaaatccggaacaaaaaacagaaacaagaaagaaaatttgataaaaacctttaccttacaatctatggaaaacacacatatatgcatctcaatgggtactccatgggatataaaagctagttgaatgagataccaagccagcttgctattctgtccacgaggctcaaggtcagtggtgccagcatacgggtaacctttggcagtgctggataactgagtgtcccaactatgaaccaattgaaactcaatagggcaactgcatcagaagcaggtttgttctttatactgaaaaaaaactgaaccacactttgaagtgacatgccaacaacagtaaagagagccaccacaagaggcatgcaaggatcttcagcttccc

SEQ ID NO: 2667 - DNA, 521 bp, Gossypium hirsutum
  Clone ID: LIB3825-016-Q1-N6-D3
tttttttttttttttttttttttttttttttttttttttttttttataaattgatgtttttttattaataaaaaaaaaaaaggaaagaagaaaaaaaaaaaaaaaaggggggggggggggggggggaaaaaaaaaaaaaaaagggaaagtaaaaaaaaaaagcaaaacaaaaaacgcgaggggaaccgaaaacaaaaaaaagtgaaaggcaaacaaaaagataaaacacttaaaggcctttcgggggagggaaggggcaggaaaaccaaaaaggaggggggggcaagaaaatgcaaagtaaatgaaaaaaaaaaagagggggaaaaaaaagaaagggggaaagggaaggagaaaagaagaaaaaaaaaaagaagagaaggaaaaaaaagaaaagggaagggaaaaaaaaaaaggggaaagaaaaaaagaaaaggggggggggggaaaaaaaaaaaaaggcagaagggaaatcctagttctaagaccaggccaaaagaaaagaaaaaaaaaaccacacctag

SEQ ID NO: 2668 - DNA, 542 bp, Gossypium hirsutum
  Clone ID: LIB3825-016-Q1-N6-D4
gacaaggcagtaatgtctttattactccgtttgtaaaaattacagtggtacttttgtaataccaaccatataaaattaaaatgaaattaagtgcattttgcaaactaattactcttatcaacaaagaatagctaacgggagcttatacccagacggggaggaaaaaacataatagtgcctacttctatgtccttgtccctgtgattcattagccattaacaggccctgagagagatgtatagaattcacataatgtacggcggatcaatagaggcccactcaaaaacctgctcgtattgaatggcagcattttcccaggtgaagtccttttgcatgcatcttctcgtcaatccctcccacgttgacttgtgatctctgtacgtccttattgctgtttttagcgcatttagcatacagtcttttgtgagcggagaaaaggtccacccggtgccttcacctctaccttctccggcgtacggattgaaattctctactgtgtctctaagtcctcctgtggcatgaactacagggacagttccata

SEQ ID NO: 2669 - DNA, 461 bp, Gossypium hirsutum
  Clone ID: LIB3825-016-Q1-N6-D5
ggaaaaaagaacaccgcccaattttttggaaaaaacaaaggtttggtccgcaggaacagacccaaaactgggctaagaggcccggggaaaccaaagcctctcaaactttaaaaaccccacataaaacggggaaaaacttcaaaccccatttaacccaagataaaaacccccaatcgggttcaccggtaaaacctttgggccccttcacttttttttagcagcaaacttggggacccgggccccggggggggcccttttttcgacccttttgaaaaccccaacagccccgggggggcccatggccctcacagaaaaacgacccagggggggggccccagagaagggccccacaacccggggcggggggggaaacattttaataatacccgcatcaccggttttaaaaaactgggggtccttttaaagccccttaccaaaacgccgggaaatttggggcaaaa

SEQ ID NO: 2670 - DNA, 555 bp, Gossypium hirsutum
  Clone ID: LIB3825-016-Q1-N6-D6
aattataatcaaatcatttattaaaatgcatcaaactccacctactacaaataaaaataacggcaggaactgaaacatgagagacttcacgtttccaaagccagttcggctttccatcttagtaatactatcacatgaatgattgcatgaaccctattaaaagacattatctaggtcctaatactaagaggtttgtcaactgcagagctcattcatgtgaaaatttcacaagatggttatgaaaggataaagacttgcgcgccaaaggctcctggacataatacttacaagggttgatggaaatgagccagggatgcgattcttcaaacctgctaaatgggccgaatccgaaaaatgctgctccacagaacaagggactggcatggatcgcgtctatcgacaagattaaaacggtgctatgaagctcgttgcccagtcgactgctcttgagctgacattgttaacctacccactcgaaatgctgcatctttgacttgtttttattaaattcctctcataatgaactacaccattgtagagtatacccctcaaaaa

SEQ ID NO: 2671 - DNA, 462 bp, Gossypium hirsutum
  Clone ID: LIB3825-016-Q1-N6-D7
gggggggaaccccgggaagggggaaaacccaaaaggtaaaaaaaaacccaaaaaaggctccccacccaatttttaaaggcaaaaaaaggggcccaaaaagggggaaaaaatcttaattaaaaaaccccgggaaggggaagggaaaaaaggcaaggaaaccccctttgggaaaaaaaaaaaagcaaagggccggccatttaaaaggggggggcaaaaaaaaaaaacccttgggggggggggggggacccctcccgggggggaaattttggcctaaaaaagggaaaggggggggaaacttcaaaccctaaaggggaagggtttcccagaaaaaggttaaaaaaaaatggggttccaacacgcgggcggaaaaacaaaggggggggggaacccttttgggatttgggggggggccaaggcccaacatttttaaggggggtggcaaaaaaaaagaacccttggggg

SEQ ID NO: 2672 - DNA, 536 bp, Gossypium hirsutum
  Clone ID: LIB3825-016-Q1-N6-D8
gaagaaaatataatctggaaatgcagaataaaggtgagtcagacaagtaagtttcttttacctctgtttcatgggtgacttcaattttcagttagtgtaagagccagttataaagcatccaacattataagatgtcaagtagcccagagtattataatgtgaaataactaggcatttctagcaaattcattctgaggaagtgctctccatccgatatcccgccggtagaatcctccaggccacttgatttcttcaactgcatcatatgctctatcccgtgcttctttaagatctctgcccttagcagtaaccccgagaacacggcctcccatggcaacaaaatttccatccaaatcaagtgcagttccagcatggaatatcttcacacaaggagccacattttcagcttcttcgaggctctgaatcacagtccctttctcataggagccagggtaaccttggcttgccattactaccaccatggcagacccaggggaccagtttagtgacacccctttcagctctcctctacaagc

SEQ ID NO: 2673 - DNA, 541 bp, Gossypium hirsutum
  Clone ID: LIB3825-016-Q1-N6-D9
atcccaaaactaaactaaggcttcatataacaactgagatcctgtcagcttttacataaagagtgctgcaaacatgtgtttataccccaaataaacccatccaatcaaagtaataaaattattttaaggggaaaaaaaaatgatccattgaatatattaacaatgtaaacatgcttattgaactcatatctgtgtagccatggcaaaggagagagcttgagaaatgggcagtgccgcaatcgaaaactttcttataatctagatttggcctgctccaccggcgcgctcaatggagcacccttggctgccatttcagccaagaaggcacaaggcttgaagaattctccatacatttttgtccactcctccagtctacaataaatgtagttagatccgagagagtcggcccaaaacatgattcctccccggtaaggtggaaatcccattcccataacagaagcaatgtcaaggtcagcccctttcactgcaataccttcggctaaaacccggcaagtctcattcacaactgggaagaatatca

SEQ ID NO: 2674 - DNA, 433 bp, Gossypium hirsutum
  Clone ID: LIB3825-016-Q1-N6-E1
aacaagaaaaccattttaaaaaaagggcccaaaagcccctttattggcttttaaaggggccccaagttaaacccttgaacaaaggggaaaaaaacagggggggggacattttttccacttgggggattaggggccccccaatccccttaaaaaaaaacaggggaatcaaaagttttaaaagggaaaagggggggggccgcctttaaaagccggaaaaacctgggaacttttaaaaaaaaacggggcttttttatggaaaaaacaaactttttttccaggggcttcccctgggatgggttccttttcaaaaaactcaaaaaactccaccattccctttttttcttgggatttttttttaagccctcccactttaacccattttttttgggttttagcccccagttttttttttaacccacccaaaagccctgaa

SEQ ID NO: 2675 - DNA, 500 bp, Gossypium hirsutum
  Clone ID: LIB3825-016-Q1-N6-E10
acaagagataagtgctcaatgcaaagatataaccgtggtttacagtgaagaatcatacaaaaccattcaagctcaaggccagctccctcctcacactaacaagttgtctcattaatccaggctgcctcttgtatatacatgtctcacatgtcattctactcgtttagcaaccatgaaaattaacaactcttactccggtggcggcttcttcacgttcttgttattatgcatccaaaccttgaatacctgccttttcaccccatactcagcacaaaacttctgtacttcctcctcgtcttgtttattgatcctccaacccactttctcggctaactccaacatcttatccttctgctcctgcgtaaattttgtgcggaacctcttctttgacaacacataaggcggaggcggcggcactccgtcggcgttagattggaacacgttaagatcctcgcttgaagactcgttcccaccgccaccgccggttccgaacgccatgt

SEQ ID NO: 2676 - DNA, 551 bp, Gossypium hirsutum
  Clone ID: LIB3825-016-Q1-N6-E11
aaaccattcactagagagcctgagcctacatgatcaatgaatactcttgtctaaattggaaaacctaattgatacagctcacatcacagtttccaatatttactctcgagtccggacagattataataccatatgataggatagccaagagagcaatctacatcgcttcaaaacacaaggcagagataattttatctaagctaaaattcagaataatctggaaagcataacgaaaattagaaacctcctcatcctatgacaaaattttgaactacctactccattcgtagtctcctccatatctaggattggcattatttgcacgacttgtatcgtccggtttggttgaattggcaaaggcgtgccaacctaaaagatatggcaaaatgaagctgaatgcagatttgaggacagtgaactctccccgtgtaatggggatataaacattttcgtccacgtttagaagtttgttttgaacaccaagattaaaaaagtgaccagacccatccgggagtggctctaccttcaacaccttcctaacctttccttca

SEQ ID NO: 2677 - DNA, 509 bp, Gossypium hirsutum
  Clone ID: LIB3825-016-Q1-N6-E2
ggaagaaaagatccaaaacgtcaacacattttaaagggactagaaaaatgattctgatcactaaacataatattatccctcctaagtatatcaatttcaaaccataatgggaactggttctttaaaagcataaatatagcatgtaattaaaactttcctactccaacccatatccaggggtccatcaatcaaagcgcaagaagctggttccaacagtgtcttcccttaggccacaagtgtgctggcagtagtcgactcgtatttccagacggggggaagcttttttgtcttcttataatagcgggcaaggggatggattctgctctcaaccaggatcaaccggaacttggaatccttgtctttgcggttcctctcaaaatgctttctgatggcaacagcttttttaatcagggggtacaaatcttcgggaatttcaggagcgaaaccatgggctttcagtatccgcaaaatcttgctgcccgtaacactcttcacctgagcaatcccat

SEQ ID NO: 2678 - DNA, 538 bp, Gossypium hirsutum
  Clone ID: LIB3825-016-Q1-N6-E3
agtggtctaatcttcctttaaggagtcttcataaagtcttgatcttagattttaattacaatatattattttttttggtgaaaaatagaaaattactagaaataaactatgccaattggcctaactctccaaatgggggtcttctaaacattcgcaaaccttgacttcctgagtgagccatcttggcaagtctatcagcttcctggttctctgctctgggcatataataaatatttcaaaaaaagtctgccgtctctggcacgggttctgtctgccgtctctggcatgggttcttaggttttaggttttgtgtttatgtttttttggattttgaggggtcttgatctcttttattttattccctacgatttccgcgattgatctctctttaattggttggcggaagcattcctttaattccttcttttacctggaagagcatttgggctgctaaaggtctactccaaaaagggatggagagtgggcagaggagatagcatctctttcctgaggacatagttcggaaaatccttgaaat

SEQ ID NO: 2679 - DNA, 495 bp, Gossypium hirsutum
  unsure (1)..(495): unsure at all n locations; Clone ID: LIB3825-016-Q1-N6-E4
tttttttttgtttttttttttttttttttttttttttttttttttttttttttttttttttttttttttttttttttttttttttttttttttttttttttttttttttttttttttttttttttttttttttttttttttttttttttttttttttttttttttttttttttttttttttttttnaaaaaaaaggaaaaaaaaaaaaaaaagggagggaaagtaaaaaaaaaataaaaaaaatggggggaaaaaaaaaaaaaaaaaaaaaaaaaaaaatggttttggggggggggtttttaaaaaaaaaaggagttttgaaaaaaaaaaaaaaaaaaaaaaaaattttttttttttnttnttaggaaaaaaaaaaaaaaaagaggggaggaaaattaaaaaaaaaaaaaaaatttagaaaaaaaaaataaaaataaaaaaagaagagaaaaagagaaaggggggatgtaaagaaaaaaaatttatnagagaagg

SEQ ID NO: 2680 - DNA, 543 bp, Gossypium hirsutum
  Clone ID: LIB3825-016-Q1-N6-E5
aaggggctaaacttgcaccactttgtattgtttgccattaatattgtctcccattaatgttaacattatctgcctactcgagtgaacattctttgtaggaaactgacaaacagtacattatgccctcgatgtggggaagaactagaaacgatgaaccatcttttccgtcattgtccaagacccttgttctccaacctcaacccctctgcaaactattttgttgcacgctttgggccatctggggtaacataaatactcatgtacgtgacaaaacaaaaagatcgagtcaggagattgcaagctttgttcttagctatttagaaaaactggaaggtgttaagagcaacaagcctaatatcgttaaggaagttaaaaagtggaaacccccacctgggcagttaataaaaataaatttcgatgaagcgtttgactagtgtaatcaacaatcggcctctgggatagtagccaaaaacagtgatagtagccagaaacagtgaaggatttgttctcctgtcatgcacaaagcttcattttggagtgccc

SEQ ID NO: 2681 - DNA, 537 bp, Gossypium hirsutum
  Clone ID: LIB3825-016-Q1-N6-E6
aatatgaaacaaaataaaattaattagcaaaaaacatcttacacttagaaatcttcaatacagatcaaagctctaaacaaattacagtaattcatttacaggcaaaatgcttttaaacaaaatggtagaaaagcatcctagtagctaatatatatcatcaaacacaagttcctaatgcaagcaaacgttacattttgcggtaaggctacccaaatacactatcacaagcttctccataaggaaaaaagataataaacattcataattatctgcctttacgacgatttttcacggtcgcacaatccggacaataccatttccctttcggttgttctttcagaccgacacagccaaagtggaaccactctatcttgcaattggggttatcacatgctaccatctctccgtagctaacttggttgcacaaacagtacgttggctcgttaggatccaccggcaagtctaattccacaccggttggatttgctgctgatgctgccacttctgttgccgcagctgctgttgctagacgtgttt

SEQ ID NO: 2682 - DNA, 466 bp, Gossypium hirsutum
  Clone ID: LIB3825-016-Q1-N6-E7
ttttttttttttttttattttttttttttttttttttttttttttttttttttaatattaacattatattatgggtccattcatcacctttgaactggaaatcaagcaagcaacatacaagctaaagggtaacactaccttacatattttttacggaacaccataacaaggtgatattaaaattgttttttgggtacacactataaattcaacttgcttacaagcctcatatacagtaatgggaagtccatatgaaattactagcaataggcgatcaaatcaattttttttactgctacccacgaataacaacttacaatcgaggggcttcctgaaattaaagttgaaacctggttatagctactcactcaaaaggtgtctttgttccattcccatccactgggaagaggaacccaataaaagaaaaattttgttgaaaatgtttaacaaactcttcacccttaat

SEQ ID NO: 2683 - DNA, 540 bp, Gossypium hirsutum
  unsure (1)..(540): unsure at all n locations; Clone ID: LIB3825-016-Q1-N6-E9
aagaagaacgcgcagtaaataaatatanttctgaaatcctgatgagtgaaaaaatagaaataaaaaggaaccgattcaaagctaatctttggggtggcttgacaagtctatcctaaaatagcttgttctcagctatatatatatatatatatatccaaaacaaaaaaacaaagagaatggtcgcaatgtcatcgaaaacatggcacaaataactccaaaaaattgttcatcccggctagaggcttaaccaagaatggggaaaatacgggtgatgtgctccaatggaacactatcagcagtgcttttcttcagctcaggatggttaaattcgtttcgaggtaggactataagttgacccctgccatgacccttctcaagaatccaaccgctgttggccgcctggtgttcaaggaatttgtccaaggatagaccttcgatgttaatagcctcagcaagtacaggtcttggaatcttctggtaagtcagggagaggacatgaatggcatacgtctggattgcttgctcaaaacccggtacagc

SEQ ID NO: 2684 - DNA, 360 bp, Gossypium hirsutum
  Clone ID: LIB3825-016-Q1-N6-F1
ggtgcaacaaagtttaatatttaaagaagcaacaagaaccagatgcgtgacaaagtcatcacatatatatacagatccattattcagatttatgaataaaagataaaaagacagcaagcaacatggaaagtggcaaatacaacagcaaaatgctaggctagcctctcaacattctgtcaagcacgatggtgtctactacttctgcgtcctctgtgatttgcagcgctgaaacagcctgtgctgctataagaccagctgaaagttcttcatttccccagcctctatcctcaaaccatggtgcatgtagatcccttctgcaagctccatacgtgaaggaccagtcactgcttccaaactcag

SEQ ID NO: 2685 - DNA, 526 bp, Gossypium hirsutum
  Clone ID: LIB3825-016-Q1-N6-F10
cttactacaaattcacaagaaataacaaaaaaccaacattgtctttacttaacatttctgtctatgatgtagcaaaagaaacaaacatatctgtttatgaaacttgtatacacaagtacctttcaaagcattgtcactaaaaggagagcacatgtatttacaaaactgacatgatgcatgcatgtacgggatcgatacccgccttaagcagaaaccggagttcgttctatcgaagcttttgtctgatattgttcctttaaacccaacatcttatttaatgcaccaatataagccttgacactggaaacaacgatatccattcctgccccagttccactgaatgttcgctgaacaatttcaccggtcaaaatattagttgatatgcggcttttctcagcacgaattagaacgcgggtggtggctatagcatcaatgccttctgtaacggcattcatggagtactcaagaagtgtaactggttcctttgtaatgagatcaatagctttataagctgaatctactggcc

SEQ ID NO: 2686 - DNA, 527 bp, Gossypium hirsutum
  Clone ID: LIB3825-016-Q1-N6-F11
gatccaacaagataaggggcaaattgcattatgtcagctcaaaagcatacagttttcaagcagaaagccattgacaagggtagtaaatttattttagcagagatacatatacggcccgtttgccattttatttcacttggtgatgttataatataacagtaaagcctaaacccccgaaccagccagtcgccgtctcgaggcatttgatatggatacttgagtaagcttgtctgcatcattcaacgccatgcgctccttgagtggcatataatgccgtagccatacaccggtataaacctgctggggtcttattatctttgtatcgggatcatctagagactcacgccagtgtgccaagtacccagccattcgagggattgcaaataacacagtgaagaactctggtggaaatcccatggcccggtatattaacccagaatagaaatcaacatttggataaagcttcctcttgataaaatattcgtcagataatgcggccttctccaaactaatagctacctcaataa

SEQ ID NO: 2687 - DNA, 542 bp, Gossypium hirsutum
  Clone ID: LIB3825-016-Q1-N6-F2
gatcttcaaatgaaatttcatttatgatctaactactacaaaaataattagtctccgtagtttggaggatgagatcaaaaccatcctctcctaaaaccaacagtttttttcaaaacagagcgacttgataaaaatgttctcaacgcaaaaaagaatatccttccaccagcttgacaaaccattccagcaatcctacgtttacttgtcccccatgacaacaggttttccaacattctatgccttggcaggctccacagcagcaggagcaggagcaacaccaccagtagttggcagccccacaaacactttgaaagcatcatagataccccactgagctccagttagagttccaatcatcacaatacggaggggaagaccacgggtaaacagaccccataatccaagcttcttcacagcatccccaacagttgctcctttggcattgttaaggaaggagacaaggttgtcagcaggatgcgaaacaatagcacagaagacaccagcaacataaccaccagcaaaactaacaccaagctgcagat

SEQ ID NO: 2688 - DNA, 463 bp, Gossypium hirsutum
  Clone ID: LIB3825-016-Q1-N6-F3
ataaaaaaaaaaaaaaaaaaaaaaaaaaaaaaaaaaaaaaaaaaaaaaaaaaaaaaaaaaaaaaaaaaaaaaaaaaaaaaaaaaaaaaaaaaaaaggaaagggagcaaaaagaaaagaaagaaaggaaaaaaaaagaaaagaaaaaaaaggaaaggcaagccgggaacctgggttaaaggccttaaacgaattacgggaggagctggtggttgagaaagagggaaagaggaaaagacagcagagggtagggcaggaaaaaaggaaaaagagaataagctcaaaccaaccttataatccaaaaaaaaatggaaagaacaaaaaagaaaaaaaaaaaaaagaaaaaggacaaagggggtaagcaaattacttcaaaaaaaaaaagaaaaggcagacagaataccataaactaaagaaaagttaagtaccagggatgggctgagcgggaaaaagagaaagagagga

SEQ ID NO: 2689 - DNA, 557 bp, Gossypium hirsutum
  Clone ID: LIB3825-016-Q1-N6-F4
gtgaagtaaattttctttaatatatatttcaaatattgtgaagtaaattttttaataaatacatcctcatcaatcatgttccaaagaatcaaattgctttggaatcatgagaaacttaagagacccttattttcaatgtattttggtaagggaagattaaatccgtaaatcccaacaatcaaaccaaaacccattgaacaacttgagcagcaatcacacatctactgtggaacaggcagggcatgaggcagggcatggttggatgttgaaatggtctgcagtttacagtcaacagagaacaatggagcagagttatgttcaacagataccatgttgatgatatccagaagaacccgctccaggtcttcgccatcactccattcatgaatgtcagccttgatgagcatagggttcctgcatattaattcccatactggaaaattcttccttggcatcacatagtcaccctctccaagcgttaggcttgggcaataatccccactgccatctccgaggtaaatgattttcttctccccctctaaacctgcttgaatccc

SEQ ID NO: 2690 - DNA, 438 bp, Gossypium hirsutum
  Clone ID: LIB3825-016-Q1-N6-F5
gcttaatacaattcactacctgaaattttaaaacaaaatttggggtgcttattacgctggcactactagcttacaaaaattgatcacttgtgctgctgctcaaacaggcagcaatcttgaacaccaaagtgggggatgccaaaacccttcatggatcgatagatgattcattcaaccacaacaccttatacaaaccaacattgagtctacagatgcggtcaccttagttattttcttttaatagccactcgagtaaacgaggtgataatattgacttcctttgccaaaagtttcattgaacatacatgcatgcacacctgcttaatgaccattacgcttacacatgtttgcgaatatttttctttagttgaggctactcccggtatctctctcgactatcttctgatttactctttcttaacacctatttatccgtag

SEQ ID NO: 2691 - DNA, 553 bp, Gossypium hirsutum
  Clone ID: LIB3825-016-Q1-N6-F6
aaaagaaaatgtctataacgtcctcgcatggaaacaaaagagaagtgctacagttcagccttatttaaacaatgttcaaaacaaatgtcagccgcgctaccaaaaataaaggattaaataaagaaaaagaaaaaagaaaagcagtcaaaatttaagcaagtttaggctgagaatctcttctaggtgctcttttaactacctatataactactaaaagtactcatttggggtaatcataactcccaaagtgaaggagtttaccttcaagtgattaatattaataaatctatcggcgaccagcccccgtcttcttagcagcagctgctgcaagtgtaggaagatcctcatcatcatccgaatccacatctccatattgccaaattccacgcctaccagtttttgcctccttctgaaagttctctaagttgtcaatcaccgattttctatccttggattcccatctcttccttttctccaacctagctagtccctcctggagcattgcagcattaatgctaaggtctgacttctcagcaacgagagttacaatgag

SEQ ID NO: 2692 - DNA, 554 bp, Gossypium hirsutum
  Clone ID: LIB3825-016-Q1-N6-F7
ggaacaaatatagttctgttattattcattactatcaatttataagagtacacattgattgaacatactccataagtctagattatgccaatagaattgaggatattttaatgggaacaaattctgagataccctatcccatgtaaactttaggaatacagaccctccaaaagaatacattaaaaaaaggcctaaaacgcatgcaaattttaataaaagaattaatactataaaaaaaaaaacactgtaaaccaaagaacaatgtgtcatccaccccgccccatatctacaatcagcccaacctataatttgcctcccacaaaatttttgctttgctcatgtaagcattacctcaaccattcagcacaaataaatgccttgtgcaacaaacttcacaactcaagagccaaagctactgcttcattcaagtaatgctcctagtcatcacaattcagcccgcaaatttctaataaagggccatctttcgagacgaatgggtttattcggacccacataagtgtcaagatcgaggccagcaggattgaccaaaccac

SEQ ID NO: 2693 - DNA, 413 bp, Gossypium hirsutum
  Clone ID: LIB3825-016-Q1-N6-F8
ctccaaagcaacacatttccattcattttagcctaattatggagataataaagccatatgggaaacttttgatcccaccaacactttttcacaaccctaacctgtaatacatatccatttatgtatacatatatttactatgtacaagatattatgtggaaggcattttcttatgttttctaaggatccttttccagcctaaaaactaggctccctggttaaaatccataaactgaggttgcggatgtccgatattgggggatgactcgggcatttgctggggctgctgctgttgcggggtttgctgaccaccaaagtgatgtggggacggttgggggaaaaaaatctgaggtagcccgccattgaaatggtttccattcatagctgacagttgaccggcttgtattttaagc

SEQ ID NO: 2694 - DNA, 542 bp, Gossypium hirsutum
  Clone ID: LIB3825-016-Q1-N6-F9
aattagcagaggcacattcaccatagcttttgaaactgccattccaaaaagaattacaaaaaccctaattgaaaccttgcttccaatgctcctacttaccatacagaagcagaatctaacctggcaatgaaggaaaacaatacaaaacagaatatagtgcaccatgggcgtaagtaaacctggtaaatgagccttctacaaattatcttcgcatgaagtcctccttgtttcttggccttgctccgtcgagggagagctttccactgaactcatctaatgaatcactcgtgagtggtccactgtagctcctttgttgctctacccaaagccggccactacggttaccaacatcataccctggcgacgtgtaattggtattcatgagcacatcaccttccagtatccggagcacctgtgacatgcgcagcctagaatgaggatcccgccttacgcataatgatgcagcatgaagcatgcaatatacctcatgttcggaatagcgaccttccaatctggggtccaccagttcatctatggcgtat

SEQ ID NO: 2695 - DNA, 545 bp, Gossypium hirsutum
  Clone ID: LIB3825-016-Q1-N6-G1
actgtaaaatctataataaaattctaaagccagtaaaaaaccaccaagcattcattatattttacaagaccacaaacacatccccaaggggatccatagaaaatgttagcaaccgtttgataaaaagttcttcactgtttagggtatcctgaaccatcttctgaaagaaggccgttcgagtgaggaattggattggcttctttgatcaaatcaccatttgttgttgctatatctttcttttcatctccaggcttttcttcccatacctgcttttgcaactgatgtttagcctttttctcctgaattgctttctggcgaatctcgtaaaattcgaaatcgtctaaaatgcaagttttgctggaatggtccttgaagattttgagcaacttaaggccttgatcaagcttgatctcttgcgtatccctgctatttgtgacgggcttattctcattgttctctaaggtaatgtgcttcaaggaattattaggtacatccttaataatgagccatcttactgggaaacagccagtccatttgtcttgttg

SEQ ID NO: 2696 - DNA, 559 bp, Gossypium hirsutum
  Clone ID: LIB3825-016-Q1-N6-G10
caaataacataaattattactaagaattttgaaagaaattatggaatcttttttctgctacaaaatacaagaataattggaaagccttcaaagtaaaaagaccctcccaaaactttgtttttttaacttttcttccccccacccatttatcatgaacataaacccctaaacacgtgatcacagattatctgtacacatgcctattctaatctctacttttctagattgcataagatcctacttccaccgccatccattcccatctgcaatattatcaatttcaatttttcaattcgttatttaatctatgcgcaacccttctcagttacactcattgactttcagtctcctgtaaccctgaaacgcagctcaccatcatcgttttgacttccaacaatatacccctttttatttcatttttttcccctctaaaatggcttctgcaggtacatgaacatgtcctggagcggggacagctgattattactctggaaatgggcaggaaacccgttatcaacagtggcatccatgtaattataagggaagtcaagggcattgg

SEQ ID NO: 2697 - DNA, 547 bp, Gossypium hirsutum
  Clone ID: LIB3825-016-Q1-N6-G12
gacaaaaatataatattttgaatataaataattaaaatgtaatatgagatttatcctttgttaaataaggaaaacagctaagaaaataataataataataaaactacaataaagagcccgaagaaattttttcccctctttcttcatcagaataccaactgcctacgaattttattacttttcccagaagcagcagcgagatcccagatggtttcgacgatcaggtctttaaatattacccgttcaatattgaggactaattcggacatctcgatggggtaatctccccaaccgttaatggcatcccctgcaaggtcttttctcaacacactacaaatcacctcaaacaagtcatccgacgagtctctctcccgaatcttttggaattcggaccaaatttgccgcaatgatggctgttctccacaccctgatttcatactacttacgagcttccatgccggcaattgcctctttcggttgaggatttcattgatggtgtcaaatataagcttcctttggagtctagacaccttggaggtgtctttac

SEQ ID NO: 2698 - DNA, 527 bp, Gossypium hirsutum
  Clone ID: LIB3825-016-Q1-N6-G2
agacaaccattctcattcatatcacagaccacgattaaaggacattacttggatacaacagactggtttttagtgaagacaggcaaagaacatagaagaagacactttgaagagtttcaaaagagctcacagaatatccaagagtacaaatgaaaagtcagagcaacaaactacatttttatatatagatgagtttgatacaattgaaccggcactcgaaattgacccttcattcgaatgcccactggttctcccgacgaacctcttcttcctcttccggggtgaagtcattcttgatattgaaagtcttcctgatctcttctggggtctttcccttgatcatgtcagcaacagtttggcaagtgagatccagcaagcccttgatgttcaaatagttcgctgccagaatgagatcaaagagagtagcttgatcgaccttgacaaagtcagcgtcccaactcttgagctcgtcatcggcggatcgatcgtctgtcttaggagcctcgacgtgtttcttgcagtactcg

SEQ ID NO: 2699 - DNA, 537 bp, Gossypium hirsutum
  Clone ID: LIB3825-016-Q1-N6-G3
aaaaagatccatgtcaattattaaaacaattgtgttaattatttgtgtacaagcccaatttgcgggcccaaataacccactaaacccattaaattacagcccaaataccccaagcccaaaagagccctagcccaataaaaaaatcagaaaaaagaagaaaaccctagccgttcggtcaacccccttttacccccacttgcctctgacgacgcctgtagcatcgcccttgtcaaatccaccgccactggtacttgcaaacattaataagaatagagagaaagcaagattagaggcatgtaaacggctatttaaagccgaatccaaaaccattgtaatttcggacattttttcaaatacaaaaaaagaacatagattcaagcaaaaaaacagcattattagccctcaagaaataagagaaaaggcatcaaaataaacccaaagccctcagaaacagaagccgtagtcctaaggtggttagttttatttttccttctttttcgttgttatttcatggccaatcgtcctattttataccca

SEQ ID NO: 2700 - DNA, 508 bp, Gossypium hirsutum
  Clone ID: LIB3825-016-Q1-N6-G4
aaaatctaaaatcccatttctagtttttaataaaaaatactcaaacaacacaacctcaatatgacaatagcattggacattttcagggagcacataaatctcaatagcctttaacatagaagattttcaagatgtcccacacacaatataactgtctcaaaattcttataaaccctacaatagtaatgaagccaagatagcaggaacaaaatcaccaagtacggtccaggggatcaacggtagcggcaagggaaagtgtgttgtttctcttccaggttgccctccttgaaggtcgagccttgtggtgcaagtgccccttgccacgaaaacccctgtattttttgccagcagaggtcagtcctcggagttccctgtgcttgtgaaccggattgcagatccagttgattcttgggtcattgcggatagcgttgggggcaggatcgactaaaatgacttcaaagtatttgtaagttgaatcctcattgatccaataagagttcacgaccct

SEQ ID NO: 2701 - DNA, 534 bp, Gossypium hirsutum
  Clone ID: LIB3825-016-Q1-N6-G5
gaaagcaaacatgtaaaaagttgtaaattaatttaaaaagataaaataagtgaaatttctaagtacaagaaaaagaaatcaaaatcttataccaagcaatgcctgatggtatgacctggaagtgattgatgcaaagttatacatgtgaataggaagtagataggtggtggtttatgaagaactactccctgtaaccttcacattggggttcatcatcatttcttggaactgagttcgcttggcaaccctaatgtcaactatactgggtggcattggctgaagtgacccatgcaattccacaagtccaaagaattcttgttttgttaaactctttttctcaaccagttcatcaaccactgcatccatcagctttcggttctgctgtaagatctctttggctcgctcgtagcatatgtttactatctgcaatgcctccgaatctatctcattaattcgatctgcaacccagaagttggacaatccatgatgtttctcagagaggccaccaagaacaaacatccttgctgctgacct

SEQ ID NO: 2702 - DNA, 545 bp, Gossypium hirsutum
  Clone ID: LIB3825-016-Q1-N6-G6
gaaaaaacagatttttgtatataatataacccaaagcagcattagcggcagcttcttacataaatactatgtgcatataccaacatagcatatatataaaaacaagcagtcaaaaattgaatacacgagacactgtattgtacaaaatacccccttcaaaaaaataaaataaaaaaaaaaccaaaaagataaccactgtacactctctttgccattctttttcctttcattctgctgcacccagttctctcacagtgtatatacacgaccgcagaatgggggaaattattcggaaaatttgcagccggtgatccttattaagtaatttccagacaggtcattgtcaagtaccgacagctttacacgcaccaccatgataatttgtctctgtgtcaatctcgtaggaagaaagcagctttctatgatcctcgaaatcaggacttgtcagattgatggagaggtttctcatcaacaacagcaccgtttcaatgtctatgggatccatctttttaagtttctgcagatgaccggtagtgtttggatca

SEQ ID NO: 2703 - DNA, 369 bp, Gossypium hirsutum
  Clone ID: LIB3825-016-Q1-N6-G7
aagacataagagttatgtacttattattacacaattctgagacaaggaaaattgtcaggaatcattaagatgaaatggattgaaccagagcagggagaacaataataaatcgggaatcaaaatcggaattaaagggtggacatggctttctaggcgtttccttctcagcctcttcctaacatactctcgcttttgcgcatcgacccattgtgcttcatccactcccttggccagaatcagtggtgggggctgatagtaagggcacttgggcctccaggaagtttcggggacacccaatcttgagacccttttgaggaaaagagagattccccatttcaggtggagagaagggaaggtatgggagttggg

SEQ ID NO: 2704 - DNA, 536 bp, Gossypium hirsutum
  Clone ID: LIB3825-016-Q1-N6-G9
agatataggtcacttcttcataatcagttcttcaatagaaaatacatatatgttgattaatctaatttagaaatgttacttcttatcactaggaaatataattgaaaattactatactaaacaaaatgaaaacgatgatttcagtagacttgggttgccactgctgagaccattgtgttgattccacacatggaatggcctcggcaaatgcgataatagccatgttctccccaccgtttgccccatgagttctttatgatccaatagggttgattcccaagtcttagaattgaaaacccttttgccccataacccactagtaataccccatggttgatccacctcttcccacatattattgggcatgacacccctcctatgtaggtttgcatgaagatagcattcaacccaacggctaaagggccacgaaggactaaatttgcggcaatttggttttcatcgatggcgatgttagtgaaattcacaacttcaacagctactttctcagggttgaacttgcattctttgcgttcccc

SEQ ID NO: 2705 - DNA, 573 bp, Gossypium hirsutum
  unsure (1)..(573): unsure at all n locations; Clone ID: LIB3825-016-Q1-N6-H1
acaatcaaatgcacttcatcacaataggttatatgctctcaatattcgatacaaacttatacaagtctctcaattaaatagagattttgagacttgctaacatagtgaagataaaccatgatcccttctaaatagcagctaaaatagctaaaaataatataataataactgtaatgaccaattttagcccggaccctctagaaacccaaaacaaaatataaatataaaatatatacaaaataaataaataaacaaaaagtttaaaatagtaacggtccattaaaagtccagtttacagacccaataaccaatcaaggcccaaactaatatcaaaaccttaacccaaaatacaagcccgataagcccattgcttttagaacagacaaaaccctagggttctctctctcgcgccgcagccaagcctcggccctgacctccgtaccccccagcgccatacgctccgtaccgtccagcagccacgcccgcgccagcacacgacccccatcacgtgccacgcactccgtncctgcgaatgaatacaaaaccacacaacagcatattggaaaagaagac

SEQ ID NO: 2706 - DNA, 562 bp, Gossypium hirsutum
  Clone ID: LIB3825-016-Q1-N6-H10
aatatcatattgatcgatttagatataggtcacttcttcataatcagttcttcaatagaaaatacatatatgttgattaatctaatttagaaatgttacttcttatcactaggaaatataattgaaaattactatactaaacaaaatgaaaacgatgatttcagtagacttgggttgccactgctgagaccattgtgttgattccacacatggaatggcctcggcaaatgcgataatagccatgttctccccaccgtttgccccatgagttctttatgatccaatagggttgattcccaagtcttagaattgaaaacccttttgccccataacccactagtaataccccatggttgatccacctcttcccacatattattgggcatgacacccctcctatgtaggtttgcatgaagatagcattcaacccaacggctaaagggccacgaaggactaaatttgcggcaatttggttttcatcgatggcgatgttagtgaaattcacaacttcaacagctactttctcagggttgaacttgcattctttgcgttccccagtgta

SEQ ID NO: 2707 - DNA, 506 bp, Gossypium hirsutum
  Clone ID: LIB3825-016-Q1-N6-H11
caggaatggatatggtaatatattttcatgaagaaatatggatgatttatgcgaacgcaacagcaaaattgtttctgagaaatggcaaaaaaacttcgtaacctaattaatcatacatgggtgggcactttcgagtagcgtaccgtgcaacttgaagacagattgcgactaatacacgtcatttccctctcatgagtaggttcaatcaggtagcttctctaccagagtaatggaatggaggcttaacttcatctccaagatacttgctccacaagaaataacattctaggagccatattatagcaaattcaccaaaaccaggtgatgagcgagcatgacaaaaatgctcaagtttcttacaacatgggtcagccgccaaagcttttcatttaaaaatgctgttcagcattgaaaaagcacttgatacccagcaacatccagcctcgtgtatcaataaacttcaagatcttgagaattcaacgaaagaatctcctccggcatcgtgc

SEQ ID NO: 2708 - DNA, 374 bp, Gossypium hirsutum
  Clone ID: LIB3825-016-Q1-N6-H12
agcaaccaaaactgtttccaacaaaatgcattataaagtagaaaaatccacaatgaaccaaacccttcaaaagatttcaagtaaaaacatacttgaacatacttggtctatgggcaattatactaagcattaaacaaaacaaaggttctttcaacaaaaagagtgaataagataactatcaagacagccaactagttgaggatttagagtatcgtcagatcttaaacggcaacatggaggaatgctcttcctggctcccgattagctagaggtccatgacatccaaaaagcttagcattaacaccatcagggacaatgtgatcctctaactcatatatgaaataacgatgattgctgtactttgggaaacccca

SEQ ID NO: 2709 - DNA, 526 bp, Gossypium hirsutum
  Clone ID: LIB3825-016-Q1-N6-H2
tttttttgaagatccactgtaataatgagaaagatttctggatatccgcacaaatcggtcaataatatcagaatcgggggaatcggcccacgtcggcttactaatgggatgccctaatgtgttacaaaatttcgccttagacaatggtccaatgagcgaaataattggaattcttgtatccaacgtcttcacagcattatctattagaaatgaattttctagcatttgactccgtaccactgaaggatttaatcgcacacttgaaagatagcccagaaagtcgagagaatatttagataattgatttatacggactcttcctgattgagaccacaggtaaaaataatattgccataaatcgacaaagtaatatttccacttattgatcagaagagacgtatcctttgaggccagaattgactttccttgatacctaataaaatgtatgaaagggtctttgaacaaccataggttgttctgaaaatcattataaaagacttcgccaagatactttatttttccatag

SEQ ID NO: 2710 - DNA, 384 bp, Gossypium hirsutum
  Clone ID: LIB3825-016-Q1-N6-H3
aaaaagttaaaaatataatatcaataatatatctatatctcgttaacattagatttataaattcgggtatagataggataatcatgcagggctcgcctggcatgaacaatggataacccattccaaaagaaccaaactttccgttgcataatgcagcaaatatacctctcaaaaagataagcagaacgtcagaattttactataaaacgggttcggaatggaacaaggcaccccaggaacagtgagtaatacggggaaaatggccaaggcaacaacacttctctttcttatggccattattccagactgaaggagcttgggatatgccactgaaagaccaaattaacattccccaaggtctccttggtcttaggggcctttctt

SEQ ID NO: 2711 - DNA, 568 bp, Gossypium hirsutum
  Clone ID: LIB3825-016-Q1-N6-H4
agcaaaacatagaatctttccaaattgttttaggtttcatggcaacaagaatagaaagaaaacaccaaattgagaaagataaataagacactaacaacccagactaatgaacaaaaaacagagcaaacaggtagatattagggtctagtccacgaaataatgcatacaaagaaacagtcaacaatccaacaaaaggtagtaacataaaaacatagatgccctattgatataaatagaggtcttagcaaacttatctgccctgttcccctttttacccattttttatccttacttggccatcatgactttgacgaactcctcatagtttatctgcccatcaccatcaacatcagcttcacggatcatctcatcaacttcctcatctgtaagcttctcaccgagatttgtcatgacatggcgaagctcagcagcagatatgaaaccattctggtccttgtcaaacaccctgaaagcctctttaagttcttcctcggaatcagtatccttcatcttccttgccattaggttaaggaattcaggaaaatcaatggtcccatttccatcagca

SEQ ID NO: 2712 - DNA, 541 bp, Gossypium hirsutum
  Clone ID: LIB3825-016-Q1-N6-H5
cttgagagattcttctgttcaatttattgaatcaacaaattcatatgacaataatcgaaatccctagaaggatgaacaccttaaacaacaggtaacatggtggcgactgctccgacgtttaatggcaaaccttgtggttttatttgaagagctggtcggatagtaagcaaaccaatgaaacagtctaaggaaactctagttccccacacattgatcgaccctagtttacgacatttattgacaagaacaaacagcccactttctgtaacatgacggcaactccatagcacgatgctctttaaatgtggacagctatgggcaatggcggataaggattcatcggtgataaatgtaccaccaatattcaggtgtttcaaggaattggctctggttatcaattgaacaacacctttatcagtgatccctgtcataccccaaagggaaactgatgtcaagttgctaacacactttgctaatgagatttggtatagtccattgtcagttatttggcaaccccaacgactccttgaaatgtcgagtt

SEQ ID NO: 2713 - DNA, 528 bp, Gossypium hirsutum
  Clone ID: LIB3825-016-Q1-N6-H6
ggataatataaggtttagatagaacattgagtgaaggaaagcagcccacgaagagaggtaaaactccaggaccacttagatggaaaaaagggaacaaaaaatatcatcaagtttatagctcattaaggcataataacattaatgatgacacactatggactccaaagataagcctcactaccgcctatcaagaacccaggtctgggaacaatatccaggagatgacggtgaaccattaaaacatgtaaccaaacgtccagtgatggacctactaacatgaaccaaaattttattgtagtaaccatgataaacttttgttgaatcaacaaattcccccgaggttcacttgcccttcttggcagcagacttggtcaccttggctccagttgggtccttcttctccacactcttgatcacaccaacagcaacagtctgtctcatgtccctaacggcaaaacgtccaagtggagggtacgcggagaaggtttctacaaccattggcttggccggaaccatcttactcatacc

SEQ ID NO: 2714 - DNA, 533 bp, Gossypium hirsutum
  Clone ID: LIB3825-016-Q1-N6-H7
gaagaagtaggggcaaacataaagcattcaacaaaaggtattttaagattcagaggacactcttccttagagttacaaacgacaaccgacacacaacagaagtacacaaacaaaggattcttttaacctttttattattataaccaagttctttctacttcacataaagagttctcaaagcccattgcatccttcaaccgcatcttggctcaaattttagccttgcagaccaataataccgcaagctactctgccgccagcatttcctgtgcttttgctgagctcatggccgcccttgccaaggtcatcgggatctgcatggacaactacagctcttccgataatggagtttgggcctgtgagaggaatctgtttgtcggtgatggagaagcttgcacagccatcatcaccaacagtgacattccctagatcaccagcatggcggttctcatcttctggagcaccatgctctttgccagcaggattaaaatggggtccagttgacatgcccccgttagttgtgtccccaaggc

SEQ ID NO: 2715 - DNA, 549 bp, Gossypium hirsutum
  Clone ID: LIB3825-016-Q1-N6-H8
accatagcaaggagataaaatcattaactgttttaatttcaaaatctaaactctcctatagtaccaaaactgtggccaccccatcacactaaatccacaatacatccaactctagatactagtctttgctaagatgccaatttaactcaaaatgtttcaatcaactgccatattctaaccacattaaagtcacccattctttctttctcagtaaaagtatctgcctcggtctcgatcccgtccataatctctatcacgctcataatcataatcacggctccgatcctttcccctatccctctctctgcttcgactacggcgtctttccctatcttcacgctctctattcttgctactttctctatcatcccgttcccttcctctgtctctgcttctttctcttccatccctagttccccaacctcccagccagcacggcctgaacgtggtagcactcgagcagcttcagcttgttgtgtttttgctcgaaactttttcttgagattgccaaactcatcatacatctcaccatcatcttcttctgcttca

SEQ ID NO: 2716 - DNA, 458 bp, Gossypium hirsutum
  Clone ID: LIB3825-016-Q1-N6-H9
aatcaataaatcaagtaataaaattttattaacaagtgcacgataaaacaaatacataaatacgagagtacaaagctataaacatttattagagaaaataaatcacaacgttatgaattaaacaaaattccatatcaatcttttgttgctacatatcctttttacaagactttacaacactagtattttcaaaaagaatttttatgatccacttgatagtgttgctgggcctctacaatttgaacaaaagtcttctggagcggtgttatatgtctagcaatatcttaattcaatcattcatttcaactttaataattctcatacaacactatcatgcattttgcccactaaattattttcttcttcttgacactagtttggagaagtagttaactttatcatttcacattcttttctcttaatattttatggaaaaatatctatccttttttcaattg

SEQ ID NO: 2717 - DNA, 408 bp, Gossypium hirsutum
  unsure (1)..(408): unsure at all n locations; Clone ID: LIB3825-017-Q1-N6-A1
cataaaaaagccaaacgacaacaattttataaacctagtgacttgaatgaaaactttcgaataatacattanaaaaccaacactggaaataaaacatcatctacaataccttattgaaccatttcccttaaaaacccacagtgaaaatgacgattatgattatttgcttatttagcaatggcactattttttttttcactcaaaccccatagttctaagatttcatggaagcttcatcaaagcttagaagaaacatcctttggatgatgaatgacaatgtaattataagcatcaagtgtcaaaaactcatccaaagttgaagcagtgcattggcgagtaaaaatcttgcatgcttctttatacattcctttcttaaacttctcttttccgacctcacgttcgatccga

SEQ ID NO: 2718 - DNA, 550 bp, Gossypium hirsutum
  Clone ID: LIB3825-017-Q1-N6-A10
aattcaaataataatgaagctgaggttatcaactggcagattcacatgcatctaagaaagcaatgaaaagcatgctcagataacttgtcaaaaagattgtttgcagaaatatagtttaaagcttgggcatcttggagattccaaaaatccaaaaattagctccgctgatacacagaattcattgcttctttcccttttcaattccagtttgaattatccatcactaattgggcatgaagctcattttcagctggctgatggaaggaagaccctaattagttcctttacagtcactcttttcctgcaagttgggcattttccctgggctgctattgcagcgttgatgcatgccttgcaggaaatgtgcccacatcttgttgacatctcctcatttaatgaacccatacaaatcggacaattgaaggttggctccttgggaagtggctggggctttgtaatttccttgaccatagactgcggtgaactctccaaattgatataccgatcacaattgataactactggggacggaagaagtctccggcacctg

SEQ ID NO: 2719 - DNA, 458 bp, Gossypium hirsutum
  Clone ID: LIB3825-017-Q1-N6-A11
gggggaaatagggaggggggaaaaaaaaaaaaaaaaagaaaaaaaaaaaaaaaaaaaaaaaataaaagagggggggggggagggggagggggaaagggagaaagggaaaggggggagggggggagggaaaaaaagaaaaaaaaagggggggagaaaaccaggaaaaaaggagagggaaaaggaaaaagggggaacagaaaaaggggaaaagggaaaaacaaaagggggaaaaaaaaaaaaaaaaaagggaaaaaaaaaagaaaaaaaaaaaaaaaaaaaacttaaaaaaaaaaacccaaaaaaaaaacaaaaaaaaccccacaaaaaaaggaaaaggggtttcgggggaaaagggggggggccaggagaaaaaaaaggaaatggaaaagacaaacaccgcaaaaaggaaaaaggaaaccgcaaaaaaatcgaaaagggaaccaacgaggcaggccggg

SEQ ID NO: 2720 - DNA, 501 bp, Gossypium hirsutum
  Clone ID: LIB3825-017-Q1-N6-A12
aaatctaaaatgatcccggatagccatagcctaccatataaggacacacgcatgtctaatgcctattatcctacctaagaaccaaacatcacacatcctactatataaaaaaaccaggattaccacctaccccatggtgctacaaataaggaccattactaatacctagcttgagccataaccaaggctctcaactagttcgaatattttacatccataaccaaatgccaaacatttcaactccaaattcaaacatgcactgtttcatcttgcaaacccgatccaaaacgccaccagcctcgagctccgtcgtgagactctagaccgtcctcagacctcatctactggttacacgaccctctccctattaatccaccaaacgcttggagacccagctgaataattccaaaaatgcttttcattgaaagcgtgttgatcccagtccaccctttttaccgtgtgaggaactaagacccactgcattaatgggccctttttgcc

SEQ ID NO: 2721 - DNA, 418 bp, Gossypium hirsutum
  Clone ID: LIB3825-017-Q1-N6-A2
ggaaaaaaaaaaattttgaaaaaaaaagggggaaaaaaaaaaaaaaaaaaaaaaagggggggaaaaaaaaaaaaaaaaacacatttataaaaaagagaaaaaaaggaaaaaatgcccgcgggaaaaaaaaaaaaaaaaaaaaaaaaaaaaaagggggggggggaaaaaaagggaaaaaaaaaaaaaaaaaaagcgggtttttttaaaaggaaaaagggggggaaaaaaaaaaaaaaaaaaaaactccaaaaccccaaaggcccgggtgttttttttcaaaaaaaaatttgggaaaaaaagaaaaaaattttaaattttttttataaaaaaaagggggaaaaaaaaaataggttgtcccacccctttttgtggagaaaaaaaaagggggggggcccgaaaaaaaaaaggggggtttttt

SEQ ID NO: 2722 - DNA, 59 bp, Gossypium hirsutum
  unsure (1)..(59): unsure at all n locations; Clone ID: LIB3825-017-Q1-N6-A4
gntgggtaaaaaagaaccgaaaaaaaaaggggtttttaatgggaagaggggaaaagaaa

SEQ ID NO: 2723 - DNA, 532 bp, Gossypium hirsutum
  Clone ID: LIB3825-017-Q1-N6-A5
attaaatatatcttctgcatgttgattatacaaaatacatatctattatcaatcaaaatggtggagcttgatagcatagagaacacaataataaagatgtttttttttttaatcttaaaacagcacacttaattaacttcaaatccgaccaaaacagcaatagtaaatgcaaaacatatatcaagatccactacaacaaagttctggaaacaaaactcaaaaccatgtctaccaatggaggatattgtaagttccaaacaaaggcttttaaagggttcctagtggtggttgatagtagcctaaggtttactcttcatcatcttcatcaccatctccaccagcagccttcttggcagctgctctctggttctttctcttcactcttccagggcggccacctccaaacggactagtaagagagaaatcaatatgcttttgggagtcgaccctcaccatgaaggacgggatgttcacaacctgcctcccgacccttatgtgtcgttgcctgatcaacacacgtgcatggtgaatt

SEQ ID NO: 2724 - DNA, 536 bp, Gossypium hirsutum
  Clone ID: LIB3825-017-Q1-N6-A6
ggaacatatattacagaattaaagaggagtttgtagacccttaagctaggatcctagtgcatatttaaaaggcgaaacatcccaagaaccctgcccacgatccaactttgctttgaaaagaaatggtccacaacttgaagtaccccttaagggcacaattatgacaaccaatatttcacagaactaccatggttataacaattatcttccgagaacacacattggcggatcaataaagaaacctttggcatgcgggcaacctttaacaggggaaactatttgttttgtaatttattggaacatgataagattttcttccttgtccggagcctcatactttctgatattcagaaggtccacaccaacccttactgctgtacctctgacatattcactgaattcttcaagcgactgcagaagacctcctgcgtccgaaccaggagaggccaaatcactacaatgtgcttgatgcttctacttggctataaacatgagcactgacaggtcacctgtacaacatactggatttcctgcaa

SEQ ID NO: 2725 - DNA, 468 bp, Gossypium hirsutum
  Clone ID: LIB3825-017-Q1-N6-A7
ggtcccccaaaataaatcactttaccataagctaagcagggtttaagaagcaaaacatgaaggatctgggagctcataagaagcaaaaatcactggtaaaaaaaaaaatctttagggcctgaaaactacattctttagggattcacgactcatggactacataagcaaaaacactttctatttgtcaggggcttaaatcattcagaaagaacattttgagactgggagaagaaacaaggccaagctttgaaacagttactttactgccgcaactagggaagatctagcttttgtgaaaatagcaatgagagatcccagttgcaacttattattggacccaaaactcaatcgatactttatgtctgccaaggcattaattaactgaactcgaacatctgagggcattttaatcttaaaaacaaacattggcacttcccttacaatatcgatcagggctaatcctttcct

SEQ ID NO: 2726 - DNA, 547 bp, Gossypium hirsutum
  Clone ID: LIB3825-017-Q1-N6-A9
ctatgaaacattactgttacaaaaacaacctacaatccgcagcttgggttttataaaccctctaatctccacaatggagaaacaaagaattcagctaccaattcctcctaagcgaactctgatgcactgattcatgtatatacatcaacactggagagaaaagaatgcaaaaacaaaacaatggaaagaaagactaaggtacaacatacaagaaagctatacaaaaatggaggggcagcctttgctacttcatcatcaacaatctctccatcttcaaccttgacaacagctgatgacaatcgcctcttagccggaggttgatcttctccatcaatcctatccgcaggtcgaagaaagccacgctgacgagaaccattggcggcgaagttacgaggaccgatgcctgacagtcctcctcttcggagtcctcgaggatctctcagcctctctgtaatctcgcgttgctggcgatgaagctcatcaatctctcgctgaagctcttctgctgtcttctcgacggcggtgcttcccatttggaatttacttg

SEQ ID NO: 2727 - DNA, 565 bp, Gossypium hirsutum
  Clone ID: LIB3825-017-Q1-N6-B1
aacaacaaaaacaagtagtgcttattacagtcaattacatgggagtttttaacataaacagacagccacatcatccccccgaagtttctaatgctgcttttaaatttagaaaaaaacatcttttcatcatcaacaacataacaacaacatcattaaggatcggtttaatggccacttgatcctgaacttttgcacagctccattacaaaagcatgcagtagagaactaatttaagaagccgccgcaccggtgagctgtgccgccctatctttcatctcccgtgccttgctagccaatttcatccccgcactatccaactgatccgccgccggtgggtgcctccccgtcacatacctgtaaatccaggacagaaccgtggcggctgcaacaccgaaaccgccggaggcgacgaaacccgttgctaggagagctgttgcaatgagagcagggacaagaactggactgaaaataacgaagagtggagtggctatagtgagtgcaataacggtgccagctaggattaaaccggagagaatgaggagggaaccaccggctgttgcggcac

SEQ ID NO: 2728 - DNA, 570 bp, Gossypium hirsutum
  Clone ID: LIB3825-017-Q1-N6-B10
gaaaaaacagtgatacatggagagggtcatcatcatcattcataataataatcttctcatacacacaaacgaacaaatggagaaaatagaaaaagagtgaagtggagacaaagctatttgggttgatttttttttagttggtggggttgctgcggaaggatcccaaagctttgatagctgctgctctaaggatgtactgatgatatatagctgctgcaagtgctccaacaaatggaccaacccagaaaatccagtggtcatcccaggctttgtcgttgttgtagattacagcagcaccgaaactccttgcagggttaataccagtaccggtgatggggatggtagccaagtgaaccatgaacactgcgaaccctattggaaggggagccaatacagggacgtgggagtcacgagcacttctcttggggtcggtggctgagaaaacagtgtagacaagtacgaaagttccaataatctcagctcccaaagcagttccgttgttgtagccagaagccaccgtgtttgcaccaccgccaagggagttgtatggatgcttcatgaaagctttaa

SEQ ID NO: 2729 - DNA, 534 bp, Gossypium hirsutum
  Clone ID: LIB3825-017-Q1-N6-B11
agtagaaaaggattcttggggcaacaaccccattgcctatagagttagaattcactaaaaaaatttaactgatgatatctacataccaagcaccatttcccggctggaaagtataagagaaaagaaagaacaacggctatgcctgaaaccagtgtcttcatcatatacttgctttcccactattgatgaaaatgtggcctaatttgttcatgcagcagcaccaccaccttcgtcaccttcgggatcgaggggaatttcatggcgaggcctgttgtacttctcacgaagctgcttgatagggatgaaatcaccggctgcatccatcccgtagaatagaaaaggaacatagggatggtcaaaccgtctcaaatctggttgttctggggctaaaagattctcctcaggaacatatgctactagtagattggggtcagcatatacatcaaccaagacctggcaaacaacacagaccacattagaatatatggttaaatcagcccattctatatcatgcatgctctttgtcgtagttgc

SEQ ID NO: 2730 - DNA, 542 bp, Gossypium hirsutum
  Clone ID: LIB3825-017-Q1-N6-B12
aatcagaaagaaaaaaagaatgttaagttgaagtagcaaccaaattaagataactttagtttttacaaattctcattcaagactcccaatctgatcaaattctttgtgtaccacaaactcatctgtcagctattgttcccttcaatcggaatctattcattatttggataaaacaaattcattgatcaaatttcgttatcatctgtttcattctattcgaacctttgatccattcaatagtcaacttgggatgcttctttttcttggattgacacagacaaacccacccatatcttccaatcaaatatatattcacttactacttggctcaacactatccactgccgcacaaatcatgaattctctctcattgccccatgtaggaattgctaattgttcaaatactacatcctggttcttaaacaagcaaagaaaaaagctttcttatcatagttccccttttgtcaactacaaaaccatgttaagggttggttgcagtcgtcagctcagtttctcatttaagccatctgaaaatgaatcaa

SEQ ID NO: 2731 - DNA, 540 bp, Gossypium hirsutum
  Clone ID: LIB3825-017-Q1-N6-B2
attaaaatatcataatttatataaatataaaataacttcaacacagattgtaacatgataaagtacatgaacatgatacaagtacacagaaggtctaagtctctacttcagagcaaggaataaatagttggtagagttttgctcagcatcaaactaaagaatattatacgttttgacatctgcatgatcgatgagaacatgattaataatcaagaagcaggcaactaacctacgacccaaaattctgctgagctgaacacgccacccaatgccggccgttcactgggagcaaaaacagtcagatatttatctacaacatcaagtcaggagctttaactttgcaggtgtacaccaacaattccagcatctttcactagctgctctgtcaaagctgaaagcttggctactcctgttttaacctcagtgaaactttcatcgttcttcatcatgctaatcattggatcagaaccactttgcaggaagatactggtatcagaatcagactcaatactagtgctagctttaatcaaaagttcatgg

SEQ ID NO: 2732 - DNA, 495 bp, Gossypium hirsutum
  Clone ID: LIB3825-017-Q1-N6-B3
cagcaatcagatcaaagaagttctaactcaaggggtaaaaacagggccggcgtgccaaaatataggaagataaggcaaaacacaaacggggtagggggttaaaagatcattctgataacagttttcagttctagtttttgaaaggagagccctacaagacatcaaatatcaatccatctttcttcccctaagaatgggtgccgttttcctcacctgcctaacgggccctaaaataaataccttgcccggggggcccttggcccccccaaaatgaatttccgcattgcaagactccttaattgacaaaatggaaacccctttttttccaatgacacgtcccattttcccttggggaacatccaaaattgaaagtttttttttttaaggagcatccccctccaccatcactttatttggaataggaggaatagatggccaatcaccatagttattatcgttgatgcaaaaacatcggcaatacaaagctccacaaac

SEQ ID NO: 2733 - DNA, 566 bp, Gossypium hirsutum
  Clone ID: LIB3825-017-Q1-N6-B4
agaaaagactgcgtgctcattgatacaaacatggtaaaataatacaaggtaataatttagcccacctatcaaagcaattgaagttcatgacccatgacttacaacagacaaatgcatgtcttccaaaatcgtatgtatcatcaacaagtgaaaccaaaattaaaatcaaaatcaaaatcaaaaggaaaaaaaatttactttttacgaagaatatggctgctgctggggtggctctaatttatctgcgcctacgctgagtgaaaaatggatttaaaatggtctcgaaatattcaagctcaagcatgagctggcagaaaccatttgcatcaagtgaactgagatctttagattcattctcatggaaaagactgattaaaatatcaattagaccttccacaagaatgccaagtgtcttgtccaggaggggcttagcaccagcaaagacctcagcatgtacagctaccagagcatgtaataactcgacagctgcatctctgacaccttttactgcaggtgctgatccccactgaacaccagaatctaacaaatagttcatggctgctgtc

SEQ ID NO: 2734 - DNA, 545 bp, Gossypium hirsutum
  Clone ID: LIB3825-017-Q1-N6-B5
gaagaactcaaagagaattttcactcaaatcaaatctgaaattttcaatgtaattgtaatgtaatgtagggtggctggccaagccatataaataggccattcaaatgttttcctaatttaattagaacactaaaactaaaactaaaaaaaactcctaattattttaatatggaaattcggccaagggtcttttatttgggactcttggactgaatataaaaatttaaactaaataaactaaataaataaaaataaaaatttacaacttgggccactttgacaatttggcctgattttcaactaagtatgggtggatttcttgattgggcttggaatcttcttattgggcctcgccttcaagaatttgggcttttgtgactcgtatcactatttctctgagataaaattggaatagaagccccagatagaattgctgtacaaagttggagaaaaatgtcaaaagaaaaaaaatagtatacaaaagttcaatataatactcctatcatttactccaacaaattcatgtatacagactagaagcaaga

SEQ ID NO: 2735 - DNA, 537 bp, Gossypium hirsutum
  Clone ID: LIB3825-017-Q1-N6-B8
aatcttaaaacagcacacttaattaacttcaaatccgaccaaaacagcaatagtaaatgcaaaacatatatcaagatccactacaacaaagttctggaaacaaaactcaaaaccatgtctaccaatggaggatattgtatgttccaaacaaaggcttttaaagggttcctactggtggttgatagtagcctaaggtttactcttcatcatcttcatcaccatctccaccagcagccttcttggcagctgctctctggttctttctcttcactcttccggggcggccacctccaaacggactagtaagagagaaatcaatatgcttttgggagtcgaccctcaccatgaaggacgggatgttcacaacctgtctcccgacccttatgtgtcgttgcctgatcaacacacgtgcatggtgaattgacttggccataccagtcttgaacacgagcgtttgcaaacgacgttcaaggaagttttcaacagtcaaagccaacacataatcgagcttgttctggctctcatccaaaagtccat

SEQ ID NO: 2736 - DNA, 530 bp, Gossypium hirsutum
  Clone ID: LIB3825-017-Q1-N6-C1
aaacaaataattcaaaggatttttcattaattttataaatgttaattcggagaagcaactccagaaatcatcatatgttataaataattcagcacttatgagctaaacaaaggagcttgatgatatcccagtacacaggtttatacaaacttgatagcaatcttccatcaaaagtgtacggatgaagataatagatggtgacattttggtaagataaaggttctaggacagcttatcgccccaaaagcgcaacacgatccttctgtactgcctgtgtcaggttgatgtcaaagagttcgaatcgtatgggcatctccatctcatagaaggggttcttcaaaacataatctgtgtagagctcataaacaactttgtccctggttcacaaactacaaagaactttgtccctgaaaatcataacatgcatatttgcaaaatcaacagtgtagagaattcatcgagtggttatttaaaatccatttaaaggagagaattcatatttgtacatgcttcttgttattattaattat

SEQ ID NO: 2737 - DNA, 543 bp, Gossypium hirsutum
  Clone ID: LIB3825-017-Q1-N6-C11
gatctaacttctcggttttcataaattacaaggacaaaattcctacattaaaatagtgagaataataatttctaatgctaacaaattaacatgtttatctacaaatggaattaataataataataataataataataataatgatgatgatgatggtgatgatgacgacgatgatgaatgcgatatggattgttttgtttaggtgttgtatgaaataaacaaaataaagctatccccaaaatataagtagctgtacacataatgaaacctattatctatccatatatgtctaaggctagatttcatttgaagatctctcagatccccagcccgagtctcctacaccatcccatccatccaaaatctttatcccaactctgtgtgtgtgtgccaagtgccaaccactaacatttcatttcatttcacttctccctaacactgtcattaaataatacagtaacattctctagtctagactctagagttagtcatacatttatttccatatatatgtgtttgtttacatagagtcagatagatgcc

SEQ ID NO: 2738 - DNA, 455 bp, Gossypium hirsutum
  Clone ID: LIB3825-017-Q1-N6-C12
aaaaaaaacacccccaaaaaaaagaggggcccaaaacattaagcaacaccccgcccaaaacccttttaaaaggaaccaaaccccggggcaaaacatggggggatcccagcccaacgggaaaaaacagggaaaacccagtttttaattaaaacaaaaacagggtggctgggggccaaaacatttggggccaaagctaaatttccccccaacaaaattaatcgacaaattcaacggcccccaccaacgggggggggcaaaaaacaatttggggggcaaaacccggaaaaccaaaaccccaacttttttgggaaaaaccaactaggaaaatgggggccggggcggcatttttgtttcactcttccaggggggaggaaaggacgggccctcaattctttaactttttttttgggctgggaaaggggacccctttttttgggggtttttatgggcatcgg

SEQ ID NO: 2739 - DNA, 557 bp, Gossypium hirsutum
  Clone ID: LIB3825-017-Q1-N6-C2
aagttcaaaaattaggatctttcaaacattactaatatcaacccaactatcatccccaagaaaggagattataataagagcaagatggcaattaatacatctaaggtaaacacacaatttaaattcaccttaggcctatctatctaaatcattgtacaatgatcttcccacttcactggtgctaaaactatcaatgcatccaccctttgtctagaaatctttacaagttatgtgggccacaaggggtgctaaacaatcttatctagtgacaaaatttaaagttacaacagtgccattcaccagtcaccaccggctgtgatatcgatggctactataccgagatgaataatccaagtagctgttgtcccatctttcatcggtctcatattcaaatccatgagctcttggagaatatcttgaaccataggagccatgactaccaaaatcttcatataccaaggggctccttctacccctctcataatacgaccttcctgaggtggggcttcgtggccttggaataggatgtcttggactgttaaaaccgtatggtgaat

SEQ ID NO: 2740 - DNA, 534 bp, Gossypium hirsutum
  Clone ID: LIB3825-017-Q1-N6-C4
agaagaacaaagacagctgctaattgatttcaaatgtatagattgtatgatttaacttatggaaaaacagaaacttctatttaaattaagttctttatatattcgacatcaagggagaagaagctgcttgatttcattaactacgtcgagtatcttcttgctaggtgaatccctgtaagaagatccaggccctaatatcatgaaccggatccacccatccataatctcagggcaaaagaccttccaaagtatggtgagtctccatccacgacggcaccgtcaagtatctgtccccacgcctggcgctttcaactattgcctttgcacatttctctaccgactctactggcatcaaactcacctggacatctctcatttctggatcaacttccaatctgccttcctttgataggaatttgccttcggtcatctcggtatcaataaatccgggcgtcacgattgtgactccgatttgagtcccaaattcaatcctcaatgtctcgtaaaagcttatcagtgcaactttgcttgcat

SEQ ID NO: 2741 - DNA, 535 bp, Gossypium hirsutum
  Clone ID: LIB3825-017-Q1-N6-C5
aaaaagaaacttgtttataacattataaataatgggtccttcggaaataaaaagaaaaaagaaaaaaaatgaagttaacatcttcacatccctcgtctttacaccaaacacttacatcacttgattaaaaataaattcggtagagttttggggggagaggggggggggcaaaaatgacaatggacccaaagaacgacagaaaaaatgattttgtacttccccaagccattttttttaccaactcaatcctgaaaatcatgcatatgatctaaaaggtagttggctgcaagttcctcattcttgttgcacgcaaagaacacttggagcacagttgcacggtcaaaccccattgcttcaagccgttctatggcttcacgttcctcaggtgtgacttgcacagcttgtggcatcgcctcagctaattgccccaaaatgtttccctctccaccttcggcaggttcattgatcaagcgaagaaagtcaccctgatgctcttgaataagtctcattaaattaggattttgtttccccaaca

SEQ ID NO: 2742 - DNA, 445 bp, Gossypium hirsutum
  Clone ID: LIB3825-017-Q1-N6-C6
aatagccacaaacccaaaagattttttttttatttacaatgttcctaaaaatgtttttttttaattcatttaaaacaaaattctaaaacgggaaaaccccaccaggcccgcccaaaaggggcggaggggaaggcggatattgcacaatcggggggttacctggggaaggattttggaaattgggagcattcgcacccatggtaccaaaccaccctagaaccgggggccccgggggcatcccacccatggggcgcggcggggggagggcgccacccctgggggcaggaggccgggatgcgcccatagggggaggaggggggaaacctccccccatgctgccccgggggggcaaaacgcccatacggggaggaggggggaggccccccaaactgggaggggggggggagcctcccatactgggaggaggggggaggccgcccttcct

SEQ ID NO: 2743 - DNA, 571 bp, Gossypium hirsutum
  Clone ID: LIB3825-017-Q1-N6-C7
gcgatttttgttaaggaaattctacattaaatgaaaatagtgtacaccattgatagttgccactatacaaagaccacatctgttacttaaatgcacatatatgttcatttcaacagcaaaaattatactatttcagcaaaagtgtagaaagtgactcttaaagaagaaaaatgtcatactgccttctgaattttgaaaagcagcaaacttctcaatttgatgggataatacatcttacagagtcctattcaaaaaggaagacatactgcgatccctatcatgtatcagccttccttttaaaatcaagcagctggaaccttttttccatcctcgataaagaaaattgcagtttccgggacatcagcccaggtttcggtgatgaattccacaatgtcgtaagatatgtctccttgaacatcaatctgttccttgtcagttggcccctttacaacagaggctcctgtggcaaacttctttccaagtttctttgaagcatcgcttaattttacaccaaaaagttccaggccttttacagtagttatacatttgcgtttgttccgcacaacctttt

SEQ ID NO: 2744 - DNA, 554 bp, Gossypium hirsutum
  unsure (1)..(554): unsure at all n locations; Clone ID: LIB3825-017-Q1-N6-C8
ctagaaaacaaatggtttactctgaaccaaaccattaagagtacaagngaaagagcaccaaaaaccaccaaaacatataacaataaaattaaagagaaaaacactatttagcagcagcttggacttcttctgctgcagcttcgaaagtctcaccaggtacaagatctggtacctcctcatcatcctcttcctgagtggcgactgcaccagtaccggtaccctcaccagcaccaggtgcctgcttctggaattgctctgccaatttcctcaagttgtccaagttatcaggtcccaactggttgatgattccagggagaatatcctgcaatttctttgtctgaggagagccactaacaacccaggtgttcgcagcaatagaagcttgaactttgggattaataaactggataacaacatcatccttgaatacgttgacttcctcaattgcaggaatagcattcactcctattctcttaagggtgctctgcaatcgtttgtcgtcggtggtggttgtcttgtggacagccttcttcttccttctcatgctacccttc

SEQ ID NO: 2745 - DNA, 527 bp, Gossypium hirsutum
  Clone ID: LIB3825-017-Q1-N6-C9
ataacaaaacacagttttgaataacattacagttagcacacttgaaattgccaacaaataaagaactcacacaccaacatttgtattcttcaaaatacagagtacttgttaatatacaaataactcataagcaaccccactcacagaaaaagtataaatttaatgtatgcatcaagtaatcttcataaactagggctccacaagaatcttgccagtggcatggccatcaatgctcttagcccaagcatcttcggccttacttagaggatgcttcgaatcgattattggcttaagctttccatctctcaccaacttaacaagaaaatcgaggttctctttcttaggtgaggtaaacaagggtatgagttgcttctttgagcatgaaatctttttcgcagcaacactcatcaaagtaccgaaaccaggagtggtatttactacctttccttttggagtcaaattagccgaaaaggtagaccaaggaatgttgtgtgcacagtggatgattacatcgtatttgcgaccag

SEQ ID NO: 2746 - DNA, 538 bp, Gossypium hirsutum
  unsure (1)..(538): unsure at all n locations; Clone ID: LIB3825-017-Q1-N6-D1
aatgaaaatttaaaaaattatatanaaaaaaaactataaactagttcaactgggtttcaatccctttgttcgaactgatatacaccagctattcggattcggacaacattgctataaattcagagaaggaatgatactaattataataatatatatgttttatcctcagcttgaatgttactgttacagtttacaagttaaaatttgggataagtaacagcaaattaccattacgaataatgaatacagaattaaatgcacacaattgctatggtaaaaggtgaaacctattcaggggtgccagtaactacacgatgctccccgattgcaatacccgctttcgtaaaatttacagacccgttgccctttgggcggaggtctgaatgaaccaactctgtttggaggaggaccaccaccaccatatgatgagtgcctattccatgaggaccttcccctgctgtgaaaatcacggtcccttgtatcaacatacctttgttggtccctcggatcgacgtacctctgttggtctcttggatcg

SEQ ID NO: 2747 - DNA, 451 bp, Gossypium hirsutum
  Clone ID: LIB3825-017-Q1-N6-D10
tcgcgatctagaactacggacgcgtgggtctagatcgcgagcgtccgcccttgtgtttttttgcttttgctctacaaccttgcacctgcattgtattcaccacgaataacaaaagaaaaattgccttcctgcctcccagcattttgctcatagcaaatattcaaacaacctatatcgactcagctggatcacaggtgaaaggggtgcaggaggtacacatcatgaaagtctcattcgaaggtttcgaatttgaacaaaaggagagcaagttaaaagagattaacaaaaatgacatattaaatcagttccaatcatcatgtgaggttttcgaagaaccctgcaaagaatgtggtgacgtaacctgttgaggaggtggatcatccgaatttttaatctccgagttctgatgtttcttgctcacagagacagtgttccatgccaaataagaaag

SEQ ID NO: 2748 - DNA, 242 bp, Gossypium hirsutum
  Clone ID: LIB3825-017-Q1-N6-D12
aataaaaaattaaaacatgattcttcataagtttagaattcttgtatttctaaaaatttagtgatctgatagtaacctagatataaattctacatctaactatatacaaatataaaatttgtcccattagaaaccagtttctgccttttggtaaaagattaaatccgaaataaagagcttagagatcacagtcggactggatcaatccaagtcggtcccgttaacaatgatcattaaattct

SEQ ID NO: 2749 - DNA, 536 bp, Gossypium hirsutum
  Clone ID: LIB3825-017-Q1-N6-D4
caccatgaaaaaacaaattctgattgatgctataatttaaagcaactggctgaatcacaaaattacaattaaatttattgagcatgtacaaagaaagaaataaggaattgatgagctatctttctatcgtttgtgagaaccagcactgattgtaaagtcaacggtagcctcttctgaaacaatttccatatcaacaacaccattctgatcattattcaccgattcatgaatttccttactatcacatcttccatcttcaacactttcagaattagttgtagaaggttccttgttgctaagaagttccttgtcatcagaatcatctgtttcacgagctgcaacttcagtagatggttgaccatcaccattaggtggtgttgttaaatgattttgggatgtttccaagagttcagccatactgctatcgactacctttgcttcatgaccaagatcagcaacaatttccaaattaacatgatcctctgatgcgaaaccagtattagtagaacaattcttgcttgtgttctcattctcac

SEQ ID NO: 2750 - DNA, 540 bp, Gossypium hirsutum
  Clone ID: LIB3825-017-Q1-N6-D5
gatcttaaagttaatgagctaattgatagtaataaaaggctttggaagagggagctgattaacaataccttcacagaagaagacgctgcaagaattcttcaaatccctctggcacgtactcctcatgaggatttccttatttggggaggagaatcatcaggtgaattcacggtccgaagtgcctataaactattacagaattcggatgaaaatcctagagcttatgctttacaaaccaactacaggaaattctataaaaaactttggagcctgaatttaccaacaaagataaagattacaatatggagactatcatggaactttttgcctacaaaagtgaatttacaacacaggaaattatcagcaaacacaaactgccccagatgtggtgaaagagctgaaacaatggaccacctatttcgagaatgccctgggtgttagaacagctcaacctttggcaaagttgtttattctgctgcgcaatcgcgatttcataaagataaacttcgatggagcatacaaagaaagccagaaatacta

SEQ ID NO: 2751 - DNA, 551 bp, Gossypium hirsutum
  Clone ID: LIB3825-017-Q1-N6-D6
atatgaactcttgattagagcttaaacatgccatttgcattagatgccttcatataccactaccgaagatggcttcgaatcttcagttagcagcatcaacatttcaacgaaaaaaaatagttacacatcgtattatgacatgatccttgtttagttatagtgtgtccggtgtgaaaggaagagtgaatgagcgaacttaaaactttgtttgtcatagctctatatttaacatgatgaagatcagcttcgtcctaaaatactgtgaagaaatatgaaggaaaatggccgactgccggataatacaacattctctattgatatattgaaacaaaaagatggtaggacccaaagatgagattcccctcccttaaaagttgataaagcttaaagggtgttgcagtgtcccaacaacttttgtttttggcagcccttgcttgcattccatcatgcagaaatctgggtgcattgaaggtgatcttttttttatgcaaagctgataagaaaactcccttttttctagtctatctcaggctcagcacaatggccaaatt

SEQ ID NO: 2752 - DNA, 497 bp, Gossypium hirsutum
  Clone ID: LIB3825-017-Q1-N6-D7
aatacaacctaaattgaacaaaatacattagactatctttctcaaactctacccaacatccatcaggacatgaaccataagattaaaacgccaggctagctccaaacattaggctgcaccagctttctgtttctttggcatgcggtagccgccaacaacacatgcatggtcacgctcaaatggttcgagagtgacttgtaaaaaaggcttgaactgctcctgttgcaatttcttaacttcactctggaatacagcctcagcagggaccgaagagtcaatgcaacttgccttgattgaaataacaaaatgacctccatccttaaggaaatatgatgcattcaaagccagaattcttgcctgatcaggctgcgcaacataagaaaatatcacattcaccatgccaactagcatcctgtatttagcaggatgcctagcatcttcaatgataggtataacattcgctcgcttcttagccatgttgaccaaatccctaccac

SEQ ID NO: 2753 - DNA, 52 bp, Gossypium hirsutum
  Clone ID: LIB3825-017-Q1-N6-D8
atgcaactaccgatataactaccgagatatgcacaccaaactgcataatgga

SEQ ID NO: 2754 - DNA, 403 bp, Gossypium hirsutum
  Clone ID: LIB3825-017-Q1-N6-D9
caaaagaaaaactctaattctctatacaatctccacatattctagttaaaacatcccatattttttttctacagggttcattcctttcatttattgcaaaacctaattcaactcttacttctgttccaagaaagtaaaaaaaaaaaaaacgaaataaagctttttcatattagaggaaaaatacccaaacccaagcgaaaatttaatgaaaaaaccatgattagttcgtcatcaatgttttgaagcatcgccgaacacctcggtgtaacatatggggcaagccttgttgatactaagccatcggttgccacatccggcatggtaaacgtgtttgcaaggcagggtaatctgtctctcacctcgtttatattccatttggcaaatcacgcatctctcattcctt

SEQ ID NO: 2755 - DNA, 548 bp, Gossypium hirsutum
  Clone ID: LIB3825-017-Q1-N6-E1
acaccaacaaaagggaagattctcattcatgattaacttccactacaaactattgattacacacttaaataacacaaagaaccaataggctgatgataacgaaagatgatacgatgatcacagaatctcttggtactcgtaaatatcacctatattatacaacaatgtattcggaagtttgatggacatgccacagctcctactcattttattaaatacttcatacatttggacatgccacagctcctactcattttattaaataattcatacattctgttgtcttccagtaggcaggcattaactctgtatggcaactccaggaaagtccatccgtggtatactatcaataaccttggatggcttgttgctgaggggagtctctgcgtcataagcagagagatgaacccccaaggcagcccggcccgaaggtcaaggttgtttttccaggcagcgtcccactcaacagctttagctgtgctgcatgccacactagcttctccggggacagtcaatctagccgagttctgagggaaaaacctctcaaa

SEQ ID NO: 2756 - DNA, 555 bp, Gossypium hirsutum
  unsure (1)..(555): unsure at all n locations; Clone ID: LIB3825-017-Q1-N6-E10
aaaaaactacgtatatttgtttacatttcaacttggcaccaaatgctagaaatggtcccgctaagcaatatgcattgaaaaacttctgagttttcaatatcaatggcagaaactgcgtaaatacttttacatttagcattgaggctgagactgctgttttttacacaagaatttaataatctaagatttttcacttaatccaaactcgtttccttgatacatacacaaaaattatgacatttatgaccaaaatccgataacttatgcaacattacaaatgcagaagtggaaagcatgtaaattacctcctcaagtggattcgagaatataagggatagatatgcatatccttttttatttcacttgtcctttgcttttgaactcctcaccaaactaagcccttttttctcctaaatctgtcaacacggnccgtgctcattcgagacttctcaggcttatttgacttctttgacttctcaagtcggctatctaaactatttctttgaaacttttggaaggtcaacacccaattcggatgtatccgaaagtccaccc

SEQ ID NO: 2757 - DNA, 517 bp, Gossypium hirsutum
  Clone ID: LIB3825-017-Q1-N6-E11
gaccaataaataacatattagtaataaattctaaaccagaagaactttgagaaagctctcagtcacaaagtataacactggcaacacaaagcaaaaatatccgtgtctttgataacaaaaaagtgattctaacttccaacagaaattaacatcagaatcccttacaaaataaaccaaaaaagacatcaaccactagttttttaaaacaaaacccgagtttagttttttaattcattctcctaattaactcgttgatgtaattctcacggttgccggcatctccaccttcgacgtaatggttcctcttcttcttcagaccacccaatggtgccttgagcttaaatggccaaaggaagttgttggcttccttgaaatgaggtcccacagtcattatctcgtggatgagatcttcaacacaaatgatgccgaacttgcctagtgcctgctcaacaattgcgttgtcggtcaaggcaactcgctgcttgttcaactttccaaaacctcttttgtaaacgag

SEQ ID NO: 2758 - DNA, 548 bp, Gossypium hirsutum
  Clone ID: LIB3825-017-Q1-N6-E12
aggtaaatatgcaaattccattcaaagagaaaccatacatagatgcaaccggtaaacaaagactagaaattatttaaaaggccatcaaagggcacaatccttcacgtaaaaccagaaaacccacattaaggaagaccttaaggcttagaacccaccacgaagacgaagaacaaggtgaagagtggactccttttgaatattgtaatcagccaaagtccttccatcttccagctgtttcccagcaaaaatcaacctttgctgatctggtggaattccttctttgtcctgaatcttcgctttcacgttatcaatcgtatccgagctctccacttctaaagtaatggtcttaccggtcaaagtcttgacgaagatctgcatcccacctcgaagacgtagaaccagatgaagagtcgattccttctggatattgtaatcggctaaagtccgcccgtcctcgagttgctttccggcgaagatgagacgttgctggtctggcgggatgccttccttgtcttggattttggctttcacgttgtcgatcgtgtcag

SEQ ID NO: 2759 - DNA, 549 bp, Gossypium hirsutum
  Clone ID: LIB3825-017-Q1-N6-E3
cgcgtctccgataacaaaaaagtgattccaacttccaacagaaattaacatcagaatcccttacaaaataaaccaaaaaagacatcaaccactagttttttaaaacaaaacccaagtttggttttttaattcattctcctaattaattcgttgatgtaattctcacggttgccggcatctccaccttcgacataatggttcctcttcttcttcagaccacccaatggtgccttgagcttaaatggccaaaggaagttgttggcttccttgaaatgaggtcccacagtcattatctcatggataagatcttcaacacaaatgatgccgaacttgcctagtgcctgctcaacaattgcgttgtcggtcaaggcaactcgctgcttgttcaactttccaaaacctcttttgtaaatgagttccctaacactcttgagattcgggtatccataagtcacataaggttcaacaaggtgaagcatgttcattgttgccttgttcactttaagaaaaacaccattgaaaatctgtctcaaacgtaggagctgcaag

SEQ ID NO: 2760 - DNA, 365 bp, Gossypium hirsutum
  Clone ID: LIB3825-017-Q1-N6-E8
gggccaaagggggagccccaaggccgacccccgggagcacccaggggccaaaaaaccccgagggggggcgggctaaatcccacaaacgaggggaaaacgtttccacgggcgtataaaaggcccgggcttgggccccccccacaacccgggtgggtccaccccccaagccaatcgggggaccggtttttgccgttccaaatccaaccggggcgaattgccggccccaatccgtttccctcccaacaatttaaaacactttttgacttttttttaaaaggccttttaatttttccctcggggaacttgttcgctatcggtctctcccccgaattaaaccttggacggaattaaccccccaattaggg

SEQ ID NO: 2761 - DNA, 552 bp, Gossypium hirsutum
  Clone ID: LIB3825-017-Q1-N6-E9
ggatattgggtacaacatttataaattggaattaagattgaaactataatatcccaaagaaattaaaccaacacaaccaacatataacatagaaaagtaccaaaagaaaaaccaacaactaggatgaaaaacagaagaaaccccggtgtttgtctagagcatattcatggcatctctcttatgtttaattttgcttctctctcctctttttaaatactaattaatgggaatcccagtgatcagtccaattggttgcactgcccactcgtggaatgctattaactctactgtaaacatcaaccttgaaattagcaccacaaatcactccttcactgtctaccctcggcattgccctgattttgttcattggatgctcaaagctcatcagccccccttcactgtggaacatgaatccagttgggaaaggagcaaaggatttggcacacccttctttaatgacatctaaatcatcagatatgaccacagagccatcagctgcaatcccccaatacagcttcactccaccatcagaccccagtgcagcaaacacgg

SEQ ID NO: 2762 - DNA, 450 bp, Gossypium hirsutum
  Clone ID: LIB3825-017-Q1-N6-F1
aaaaaacaggggcccgggggccccccccaagccccccccgtcccccaagagagcccaaccccccacccttccaggggccccatttaaaaaaaaaaaaccaatcccccccccaaaaggcccccccccccccccggcccccgtttggaaaaaaaagccaaaaggggcccaaatgggccccccttggcccccccctgggggggggaaacaaaacggcaacccccaaacccctgttttttttgtccttgggccccccggaccaaaaaccggaaatgggaaaccccttccccccccccccaaacccaaggggggggacccccaccgggggggggccttttcccccctggcgggaaacccccccaaaaagctaacccgggcccccccaaacacccccaaaaattagggggggggttaatggcccgggccccccaaaaaaaatggccaccaaagggc

SEQ ID NO: 2763 - DNA, 555 bp, Gossypium hirsutum
  Clone ID: LIB3825-017-Q1-N6-F12
gaggagcaaaggcaaatccagctcttcttttgttcattaaatttgtttctacacaaagtgcatgctcttaccaaattaggccaccatgttgataaacaaaacctaaattttcttaagcaaacctttgtaaagattaaaaatatttccagcccttcttacaaagatctgtagcaaagctttccgtgtcgataaatctatattgacgatgacagcaatgtcaaagtgtagtcttaggccgattggtctaagccaagatcaccccaccgaacattgtatctggccgcaagataatgagccccgacagggccacggcttccataagggtagtattcgggcattatttttttctcttccagctctgccaaaacgggagtgaagagtgaccaggctgcatcgagctcgtcacttcggataaacaatcttctctcaccttcaattgcatccagcagaagcctctcgtacgcatccgggatctctttcgaatatctggcagcataatgaaggtttaggttactgcagtccaatctcatcccgagtccagggaccttgttattg

SEQ ID NO: 2764 - DNA, 543 bp, Gossypium hirsutum
  Clone ID: LIB3825-017-Q1-N6-F2
cgaaaagaaaatacaatttattctaattgttgaagaaaataatacaaaattcattcagctctacacatcatcagtaatgggaagattattatgccacaacagtacctttgaaaaactcaacaacaaggttttctacaacaaaattgaggtctctcaaaactgtgaacttgctcatcctgttgagccaacaggcttttggtataagaactaagctactccacgcaagccaaaagtatccgcaaggaatatcaataggatattgataggcacataacttaagtctgacacaaaactagaatacaagaaagtgaagttgaaataaaactgacactagcataaggatacttctttacttttccactcgctcacccaaaatggaaaacctaaggctttgcttggttgcagaaatctaaaagaaaacagcaaacaggaccatgtttccatcaaagcacattattattttcatttgacactagtatcccttgaatattagttttgttattaattaggataaaagaaacttttgattacccagttagaagg

SEQ ID NO: 2765 - DNA, 557 bp, Gossypium hirsutum
  Clone ID: LIB3825-017-Q1-N6-F3
acacagaaagcatatctatgtatgcaaatagtatataacaaaatgaggggagttttaattttttttttaagctagcttttgaattataaaacaatgatctgaatttctaaatcagggcttcctattacaaacccgggtgaaaaaaggaaaaaggcgaaacaaaaatcgtggggtttaccgtggtccatggaaccgagagtccatacctactgttaaaccctgtgatttcgtttgaaggctttgatggggtctctataccttaaagcttcctctcgatgtttattgcctcgacaactagaaaaaaaaagaaaaagaaaagctcatggaagcaccgatggttctagtttctgacaacaaaaggtttaatcacacttgatgtttctgtagatcctccttacgaacaagttcgaaccgagaaaaccaatggctccacagaggattcccaaaccaagacaaaacatcaaagtgtatccgaagtagaagctggtctggaagaagcctgacatcttggttttcacggagtagtagtatacggagtacaaatacacgtaaatagc

SEQ ID NO: 2766 - DNA, 67 bp, Gossypium hirsutum
  Clone ID: LIB3825-017-Q1-N6-F4
ggatactaaatatttctcagaaagctaaaaatacataaaaaggttgctctcgcgatctaaaactagt

SEQ ID NO: 2767 - DNA, 543 bp, Gossypium hirsutum
  Clone ID: LIB3825-017-Q1-N6-F5
aaaaattgaaactagttcatatcaacttgctcaagttgtatgtataaattgcaaatcaacaccttatttgaacttacaaatctaggaaagcataaaatgtagttccaggagcatgcatttaaagtagcaaaaaaaattactgattacagtgtaagtctaagctccaaatctagctcttgtgtgtcacttgattctgaattttgactgctcgatcccaataagttgctgagatggttcttgctccttgagtgtgaatcctcaacatgtaggtttagaagttctggtcatgtttggttgtgcaaaatgttgggtgtctaagaagccactggttggctgggaatcaccatatctgatgttttccctttgatcgtattctccaacccccatctgtaataatatataattgtagtacaatcaaacaatcgagcataaactgtctttgtcaatgcatcccgactagccacaacagcattacaatcaagagctttaactatacttccttcacaggtttgaatggtacgagtacataatgtcgccaacaag

SEQ ID NO: 2768 - DNA, 538 bp, Gossypium hirsutum
  Clone ID: LIB3825-017-Q1-N6-F6
aaagaaaacgaattatgtcaaattaaaatacgaaaattaaataaaattttgcaatttgaggattcaaatatgttcattaagttaattaaatcccaacaaatttaacaaagtttgtaatgaaattactttttaatatttttctatttcttcttgcttccttttcccaagctctactagtaaggtcaaaatagcctcacacatttccgtagcgtctggctcgtttggatttttcttcttcgaagagtacaccatccaagcgtggtcgagcttctgctcgggtctcactatgaccgaacccggaacttcggcatcacggcacgtcacgagtccatcacttttctccccgtatctaagcagcaagtgaagagcacataaggccatggcagcggaaaccggaattacgataggcacttggtgtccaagttgactgacatcgtctaactccgaattcctgaactttaaaaagggaagccggggaagctcaccatgagctatttgtgtcatggtagctagtacaccgggagccaattttgctttc

SEQ ID NO: 2769 - DNA, 261 bp, Gossypium hirsutum
  Clone ID: LIB3825-017-Q1-N6-F8
aaaaaaaacacactacctcaataaatcgagagaaaattcgttcatggaattcaaacctgagacttcgaataatgcctttctaatactacaaccataccatacaattatattttaggatttcagggtatatataaatatatatgttcgttctccatattcctacaacatgtaaatatctttagaatacacactctgaaacccaaaccctattcactacaaaatagtttctcttacccatttttttccttctaatctctctac

SEQ ID NO: 2770 - DNA, 550 bp, Gossypium hirsutum
  Clone ID: LIB3825-017-Q1-N6-F9
gaaaaaagattaaatattacttgctatatgtaaccactacaataaggccaatgactctgcggtccctgcatttacagcaaaagtttgttctgttcctatatgaaacttactctaaaaccaggaaataattatcatttgcataaagttaaagaaattcctaatcagtgtccgacctttgctattatacatattttgatatgagtatgaaaaattcagatacatgattgaagtgaaaattgagttatttatcatttaagcaaatccaacatttgaaagcacaaagatagctgaaattttcagttatgacatacctgtggctggtattgttgatgttcccgcagctgctgctaccggtgctgctactacggctactttggctgcttccactgttaatattggatccaccaccttcactctcgctcgatcccgatctcttcttccaccactctttatctacgttcttaccagattcatctgatacagttggctttggagaaactttggaattatgatttgtattagactcattattcttcttcttcttgttctt

SEQ ID NO: 2771 - DNA, 88 bp, Gossypium hirsutum
  Clone ID: LIB3825-017-Q1-N6-G11
ttttttttttttttttttttttttgttttttctactattattacaaatatattatttctgtgattatattattagaacattatttttt

SEQ ID NO: 2772 - DNA, 548 bp, Gossypium hirsutum
  Clone ID: LIB3825-017-Q1-N6-G12
aaagcaaataacatttattgattttttctatccctttgcatttaacacagcatttctagtggagctggtgacaaaaagactagacgtacaactctacaagtccattacaagatgttcgttaaaaaaaattatagaaaaagagtactttgaaaacttaaacatgtaaccgcaactgcacaacatttcccaattttctttcatctcaaatacaaaacaggcctaaaagtagcctattctttttaaggatgccccccaccccaccccacctcaagttatattacatgcaatgaaacggtaatgatgcatgtaacatcacagctccattatttcaaaagaatatttaccatcattgaagtgcccttgagattctacgacaggcccattcaagcacaataaccttacaccgtcctctttggatcacgagcagctgcaagatggtccgaaatgaagtcaaatgctctggtatcctctttctttgaactgttcatcattgaactaggtgtttgacttggaaaatttgtctggaatatgtctgggagaggtgaccc

SEQ ID NO: 2773 - DNA, 503 bp, Gossypium hirsutum
  Clone ID: LIB3825-017-Q1-N6-G3
attggtgggagaagttatgacgtatatatacatcgtatatatacacattaatttttttacttacaacactacccgtacaatccaaaaaaaccgttgtacgtacaaaacataaagggcaattgccgggggcgatttctacgaactaaaaattccaatgaatgcttgaaaatgtctgaaaaaattacttttaaatagaataactccataaagggacataatcatctacttcatgttcttcccatcctccgtcatgaccggaacgaggaggggacattattataccggcagccatatttgcccaaaatttttgtgtcccaaacaacgctttttcgtccaaataaaaccctttctccatctccgggttttcacttttttttgaatcgtttctaaaattcccgcacgaacactcagccgttctgaaagtctccgccacctccgccgccgtcttttgaatatcctttgggtcggaaaaagccgggaccggaaaattccaagctgagtca

SEQ ID NO: 2774 - DNA, 549 bp, Gossypium hirsutum
  Clone ID: LIB3825-017-Q1-N6-G4
aaatcaaaacatatttagggataataaaatggagccagaaactgaaacaggaacaagactgaaaaagaaaattttcagtagagttcattacactaaaagttgcaaatctagaaaactaaattataatctaccaatctgtatatgtcaataaaacaacaaaaattcaaaaatcaaaccaaagacagaaaagcatatttccaacaattttcatttaaacctgaacaagtagtagatgcaaacaacccacattcttatcctgattcacctcgtttcgagtttcgatcgatttccatgatgtaaatgtgtctctaagaagcaacaaatggaaatacaaaatcggatttgcatctacctaccagctgagaaactttacagaaggggcaaagtgtgcgactaattcacagccgtgacgaaataaataatgtacgcaagacagcagtgtttatgtcggtcatccatcaaagccgaactgcaagccaaccaaacaggctttaccggtcacactagcattctaaggcatatgttgggacctcgaacatattttcatca

SEQ ID NO: 2775 - DNA, 521 bp, Gossypium hirsutum
  Clone ID: LIB3825-017-Q1-N6-G5
cttgttaatgattcaatatttaattaaaaaaatctgttgtttgatataatgaattcgatcaccaagaatcaaatcaatagccataaaacaattacaagatacaacactgtcctataattacaacagctagccaaaggatcaaaaccctcccgttgaaccttgccaaacctaaacagcttgctgatcctttcgggttacaaacatcttgtttccaccaaatgccaagttggttaccttcaagcctcccattgccttcactctccccatcacattcttcctaaaaaccttaccctttaatcgaccccccgaacccaccgccacctccgaccacaactcgatatcccctcctttactgcaaaacacttgattcccatggctctcgattttgcaccctaacccttctttcttcccattcactaccttccttctattctcaacacacatccatggattactattatcatttgcatcagtgttcacagcccctaaacacctcaaatccgcattcaaaacctccccag

SEQ ID NO: 2776 - DNA, 545 bp, Gossypium hirsutum
  Clone ID: LIB3825-017-Q1-N6-G8
acaggtcaaaccttgctattgcatgtatattatatcatatataatatattccatatgatcgttactccttttttattcaccttttgttctatgaaaaacgaattgtaagctgaaggcaaatgagaaatcagaagttcgagatacgatggaagtcaaatatctccttttaagtatagtcttaagagatacaagagtcttcattgctgcaagttatttaattaacgcttatataactagtaggaaatagccgaccaaaggcagctaatcaagggttgtggtgaccagggagcttctccttgatcttatccatcactcctttcttctcgtggtgctgctggtgatacgtagccccctgccctggggttgtagttgaggtggcctgagattgatgctctttgttacctggtatcttctcctttagcctctgtttcagtcccttcttcttcttccccgttccttcgtcttccgaagatgagctcgagctagaggaacttccagtacgatggagtccatgatggcctccgtgatgatgtccaccgatccct

SEQ ID NO: 2777 - DNA, 549 bp, Gossypium hirsutum
  Clone ID: LIB3825-017-Q1-N6-G9
gtcaaaatctatgatacaatttattaacctatcaaaaattacgactgtaacaaattacacaaacaggatacgaagtgccaggtccaatcctaacccatctcagttatcatcattagcaactatgcaaaactaaaaaaaagacctcataacaaactgtggatggatacaatcatgcaagaaactaaaagtaatgactgaatggaaacaacactatttaaacagagatgctaaccagccttccaccgtgcatttccagccatccattccctaaaagatcttgaagagtagaccaccgtgtgtggcaaagaagggagcaaacacaagtgactcgactgccataagcttgataagaatgttaagtgatggaccggaggtatccttgagagggtctccaacagtgtcaccgatgacagctgccttgtgaggatcggatccctttggacctagggtccttgcatgctcggacacaccggcctcaatgtacttcttggcattgtcccatgccccaccagtattggatgcagaaattgcaatctgaacaccggaaac

SEQ ID NO: 2778 - DNA, 572 bp, Gossypium hirsutum
  Clone ID: LIB3825-017-Q1-N6-H1
gaataaaaataatatttttatttaaatttaattaaaaataaatataaagacgtccatcatccaagtcgtaccccaaaaaaaaagtccaaatgagcgcgtacctggatttacgggaataattattcaaaagaaatagaataattaacaaacttgtcattccctaaagttgtttaaatttaatcatccctaaataatggagcttcttgcaaatcgtgttaaccccgaatccaatatcaaaattcacaatttataactcctccaaaaaccatttcttacttgtatgtttcacgtggaccgtcattttttgtctaacaatcagactcagctctgaaagtactgcagatgtgcccatcaacacttatggaatgtaaaaaaatgccatgaatctaaaatcccaattggccgtttattagaatccatctacctacttgcaatatggactctggataaaccccttacggaaaaagatggtattatcattgacataaaagaaaagaaagaaagcaaaaggaagagcaggcttttctcgaacccaaaaacatgggagatttgattggataacaactgctcct

SEQ ID NO: 2779 - DNA, 567 bp, Gossypium hirsutum
  Clone ID: LIB3825-017-Q1-N6-H10
gaaatcaaacatcaatagctcattataataaagagatgtgctaaagcatctgaaaccgagatagtctcactgtacaaatatgaaatggaatgcaagcaattgcaaaatcttctcttatgctacatcatatggatcaagaggaagtccttttactctttttcttggccgttttcgcaatcgcatcgcatatctctttcttccgtttgttgttatagttgttgttgttgttgccacctgtgctcattgcactcttactctgaagctccaaagcatccttcacaaaaaattttaacctccatagggtagattcactctgagcatcaatgtcaatctccacttcttcagccattgcttgaaacgcgggattactttgagcaataatctccaatgctttattaagatcctccatagacaatcgggctatggctgtcccaagatttctcttctcttcggttgacattttcctgcacttttggacgactgtttctctgagatgttccaaatgtgtatcgacctcgtaaagctcattgcataaatcccggaccactttcgcatgagcagcttctc

SEQ ID NO: 2780 - DNA, 555 bp, Gossypium hirsutum
  Clone ID: LIB3825-017-Q1-N6-H11
gcatgaaaacatcaatatatatataggtaggtaggtaggtaggtaggtagttcaagaaaacaaaaaccagaagaatcggcagaaactaagttctaatcctacaaacaactaaacaacattccataccgataatgtctgccaaagcatacgcatactcaacaaaccaaaatgaacttgagtttaagaagaataaaccttgagagtaaagcaaaagctaatatgataatgaatctctaaccagactcaaatagaaacttggaacttgccagatatcccattcatagaggtccactgccagttgcaatatccttctttattgctccttgaatccatttgagaaccaaccactgaaccccaagaataacaggtatccataattttcccttgtcgtttgcgtcagacccatcaaccaacttcttgctaactacaattgctcgactcttatttgttgcaacacctgtgatggcttttaccaagtttggaacccaagcttctccattgggaagaatcttttcgtctatgtcatttttattacatctcccagtgttttcaacc

SEQ ID NO: 2781 - DNA, 577 bp, Gossypium hirsutum
  Clone ID: LIB3825-017-Q1-N6-H2
tcgcgatctagagcccttttttttttttttttttttgtaaattcaatctaatggtattaacaatatatattattactaattacattttctcacatggattggtgcaataaaaacaaacctaaaatcattgggaaagaaaggttttcatttatctgagcaaaattccagaaaaagaaagaaaaaacagagtgttggccattgtttcttaagcaataccatccgatgaaccaagagggaaacaagtatcttccccaccggtactccatagaaaattagcatagctcgccggataatatgagttattaggatcaacttcaatggcttccaagaaattttcctccgctgcccacatatccttcttcgctttccataaaaaaatcgcatatttattgtgtgcttcagcgtctaccggttccatttgtattgctttcttgaacaactcttctgctctgtcataatcatgaacaacaaggtagagaaactgagcataattagcaagaaggagaggattattaggttcttgtgataatccctttttgtaaacaagctctgtcctacaatacgttccatcaacgat

SEQ ID NO: 2782 - DNA, 538 bp, Gossypium hirsutum
  Clone ID: LIB3825-017-Q1-N6-H3
aaaaaattaaaaatataatatcaaaatatatctattctcttaacattgatttaaaattgggtaagatagataatcagcagggccgccaggcatgaacaatggataacccattccaaaagaaccaatctttccgttgcataatgcagcaaatatacctctcaaaaagagtaagcagaacgtcagaatttcactataaaacgggttcggaatggaacaaggcaccccaggaacagtgagtaacacggggaaaatggccaaggcaacaacactcctctttcttatggccattatcctgactgaaggagcaagggatatgccactgaaagaccaagtttacaatccccagggcctccttggtctttggggccttcctttatttggtttgccacttcccttctttaaaccacccccatgtctcgggcatggaggaccatgctgcggaggtctgtttccattcctcgggaaacctaaagctgggacacccctcaagaatttcactagagctgatgtcaatggcgatgccattgacccatcccca

SEQ ID NO: 2783 - DNA, 541 bp, Gossypium hirsutum
  Clone ID: LIB3825-017-Q1-N6-H6
gaaaacaagttctaatacaacaaaatctcaaacatatattaaggaacatcacaaaataagtcgatgtttatcactgagtttcaagtattatttatgtataagccaaacagtaaaaaaaatcacagcaaagcctgtgaaaaaaaaattttatttttaacaaaggcactttcacaaatataatttctatttttctctacttattcttcaaactcttctcttcattatctctgtgtgtatctgtatttgtatcgatatgcctagtgtttaagttttgctcaagcatcttgttgcttaagaaatacaagaatcttgttgatcagcaaatatatccaacagggaaagcgcctctgggatgttgagttcaaggcggaattttggaccatcgtagtgatggagaattggcctaaatgaatcttcttcaagtggctcgcagattttccttgtaataacgcgaacctgagcagggaatcgagattcgccagggcatttcttgtcctcccaggcagttgggtcaatgtttgttccaccaaagcttgcagcc

SEQ ID NO: 2784 - DNA, 570 bp, Gossypium hirsutum
  Clone ID: LIB3825-017-Q1-N6-H7
aaagtcgaaaagtggctcctgcattgttccattattatactttcttgcttcttataaaagacccaaagttcatagttgttttttacacaaaccgcactagttgggcttaggctcctcctagtatccttgagactgccttgcctggagttatacatacagttggaaatagataagactgtttactattgccactcttgcatgcagcaagactcaaaacacccacaccgtatttatataaacataaaaagaaacgaaaagcagaagcttgagtaaactctgtatggcgcatatcaaccattcacaacggtaccaccatttggatggagggtttggccagtcatgtaggaggagcagtggttacatgcaaggaacacaaagcatggtgcaacctcgctgggctgcccaggtcttttcattggaacttgagctccaaactgagcggtttcctcttcatcaaatgatgctggtatcaatggagtccatatgggcccgggtgctacggtattcacacgtacgcctcggttcaccagctgttgtgaaaggcctctagtgaaagccacaattgcaccc

SEQ ID NO: 2785 - DNA, 521 bp, Gossypium hirsutum
  Clone ID: LIB3825-017-Q1-N6-H8
ctattgtatttacattttattgtccatttttggttttttacatggtttacttccttttaaacattttacaaagttcaatcacacaatacttgcatcaaacttgatgatttccttaacatagtaggataaactcgagggaaatgcattgcaaaacctcccgatccaagtcactaatcggacaaaagaaagctctgctgacataatagccacatccaagtaatctccaatctcaaagctaagtacacccaaggtttagctgtcatctaatctcctcacattaccgcaagaaaaggtctttcccacctttctcaccacaaaacggccattctagtcaggatatacaaatgcaaaggacagccttgcatttattctccttgctgctggagctacctttttcaccagatcagtcaactcacgaagcgtagcatccttccatgtataaatctgaacctcatccttgggttccttgcctctcactgcaaaatcttctttagaatgatgaccaccaatcttagtgaaaa

SEQ ID NO: 2786 - DNA, 471 bp, Gossypium hirsutum
  Clone ID: LIB3825-017-Q1-N6-H9
ggggaaagggaaaaccaacaaaggccggttaaaaaaaagggccaacacaaaggccgcaactggtttgatttacaaataaaatggttttaaaaaaaaagggggcttgcccccctttttttgtaaagagggaaaaatcggattttttaaaaaagcaaatttagtggggggacccttcccgacccacataaaaaggccctacaggggcatttttaccacgggaaaaaaaaaaaaaacttgggaaagcaatttttgttgtaaattgggggcatggagttgagggggcaacactatttggttgattttttttggccatttaaacttcatacccccaggggttggggggtttcccaaccctaaaaaaaaagctttgcaattaaacccgttgtataacatgccgctcgttttcagccccgtaacttttgacaagcatgaaatatatcccccaaaatttttcctccttaaaaggggggg

SEQ ID NO: 2787 - DNA, 499 bp, Gossypium hirsutum
  Clone ID: LIB3825-018-Q1-N6-A1
gatgacactctcatttccattaagatattaagaaactgaagactgcatatatataatattcccaaaaaggtgcatgatacttagagaaaagaaaacccaaaaataaggaaatcaaagggacgccaagggcatgtaacaaatatttcagcaacaaacaaagttattcaaatgataagatagaagaaacttctttgccatttttctttttaatctctctggagtggtatgggattaggatttccaatatctcgggagcctatcacttggcgctggcgagttgggtgcggagcagcttggcagcagcaaccatgttgctcagggctggtttcacctcagcgtacttgcgagtcttgagcccacagtcagggttaacccacaagatgttggtctcgagcacggcaagcatcttgttaattctgtcagcaatctcttcggttgatggtattctgggagagtggatgtcatagacaccgggtccaattccagcaccatacttcac

SEQ ID NO: 2788 - DNA, 420 bp, Gossypium hirsutum
  Clone ID: LIB3825-018-Q1-N6-A10
caagcatcaaagcacatcaactctataaatcaagcatgtgcaatcaagtccggtatgtctcgttctatatgttttagtttcatccatgtattcagcaagatctttacatacatacatgatacatatttacatgcatacatacataaattacatatatattagtacatgcagggtgttgcaaaatggtatcgatttctcatcaaaacctacaaacatccttagacagattaaaagtttgtaaaattcatgtacctattttgctttgtctgctctctttgcagggcacagaaggcatgtcttagcgtcgattcttgcagttttttcttccttgtgtgtcactgttgacctgcatagatcagtgtatcggatgatactgagtaatacctcgtcttggtggcaacttccgtcaaatgaaaagga

SEQ ID NO: 2789 - DNA, 562 bp, Gossypium hirsutum
  Clone ID: LIB3825-018-Q1-N6-A11
gaagcgcattctcacaattccattggcaaatagtagaccacaagatgcattggtatggcgaggggataatactgggacatatacagctaagagcgaatacagatggctaattacagagggggtactagaatacataatgaacttcctactaatttttttacaaaattatgtgagctccatgtgccatgcaaaattcgtatttttatgtggagaattgctaacaactatttacccactttgcataatctaaaatctcgtcaattggctgtcaatcctttatgcccggtatgcatatctgaggaggagtcggtggaccatctttttagggagtgttccttcacacagcaggttttgcggggtttggagatgccattttcaacatgcaacaaagaagccaattggaaaacatggttagtagcggattttgaaaataagagtctggaagcatgcaaaatcaaatctatcgcttactgggccatctggtataatcgcaacaagctatatcatgaaagagtcagagagcaggtacatgaagttgttggatttataaggcttactatac

SEQ ID NO: 2790 - DNA, 528 bp, Gossypium hirsutum
  unsure (1)..(528): unsure at all n locations; Clone ID: LIB3825-018-Q1-N6-A12
attataaatattgcaaaatatataaatggttcgaaaatcgtgtataccagaaagacactagacaaatgggaaaatttactagacttgcaaaatatataaaattgttgggaaaattctagtacaaggcatataataataaaactgtgagattcaacatgctaattaattaagatataataacaaaacaaagcttaatctaaaccaaaaccatttctttttggtacatgaccaaaaacaattaaacatagctaattggaacctccaacttcattaatcctcatcattaaaagtagtcttccttcctgtgccagcagcagcaaggtttggcttattataaggtgttccacgtccacctctgccaccaccaaaccgaccaccaccgccacgcctaccaccgcggccaccaccatcccttcctccccgaccaccgcgacctccacggccactgccatcccttcctccactccatccaccactcctaccaccaccttttccactgccaaaatcgcctttaggttntgcctcatc

SEQ ID NO: 2791 - DNA, 194 bp, Gossypium hirsutum
  Clone ID: LIB3825-018-Q1-N6-A2
gctagcaaatattcccactaaatatgttgtataatgtcacaagcaataatgtttatcatacatagtatgtaattcttttctatctgctatctttaggccgaatatcgattccttcaataatgaggcccttcttaagggtataattatcaacttcccttaaactacaagtagctttcccatcatccccatgttca

SEQ ID NO: 2792 - DNA, 198 bp, Gossypium hirsutum
  Clone ID: LIB3825-018-Q1-N6-A3
aaaaaaaaatgaccaggaatttatttgaatacagagagctgcttacaagttacaatatacaaccacatagagcagcacaaggacataagcatagaagcagaacagagcaacaaaattgatagattactttctagcatatcagccgactgctacaataggaaacttcaacccacagtcttgtttccaccttcttgtgtc

SEQ ID NO: 2793 - DNA, 525 bp, Gossypium hirsutum
  Clone ID: LIB3825-018-Q1-N6-A4
atataatataatcctttttaagcactaaaaacgtatatataacttaatatatatagatggatagatagatagatacctaagagttaatttttcgatacgtcgatcagtaaagatctcacacaaaagaccagtttacaaacatcaaggcgaggcagtgattggcagcatcatcgttgtcgtcatcgacaaccttccacacaatcacctgctcataggacactggccttcccatactcgatacacatatccctgctggtagatgtgcaaacccctgttgcatgatctttgagaactcggagcataggctctttcggccggcttcgtcgagaatcttgtccagcattatgtcttgaagggctaccaatgtagtttctagcatatcaagcccagcctggtttgcaaaggtgaaaactggagaagcatttgttttcaatgaacagcacattatcgcatctgaatggtttcacagttgcttcagcaaagcatcaccggactgtgaatcggctcgtaggagttcttcaccgg

SEQ ID NO: 2794 - DNA, 568 bp, Gossypium hirsutum
  Clone ID: LIB3825-018-Q1-N6-A5
aatagataaacggaattgtttaataaataaatgaaattgttatagaaatggttgttgaaattaatctcccacaaataataccactttttactaaataactccaaataatttaatcgaatttgagctttcaaacctcaaaatttgggtgaaaagcggggaattaatgaactcaacctcagtgaaattaatcaatggatatggatgaccatattccactcggcactgcagtcttcaaaacataaatatttgcagagggaaacaatgctgggcttgccaacactggctgtttatcatcatccactcaaaatcttttaaacgcggctaagtgagaagattcatccatccccaacatctcacttcattgcaatggcaatctgctttgctggtgggtgcggtttccttcgattgacccacaaaaatattcaggattacaaccttcttccgatttttgcaaaccttcgagctactccgaatataacagctttggttaagagccctcgatctagaatacatgcaaccgcgatagccccaccaacaactacaagtttgggaatgttgttcttccctg

SEQ ID NO: 2795 - DNA, 540 bp, Gossypium hirsutum
  Clone ID: LIB3825-018-Q1-N6-A6
caaatcaaatcaaatcaaatcatatcccatgaaatgaaagaaacaaaagaggttttacaaatcagtaggctatatagtctgggtgctattttacagttacaataagaaagcccctcttgtagatttcccttctctaaaacctaacctcctatacaacctctttctccggtgggcttttttcaggaaaaagaaaaaaaaaaagattatgttacaagaatacaagataaagaattgaattctacagtaagtggatggttagaactttgtacactacatgttttcatggtacagtgggacttaccagctcttacgattccacaggctgaatcaaatatgccaggtgaatggtggaagctgaaatgaaatcgtagaaggtccacccagtctacaaatttcatactcaaaataatgctacaaggctcgtagcagttaccttgataactctgcatattcggattatctgttactcagttgtgatcataacccgctctctgctccatctgacatctactttggaacattcatggaattatccatggc

SEQ ID NO: 2796 - DNA, 203 bp, Gossypium hirsutum
  Clone ID: LIB3825-018-Q1-N6-A7
gggcataaaagttcgataacttagcatcaaatataaacccaacaaagggacatacacttctaaaacgtccgtactaggactacactgggccaaagctaatttataaagtaaaagaggcgaaccaggtttatatttaaatattttttatatatatgaaaagggaaaagggggcgtgggaaattaaacgccttcggctgacgggg

SEQ ID NO: 2797 - DNA, 537 bp, Gossypium hirsutum
  Clone ID: LIB3825-018-Q1-N6-A9
gcttaaacatcagtttagccatattcctggctgttaaaattgctaaaagttgtgtttcttttaacttgttgcaacgtttaccagatatttcctactggtctgggaacatatttatatgtgcagattacgataggtgttaaaagaggggggactgttaggggaaaaacacggcttctttacaactaaaactcgaattgcagctttgattcactgcaaatcgactgaaaatgcactacttcaattacacttctttccgcgtaggtttctcccgtgagtgttgattggagcggctttagttgttgtcggttgtttggatgaaggatcggaattgatggatgaaagatttgggctgcgagcctttgggtatggatgaatggtcgcaagttcacggatacggcataccactgtctttggtaatggacgtacataatgcttcacgttagtctcaccctgcaactctttcctgttgtgtttatgagcagagctagatcttagaaggtttcgccatttgtcccttagatcaacaggtgtccggta

SEQ ID NO: 2798 - DNA, 99 bp, Gossypium hirsutum
  Clone ID: LIB3825-018-Q1-N6-B1
gaccgggatgaagaatttatatcactttcgcggggtgctatttggaaaaaaaaaaaaaaagggcggccccccccgaggacccgcccccagggtcccccc

SEQ ID NO: 2799 - DNA, 557 bp, Gossypium hirsutum
  unsure (1)..(557): unsure at all n locations; Clone ID: LIB3825-018-Q1-N6-B10
atagctaagctgaaaaatgaagatcaggctacatatattattatatagggagactagaccatatattcagatacaataacattgtcaatctaattggttcaaataaacacaatccaacaccaaagaaaaaacccctgcctacctgccccgtagtttccaccaatctatatttcaaaccaaaacactgttctaagtaaacaagcaacgatcagcttctgttagatctacttctttccagcggcaaacgtgaatctagtgttgacagtatctgaggcatcgacatccccccggacacaacaatttcgattccttcacggactgatagatttggtctgataacatcatttgtattgatgaggaatatatcaccgatgtaaagatgattcgtgggaacatagacacagcatagctcttcttcaccagtgtagctctgtagagaaacagatgaagtaatgaacccaaatgcatattcaccaattcgaggatgccttatgatggctacttccttgaatgcctgtgtgtnctgatctggtgatatagccggaactgatctgctt

SEQ ID NO: 2800 - DNA, 561 bp, Gossypium hirsutum
  Clone ID: LIB3825-018-Q1-N6-B11
aaaccacagaaaacaccctatgtagttttcatggatatagagtgtagacagtaggaaactcatatattctatataatatacacatttatgcacagtattcttatgactttgacgttccatttatcttaacagcatctagttaagcttagcttagtttagctttaaaatttacatgcaccatggggattgcaaagcgtcccaaccagttgcttccataaggttgctagcgaaactgcctggatcacccatcattggaaattccaaagacatagcagtttcagcccaaatggagtcgtctaaaagaggcaagttggcgttcatattttcccagaacccctcaattccatcttcagtaatctgtccaaactttgcatccatgttcccttgaagatcaatgctctcgttggggaaagaaggcattactgaggagtcattgttgtacactggtattggtgtcatgtcattgaccctaatagttgggttatttgatgatgaactgatcatactcatacctgaattgctcacgttttggggttggtaattcaccatcggagccatctg

SEQ ID NO: 2801 - DNA, 541 bp, Gossypium hirsutum
  Clone ID: LIB3825-018-Q1-N6-B2
aatccaaaatgattctgcttttcattacaaggaattgacaatttttgccatccctaacctgtgtttttttgcaattcattacaagagattaaaatgcaggaaactgaattttgaaacaaaagatttaaacttgtttatcttgagggactttcccattgggtcgctgctctgcttggcggggtttcttcccacctatctcaatgcttgttccattaccacttaggcttcttaatttcctgacacccctttttgttgcggtacatgaagtaaacgatgagttgcatggtccctaccccacacccaaacccattggggacagcaacaaaagcatcccgaccaaggagaccataaataaaccatgaagcccctcataggaacacaaatagtgacaagaaaaatggcatgaactaaacacttttggtcttgatcaccaacctgatgattgaaagtggtgaagcccacataatggtggaaaaaatggcggcagctaggccacaaaagagctttctgccctttccatggagggaaaagagggaaatga

SEQ ID NO: 2802 - DNA, 333 bp, Gossypium hirsutum
  Clone ID: LIB3825-018-Q1-N6-B4
ggaaacccgaacggttggaactatttttaagaggggccaaaaaaaacaaggtaaagggggtacatgttaaaaaaaataagctaggggaaagggaaaaaaaaaattttttttgagaaagggggttcttttacactacaaaactggaaaaagggttaagaaaaaacctttcgggaaaaacccccgcttgaattggaaacccgcaaggcaaaaaatttaaaggggggggggggcggattaaaaggaaaacccaagcaaaacttgtccaaaacttaaatagccagccaatatttaagggctatggggccaaaaaaccggaggggggattttcaaaaa

SEQ ID NO: 2803 - DNA, 557 bp, Gossypium hirsutum
  Clone ID: LIB3825-018-Q1-N6-B6
gaacaagaaatattgttggatgaataggttaatacaaggaattattgtaagacaaagccatgaaccataatccacgttacagatacgctaattcatctattctataaaatgctaaacaaatcaactcaagccagcaacaaaatcgaagatagaacaactagggtgtcactggaaactccccaactttaagtatcaaaacaataataaaatagatttcccaacttctcaaaatctggcactgctgcgccattctgcaacacttcaagcaaaacaatccccaaccattcttccatcttgtcaaacaaataggttacctgcagcaggaaagatgctccataccaaaccgagtttctaatgaaagtaaaagaacacagcaactctatctttgttgataactatggaattcacagtctctcatgagtctttgccattaccaataactaagtcagatacacgattttgctaaactcaacatacaggaacacggaagcttcatcttcatgaagcttccacctacctaaggaggaaagagtacaaggatttctagtaatgtacat

SEQ ID NO: 2804 - DNA, 158 bp, Gossypium hirsutum
  Clone ID: LIB3825-018-Q1-N6-B7
ttttttttttgttaaaaataaagttccaatgacattaaacaaaatttattgtaataaataacaatcataaataacaatccagtaaatagaaaaagcctatgaagccaaaccgaaaaaaaacacaatgctagcaaagtattagaatccttgcaaccacc

SEQ ID NO: 2805 - DNA, 555 bp, Gossypium hirsutum
  Clone ID: LIB3825-018-Q1-N6-B9
gaacactgcaaaaaatattaatttaaaataatgcgtatgcaatacatggccagaaagagacgagatatttgtaatctatactttatatacacataaattacagatgtatacaaaatgttatgcacaaatataccatttcttttttgttcttgagatcaccaaaaaggacaccacccaacatagttctggcacaaattttcatgtgatgtagcttggagaattaacttttgaacttgcaattttacggacaaaccatgttccacttctcggttatctccagaagttaatgtgctgtgatcaactacgttttgcatggaacatgcaggtattgatgagcatgaagatgaaaaatcacgtccggtcagtttgttactcatgcgagccataaccaccacagcccgctcattcaatacctcattagcatcaccaagttgattgacagcctgaagaagttccctttcacgtgccccccgctgaggttgaccaagctctttgctttgagcagtttcttctgtgtttataacagcaggggcatgattactggcaaacattgaa

SEQ ID NO: 2806 - DNA, 509 bp, Gossypium hirsutum
  Clone ID: LIB3825-018-Q1-N6-C1
aaattatggtgccgtcagcgtactgacatggatgccacatgtattaattgttaatctagtaatgtcacatcaataatttaaaaaaatattaaaaatattaaaaggttcttttaaagtaaaaatattaaataaaaaaattctcaaccttctcaactattcttctagggattctcctggttatcaaacaccacctttctccaaaccaaattgaacattctaacaatgagggttttctaatcttctaatcatttaagctcggagtcttcattgaattcctctgcaacaaaataactagaaaaaaaaccatggattttttccctattcaccatgaattgcagtgaaaaaacactggaaacattaaccctcaagcctcttgggtcagtggcattttacgaagctctgaccttcagtttgcaaatcccaacagtaaagaaatagccactgttgaaaagagtaacatatctcaaaatcgagtcgatctaactgagaaagatccgggcttaacaagc

SEQ ID NO: 2807 - DNA, 566 bp, Gossypium hirsutum
  Clone ID: LIB3825-018-Q1-N6-C11
gatactgcaaattatatcatctataaacggaatcaaagctgttgatatagactcgatttccacgcctctgttttggcttgaaatataacagacactaatggtatgtagtactttatgactctaatccctttaacaagctctttaagttactacactcgtacgggtacaacacaaaccactgtaaaataatattacaaaccttttcttgtatcattacaggactaggctagcaacaaggatagattctcaggttggcttttgcttctcctggttagcatcgatttgcttgcttgttctttagtagtatttcatctggtcgtcaatggaggatgacttcaatcatggcttctctgttaaaattcttcttgaggtgtctgtaactgtaaaacgaatcccttcataggaagtaagatagttgctccttttttcttgaacccccttctccgtacaagtcattccactgttttaactcattcattccagctccctcagatgcgaagctagccgccacctgattctttgcttgcctgaaatcttccatagataatggccttagggtaatgact

SEQ ID NO: 2808 - DNA, 532 bp, Gossypium hirsutum
  Clone ID: LIB3825-018-Q1-N6-C12
ccaattgaaaaacccaatcttttatcattttttactagtcacataaaaagctaaaaaaaattatactaaatcccagtatcaagcttgtgactgtagacatccagctcggcaaattacttctctgattactatatctcatttttcttcacccatactaattgccaaaataagcaccaaaccacagaatatttcaacacatataaaggtctaatataatcaacatagccaaacaaacttccaaacatatcataatcatccactgaactggaaagcacatgtaacacaacatgcatactttgtcatccaaccaacttagatatgtcctaatcagatagatagtatttcctgcttccacagcacaggcttagaaaccgtggattttgatgttttccttcttcactatgccagcctgaacaaggaaggttgatacattcttacgctggtcaccttgaagttgaatcacctgtcctaattcagggtcctggaccacggtcccattgcagcaaaactccttcttcaggtctttaagtat

SEQ ID NO: 2809 - DNA, 574 bp, Gossypium hirsutum
  unsure (1)..(574): unsure at all n locations; Clone ID: LIB3825-018-Q1-N6-C2
cacatcaatcctattttcaaaaggaatcttaaatttcgtgaaccaaacgtacactaatttttaaataggacacggggatacaaagcaaaggatctaggcctaaaaccatgctttcaagttctagtctacggttacatcatcataattgtggagacaagatttattgatcccattaacgttcatgcatgctaaatgtaaatgtaaatgcttgtacacgcagggagaaagcacttacgggcaaaataattaagaggaaaggatgaagcctgcctctaaaacagatcatgaggatggagctttctctttcagggattctttaactgcattcaacagtaatggcattaacttctggttagtgacaatgatgcctgtgtccacatcaagatgctttcccttggaaaaatccaagggctgccctgcagcatctgtgaccacacccccagcttcagtcacaacaatacacccagcagcatgatcccatattttctctcgataccctttgtgaggaaaacgcagatatatggctccatctcctctggnacagagcaccatatttgcctggctgtcaattcta

SEQ ID NO: 2810 - DNA, 532 bp, Gossypium hirsutum
  Clone ID: LIB3825-018-Q1-N6-C3
aaatgccataaaaaggatttatcaatttttttatgcttcatattgctactagactgtatgagcttgccatgaaatacagaagacaaatttgggaacaacttgaatccagaattacaatagaaccaaggaaagcttaattgagaacttaaaaggtttttctacatataaagtccttctggaaccccttctttcttcttaaacatcaccttttccttggccttcttaaagtctgcatgtgtcaccttcatgcgtcgctctcttaaagcaagcaaaccagcctcagtacatattgcctttatatcagctccagagaactcatcttttgtcatcacaaattcttccaagttcacatcatcagccaatgtcatccttgatgtgtgtatctgaaaaatgcgcctccttgttttgatgtcaggaagggggaactcaattttcctatcaatacggccaggacgaagcaaagctggatcaagactttcaattcggtttgttgcaagaatcactttgacgtctcctctcgaatcaaagccat

SEQ ID NO: 2811 - DNA, 300 bp, Gossypium hirsutum
  Clone ID: LIB3825-018-Q1-N6-C4
ctggaaaaaattatgatttttatttctccaagacaaacaggtgtagcaacctgctacaataatactgcagtaagtagctgaaacagcagtattcaggtgaaaaacaacctgttttatttccaaactatatatcttggaaaattacttgctacaatcacagatagcaaaaccattgatacaaattttcaatcgtttgagttgttggagagagtccattcatccaaaacctcattttttgctgcagactttgcatccatggttatttcaagttgaaaccttgctcccctttggtggtgtatt

SEQ ID NO: 2812 - DNA, 561 bp, Gossypium hirsutum
  Clone ID: LIB3825-018-Q1-N6-C5
actgaatataagtaatatcataatatagcttgagagaaacatcattggttcattacaggaaagatggacactaatctgaaatggccgcttcttgttattcattaaatgcagcatctcaatcccatggacagagcaaactcattattggtgccttagatgagtgcactcgacgccacaattacaattttatctgtatgtagagccatcgccgatattaaccaaaacttaataacaaatgacaagctaatccagcaccacaatgcccggtttctgtcccgtagaagcttatgaatcttcatcaccaacattgacagcaaagtgcccaatttttttaccctcggatagcatccgctgcttgttcaagtgctgggttcttgctttgttgatgactgaatttggtgatttgtacattctctttaaattgttggatacatgttcaccgcctacaagattcctttttggcgtgaaaccaaaaacatcttgaaggaactcgttttcctgcatgtgtttagcgaaacctccaccaagaaagcgcctcaaaaagttcgactgaatcaactg

SEQ ID NO: 2813 - DNA, 522 bp, Gossypium hirsutum
  Clone ID: LIB3825-018-Q1-N6-C7
catctataaacggaatcaaagctgttgatatagactagatttccacgcctttgttttggcttgaaatataacagacactaatggtatgtagtactttatcaccctaatccctttaacaagctctttaagttaatacactcgtacgggtacaacacaaaccactgtaaaataatattacaaaccttttcttgtatcataacaggacttggctagcaacaaggatagatagattctcaggttggcttttgcttctcccggttagcatcgatttgctggcttgttctttagtcagtatttcatctggtcgtcaatgaaggatgacttcaatcatggtttctctgttaaaattcttcttgcggtgtctgtaactgtaaaacgaaccccttcataggaagtaagatagttgctccttttttcttgaacccccttctccgtacaagtcattccactgttttaactcattcattgcaacttcctcagatgcgaagctagccgccacctgattctttgcttgcctgaaat

SEQ ID NO: 2814 - DNA, 558 bp, Gossypium hirsutum
  Clone ID: LIB3825-018-Q1-N6-C8
gaggaattaaagacaaagaaggtaaagagacttaggaaaaaaaagtggggaatcgggatattccgagaatgggatatacccaggccggtatgggtttcattttagaccataaaaatctattactgaccaatcaaataagctttcatctttccatcgagattagtgttatttcgaacgaattatttttccaaaatatgttgagacctatatattgaaaacaaggtgatttaatttctgatcacatacccataaattttgatttagaaggattgaccatctcagaaatatgcaaaaggaaatgaagacataaagaaagaaatgcagttcccttttcatgaatgtcaagacaatgaaggatataacaaacctggttggcgtaactgatacccatgtttgcccaagcacgcacatagtttggcttcaaagctagtgccatttgtatgattcacaccaagagcaagaagtacttccagattggcaggatcggcctcctgagcatgcatcattgctgcaatagccagtacagagatatctaatcagtgaattacattttttcta

SEQ ID NO: 2815 - DNA, 535 bp, Gossypium hirsutum
  Clone ID: LIB3825-018-Q1-N6-C9
acatccaaaatcctttttctttttctctaatttttctagagatacaaaatctgagtttttctgccattggcaaaaatcttacagattgatgttaagatagttccaacagtacatcaaagatgattgaaaaattgatgggcaataaaatctctttcaaacatcaagtggagggtataaactttgctcctcacgaagagggcctttggcatgcagaaaacaattgccaactaatgaaagccatactcaaagacgtgaacagttcgaagcctaccaccttcgggaagtgccatcccaatcctcgccttagatagcttgtaatggatggcatggtagcaacaattccggcacatgcgtatattatgggaatcaaagtcttgggcttgtttttgcgaagccacattaaagatcccaatgcagcaagagatatacttaacaccaaattagcatttgcttccaagccttgtagaatgaaatcccaagtgaattctagtcctctagctcccacccaaaggggtgccaatctatgtagaaccga

SEQ ID NO: 2816 - DNA, 524 bp, Gossypium hirsutum
  Clone ID: LIB3825-018-Q1-N6-D10
ttttttttttttttttttttttttttttttttttttttttttttttttttttttttttttttttttttttttttttgggtttttttttttttttttttttttttttttttgggggataaaaaagaccgaagggaaatattaggggaaaaaaaaaaaaaaccaagggggaaagggcacccaataaaaaaaaaaaaaaaatggaaaaagttaaaccggaaaaaacccaaaaaaaaaaaggcggggccaagaaaattttttttccaaaacccggaaaaaaaccaggggaaaaagggttcaaaaaacgggggggggaactaaattttttttttttgcaaaaacctggaaaaaaaactggaaaaaaaacccggggcccgggaaaaaccaaaaaaaacaaaaggggaaaaagggccaaggtatttcccaaaccaaaccaaagggcccaagctgatttggaaggaaaaaagaacctaaaagggaaaaaacccgttagggggggaacgcgaacaacacaaacacggaaccac

SEQ ID NO: 2817 - DNA, 546 bp, Gossypium hirsutum
  Clone ID: LIB3825-018-Q1-N6-D11
ctgaacaaaaaatgtttgcaaatatttaggaataattatcgcaatcgagtttataattaaactaaaatcaaataaaatatatttgtaataaggcccaattggcccagaccttttaaacccaataatcctaaacctagcccacaaaaaaacagactatcagaaaccctagcttctgtttagcgccgcaacaagctggaaccgttcgtcctcgttcgccgccgcaaatatggtaccacgaccctccccaacatgcgccgcttcatgccacgttatacctgcgacaacaaacaatgcgacaaataagagaaagcagaacagaatatcaaaattcgggcagcaataggccaacaaataacaaaatagatttctttggatttttacttcttttcttttcttctcacataccgggtataaaaggccgatttcaaatctgcggggactcgccgtaaacgatccaagcctgcttcgtttctaataggagttggagggctcacatttggatcggccgtaggccgacagcggcaatggaaaagggtttgaaaccct

SEQ ID NO: 2818 - DNA, 503 bp, Gossypium hirsutum
  Clone ID: LIB3825-018-Q1-N6-D12
gacaaggtaagtaaatttaattggattaaagcagcaaaattcttcaattacatacatatgacatctattatatataaaatgaatcataattagtccttacttgatcagattgcatcaaatgggccatcaaaatgcaaatttcaactctgagaggtcatccattggtatttctaaacctattgaatcatggtcttgcaagccatcttcatcaaagtttagccatgaactcaaatcttggggaccaccaatgtcatttgaaacacccaattcttccataggatctaaatcatttagttgcaagtttgcgaaatcatctggttcgtccgattctttcggacgaacattactcggggttggagataatgacctagcttctctttcagtcatcttgttagaattagccaaaggtggtagcaaaggatccgagagcctgccgttgaatccatgccctgacttctgtttgggctttgcttttgttctccggtcacccttggcaccgtcta

SEQ ID NO: 2819 - DNA, 542 bp, Gossypium hirsutum
  Clone ID: LIB3825-018-Q1-N6-D2
cagaataattttagaaatgaggtaactaaaattacaaatacaatttaacaaaatatagataataaaaaaaaattgtaataagccttatgtatagtcagaaacaataagatttaataatatccaccatcttaaaaggaataatctatctcaacaccgccaggcagcttgtaaaattagcattaaacagttgacttcaaagtaaaacataccgcgagctgttgtctttcaattgtgctgcatgtaaacataatataagccctagtggtgaattatttacaagccgtcagccgtcaacaactaaattctgttgacagttaacaacaaatctccacgtccttcaaaaactaaatgcaaacctgtactaatttttaagcgattctttttcaactaggcaataaccaaacctgatactagacacagccatcctcacgctgtgagatcatgtttagtcatgcagcataacgtgtcaattaaattggatttctcatttgctaggtctattatggataaagatcatgcaaacatatcaattaacatgtaaa

SEQ ID NO: 2820 - DNA, 113 bp, Gossypium hirsutum
  Clone ID: LIB3825-018-Q1-N6-D3
cacgctcgatcaggccaaaatgctaaaatactgtgggatacgggggaatataacataatctcattagctgattttcgtatcccactatcgaaatatccagataaacgcacaaa

SEQ ID NO: 2821 - DNA, 523 bp, Gossypium hirsutum
  Clone ID: LIB3825-018-Q1-N6-D4
aaaaaagtaaagagcatttcataaacattcaaaagggacctgtttccaaaacacaacaatcacaggtgctactgatagagtatcccaaaaaggaaccaaacggtttaaatcccaaaaaacatacgagaacacaatagagaaaccagatgaagaaaatcaatgttttagtcaacttcctcaatcttaggaccagcaccacttccaccagccggaacatcctcatccatgccaccacccatgtcaccgccggcaccctggtacattttagcaatgatggggttgcaaatactctccaactccttcatcttgtcttcaaattcatcggattcggcgagttggttgctgtctagccattgaatggcttgttcaatagcatcttcgatcttttttttatcagttgctgggagtttggcaccaatcttttcgtccttaactgtgttcctcatattgtatgcatagttttccaatgcattctttgcctcgaccttctttttatgttcttcatcttcggatttgaatttct

SEQ ID NO: 2822 - DNA, 565 bp, Gossypium hirsutum
  Clone ID: LIB3825-018-Q1-N6-D5
agaccaaagcaaaacaagcatttcaatatcaaaaagacaaaagagacttgtaaactgattaatttcttgttctcatattatagaaactattccactagccatagaatgcgaaaacaggggaggaggacaaaacagaagcgtattaaagcatgatatttcactaattttccttccacccacaactcaaaacaccaaaataactaaaaggacaacaccataacaaagctgaaaacattgtctgcaacaaatatctaaatcaaaaactaaaattactgagacacacccaaccacttagagaagttctcaaattctgtgtaatcactgtcggagatcatagtctgataccatgctttgcctgctgacttgattgctgttgcctcctccttagaaatgggcttcctcttcttgtcaagcttctccttcttagccttaacacgttgtgcctcggctaaaagagacatcctcctagcagtcttcgcatatgggttcaacttcagcatagcattcaagttcttgagtgggttcttcttcaaaggtgccctcttgatctccttcttaatgggct

SEQ ID NO: 2823 - DNA, 530 bp, Gossypium hirsutum
  Clone ID: LIB3825-018-Q1-N6-D6
aaaaaataaatgattaaatgtctacaagaccaaattacataacccaaatttaaaacccaatagcccagctacaagcccatttacaaaataacctaacccaaatacccctggcccaaatggcccaaaacttaaacaaacctcagtcaactaagaaccctagcagcaaggagcgccgcagccctagcctccagcgcgcctccttacaaccccctgcacgcctcggtacgccaccctcgtgcctccacgtcgcctttcgtacctgcaagagaagacaaaaacagcagcaagagtagcagccaatgaaaatatttctgtattttctcttcttttgattattcggctataaagccatggggggaatcgattgcaagggtcttcttcctttttttttacatatacacgcacaatatacgcaaattgaatacaaaaaaaggtcatcaaaaccttgaaaggtgatttttgagtgccatatagattcttgcttttcaatctgtttttcttagtttttcttgaccttgcatgtgatttta

SEQ ID NO: 2824 - DNA, 499 bp, Gossypium hirsutum
  Clone ID: LIB3825-018-Q1-N6-D9
gaatataaaaaggttctctaattattcccaacttttattgatttatagaactgccctggctaacactgaacattacaacaggaccaaacttttctttatatggtacaacagtacgaacttgaaaaagaaaaaagtagaagcaaacaaacaacaaacacagactcaaggcagtagcagagcacaaaaagtcgctcctttcatttaataggatcgataataaggatcatcctgggtacctccgcgggtgctccttctagtcccagcattgttaggcgccgcacttgggaagtcttggtttcccgttgtaccgtaagcaccccctgtatctccgccaaaccccatactgctgaggtcatcttgcctgcctgtatcatacccactacctgcggtggggtacccacggttgtcatgtccaccggtaccgccatagccaccagtatcccctctgttgtacccagctgtggtgtagccagtaccaccaataccaccaccaccagca

SEQ ID NO: 2825 - DNA, 491 bp, Gossypium hirsutum
  Clone ID: LIB3825-018-Q1-N6-E1
aactcaattcatttcattaacaaaatgtaaaatggagtttcatggtaatgaaatattaacacaaatcaaagtatgatagttacataacaagatcaaaaccttttaattttagaattcattaagtgcttcatgcaaccactcttacgatatggtattttattaggtcggaatttggactgtgaggcgagaatcatggaccacgaagcgaggttaaacataagcatgttggcgtttggtcgtccggtatcatccctcctcctttgcttgtattaacagcttctagcattctcacaacctcctccattgcagggcgtttctccggattcgcatcccaacattttttcatgatgtttgctaaagaattcgggcagcatctcgggatatctggtcgtagattctgtcgaacaacagcagatgacacatctgcaaagctaaggtccggataaggcatatcgcatcaataaaattaccacagcaaatgccaaagctgt

SEQ ID NO: 2826 - DNA, 352 bp, Gossypium hirsutum
  Clone ID: LIB3825-018-Q1-N6-E10
ggggagggggggggaaaacgggaaaatcgggacggggaccgggaggggaaaaaattttcctaaaaaggaagggaaaaaaaaggggggaaaaaaaaggaaaaaggggttccgggggaaaaaagtgaacccgctaaaaattcaaaaaaaaaaaaaagcgaaaaaaaaaaagggaaaaaccgggggggccaaagaaaggagcaaaaaaaaaaaaaggggggggggcaaaaggccggttttaaaaggggaaaaacgggggggcaaggggaaaaaaaaaaagggcaaaaggggggggaaaggggagaagagaaaggggcaaaaaaggggtttttttttaaaaaggaaaagggaaaaa

SEQ ID NO: 2827 - DNA, 553 bp, Gossypium hirsutum
  Clone ID: LIB3825-018-Q1-N6-E11
gcaaagttcctttctttcaaattcaagaaattgtttaaggctcggcttattctaaacacgtttcaaaagtcaaaacataacaattagtaaacaaaggaagagtgtgctgggaaaaaaaaactagccaatttttaaagataaaagcagaaataagattcctttgattctctatccaaatagcacatcgaacttcggagaaaatccaagagttgcattggcagaaattctgctctatcatgatcatggagcaattctttgagggtcacgagggtaaagtgaagttttacgaatgttacccagagcacagaagagcatcaccacacgctccaatcccactccaaacccaccgtgtggtggtacaccatatctgaaagaatcaacataggttgagattgtattgacatcaattccacatgcctgtgcacgttctgccaaaaattctggtacatggacacgctgagctccagaaattatctcctcacctcgtatgaagacatcaaatgaattactgtaaagggcattatcatagcaaggcatggtgtagaatggcctc

SEQ ID NO: 2828 - DNA, 498 bp, Gossypium hirsutum
  Clone ID: LIB3825-018-Q1-N6-E12
aaaaggaaaagaaaaaatttcccttttattttattccttaaaacaaaagggctccaaaacacacaacaaaaaaggcttttcctttttacataggccaccctttttttattccaccattacatgccttactaacaaaactactacttaaaacaagcgtgcaaagtccaaaaaccacaataaggggttattacttcccctcctttaataaaatccaccccgattttgtccaaacacaaaaaaaaattcttgcgggttgttgttgaatacctaatccaccaaccttgactccaccccaaaccccagttccttggcctggcgaacccattgtctaacattggtggttttcccaaccacaaaaatccttttgttgttttggccgttgtaaagtccaaacccgaacaatcctaggtttttgttttgggaggcaacaaatgtgactggatggcctgctgggactacaaatatgtcaccgggtgataaccgggctctcactttttt

SEQ ID NO: 2829 - DNA, 524 bp, Gossypium hirsutum
  Clone ID: LIB3825-018-Q1-N6-E2
atcaaaatctatataataccaattattaatgtctcaaaactataataaaatatataatacctatagtaatattataacacgagaatatacacaaagatgatatgaataaaatacagtaaaaagaagttgcactcagaatcaaaattgcagcctgactaagcacaacaaagaaaaataaactttaaaaaggaaattaaaaactcacaaaggatccacaatgcccttctagaagccatctttcatccacctgcaaagcatctcatcaaaaattttcaggcataccttcattgtgaatcacctctgctccggatctgcatatctccttatgaacccttgccattaagtgacaaatgcactggtttcttttcttggcctaaagagagaatttcttgcattctttccggccaatctgaattcaatctacgggcaaaatcttccacctccctatcaattttttccttcaatgtcggatcaatctcatcatcaatatcaccatcgtcaaactcgttcttattgggaaaaat

SEQ ID NO: 2830 - DNA, 549 bp, Gossypium hirsutum
  Clone ID: LIB3825-018-Q1-N6-E3
atatagtaattggatagagttttataaataatgaatttgtattttacaagaataagtatacaaaaaagaataaatataaaaacaataatcgactagaaagattttccaatctgtgtatttatctttagtttctaatcaaaatgagtcatcacttcttccatcgagtcaacccagatccaccgagttcatgattccaaaactcgcccaaataagtcttagccgcatccaaactagggaaataagtaggctctaagaatacctggctcaacgaatcgaccgagccggagccggccacgactcggttccctttcgcttctaaactccccataaccaccaccaacacctgcttataaccgtaaaagaaccgttttaaagctccttcgatggcttgcaaagcttgtacgaggaagaccttattgccctcctgcttctctgagtacaatctcatcgcagcttcttggatcctgggtccgcctttaggatccacctccacacccaatataaacggaaccttgtgtttcaactccttggacattttcgtaatttcaa

SEQ ID NO: 2831 - DNA, 547 bp, Gossypium hirsutum
  Clone ID: LIB3825-018-Q1-N6-E4
aatacaacatacaagggtcggatattgatacttaaataaaaagttttgtctaacataaactataactatgatcctatttctattgctccctcctaacatatacaaccctatacaacttaataaatataatctatgctcacatcttcttatcctttcatgtgtgatgggaaatcaaatgaagcaatgcgtgaatgcagaagcctgatcgagttcaaaaaactactatgaaagactgatgattgatagccgaggagcatcagcatatctgctatgagttacgggataagaaacaattgctactgctagaactgcccatagtacaaggtacatctcgaacttgaaacttaacgcttcgagttccgacatactccattatttccagacactcgtgtaaatccgagtcgctaaccaacattacccattccccttcatcatctaaatagttcagttggaatgtcccgttttgaactttgaacctttttgcaacttcttcatatacttggaagcatcctgcagatggctcaaacttaaaacggactgtattttt

SEQ ID NO: 2832 - DNA, 575 bp, Gossypium hirsutum
  Clone ID: LIB3825-018-Q1-N6-E5
aaaaaaaatataaatcctaaaattaaaaatttggaatacaattacagttcgaaaatactaacatataatacaaacacagaaagaagtgattttttacgtagaccaccttccaatgcagaaaaaaaactgatatatttacataaaatcaattatggaaggtgacgagaaacctatttcgtctcttaaacctacatcccaaaattcgagtcatctcagttccttcaccaataggcaaagtcacagcttccactctctttttcctcaaaagttgaccaaatatcgacccatcttttttatgatgaacattatgaactatcacagtcgaccctgttttaataccatcctcctcctccaccattgttttaaacattaatttcaagtactcatcgtcgaacttacaatcgatcactgcaaaatccacgttcttcaaccgcatttttatctgttttatgattgtctcgcgtgggctagtgttggtgggttcagcgtgaaccagatttatgtattgttgaagttgatcggcggtgtggtggtggtacaagtagccattggcgctgtttcctgtgagagctttt

SEQ ID NO: 2833 - DNA, 537 bp, Gossypium hirsutum
  Clone ID: LIB3825-018-Q1-N6-E6
gtaaattctattacaacaattgaattactaattataggcctattctattacagctcttttttagaaaccttactccaaacattccgtacagtttgggaagctttgatgggggatcaatctatcatcttttgatttgtttttcagacccttaaacaggaaacgccttcttccctcatcatttccagagatcgtataaaattccgaactatgattattccaaatactctcttgtagcagtaatctttggttatcgaaactccaccgaaacaacagcaataattaacacagaaatcaaacgcaacttcactaacaaatcaataaccgattatacatatatcaatcaaacgaaatttagactaatcctaattcagatgataacccaccaaatatatcctttttcccaaactagaaattacatttttctgtgaggaaattaaaaaaaaaagactgagagtttatagacgaaaacccagacacacctttgcattctaaaccaagcaaatcagcaaatctaagacccaagttacgctatacaac

SEQ ID NO: 2834 - DNA, 306 bp, Gossypium hirsutum
  Clone ID: LIB3825-018-Q1-N6-E7
aaaaaaccccgccttttttttgggggggaggggcccccaatttttttaaccagaaatttcccaaacccccgaaaaaacccccccaaaaaaaaggggccaaaacccctgggccccccaaataaaaggatttttttaaaaaaaacattatgatccccacacaaaggggaaagggaaaaccattccccccctgggaaaatctaaaaagaaaaaaaaggccccatcccgggaaacccccccccccggggaaacatggaaccccctttttcccaaaggaaaaaccctgcccctgtcaagacccctgggaaa

SEQ ID NO: 2835 - DNA, 568 bp, Gossypium hirsutum
  Clone ID: LIB3825-018-Q1-N6-E8
aatacctaataattaaactttcatgtaattactgtcatatttttattattaagtaggataaactggtgggttatacaaactaatttatattagatctaattagagaatataagcagcgatcaattgagtggaaaaaagttacacccgatcaacttgagattcgaaatttctaaatatgggaaaaacacgaagaggggctttcttgaaaacagtgagcccatagccttcatccatgtctaaattctcggcattttcaccgtcaggtaatttccaatcgaaccagtacagaagattagcaaccagatcaacaatgaaggccactgcaaacgccattccgggacaaccccttcggccgaaaccaaatgggatgtactcaaaatcttgacttttgaaatcatctgagcttttctcgaatctttctggtataaactcttctggtttctcccacacttcagggtccctatgaatcgcccaggaattaaagaaaaccatgatatttgaaggaatatcgtaacctccgatgttaatctttgacgttgttcgtcgaggaacaaggagtggaacagct

SEQ ID NO: 2836 - DNA, 479 bp, Gossypium hirsutum
  Clone ID: LIB3825-018-Q1-N6-E9
aaaaaaaaaaaaataaggcttttggggggagggggtaaaatttgggcccaaagaaaaaaaaaaaagtttttttaaagcaaaaaaataacaagggggccaaaggggggggcatttataaaaatggggaaaaaccaaaaccaaactcttggaaccgtttaacaaattaaatggaaactaaagggaaaccaaacagggggagaggtaaaaagtggacaaaaaaatcaacaaattatgaaaaaggtataatttttgggaaaaaaaaccacaattaaatcccgggaaacccaattaaaggggtgtaaacgagggggccacccaaggaaaaaaaaaaggtaaaaaaaattttaattttacaaaagcacaaagagacatcacacccggataatgacccccccagcaaaaaaaaaaaaacccacaaagggggcaggcccttcggaaacatttttaaaaaaataattttttttaaaaggaaacaaaaa

SEQ ID NO: 2837 - DNA, 430 bp, Gossypium hirsutum
  Clone ID: LIB3825-018-Q1-N6-F10
aacaggatacaattgagttgacccatgttaacaccctaattccctgttactcaaaagaattaactgtacaaataaatatttttttacacaatgaaaatggaaatcatcagcaacaggagttaaaaatagagtaataaatatgggtaaactctatggctgaaccttgcacttgaaaagagccatcatttgggatctcgagtaaccttgcctatttagaagaaaataaatgtaagttcggagtctataccgatctgagtttgtaagggaaaatggaggattcaaaatgagagatggtgcttccactagaaggaagactaataaacgctcagcctttgaatacaataaagctgcactttccatatcacccatgagctgatcaactcctccatgttttcccaaggcaagggcggcttgaaatattggctttatt

SEQ ID NO: 2838 - DNA, 533 bp, Gossypium hirsutum
  Clone ID: LIB3825-018-Q1-N6-F11
aatgggaactataagccaattaactggttaatttaatatacatcaaatgtaaaatatctttcaaataagcctcaaaattatgttacttttacatcagtttttatacttgacctcacttgtggatgcttagccaccataatctcttcttgctgcgacctcacttcgctaggagcaacattgtcacattttttacattatatgatagagtagcatcacacacattctcttgtaacacaaattctagttttacataatccataaataagaaaggcgaatccaattcatttacaaggtaaatgcgtatatgacaaaaacaaaaagcaacactacaactatatctgtagaatcaagaatgcaaaagagagagcaaagcatgcaaataggttaaaatcaagaatggtgaatcaagagtggtagtgcagagagagagatactggtgagaataattgccccctctcgttttgcctgtttcacaacactccacagactatttcttgaagctggatcaagaccggtactgggttcatccataa

SEQ ID NO: 2839 - DNA, 549 bp, Gossypium hirsutum
  Clone ID: LIB3825-018-Q1-N6-F12
aatctgtgcaattaaaataactactaccattactattattttgaatttaatgtgcatgcaaatattacttgcaatgttgaagacaccacttccatccgtttaccttaaaaactatttatgcataagcttgatatacaaactgctgctatgcatttacaatcctgtaagtatgcaggatagagatgcgactggcagaaagaaacaaacatatatgactagctttggaaagattcaaatgtaatggtagtaaatgcaatcaagcactatagccttgatttgaaggatgccattgaatcggaccatggccgttgcatgcagcagtacaagcttcctgcattaagacttgggaaacaccactattgcaaatgttggcgaacgcacgcatgtgtttcatgccgtattgtgtcaatgacccacagtgtgtttcgaacaagcggaccacggatttcaagcattgccagtcatcaacaaggggcaaaccagtttcccttacagatttgagaatggcagagccttttgctggtccatataaaagtgttccaatcaaat

SEQ ID NO: 2840 - DNA, 550 bp, Gossypium hirsutum
  Clone ID: LIB3825-018-Q1-N6-F3
agaaaacgaaaacaaaagccacagaaaatgtttcattagaaaagaccagaaacattacaaaccagatcagctgcaaatccctgtatcatcttcacatacatcaaaggaagatgaaaagatcacccccaactatacttacattaactaaatttagaaaaaggaacgagctgattattactcgctatcaacaacaaaaccaaattacatattttagctagttttaaactatagtccctttcagaccctagatccagttacagcggtgctggtcttgtgccctggttcatcccccggtgcatgcatcccatagtcggaatctcgataccctggtccgtaccgactgctgaacacaccggcatggatcaacaacacatacaaaagttgagtgaatgtaaggattattatgaatgcttcaagtatcctcaacctccatcctctccatcctcctatatttatatgcttacaagcaaacccaaaggctaatgcagttagagcccaagcaataagtgcagaagaaccagctgcagccaaactatcacttctccatgac

SEQ ID NO: 2841 - DNA, 487 bp, Gossypium hirsutum
  unsure (1)..(487): unsure at all n locations; Clone ID: LIB3825-018-Q1-N6-F4
tttttttttttttttttttttttttttttttttttttttttttttttttttttttttttttttttttttttttttttttttttttttttttttttttttttttttttttttttttttttttttttttttttttttttttttttttttataaattnaaaaacaaaaaaaaaaaaaaaaaaaaattttataaaaaacaaaataaaaaaaaaaaaaaattttataaaaaaaaaaaaaaaaaaaaaaaaaaaaccaccccnacaacaaaaaacaaaaaaatttttaaaaaaaaaaaaaaaaaaaaaaaaggggggaaataaaaattttaaaaaaaaaaacaaattgaggtatatttattttttctccccggagaaaaagggtaaaaaaaaaaaaaaaaaaagggccccgaaaaaaaacttgggaaaaaaaaaaaaaaagaaaaaacccccaaaattaaaagtaaaagaaagcaaaaaacaaatattttttt

SEQ ID NO: 2842 - DNA, 549 bp, Gossypium hirsutum
  Clone ID: LIB3825-018-Q1-N6-F6
aaaaagggaactaagctcttgcataaaacaagtaccaccatcttcaaataagtcccaatatgttcgtgcaaacacaattacacaagtgccacagaaaataaaacgagagatcaggtccacacatcataaactaatctgcatcttccaaacatctgactcgcaaagcacccataaagggtgattttgtcatattacacaacatttttacaagagtgcatcaaacagtgtccgcatcactttcaaacattcgaaccacctctgccaccccctcggcgatttccttctggatgacactatctggcatgtcaaatgtcctcctcattgaaagtgatctcccttggggctgaggatccaccacatcaagcatcgcttccagttcgtctaccattgacttcttagcagctcgcaccattagatcagctccctcaatggcatcaacagtaaggagcagcacaatgattttctcagagaacctttggcgttcttctgcatcctgggctactcgacgacgataggagaagttattaaaatatgatctgatctctttca

SEQ ID NO: 2843 - DNA, 186 bp, Gossypium hirsutum
  unsure (1)..(186): unsure at all n locations; Clone ID: LIB3825-018-Q1-N6-F7
aatacaaacaaatgacgtatcgatcttatcaattaaatgttttttaacataaactgaagtcaccaacatatatatgagaggaatttgagaactggcatttctagactctagctcatttanngaacacccgaggcaaatacataaccaaagcaatttattaaaaatctcggcttggggcattttttc

SEQ ID NO: 2844 - DNA, 555 bp, Gossypium hirsutum
  Clone ID: LIB3825-018-Q1-N6-F8
acaaggatcaaataattacatttcattgacactgtaaggattccatgcatatttatggccttttaaagcacaacaagtcttttatgggttcatagctgattgcacgcttaaagactgggagttagccttattactgctcaaagcaaccgctgtcttcataactaggtggccgcctcaaatgcttgcatataaaatctccggccaacaagagtttttccagatcgacatttgtctatattccaagcccattgagcatgtaaaccacgtgctcggtggcaacatttccggaaccacccttagcatatggacaacctccgagacccgaaactgatgaatccacgttactgatccccatttggagtgatgttaagatattagacagagcttgcccataagtgtcatgaaagtggacagcaagattatcgattgggacaaaattcataacattttcgagcattggaatgacggtaccaggtgtaccaacaccaattgtgtcaccaagggaaatttctgagcaacccatatcaaagagctgtttagccacatatgctactt

SEQ ID NO: 2845 - DNA, 430 bp, Gossypium hirsutum
  Clone ID: LIB3825-018-Q1-N6-F9
acaagaaagctataaattcataaattttgcaactctaatctcagttgctacatagattagcagataataagaagaagaatgacaaaccacaagaaccaatcatcatgttccaaatgattaaatccttgtaaaatactcatacattccaaaagagaaaaaagaatgcagatctacggaggaggtggccctggttcaaacagtggagggcagcagcttctgaatattccacagcaacacagaaaccacaaacatgattcccataaccctccttctggaggtgacggagctagcagcggtgtcgtcggtggtggagttggacgtggaggaggtggatccatgttggttgtggagataagactttggaaagatagcttatatccggtgagattgttatataagttgatgaattaccatcctttctcaaagtcat

SEQ ID NO: 2846 - DNA, 543 bp, Gossypium hirsutum
  Clone ID: LIB3825-018-Q1-N6-G1
gaactcaattcccgagtcaagtctttttttctctaaatgttttttcaatgttacttgcgaacatagatagtatactcttaatactcggaactgcttctaaagcttaatctgaataaatacgtttcactaaatcagaacagcagtaaaccaaaccccaattgccaccaaaaccgacattcttaggaaaaaggggatacaacccctcttcaaaaatatttttcatttaaatacaacagataaagctttcatcagatttctctatactaattttcttaatgcttcttgtttctgctaactgaaagagcccttctatactacatagaatttgaacatggttacacttacacgagacaattttgagcaatcggccaaactgtggtctttatgatgacatagatatgccctcagctgttcctgcattagttgttgcttcttctgactgcataccgggtagcaactctgctgcttcttctgctgaggctgagattagtgatgctgattgaatctttccggcatgctctagtctcattagaataacccccc

SEQ ID NO: 2847 - DNA, 440 bp, Gossypium hirsutum
  Clone ID: LIB3825-018-Q1-N6-G10
acaagaaagctattaattcataaataatagaaaccctaatcctaagaacacttcatcaatgaacacattagaagaagaacgaaagacaaaccacaagaaccaatcataatgttccaaatgattgaacccttgctaaatgctcatgcatgggaaaagagaaaaaagaacgccgccctacggcagaggcggccccggaaaaagacagaggagggcagcagctatccgaatatcccagagcaacacagaaaccacaaacaggattcccatcaacccttcttctggaggtgaccgacctagcagcggcgtcttcggaggaggagtcggacgcgggggaggtggatccatgttggatgtggagataagactccggaaagataacttatataccgcgagattgttatataagatgatgaattaccatcctacctcaaagtcatggc

SEQ ID NO: 2848 - DNA, 538 bp, Gossypium hirsutum
  Clone ID: LIB3825-018-Q1-N6-G11
aaacttcaaaactaaatataaaaattaatgaatttaaatttaatacataaacattgattcaatatgtaatttaatacataaaaaaatagcacacaaagtattacaatttctaaaacaaaattcatcctaatgagaaaataatgccaaatcatcaccacctctcattaatcaaaggaaaaagatcagaaaagaagaagaaacaatatacaatagagggctggttcaagcttagatgaagccaaagtattgcaatgcctgcatatataacttagtgaagtactttgatcttgatcttggttaagacttgttccagcaataaaaaaaattgttaaacgaaatctcggtcacctcgtgctattgcatcctctttccttctcaactccaatgaacataatgacaaacaacggttagcctgtgagagctgagtttagtgcgctatgaacatcaatcccaatctgtgcttcagctttctccaattcagttgtggctgagctcagcttctgggtgaaatcttcaagccctttctggacaagattta

SEQ ID NO: 2849 - DNA, 426 bp, Gossypium hirsutum
  Clone ID: LIB3825-018-Q1-N6-G12
aagtaacaacaatgaaattccaaagtaggaaattaataggcttaaatgcagcaaagaaactatcacaggtgtaaaactactactttttacaaactcgagcagcgattatcattacacatgaggtctcacagtggtacacattattatgggccacgcctaccgctttcatcctatttacattgtttgtagtttccattttccctccacctcctatattttcatgtatccactcccaatgctttcttgatgtcaccctctatggccagtggtgtggtggttgggctatagcgagagaggacgttaccatccttatcaactaaaaacttagtgaagttccactttatcctagatcccaagaaaccagattgctttgcttttaagaacttgaagacgggttctgtattcagcccgttcaacgaacctttg

SEQ ID NO: 2850 - DNA, 551 bp, Gossypium hirsutum
  Clone ID: LIB3825-018-Q1-N6-G2
gacctcaatagaggataggtagttaattgaaaaaactggtaatagatgtttacattttcatatcgaagaaaccaacctaaagaaaaaggctagtggaacttgtatctttcgagaaaacagaacatacttttatcatggtaattccaatttgatgcaacaactaaacaaagagcactttcataacaaatataagatcaaacaatcccccagaagcctaagttcatgatagaatctgggtaagaaatgacccagtaattagctgcacgacttttagaaattcaaaagaactaagttttaattttcagaatcaagagagctagaacttatccttctcagatttatcctgaaacctttgacgcaagtcctgctttagcatctctgtgtaatccttggcaagaccttcattaccacacaactcatttagaagttcttcagcattcctcccattgccatatacctgaactgcattttcggcaacagcatggaagacgtcatctggtacattagactgctcgatcctctgagcaatttgttgaatgtcatcctgtgat

SEQ ID NO: 2851 - DNA, 71 bp, Gossypium hirsutum
  Clone ID: LIB3825-018-Q1-N6-G4
gagttaacaatcatgtttagtagaaatatattggccaattaccaacagaaagtttcatttcccccctcacc

SEQ ID NO: 2852 - DNA, 537 bp, Gossypium hirsutum
  Clone ID: LIB3825-018-Q1-N6-G5
ccgatgaaattgacaaattagaaatacgtgactgccaattttgtagtgctgaaaggtgaaaagaaatcagagaaatgaaaaaacactctgaaagccaagaaatgaacctacttccctggcttggtctgtagaggccagtgagcggctctgcctttttgagtcacttggagatggcttgtctttccgaccatcctggatagagcttccaagatctgctagatgcttgctgttcttcgccattgaaatatcaaatgatagcatttgaacggataatgtggcagttttggtgcttgaaactttgggagaaacagccgattctccatttgctccactggaacttccttggagtacattgtttttcgtctttgtgccggccttggtgccacaggcgtctctgttgacttcgccaggttcaggttctgaaatgaccattgcatcttttgatgttcctaacgtagcattgccagatcctggctgattaacagagttgtgttcctcggtacaaatgcaacagtcggtatcaatgggctttggcat

SEQ ID NO: 2853 - DNA, 518 bp, Gossypium hirsutum
  Clone ID: LIB3825-018-Q1-N6-G6
ggaacatatttcacattataaaagggattttgatgatcctttttgacaaatacaaatgcaaataaaatgtacttttattattactattaaacacaagattttgctgaactttgatgccaaaggatccacaagttagataaccccttttgctcacaactctgacattgcataatccaaagcatcaacaagataatcggcatcatctttggtgaaacacattggcggctttattctgaaaacatttccatgcagcccacctttcccaagtaaaactccgagttctctcattttctcgaacaggatggcagtttctgccttggccggtgtcttctccttcctgtcggtaacaagttccacacccaccattaagcctctacctctgacatctccaatgatatcatgtttgtcctgtaaagatctcaagcgtgcgatcaagtgagaaccaacatgagcacaatgtgcttgacgcttgtgcttgactataactctgagcactggaagtgcacctgcaaaacata

SEQ ID NO: 2854 - DNA, 372 bp, Gossypium hirsutum
  Clone ID: LIB3825-018-Q1-N6-G7
acttcaagaattttttttttgtatgccatatattaatgtatggggataaaaaaaataaaaacaaaatttttacacgtttttatacatagtttcgaagagaaaaaaagaaacaaaaaatacaaattttttttatatattaaagcaaaatctgatctacttttttttttggtactttgtatcgattctgttgggacccaaaatactatgttctttcatggcatttatagccgaaatgaaaatgaaaatacaatgttctgtctcttttttccgtgttggcttggttttgcaggtgtccgacgcgtgaaggtggcgtgcgacggtggtggtgcgtatggcaatgtacgtaggtcaaaaaaggccctggaggcttta

SEQ ID NO: 2855 - DNA, 552 bp, Gossypium hirsutum
  unsure (1)..(552): unsure at all n locations; Clone ID: LIB3825-018-Q1-N6-G8
aaagaacagttacangaaaatgcaaaattgcaatgtaagccaacagatacaatgaggaaacagtttatttatgcgttcctactctaaaaacatataaagaaactaattgaacaatcaaactacacgattctctagtgtcattcatctaaaactaaaatatcttcccaaaaaaatatcccttgcaatttaacttattaaggactcaactcagagtataacacttcattgattatgacaaatgtttaacatgtactcaagaactcgtccccaaaataatctacaagtcacggttaataagctgataatccacactagacataaatcgtagcaagtccaaaccttgtggaggttcttttcatgttgaattcactccatcaagcagcaaaatcggacagaaatactaatttatgtcaggtagctatgtagtgcgtgcagttaccttcttccggacaatcctctttctccggggcttcaaagctccagtttccccatcggcaacagattcaacgtttccttgtttgatgccaagaagtccaagaccggaaacaatgg

SEQ ID NO: 2856 - DNA, 551 bp, Gossypium hirsutum
  Clone ID: LIB3825-018-Q1-N6-G9
aaattgaaagagaagcctattaaatttattgatctccatcacagctgttccattgaagtaaactatttctagttataaaaaataaggaacaaaggacgagatatctctacaagtatcacttaatttttcccgtaagtgaaggacttattagctagtaaaaaaagtatccttagagtctagagggcaatccccctgccactattagagtttcccctgtaatataacaagcatcatcggatgccaagaaagcagctgcagcagccatgtcttttggggtaccaagccttccaagtaaggtcttttcctcgttagccttcttcacaccctcatcttttgtgatgtatgctgcaaagttggtaggaacaaaacctggagcaacagcatttacgcgagtaacaggggccatctcagttgcaagtgccttggtcaatccaagaagtgctgtcttagttaccccatacatagccatagcgggctgtggattatagccagcaatcgaggaaataataacaatggatgaacccttttggaggtgaggagctgcctcctgt

SEQ ID NO: 2857 - DNA, 452 bp, Gossypium hirsutum
  Clone ID: LIB3825-018-Q1-N6-H1
gggttaaaacccccaaattttttttggaacacaaacaaattggcagggaaaaaagagaaggggcaaccggttcgataggacaaaggcttcggttaaaaaagaacagataaaaactagaaatcgggaaagggtccaatcagatagacccgcaaaggtttacggggaattgccaaaattttacttttttgataacaaaaaaaaagctttttggttgggggacttcccccttaggtgcccttttgggatcgagtttttcatccccacaaaaaaaattaatgccccaaattgggcaacaccctgggggaaatccccaagcaaaacaaagttttggggttcattgggacaatagttgtaaaagaaaaaaaaaaagggggggctcaccaacaagtagacaaacaggggtaagggtccaaaaccaggggcaaaaacaaaaaaaaaaacaccttgttctt

SEQ ID NO: 2858 - DNA, 569 bp, Gossypium hirsutum
  Clone ID: LIB3825-018-Q1-N6-H10
actgatatcgtatttgattcctttcagaggttcccagggtgagaatccccgcccaattgacattgatggcagaacaaagcaaaagataacgccatgtatagccactgcgctcaacattacattacataggccatatttcctgtatacaaggcgaaagcttcaatctacagtctcatgcttgaaggcagaagggggtaagagccaaagaaaaatctcacctccaactgtctccaaataatgaatagcacagactaaagtcggtcaataaaaatacaagttggcatctaacgggtctctccccagtagctatttttgagctttgtaggaatggcagtggtgaccttaattttcaattaaatatgttctctatgtatcctgccgcttaagaggaatgccttcaccgaagccatcgtcttcttcatgcttcaatgatctcattgacaaagatgttgacaaacctggaccatcagccatatccttggttttgtgaagaagaaaagttccagaaaggatagtcacgaacccacacatctctgtcagaatctgagtaagactctgtccatcccaat

SEQ ID NO: 2859 - DNA, 434 bp, Gossypium hirsutum
  Clone ID: LIB3825-018-Q1-N6-H11
ggttaaccaaacttccccaaaaaaaaaaacaaaatcttggggggaggggggacccccccctctccaaaaaaaaaaaaacggcccaaaggccccgggtttttacaaggggcctaccccccccccccccggggcccccccggaaaaaccccccccgcccccccggcccccccagtctccccaaaagagagccggataaaacccggccccaaacccggcaaaaggggtcccccggggaaaaaggggacccccccaaactccccccaaaaaaaagacccggaaacaaaaaagggaaaccccggggcccccaacaggggcccccccccccataaaagggggcccccccaccccccccttcccaggacaaaaacctgggggcccccccccttaaaaaaaccccccaccccccgggagggggccgtttccccctccccccc

SEQ ID NO: 2860 - DNA, 548 bp, Gossypium hirsutum
  Clone ID: LIB3825-018-Q1-N6-H12
atgcagaaaatattgttttaaactgaagcaaacaaaaaaccatgaacactcagcgagaactaaggccccccaagcttatttgagtctgatttcacaacctaaattccatgagaagaaacggtctgatttcacaacctaaattccatgagaagaaacggaaaacccccaaaatcatcaatacagaaaatttctctgatacacagaccacaagactaaattcttagtatttgtagtccttaacatgaaggctctctgcagcaccctcactaatctttgcgtcacccttgtatgtacccaaggtggcctccgagttagccttgcacctaacaaggaaagcatcttgtgctttcttcacgttttcctcctttccagcccaggccttgagagtgctctgctgaagggcacgtccaaatgagaatgagagtgaccatggtttcttggtctggagcttgttcatggcattaaggttaagggtagcctcctcctcactttgcccaccagacaagaacacaatagcagggactgcagcagggacggtacgctgcaag

SEQ ID NO: 2861 - DNA, 539 bp, Gossypium hirsutum
  Clone ID: LIB3825-018-Q1-N6-H2
gggggataaaatagaatcaaattcattgaccaaaagggaatagtatcagaatcatgaaacaaaagaacaaaattgaatccaaaagcattattttatattttccatatttctttcaaacttgaaaatattagttatccatttctaaatccgatgaaatacctaactaattcatagatcaatgacacgagacaacttctggatccggtttaataagaagtcaccttgtttaatagtggcctggtaaagagcattcttcgcatcagggcggttagtttcgaggacaccagcaaccttgtcaatcttgcaatgaagcttccctgctgcgataaaacgagatagctccctatatagagagaggtgttaatcagacgtaattagttactgatcaatgaactctactgtcaccccaaaagcctttgccatggcttcaatagtaacactcttgtaggattccaaaaattgagagtaaacaacagtcctgacctctctcatgtaaaaccggaaatgtagatgcaaatagcggtccaattttatctgct

SEQ ID NO: 2862 - DNA, 548 bp, Gossypium hirsutum
  Clone ID: LIB3825-018-Q1-N6-H3
aaaaaggtaaacagcatttcataaacaaaagtcttgatatctttaataagttcaaaagggacctgttttccaaaacacaacaatcacaggtgctactgatagagtatcccaaaaaaggaacaaaccctataaaagttcatttcaatccgattagaaaccaaacaacaaaaccaaacagtttaaatcccaaaaaacataagagaacaatagagaaaccaggtgaagaaaatcaatgatttagtcaacttcctcaatcttaggaccagcaccacttccaccagccggaacatcctcatccatgccaccacccatgtcaccgccggcaccttggtacatcttagcaatgatggggttgcaaatactctccaactccttcatcttgtcttcaaattcatcggcttcggcgagttggttgctgtctagccattgaatggcttgttcaatagcatcttcaatcttctttttatcagctgctgggagtttagcaccaatcttctcgtccttcactgtgttcctcatattgtatgcatagttttccaatgcattct

SEQ ID NO: 2863 - DNA, 544 bp, Gossypium hirsutum
  Clone ID: LIB3825-018-Q1-N6-H4
acaaacttacttcaaatttgagaccccatcaaattttcctcaaatcaattattacatcagataagtaacaatcaaatttgtgggcaaactcccctagttgtttacctcttttcagtgcccattcgaaggtcggaatacggtatagccattgatgccacatgccatattcggatactctgggctgtagtatgcgtaattttcaccatctgcattcctcatgctgagtaaagacagatccgaagatgccatttgccaccggtttgggaccagtccatcaatttgttgtccattagcataacgtagggggctagcttgtggaataaactccctctctgtatcgaaatggttgctggaggagctactataaccttgttggaacccatcattatggtaactccgcattcgctcaaatctgcacgagccacttgaggatcccattccatctgacaagcccaaatcggaatgaaaaggaaaatgctgatttaataaatatggctcattgccaagagaatggaagcctggtccagccctaactgccttccac

SEQ ID NO: 2864 - DNA, 540 bp, Gossypium hirsutum
  Clone ID: LIB3825-018-Q1-N6-H5
cgaaattataatacattatttattcaagaaaaaacatgacacatttgacaaagcccttgcattgacgaaaattacagtgtacttaaaagcttgttttatttaacgactttatggtaatggcggcccccaacgtcgatgtcccaacttcaatctcaaacgtatcgtaacgtcggaaaagttccaccacaaacaacctagaaatcaacaccacaaattccttaccggcacactgtttattctccaccgtcggatgctccgtttccggtccgttcgaccaaaacacatgtttcaacaatttctccccttcaacacccataaacctctccggtacaaactcttcagctctttcaaatattatcggatctttggtcgcaaacggttggtacccgaataacatctccccttttttcacttcgaaaacggcgtcgtgactttcaatcaacaaatcctcctttgcttttgcatattgcgccggcaccggtggttcaatacggaaagcttcgtacaccaccgatttcatcaacggcatttgttccattg

SEQ ID NO: 2865 - DNA, 417 bp, Gossypium hirsutum
  Clone ID: LIB3825-018-Q1-N6-H6
ggctaaatgaaaagagaaatagggttcatgccattccattaattttactttcaaaactccaaacattatcaaatgaaataaaaatgtcaaaaacaccgaaatcaaaactgatcaaccactccgtgaatcaattttactgggacacgcccaaccacttggagaaggtctcgaactttgtgtaatcgctgtcggagatcatagtttgataccatgctttgccagctgacttgattgcggttgcttcctccttaaatataggcttcctcttcttgtcaagcttctccttcttggccttaacacgttgtgcctgagccaaaaaagacttccttttagcactctttgcgttaagggttaaacttcagcatagcatttaagttcttgagtggatttttttataaaggggcactcttgatctcc

SEQ ID NO: 2866 - DNA, 314 bp, Gossypium hirsutum
  Clone ID: LIB3825-018-Q1-N6-H7
gttcttcaaaaaaattcccggccggggccgaccggggaaccccggcccgggaccgggagggggacaagggccccccaaaaggagggacaaaaaagccgggggaaagaaagggaaaagcgggccccagggcaaaaaaggaacccgccgaaaaaaaaaaaaaaaaaaccagccggaaacaaaaagggaaaaaacgggggggccaaaggagggaacaaacgcacaaaaaacggggaagaaaaaaggcccaaaagccaaaagaaaaaaccgacgaaaccggggaaaaaagaaaatggccaaaggcccaagaaaggggg

SEQ ID NO: 2867 - DNA, 542 bp, Gossypium hirsutum
  unsure (1)..(542): unsure at all n locations; Clone ID: LIB3825-018-Q1-N6-H8
aatataaatgctcatacatattaaatcttgcaaaaacgagcccttattgaagaaaaaaaatcagtggactactttccatattcggtttccatattctgtctaaaattgaacttacatccaaaaaaggggaaaaaaaggatcatagtgtctctttcacaggttaacattcgtacacagttaactcgttccaatgggcgagtcctcaagggaatgaatttaatgaattacaaagaagaataatcaatgtgggaggggggnggggagtaaagccaaaaaggaaaaaaaatgaaatgctttaattaatcaggtttactcactaagattgcagctgcgaaggtagggatgatcatacttgatgtatttggtccagtatgatcgatatttggtcatcgccagctcgagccagggtttcatgttgccattgtagtggataactgcggcatgttcaatttcttttttgtctacacttggattgtagccaagaccaagtacatgccatgatttctcaagcggatgtgtgagaccgtaaaatgtaatcaacc

SEQ ID NO: 2868 - DNA, 110 bp, Gossypium hirsutum
  Clone ID: LIB3825-019-Q1-N6-A1
gcttcacaagggaatttaatcatacactgaactacaataaatagcatttgaaaacacagatttcctaccatcaaccaaagccaccaattcatatgctgcactattctaat

SEQ ID NO: 2869 - DNA, 557 bp, Gossypium hirsutum
  Clone ID: LIB3825-019-Q1-N6-A11
gagtgcaaaatcatgctacataaattagtataataaaatgtaatgaagatacaaatattttattataatattcttttaagttcttagcaagtaacctattacgctcttgcagcggaaagtttttagtacggaaataagatcactttacacacaaagtagtagataaagaacaaaacccagatttcatgctctactcttgaacgggatggctcgaatgactatttggtgataaagcgcagcaagtgcagccccaatgaatggtccaacccaaaagatccaatggtcattccaagcatggtccctattgtagatgatggctgctccaaggctcctggcagggttaatgcctgttcctgtgatggggatggttgccaaatgaaccaagaacactgcaaacccaattggcaatggggccaatatagggacatgagagtctctggcatttctcttggcgtcggttgctgagaaaacagtgtaaacgagaacaaatgtaccaacaatctcagctccaaggccgtcccctttggtgtatccatggttcataacattggctccac

SEQ ID NO: 2870 - DNA, 524 bp, Gossypium hirsutum
  Clone ID: LIB3825-019-Q1-N6-A12
ggccaaaaaaaactcttttgataaactttttatgtttggaacttttttcccaattttttttactacaaatatttatataaaaagagaaaattcctgagcctaacaactctactctgtatcatcgaaatcaaagaaacttaacctagtgtttgggatcaaggtttcaaacatggggcttgctggtttgcgggacaacccaagaattgaagctctttcttatcgaaaatctccaaaaaaaattccctaagcatctgcgtagtactatggtttgaactattattaccgttactaacactagtagcacctgaactagaagtgggcaaaacacttgagcccatcgacccaacgctggaatcctgcacctttggttgcatagcaaacacaaagctagatattggtcgacctgtgacgttaaaaaaacggcgttgcagttgctggaatcgcccacaactgtgcctggtttgaaccaggtgcagcagggagtacgctaaaagtacccataggccatataggaaccaaccctt

SEQ ID NO: 2871 - DNA, 564 bp, Gossypium hirsutum
  Clone ID: LIB3825-019-Q1-N6-A3
aaattgtaacaatcagctaaatcatcattatcaactttcatcactacataatgtacaaaataatttcgtgacatttttacaacatctagaattgcaatactttgttttaaaattgccaacaataaggtgaaaaaagaattgctctacaacctatagaagaaacagtgaatcccaacagccattcaggattgtgacagcaagtgttaaatttgaagcaaaacggagcactgtgccaaccagaacgaggcagccagttttcaaggcagaggcataggaggtttccacttcgcaaattcaacaagattcctattcactacggatccattatgcagccaaaatgtttcagctgattggtgaaattgcctcactttcctctgaagctcccacattaacgctcgcattgtagaacatggctccgagtctggagcataaacccacaaacatcttacttgcctgccacgacctattatctgctctatgacctcatctggtatcgaagccaggtaatccagaagctcaggccctattgatgtggatggccatttgattgatatctctgtgtag

SEQ ID NO: 2872 - DNA, 572 bp, Gossypium hirsutum
  unsure (1)..(572): unsure at all n locations; Clone ID: LIB3825-019-Q1-N6-A4
aacaatcaccccaggtttccgaagtagcggcgtagggctcagggaatccaaaaccttggggcctcaacaggggttggcctctctcaaagtgctgcaactccactcccccggtgtagcttaatacatctctcgggttcatgctaaggttaacgttcccattgccaccttgattgtccctggtcaatcctagaaagtccctggtgaaacggtcgctgctcttttgccacgtggccaggtctgcagccgtgaaacccgagaaatctgggtataaatgagtcgccatgctgtagtaataattgttgttctttatctgcgtggcggtggcaccagcggtggtagccttttgaaggagtgcagtggctgacaactgaggagtggccgacgtggcagcagcattggagggaggattgttgctgacgtggaggctttggaaaggtgaggtgaacagggcctttggaggcgggagtggcagttcttggaagtatggcgtgagatggtgagactcgggcttgacttgaagtgggccattanggttagggttagaggtttgaataggtccccatgggttttgg

SEQ ID NO: 2873 - DNA, 512 bp, Gossypium hirsutum
  Clone ID: LIB3825-019-Q1-N6-A5
gaaaaaaaaaactacattttagattaactagaaagagagtaaacaaaaggaaaataataagagaaggtaccatttctaagatggaaatgtcttacaactcaactaatattaggcattacccactctatttctggccttatgccacccaagggaaaaagagtcaccgataccaaatgggagccttggccttttcattgtaacagcctgtgacccgacacccgtttgtgacaaagggcttctgcttgaagtcaaaaagctttcgatggagcagtcaccaattcgggttggcatattggaagcagttttgttctctagagctgcagtgaattcagacaaggaaggcaattttatgttatcgagagggatcatcccttgacaatcgttagaaaccttgatagccaattcggaaagttcttctctggctgcttctagaccagtagaagcagcagcctcatcattcagtgctgtacaagctttctcgagtattgactgtaggtatttgccttgtgctt

SEQ ID NO: 2874 - DNA, 564 bp, Gossypium hirsutum
  Clone ID: LIB3825-019-Q1-N6-A6
atcattaaaccaaaataattaataaacttaaaattttaaaaaaaatgagtgaatctcgaggttaacttaaaacacacaatacaatatattaaaaacatgtccctgtttgcggggctgcatcatgactcgactcccacgttaccaaaggaagttcaagttggacatgagcctaatctgtaaactatactgcataagcagttcttagttgacatgagcttgaattctaaatgttacatgaatgcagtttcttcccagtaaggaacctgtttcctggcttgggagctgaatattatttaacatggaattcaattatgtagaacacagacaacaataaagacagcattaaacactacactcggcaaacctaatccgatattatggagatgcatcctttgctttccccccccccccacgggtactgctccttataggcagtcagcaaattatttcctgaaaaacaaattagcgaccttcaggtcattcctcgcttgcgtttagcgttgtcccaaagcttcagtaagaatgtaacaccctctttcagggttgcctttcttccttctccgc

SEQ ID NO: 2875 - DNA, 527 bp, Gossypium hirsutum
  Clone ID: LIB3825-019-Q1-N6-A7
atcatacactaccaagtaaagcaatgacagattcatacaacagaggacgaggcagacttgtttgagagcatatgttgtagagatttagggctacttactggaggcctgcaactgaaattttggcatacaagagcaaccactttgtcagctgcaaaattgtttcttgccatgagagccactttgtcattattcgtttcccaaaattccatctctgctgtgtttgttggatctatatgaattactgttttgttcggatcatatgaggcatgagcagccgcaagcatgttttcgaactcttctgaaggcttatggccaaccagcacaacttgcttcctggaaggaatcgacagcatatcggctgcacaacacataagtggcactgccattgccatttcctttaatctcgactcgaaaacagcaagaagatgctctccgttctgcctgtaatggtcggatttactgccagaaaccatggaggccaatctcacaagattgattgcagagactgagtttcctgatggttcggc

SEQ ID NO: 2876 - DNA, 549 bp, Gossypium hirsutum
  Clone ID: LIB3825-019-Q1-N6-A8
aattcaagctttatttgatcaaccaaaaacacacatatattttaaaccagcaacctcagtcagtgaaccttgccacccttcattttggcaatatactcaaacaaactcccatcaaaacatccccttactgcttcttttgttagataaccattttcatccttggcaattatatacaaaagtacccattctccctttgatattatcctgcaaaccaattccatttttttttaaatgaatagaaagtacacggaattcaaagaaaagggtgattgaaataccagccaatgaaatcatatgagtttcgattagcctcagtcatgtgccatagttcccccagtgttaacttgtccggcacagttcgagcgtacttgctaaaaatactctcaaagttcattggcatataccttccttcagtgtcatatgttgaagagtcacttccatgcttgcatttatgtattctatctatgcatatgggaaaatatagatttggtagccatccaggaagagtccaataactcaatgccacattgatggtaattgcaataacaa

SEQ ID NO: 2877 - DNA, 564 bp, Gossypium hirsutum
  Clone ID: LIB3825-019-Q1-N6-A9
aaatggatattattctataagaaagttaacaaacttatagtaattggatacagttttatcaataatgaatttctattttacaagaatataagtatacaaaaaaattaaatataaaaacaataatcgactctcaagcatcaagactagaaagaataattaatcttccgcttcttttcgattttccaatctgtgcattttatctttagtttctaatcaaaatgagtggcaccgagtcatcagttcttccatcgagtcaacccagatccaccgagttcacgattccaaaactcgcccaaaaaagtcttagccgcatccaaactaggaaaataagcaggctctaagaatacctggctcaacgaatcgaccgagccggagccggccacgactcggttccctttcgcttctaaactccccataaccaccaccaacacctgcttatatccgtaaaagaaccgttttaaagctccttcgatggcttgcaaagcttgtacgaggaagaccttattgccctcctgcttctctgagtacaatctcatcgcagcttcttggatcctgggtccgccc

SEQ ID NO: 2878 - DNA, 570 bp, Gossypium hirsutum
  Clone ID: LIB3825-019-Q1-N6-B2
gaaaaaccaaagctttcaatattaaactgtatcgattcagaagccatatcccaaacctggataataaccaaaccaaaaaagaggtttcattgactatagaggctgaagttcttgctccggagctgccgcaccaacaggtttatatgaattcaccgtttgttgtttacgtctccacataccccacactccataaactgataatccaatcaccactattatgataagagccataaccaccaccgtataatttcgcccccaccatgtctgttttgtagaagactcaactttccattgcaccaactgatagtttccaaaagtatcagggagcttcacgcgatgttcagcaagtcgagaaattatatttgttgcagtctcattagaaatgtaggttaatgagtctgaagggactatggccaatctaacaagagaactgtttccttcagatgtaaaattcaataaatggacctgtgaagcattaacatctaactccttagcaatgaactccgtaagtttattgatttgaggctttagatatgagtggttgacgctcaatgacatatccaatataat

SEQ ID NO: 2879 - DNA, 521 bp, Gossypium hirsutum
  Clone ID: LIB3825-019-Q1-N6-B3
acaaatggacactatttcttcaaaatcacaaaacagtccattacaagccctaaaacaacaaaaaacaaaagcccaaataaattaaaaccctaacagcccaaaaacccacaactttaactttcagcaaagaaaaaagaaaccctagcctacaagctgccgttgctcctccccaacacaccaccacagccacacgcgtttgacgtttctgttacctggtggtcgatcctccgactccgcaagcaaccgaggtcgtcactgtcgaggaacagtgacctcctttttatatagaaaggtttttttagaaccctaaaaagtcgaaaggttttctctttttttctggcgacttttgggcaatcttctaaagaaactgaccccagatcggagtttggggagtcaaaaagctaaaaaggccttttttttggaactccagccaccgtgtacggcagcggacgggaggtggcccgatgaccggagttcgaccggacctaggccggagcttgaggggagagtgaaaagagaga

SEQ ID NO: 2880 - DNA, 551 bp, Gossypium hirsutum
  Clone ID: LIB3825-019-Q1-N6-B5
atgatgatgcatttataagtaatctcatcagcaagaagtttatttaacagtacattgcaatccagaacaaaaagtagtctccagagcctataaaacattcaacacaaagagaaagaaaccatatcatgaaatctccatcatctcagctaaagctttgtttgcagcagcttagtagacgtagccctttacgaacattcctttcttggcctcttctgattctccctcgccggtgtatttcccgagctgagcgagtgagttggctttggcacggacaaggagtgcatcctgagcagccttaacgttctcgggtctgcctccccatgtcttcaagcaagtgttctggagagctctggcatacgagaacgagacgtgccatgggtttggagattggttcattgcgttcaagttgagggttgcttcaacctcggattgtccgccagacaagaacatgattccaggaacagctggggggattctcctgtggaggagcttgagggtgtaatcagcaacttgctgtggggtggccttgtctttgccgaacgcgtgggtcg

SEQ ID NO: 2881 - DNA, 572 bp, Gossypium hirsutum
  Clone ID: LIB3825-019-Q1-N6-B9
gagtgaataatttgtttggattcaaagttggttgtattacacttctaatcttgcataaaagtagcttaaataaagaggtgagtttcaaatataattgtacgggcccaaatttgcccgggcctaacaagcccaaacaataataaacaaacccagcttctgtcgacccaataggcccaagaccttaaaccaactcagagaccctagggtttttgagcccctctttgggccgcgctgctcccccacgtgcctcgagtgcaccgcccgcgcctggcctcgaggcctgacccctctgcttgtccttgcaccaacccgtcccatcacttttgcctagaccagcaaacgaaacaggaaaatagcagagagacaagcaaagtaaagaaagaaaacagcaagcaacaaatagaagagggtagcaaaataaatagggggaaccgattgtatttgggggatttttggaagacaaaaaaatggtattttcacacgcatacgagaaatcaaaagcaaaaacaaaaaaaaaaaggttgtttttggattctatgctcttttcttttttttttctttcgatctttttt

SEQ ID NO: 2882 - DNA, 553 bp, Gossypium hirsutum
  Clone ID: LIB3825-019-Q1-N6-C1
atgcaacaaagcatgaagatttaatttctaccataaaactgctttagtagaaccataacattggctacagaaatgaagttgttcatggcttatcatcccgatttaccctagcagctgtggccatggtatccgccactcctcctggtgtgggcattgcttcggtactgttactcagctccgcacctctcacgccatcagcatcttcgcttgtcacggctttatcgtgaggcagcttcccactagcatcctgtcggtcccaaacaaaaaaaaaaaagaaaattagacgaatgagggatttacttcttgtctgctgtgtaatgtaactggtaaagtgaagggttaacaagtgttgggcttaatttatcaagtctttattaccgacaaaacatctgatatagtgattttattgtaatcataagccacacggtcattgaaattgacagcagcttgagctttggcgccaaggccgctacgttgggtgacgttaccaccagcagctctggcctcagctgctcgtattgcagctgcatcacctcggtcaaccggtttgtcg

SEQ ID NO: 2883 - DNA, 589 bp, Gossypium hirsutum
  Clone ID: LIB3825-019-Q1-N6-C10
caattcaagctactacaacaaaactaattgtattgttttgctcccatagtcaacatactaatttactgctgttagtaaccgtaatttatttactacatttttttttctcgtaaatggccagccacgaatcatccattatatatgcaacaaagcatgaagatttaatttctaccataaaactgctttagtagaaccataacattggctacagaaatgaagttgttcatggcttatcatcccgatttaccctagcagctgtggccatggtatccgccactcctcctggtgtgggcattgcttcggtactgttactcagctccgcacctctcacgccatcagcatcttcgcttgtcacggctttatcgtgaggcagcttcccactagcatccgacaaaacatctgatatagtgattttattgtaatcataagccacacggtcattgaaattgacagcagcttgagctttggcgccaaggccgctacgttgggtggcgttaccaccagcagctctggcctcagctgctcgtattgcagctgcatcacctcggtcaaccggtttgtcgccaacagagatagctgttgcctccaa

SEQ ID NO: 2884 - DNA, 557 bp, Gossypium hirsutum
  Clone ID: LIB3825-019-Q1-N6-C11
ttttttttttttttttttttttttttttttttttttttttttttttttttttttttttttttttttttttttttttttttttttttttttttttttttttttttttttttttttttttgggaaaaatccggggcccaaaaaagaaaatcgggggggggcaaaggggaacaaaaaatccccccccaatgggccatttttataacaaccaaaaaatccccccggaaaggccctgggaaaaccggggggaaaaaccgaagctaaaattaggggttctggccagaggtccaaaaaaaaccaaccaaaaagggggaacggggtaaccaaagggggggggaaaaaaattttggggggggggggcaaaaaccccaaaaatttctggcctttaaggttcaaacaaattaaaaatggccccaattggggggaaaaattttaaaattaaaaggggggattggccctaaaccaaaaggggggggggaaaaaaaaaaccccgggcccccttttttttcccctttccttcccaaaaaaaaaaaaaaaaatggccaaccccttggggcccc

SEQ ID NO: 2885 - DNA, 540 bp, Gossypium hirsutum
  unsure (1)..(540): unsure at all n locations; Clone ID: LIB3825-019-Q1-N6-C12
ataaanataaatgacatgaaaatttatgtgttaaaacaataaattccaaaatatgtcatcaagataacggtcacatcagcggggcatttaacagtttcggaccagtcattgaacggttttagactaaaaagatggtgaccatttttgctacaatcttaacacaaaattggagctattactagctttcttgatgctttaggctttaattcagcccttgaatctaatactcctactgattccaacattgataccagaggcttctccgccgtattgaccaactggttttcgagtatcccggacctgacctttcctttgtttctctcgtttcttgctttgcaacctgtatttcttccttggatttttgatgttcttattccgttgtcgagtcaaacctctattcttctctatctgatgagttatcagtcgttttccatcgacggtttcaggtaacgagggaggcgctgaggtccttgtatatatctcagcctttgcagcaagttttgaggctctttgttgcttaacttgtttgtaaaattcatc

SEQ ID NO: 2886 - DNA, 223 bp, Gossypium hirsutum
  Clone ID: LIB3825-019-Q1-N6-C3
atagaaatattatactaattatgccataaaaaaaaaagttgaagcaaacaagcatcacaagttacaatagaaattgtataaaatcgtagtaagtatgctacccaacaccaacccatagttaattcgccgtcccaactgctaactcatttttgttatagtcaacaacccctctaacacgacagattggtccacatctatccaattctttgactcagtccttttc

SEQ ID NO: 2887 - DNA, 557 bp, Gossypium hirsutum
  Clone ID: LIB3825-019-Q1-N6-C5
catgctacaaaaacactaaaattaagttcaaatttcatgctacaaagcaaatgcacaacatgcagtctcgtggggaaacagataattcaaacaagcatagataaagctcaatcaaatgataaaaacatattaacccacaatttcaacagattgaaaacctttctccatcgacgccttcacagcatccagaaccaattgtgtcttccggctgattgtcggccactttttatccggttgtgctccattctttttaatatttgcaaccaagctggcaaactctctcaccatgcaggcttcctgaggtagatctacagtgacagtgtgctcactcggaagttgcacccatccggttacaagttcgttaaatccaggttttgcggacgtagtatatgaggcctggtgttcttggtaaggaatgatgaaatctgtaagatgtagtgttcccaacgttcctatagcagtgagattcattgtcaaatttgataagaaagaacaatggaaggttgcaattttgccatctgcccaaagtagtgaagctccacactctagtagtacac

SEQ ID NO: 2888 - DNA, 560 bp, Gossypium hirsutum
  Clone ID: LIB3825-019-Q1-N6-C6
aatgaagatacaaatattttattataatattcttttaagttcttagcaagtaacctattacgctcttgcagcggaaagtttttagtacggaaataagatcactttacacacaaagtagtagataaagaacaaaacccagatttcatgctctactcttgaacgggatggctcgaatgactatttggtgataaagcgcagcaagtgcagccccaatgaatggtccaacccaaaagatccaatggtcattccaagcatggtccctattgtagatgatggctgctccaaggctcctggcagggttaatgcctgttcctgtgatggggatggttgccaaatgaaccaagaacactgcaaacccaattggcaatggggccaatatagggacatgagagtctctggcatttctcttggcgtcggttgctgagaaaacagtgtaaacgagaacaaatgtaccaacaatctcagctccaaggccgtcccctttggtgtatccatggttcataacattggctccaccacccaacacctcatatcttgatggctggaatcctttcaccacc

SEQ ID NO: 2889 - DNA, 557 bp, Gossypium hirsutum
  Clone ID: LIB3825-019-Q1-N6-C8
aaatcaggaaaaagaagatgataaaagattagaaacaaaaagaagaaaagacaggaatctccaaagctggatcagagattaatgtagttaacacaagtagcatttgggtattcacatgtggtattgtttatttatctgcaattatctctatacactttaacagcaggtgttggacatcaaacaatcagaactcgataacgttgtttatctgaacggaaaaggatgggcggccaacactggaaagaggcgtgtctactcctactaccatccctgacttcccgacatttccgttccacttagagcgcccaaatgatattgatgcaaatgcggaaggatgtggcaccagagcacaaccacaaatcagattgagatcctccttcaccgtgtgaataacttccgtccgcaaccccggattacttccaccaaacgttggaaacaagctaaattgaacggacggcctcatcatgagccctgattgcttccaagccagcgcttgtgaaagacccagtgtaaatgatttgtcaggccattgcaccattggggtaatacgcgttccc

SEQ ID NO: 2890 - DNA, 561 bp, Gossypium hirsutum
  Clone ID: LIB3825-019-Q1-N6-D11
ggtacaaagtaaaatcgaataccaaatcatacaacatgcattttttccctagccactgcataggaaaaaaatgtgaaaggaaaaactatatcatttcagaatccttgaggaactgttattaatacaaactctttactaagctacgctaatgcataagggcaacggcggcctcctgaatgaaaggctgcgtgacatgcacgaattgttcggcttcccgctccacctcttcccaacaccgacgagctccttttccctcattcatcttcttcacgaatgcaacaaaccgtctccaattgcccggatgaaagagcgatgggttcatcctcaagtacgtaaatgcacacatctctctatcaactgctgagccatcgacattcaacgatgaagctcgtaagatctgctcgtgggcgtattcatcataacggggaagtgcattctccccggcaagtggaacttgtgctgctcctgttgctaaagcaacttgcttcactagcttctccggtgcacacaaggcatcttggggctgctcatgatcccgcatctctatgcaagcggacgcgt

SEQ ID NO: 2891 - DNA, 569 bp, Gossypium hirsutum
  Clone ID: LIB3825-019-Q1-N6-D12
cgagggcaaacggatcttaagaccaaattcctacaatatccacccattaatatgtttacaagcccatcctaaagattttaggaagtaataatagtgtttgttttttcaagcttaactagaaaggaaggaaatactagaaaaatctggtcaattctcccaactgaagatcaattttgataaattgaaattaatggtcagtcgaaactgccatccacgatttatgaggttcttctgaagtataatccacttctttggaagcagacaaatatcttgcctcatggacatctaaaattgttggggcaaggaggaaaggatttacttgcacaaggactgaactggcaagtttgggatcacaaattaaaatccacaaatgctgtctgtcaacagcttcctggctaacattggtgatggatccccgtagtctttcttgttatcctactctagaaaacaagctcatgaggtttcatgcccgactttagagaaaatcttgcagcaaggtacgccttcaagtctgcgactccctcaattgattttatcaaagatgcatcaacagctttctggtcctcttt

SEQ ID NO: 2892 - DNA, 558 bp, Gossypium hirsutum
  Clone ID: LIB3825-019-Q1-N6-D2
gaaccttgaaaaccttattatacttttgctttatattaaaacaaggaaataaaatacattcttttatcagtttctttgtaatacaaaacccaaaaaggcccaaataaaatacataaaaaaatatcaaaaatcaaagccgccgtcaaagccgccatcataatccgccgcatcagacaccatatctccgatcaacatcccaccaatcgctcctccaaccaacccggcacccaatcccaatccaaacttgctattcttcttcggtggctgttgcaccggttggtacccgtaagcccctggtggtggaggaggatacgcataccccggtggtggatgtggatatccatacccaggcggaggcggtccctgtggtggatacccaccacaacccgccactgcatgcggcggcggaggagggtatccatacccagcaccttgtggtggtggtggataagcccccggaccaccatacggaacggcagaactcgatccagccgccacatacgccgctggatacgcagtaacaggctgatgatgaggatgatcgtcacccttattctt

SEQ ID NO: 2893 - DNA, 543 bp, Gossypium hirsutum
  Clone ID: LIB3825-019-Q1-N6-D3
aaaaatgtcttaaatatttaatctaaagacccaatgctacaacttcaacctcaagtaaaacaaattttacaacaatattgaccccactcaccaaccccaaacctgcaatttcttttgcttattttcacctaaaaaaatctgcaattaccaaatggacccaacttttctatcgtatataccatatgggtccactcctcactcatcatttcttcattgcatttttccattgggataagggatttaattatatcctacattcaacaatttgaatgtttcaaactgagctgccaaaaatgcccccccattttttcaaggcttatcaatccattcattttctgctgcaatcctccccatcttgttaaatgatccaactgcagataagctcttgaaactgctgctcccctcgctgaaattcctcgacttcctccgtcttctcaccttcggggaactaccgtcctttccaacattgccgtcgcaatcttttatcttggctactgccaatcggacaatggtgctgcggcaaaagggcaaactgggggtgtt

SEQ ID NO: 2894 - DNA, 279 bp, Gossypium hirsutum
  Clone ID: LIB3825-019-Q1-N6-D5
gatctctcttttatggtcttttcaaatagatcattataactttttgagccaacacattggctgatcaatatgacacataacaaaatgttaagtccctatacatgtcgtactcaaaataataagggtagctatacccaaatgggcaggagaaagggggaacatgcctccgacgggtaccgggccccgagctaacttggggaaaacaattccaaatgattcaacaagacgagggggggataccactaattagaaccataaaaatctgatataaaatttaat

SEQ ID NO: 2895 - DNA, 493 bp, Gossypium hirsutum
  Clone ID: LIB3825-019-Q1-N6-D6
ggggagggaaaaggaaggaaaaaagggaagggggaggggggggggaagaaaaaagaagggggaggggggggaggggggagggggggaaaaaaagggggggaggaaaaaagggggaaggaaaaaaaaaaaaaaaaaaacgggaacaggaaaaaaaaaaaaaaaaggggccggaaaaacaccaggggggccggaaaaaaaaaaggggaaaaaggcggggaaaaaaaagggggaaacgggggaaaaggccaaaaaaaaaaggtggcaaagacccaaaaaccccggtgaggaaacaaaggggaaaaccaccccccccccgggggaacaaaaaacccggggccccaaagcccgggcgaaaaagccccaccaaaaggagctgggggcccggaaattgaacccgaaagaaaaaaaggggccgaaccagaaaaagggggcccaaaaacagcatgagaaagaaaaagaaccccccagaccgaacccgggggaccccaacccg

SEQ ID NO: 2896 - DNA, 573 bp, Gossypium hirsutum
  Clone ID: LIB3825-019-Q1-N6-D8
ggtagaaagcatatatatatcataccttcaaatttcgttcttttgactgattacagcccaaatacaacccatggttttacaaaggaaaatacaaaataaaattattatattatcaaaggtaaatttccgaaattttaaaccccttcggatttacacattgaatatagccattttatgttggaaagcattcaatcccccatggttttcaaaaacaaaacctgtttttagttttagcacagcaaagtcaggtaatagtttgctgtgatttttatttataggttttttgtcttttaagatgggattttaactgccttccaaacgggttagtaagataggcatctacagttgcagctctgttagtggaataacattatacagccaagtccaagagttgctttgctgcaaggttaaaaaatagatccctggaatcggctttattcgaactatttcacagtaggaatggcctttaagggccactcggtcactgagttcccatttccaccaactgcaatggtgacttgagaaacttctttagtgcttctactatgttagcaaatgacggccgttcagccg

SEQ ID NO: 2897 - DNA, 550 bp, Gossypium hirsutum
  Clone ID: LIB3825-019-Q1-N6-E1
ccacaatatctgacatgagttcattattatgataaaaggcaaggagctgagtataaaacttttgtcacaaaaacatggactttccaatgaaattataccaatgcgattgttataactcgatagaaatggctcctgctgaatagaacaaaaatgattgtaggatctgtacgaaggccctaaaaacatagtattcatgttggcatcacacaggcagattccttagcagacgaagtgctcgtgaccagtgtgatctttgcgataaaacaatcttcctcaacgctggcaccgccccagcagctatgattgcagaatgattctcactgtccatactcagattatacagtattgataaggctgcttcgactgccctgtcactcccttgttcaataagattcacaagtggaaatataccaacctcagatgcgacagctcgggtggaatccacaaccccttcggaaattattctgttaagttcaacagcggcggattcctgtgtttctggagaaagagaaattttatctgctctataagtcttgggattgtctcataa

SEQ ID NO: 2898 - DNA, 570 bp, Gossypium hirsutum
  Clone ID: LIB3825-019-Q1-N6-E10
aaatgtaaattagaaaatatgatagaagaatacctgccagcaggaagtacacagacaacacattctcaagatctaagtacaccctttttaacatacccaaatctaggaacttcaagaaatgtttcagccgacagattaaaatcttcttaatccttttgcggtatcatccgagccaacggatataaaaaggccttaaggtaagatgggaagctcagtcttagcgaaggagaagaaacttacacgcccgttttctacatgacagaacttaaaagggatggcaccatgctttatttcaagggcctcaatttctactctggatgatggactgcacctacttatgtatagaacaaaactcggatcacctggagaagactttctaaacttgctgttaggaagataaacattaaaagctggactcacatctgtaatctgcatattattgaacaactcaatgacagaattctcgtctttcggctccaattctagcatctcattactctcttgactgccttcaagtgaacaagttccagacttaatctgttgacccttcacagaccaaggaataccatg

SEQ ID NO: 2899 - DNA, 362 bp, Gossypium hirsutum
  Clone ID: LIB3825-019-Q1-N6-E11
aatggaatcatatgttcaattattcaggcttagaaccttatggctcccccaaaattgagccattgagttaaagtcagtcaatgaatgatgcaacaaacaagtatattacatgaatgatggctgttggtacttaaaaattattagtcagtcacctccatgtctcatccagctcttgactacccttccatccaaactttttattatttcccatcccatcctacctacccaaagtaattaatgaaccgtcattacgatctaggaccaaggcgtgaacacttccttcgaccatttttgctaagcccgcaaacacacgtctccagaagctcgtagtgacggttcattaattactttttattatttcc

SEQ ID NO: 2900 - DNA, 569 bp, Gossypium hirsutum
  Clone ID: LIB3825-019-Q1-N6-E12
gacaaagcataaactttaattcattaaaacattaaaatagccaatacatagaggatataaaattagagccaacatgcagggaccaaaacataaaacaaaataaacaaagcctcactacactaaagtggagactaattttggattttgaaaattccatcccaaaatccttattcattcttcttcttcttcttctttttaatcatatattttatctcctgcaagctgctgcaaaaccctctcttcatccatctcacttcacatttttgcagttagtggaagtgctgatcttgtaagggatgttgacactacatttggctgggagggtctcagccaagttgcctttaattttgacagccttagcggcagcttgcaagcacccacacacggtttggcggtcaggggtggttcgagccatgttgttcagggaccggatcccgtcgcagcaagccttcggcacgttccctccgttctgcaagtatgataagcaaccggccactttgcttgtcacatcgccgcatgttatggtgggttgtggcaatgggctcaaccaccaacatgcacaacactag

SEQ ID NO: 2901 - DNA, 554 bp, Gossypium hirsutum
  Clone ID: LIB3825-019-Q1-N6-E2
aataaacagtacctttccagcagatatagctcagaaaattttacagattcctctagcggaaacaattcacgacgacttccaaatgtgggaaggagaaccctctagtgaattctcagttcgaagtgcttataaactattacaagatgtcctaataattacttaatacaggctgaaatcaaggacttctacaagaaactatggaatctacagctaccataaaaaattacaatcacaatatgacgaatttcctagaattacatccctcccctagtaaatctcatacataaacgagtggccacaaatactatatgtcctcactgtggtacttaggaagaagatagttatcatgtctttcgacaatccccacaataatagaggtctggtaaaatttaaacctcttttgggtcataaataaatgattcaaagcttttgagaatggcttacctaggttttcaagaggggtacttgtaaatagtgctgacttttttgctgtgctttatagttaatcttacatatggatagaagccacagacaacaagaagagaatacgaggg

SEQ ID NO: 2902 - DNA, 557 bp, Gossypium hirsutum
  Clone ID: LIB3825-019-Q1-N6-E3
gaagcattcaattgtggtaatttttattggtctcataaggattcagagttatgtcggcagtgaaatgcacaggacagcttacttattactcatcaaggagtgacatgcatatatatatacatatttatatttatacccagtggacttggcttcattacagacattacaactttctgctctatactctttaacatgatgatctcagtggtcatctaaagctttgcaatgacatatggtggcaagttgaatttggatctagttggaagctttagatcttcccaatcttcatccttcaccttggagaaatacctgtctactgtagtatcagcaatatgctccaatttcgacggctcccactttgggttcttatctttatccagtagtatagccctgcaaccctctaaaaagtcgttgctgaattctccacgcataacatggcaaaccattctatattcacgagtgaggcatgcaccgacaccttgaactcttcctactctaattgatctaagagaaattttaagactagtcggagaagcctttttcagtgtttgaatggt

SEQ ID NO: 2903 - DNA, 547 bp, Gossypium hirsutum
  Clone ID: LIB3825-019-Q1-N6-E4
aaaataataaattaataacacaattaagagatcagctagcacattaggaagggagagaagtgagagaataacttgagtgcccacatgactctcgcaaagtaaaatatatcaagtgattacaattaggattttcaacctatcactgtccttaaacctttagaaagtatgattacagaacatactttagcattttcctcaatatataattttgccagtctctctttctcaggatgctggaatgcaggtggatctaatcctccatcaagccctcctaaaaccttcatgaattgcaccaaccagtaacaacatgaacttgagcttcaatgatagaacagtttacagtggtacaattgtagtgggcaaaagaagataggaaagcctagtaggtacatgggtgttcacctcttcataacattcattacaaagtccataggcaaaaagttttctctccttgtgcctcaatagcacttcatctaatctggtttcttttgacccagtatttggttgttttctagttagtgaactagttcgaagctccctctccttt

SEQ ID NO: 2904 - DNA, 518 bp, Gossypium hirsutum
  Clone ID: LIB3825-019-Q1-N6-E5
ggggcggaaaaactcagtggggacataattaaattcacagataaaattccacatttccccaaggaaaaaaccaaaggggaacaagccaaaatagatatatgaatgcatatgccttaattatatagttttatgaaagtaaattttcagagttaaaggaccccaaaaaaggattattgatagcagagttgagctcaaatccagctgagttgaaaacttgcatgtcgaccttgtttcttgaaaaaaacaaaaactcctttccttaaactttttaaaacccacacagctccaaaaactccactcctccttttacaaatccaactttatcctggaaagtttgattattgagtctaatttttctgaatttctcctcatcaggattcctggccacatttcctatgtatgtaaaaaaagtctggaatgctctcttgactttcgcatcatcatccttgggattttgcttgagggatcgcaaacattcgcgcatttgttcagcctttggggcaggcctaactggcaaa

SEQ ID NO: 2905 - DNA, 598 bp, Gossypium hirsutum
  Clone ID: LIB3825-019-Q1-N6-E7
tttagtgatctatacaagactatgactcccatgccgcttacgtaaccgtgagtcctataaaccgtgcggactttgtttgacacttttttttgtttctgaatttaccttacaacgcaccatcttatcaacttgaagaggcattcaataaaatttgggaccattaagtgtaatcggaataacaagttactaagtattaagcaagggtttacttttggttttgatgaatttgaaaatccaagttcacagcagtagtgcaactttgaggacttcaccagatcacactttgggtgatcgtacaacctcgctccgtgaagcaaaaaatgacaaatacccgaggagtatcgtcatcagagggagaccaatgtataattcttacagtaaaggggggctcccaagtgacagttccacggcacgtagtaactttggcggagaaccaagacgctattgcacgcatgaaatcagacacccgtgtgacttttcaggacaacctgaggggttctggaggatggaatggatataattatccgaaaggaataaacagaatggaacgggtagccatcaagggtgggcaaaaccagcttgattctacttgggaata

SEQ ID NO: 2906 - DNA, 589 bp, Gossypium hirsutum
  Clone ID: LIB3825-019-Q1-N6-E9
gcgatctagagttctagatcgcgagcgccgcccttttttttttttttttttttttcaaaaacaaggaaagttctgttctccgtataatcatctgcaatttgaattacattaaaaataaaataaaatctaagtttcacaagaaaacacagtgctcagtaacatcagataccacacaacattgtttataccaccagcaaaatacaagaaagattaggaaactctcacaccaacatggaattgttcaagatactgagtactttgtgaacttagaaatggtgagctacaccactcaatgagaaactgaaaaactagtgctatttatcaggtaaccttcataacttatggctccacaagaatcttgccagtggcatggccgtcaatgctcttggcccaagcctcttcagccttacttagaggatgtactgaatcaattactggcttaagctttccttctttcaccaacttcacaagaaattcgaggttttctttcttaggtgaggtgaacaagggtatgagttgcttctttgcgaatgttatctttttgaaagcaacactcatcaaagtaccgaaaccaggagtggtatctact

SEQ ID NO: 2907 - DNA, 580 bp, Gossypium hirsutum
  Clone ID: LIB3825-019-Q1-N6-F11
ggaataaaaagttgactttatcaatattcagaagttaaaaaagtacacaagtaaaaggatcatattagatcccttcaaagaacttacaaactgaaatcaacttggtttgcaataataaaatatttaataacaataatcagatcagcaatcttgtttaaacccaatcacacataaaatatatacactttgaagatcatatatatttatcatatgatcttcttcctctacatcaagagctcattaacccacccgaggtcaagatcatgatccaaaacgacaccgtttccattgtttttctcatcatcaccaccaccattgaaatattcaccagaaccagaaggactttccattgaaggagctcctttgaatgaaacatcaagccatggaatgttcgtatttgcagtagtagccattggtgaagatgcttcggacaaattcatggttcctaaacaactcatgacttccttcaacaaaacatcatcgtaactgcttgtcatttcggttccaaatttactaagacgatcaccgccgtaccttggtgttctttgctggtgtcctaagggagatagaggcggtgaca

SEQ ID NO: 2908 - DNA, 578 bp, Gossypium hirsutum
  Clone ID: LIB3825-019-Q1-N6-F2
agagggaagttttaaagcttctccgtattatagccaatttaattacatataaagcatttgctgcttgataacaagcttcatcaaacaataaggcagcctaaaatactcaagaaaaacactcacaatccaaagtaagcaacccagaaatcaatacttatagatagtgactgctaaacagccttcaaaacgagtgcatatcggaacaaagtcccgagttccatctcactttgtaaacactagaaactcaagctcttctataagagcaagatgactcaaaacaaggtccacaagtcttcataacatggcaataagatcgtatataaaaacattggaaacatctacataatcagaccataactaactcatcaaatactaaatgtggcaaagtagtactcgcttcacacagtaccaccggtttggtgaagcatagcatcgatctcatcaccatcctccatctcaagctcgtcaggagtttgctcacctcgcaggcggcgaccatcgaacaagaaggcaatcgagttgaaatccacagattgtcggtcgcaatatgcattcatgagcttcttcaattgtgtgct

SEQ ID NO: 2909 - DNA, 547 bp, Gossypium hirsutum
  Clone ID: LIB3825-019-Q1-N6-F3
gaaaaaactttaaatgtcatttagaaaactgtaacaaatagaaaatcatgtttgtttttttgttctttttttaatctttctacacaaatcgaactgcctaattgacaataaaatgataaggaaaaaaaaaagataaatttgaacagccgtcaaaactttcaaactatccatcaaatatatgtaaccaaactcagttgttcttggcagctgcaacttgcttcgcaccaacagaaaagaactccgtaatgacttcgagaggcatgcctttggtttcgggtacttttaagaacacaaacacccacgatttaacacacacgaccgcgtacatcccgaaaacaccggctaaaccgactgatttgagcagcactgggagtgaatacgtgacgatgatgtcgcaaatccaaaatgtaagggcgcacatagcaatgcatatgccacgaacccgtgtcgggaagatctcagcacaaagtatgtttgggattggcccaaatcccatgacgaagaaacagaagttgagaacaacactaacggttgagatcgctgcgtg

SEQ ID NO: 2910 - DNA, 567 bp, Gossypium hirsutum
  unsure (1)..(567): unsure at all n locations; Clone ID: LIB3825-019-Q1-N6-F5
agccaaacgacaacaattttataaacctagtgacttgaatgaaaactttcgaataatacattanaaaaccaacactggaaataaaacatcatctacaataccttattgaaccatttcccttaaaaacccacagtgaaaatgacgattatgattatttgcttatttagcaatggcactatttttttttttcactcaaaccccatagttctaagatttcatggaagcttcatcaaagcttaaaagaaacatcctttggatgatgaatgacaatgtaattataagcatcaagtgtcaaaaactcatccaaagttgaagcagtgcattggcgagtaaaaatcttgcatgcttctttatacattcctttcttaaacttctcttttccgacctcacgttcgatccgagccatttcttcttcaaccactcgcccgaacacatggttcactcgaaccccaagtccatcaccgtctaattcaacaccatatttcaaccactgccagatttgaaccctactgatctcggctgtcgcagcatcttccattaggttataaagcgggaccgaacccgaac

SEQ ID NO: 2911 - DNA, 585 bp, Gossypium hirsutum
  Clone ID: LIB3825-019-Q1-N6-F8
gagtcatacaccagcgaaatccagacatgacagcagcaagcatgacaaagataaaaccccaaaactcaaattcagtgtcccttgcaactgttaatagaattccaatagagattaccacaatgatccctaagagtttaaagcttggggactccaacctgaatgcaaaagcaaataggagaagaaatataggagctgctgatttacactgcagggtacacaggaagaatattttagtcaataacaccaacagaaaaagaaatatcaaaaagcatattcacagagtaggccaatttgatgagactaaatatacatcacaattaagagtacagaagagttaacaaaccattgttgcaaaagtaacagatatgaaaaccagggatacattgctcaggttaacgtccagtgcagttgaaagagctgtaggtacaactgtgaaaggcaaagtctatctgtacattagttgatagaaaagttaattaacagagaaatgcagaggtggaaaagccgtagaagaacaggagaccagcattttgaaaccttaaatctaagtgtaacgatgcacctggctagtgatgcaattttaaa

SEQ ID NO: 2912 - DNA, 555 bp, Gossypium hirsutum
  Clone ID: LIB3825-019-Q1-N6-G11
ggatccaatagcagtccaaattatcatattacgaacttgtctatatataagggggtaccacctcctctaccaattaccataaagtaacacgggaatctcatgtaagaagttcaagatgactaacaagttataaagataaatattactgatgcggcatgcatgcatagatgaactccatgctgatcaatattttgaacttcatagtgaagtaacaatgtcagccttcttccatcaagtaataactttcctagcgacgattcatgcgtggcttctcccaaaaagcacggccaggtccgtaaaaaggacccttgtcagcagcacccaaatgagccccatatccttcatatgaagctggaaaagcgccctctgaactgttgaatttcatcccatacggtgcacctgcagcccatggtctagcatccacactaaaaagttctgcacgtagcttttcaacttcacgtgccatggaaaccatgttcttctccattgcttgtctctgttccatcagctcaatgtttgcctttttttcataatcaatagcagtccttgcacgca

SEQ ID NO: 2913 - DNA, 575 bp, Gossypium hirsutum
  Clone ID: LIB3825-019-Q1-N6-G12
cgtaaatattgaattcttatagaggattcaaagagttagcatttacaatagtgtctcataaaccataaaagtcctaataggcctttaaaaatggagtagtcgatgatgaaggtcgcccactcttgccacaatctttcccattccttaaaccaaaagccaccaagaacttctcgttccagcttcctccagcggctgccgctggagtggtggaggaagaagcctgtttgcaagcatgatcagctggaaaccggtgtttcaaacaaacctccaatcgacatgtcttgcaaatggttctattagagaatgtcaacgtttctttacatcttttaacggggcaagttggtttcttcttcttccttggatcacaattcccagacttctcatgtttctccaatatcatcttctcttgatcttctttgcccgttatttcgatcgacgtagaacagatttcacaaataatcaccttcctactgttatgttccggttccggacattcatgagacttacacgatctatgttccacacaaaacaccttatgacaagcttggcatttgaaaggaagaaaatctaattga

SEQ ID NO: 2914 - DNA, 538 bp, Gossypium hirsutum
  Clone ID: LIB3825-019-Q1-N6-G2
ggcaaacagggaatacatagaacctgaggaaaaactcgagtttggcatggtccaaacaccgacatcgacattcagacattgtttgtcctaaatagatttcgtcgatacaaaaggcaaacaacaacaacaacaaaaaaaaaaaaaaaaacaatgccttggtaattttaagcggaaaaaaggtgaaaaacaccaatgcagaatcaaaacaatcatgtcctactagtacaaacttatggtacatgataatcgttaaaagctcgacatacttacaattagtaaaacccgggaggaggtctgttaggtttctaatgaaattctatcgtctggaccggcaagcatgatattgcagtcaaaagcaaatttccgggcaagcatgatggctgcatttcaatctctctttgattcaaatgctaatacaaccgaaaatcctttctttgctagccaaaacaatgcctgagcgggtgcatttccgccacctcggactccacaaagctgcattgcgctggaataatattctttagcaattgcagtctttcct

SEQ ID NO: 2915 - DNA, 553 bp, Gossypium hirsutum
  Clone ID: LIB3825-019-Q1-N6-G3
ggactaaccatgaccaaaatcatggaattcagcagaaacatgcgaagcccattgtttgcagaagctattatttttaactaatatgttttgctcactagctagggacaaataatttattttgttcaaaatagaagagcttaaaacttcatattttcaaccgcatcattttttttgaaaaacaactctttaagatatgcagatgcataataataccgttgaaagacagatgaaatacccgagttcgacagaacaaagcagttttcattttcccttgaacttgctgctaatggaatcgtatcttggtacgttaatgacattcccataagatgccattgtgagattagaagatagaagcttttcggctaccgaagaaatatcctttggtgtaattttatcaacgaccttcaagaaatgctccacgggtttcctctcaccatatgtcaagatttgtttaccaatatcttctgaagcaactgctctggattccaagttcatcaaaatggcagacttggtcgactgtttagcacgctccagttctttctgctcaacttgt

SEQ ID NO: 2916 - DNA, 548 bp, Gossypium hirsutum
  Clone ID: LIB3825-019-Q1-N6-G4
attaatatgggattaaatttatcaacttaatagtagagggattgatttgaaccgatttctatagtacagaattttctacagcttttatccaggtcttgttattcaggtactgtcttgggcgcgtcttgtcgatttggagaaaataagtacaggcgttattggccaatatcgcaaacctcctcctgatggtcatctgctttctaactttccgaggtaacaacattcagggagccttggccagcatgttcgagtacagtgaatcaaacattgcataatcaactgatcaactgagctgaacttcggattcatttcttattgaacttcgatccatgcattcaacaaaatctctcgtttgtcaaggatgaattttttattcaaattgttccaaaaaagaattatagctggaaactcgtaaaatcataagttcaaagagaagataagcttgccgggaactcgaaaaatccagagacacatgttcaagctacaatgatttcataaagggattccacaactactgggaactattgtaacttataaacatcggaaaa

SEQ ID NO: 2917 - DNA, 562 bp, Gossypium hirsutum
  Clone ID: LIB3825-019-Q1-N6-G5
ctgaaaaaacttcattaattcgtacagtttcaaaatatctatggataacaaaatcaggaccccctctccccaactgtcctgataatgcaaagcaaagcagagcagagggtccttacatgaaaacaaccagaaacttgtacaaacttaactgtgactcccaaaatcctcatgtgttttcttcatttacaagtcattaaaacatagttgatgacataaatgagagcacggatactcgcatggtctgcacctgtaagcaatggcgagctacttatttcatgcactctcttgtagacttcctgaaagattggtcgcacatgcaccgcaatcatttggtcacctgggttgatagctgtggccacgtccaccatccatgtgagttttcgtggagtgtccttgttgatgtcgcatgccaactgctgcaagagggagagcagcactccttggctcaaaggaaaaggtgcagttgacagaatcgtacgtagatcaacctgtgaacataaccaagaaacaatagagaggtcacttctttgcagcgcaattgtgaacgcttcttcgtatttgc

SEQ ID NO: 2918 - DNA, 544 bp, Gossypium hirsutum
  Clone ID: LIB3825-019-Q1-N6-G6
aaaatcagaatttgacctcagatttttcattaatgatttgacattctccaagtgtttacaaaaatgtccatggagaaagtaactgggcttcttcacttgatgttgagcattgccccacactattgaaccatattcagacctagccgttgatccccttctcgtccttttagctacaaaaatcactgaatatctcttcttttccccaatatgcctaaagacgagcgtccggggcctaactgagatcccgacagatgacggaccatccaccgccactttgtatatcgaccgtgcggggctgacgtttgttaattcccgagtgtaccgaacaacccttttgtccccaaacaggaccgaaaatgatgggtaattgagttcaccagggtctttgaatctgttggaacatgtaatgttaggacgcttgacaatggttttaacttgatcaatggtgtagcctagtgagcataagaaggatatgtattgtttcgtagttatatcgtatattagtcccggagaaagggctttttgagggtcgacgtgacctgcc

SEQ ID NO: 2919 - DNA, 495 bp, Gossypium hirsutum
  Clone ID: LIB3825-019-Q1-N6-G7
ctcaatacctccccataattcactcatttcatttctacttaaaaacaaaaaaaagggaccatgaacaaaaaaggcagaaaatagctaaatttccaagccatgtcagagaaggatcttaaaaagcagcagtcaagaggggggggcattgaaaaaaccccatggataaagctgggctctggtccttcactcaaattttccccattttttttttcctcagcatcccaaaaaaaccttgcatatgatgctagcacaaaacagtcatcaggagctgctttaacagcttgatcgaagtaagtttcagctctggaactatttttgggagtttcccagattaaatcagcttacatagatagaacattcccgtcatttggattaaccaaaatcgccctcccgcagtattcctcggttttcacaaaatccccacaaaccttttttaaaaatctagcgtaattgctgaggaaaagtgaatttccaggattagcctcgatcattttc

SEQ ID NO: 2920 - DNA, 576 bp, Gossypium hirsutum
  Clone ID: LIB3825-019-Q1-N6-G8
acacaaactgaaaacaggtaatcattcagattaagtttgatattcgagttccactacgtgatgtaccctaaagttgacctaaatgacaagcaaagtggggcattttccagtataagggaggcaagagcatctttaacagtaatacagtcggagataaacataaagttcatcatcttttcttgaaagagttgataaagggatactatagtcgccctcacttcataatttacaaatgcctatcttcatgcttgagcgattttaacttcagaattaaataatcggttaagcacggcagctaggcgaatcccgccttgagcaagcctcttctccacaataggcaaccgagaaaggaaatactcatcttctaatgtgcttcccggtgtggcattcctatatgcaaacttacatgccatcctaacactttcagaagcatacaggttaggacaaacagtttgattatgtccacagttctcccatgatgatacatcattggaccaagcatcagtaatatttctctggatggcttgaatcattgttgcaagatctgagccatacaatgtcttcacagcagaatca

SEQ ID NO: 2921 - DNA, 574 bp, Gossypium hirsutum
  unsure (1)..(574): unsure at all n locations; Clone ID: LIB3825-019-Q1-N6-G9
aaaaattgagatttttcctttcactaaggacaaaagtaacatttcacacactaatacttanaatttacttgttcaacctctttggctatcaaagattggactgtttttattattgatgttacgataacttattttagcactgatgtactaaatcagtttattctcatgttgttacattaaccaaccaaattaggcactaaagattgaatctcaccttgggctctctaaatatagagctgaatgaaattccaagtagggatatgcttaacccttattagcccctacctcttgaacttcattcaacatctcggccttttccccaacacatggttgccactctagtgtttcacctgcaaacatagggatgatattgccaaaagaaaacgataaagaatctggaatcttccatgaagccttcgttaatttaatctttgcggtgtttcttgggagaccatagaactctggtccgttgaagcttgtaaatgcttctaatttatcaagcgcacccgcctcctcgaagaccttggcatatagtgataatgcaacaggggcgttgaaaattccagcacaacca

SEQ ID NO: 2922 - DNA, 535 bp, Gossypium hirsutum
  Clone ID: LIB3825-019-Q1-N6-H1
caaaattaccctttatgactactcaaaatttgaaacatgtaacatactaaacaacataaaatgaaatgacaatcaagcaaagttagcagactcaacccaacacatggggtgtaaaccttttaggacaagcaaaactgcatttatacacccgtcgttttctgggttatttgttacttgagcatattttccccaaacaactttcccagctggcgtgaccaaacccaattcacttacattcacctcgatgattgttcctttggtcatgacaccaagagatgtatacattggaccattgggatttttctttaccccaataatgtcgagattgaaggtgcacttgagctcaggatgtgtaacatcagctttagtaaatcgcaatcctgaaggacggatgaaacgctcatattttggaggctttcttgtaaaaccaggtcctacaaatgtgcactttgtaaccattctcttccattgctttgtttttcttttaccagttctgagcaccttaaacatttcatcttctgcgaccggcctgacc

SEQ ID NO: 2923 - DNA, 570 bp, Gossypium hirsutum
  Clone ID: LIB3825-019-Q1-N6-H11
caatatcgaagagataaatacaatttattctaattgttgaataaaataatacaaaattcattcaactctacacatcatcagtaatggtaagattattataccacaagagtacctttgaaaaactcaacaccaaggttttttgcaacaaaattgaggtctctcaaaactgtgaacttgttcatcttgttgagccaacaggcttttagtgtaagaactaagctactccaggcaagccaaaagtatcttttaaactgtatcagaatccaacggaaacaaaagaaataattcaagcagtcattctgctcgaaatatctgtgcagaggtctatttagcaacaccaccagcttagataatgcaaaaagctgaaaatgcatgccgttttaatcacgattaaaattgggcccaaagcattctattagtgccacaaaacaccaaaatgattctgactcatccttcatcacaaacaaaattgaagatagcagatcgctcatccccaccgcgttgttttagctcagacatatcaccaaaatatcctctattcaattcatcagcactgccagtcatgctcgt

SEQ ID NO: 2924 - DNA, 568 bp, Gossypium hirsutum
  Clone ID: LIB3825-019-Q1-N6-H12
aaatgccacaattctaaccttcctttaaagttaatttgttagtataacagtcgtcaaacctaagctttacttgttctgatatcaatataagatcaaacacatatgatctggaatttttatcaagtcgaaaataacaaagaaagatgcatagaacgtaagaatattaagtttcttctgctccaaaaacatgtagcaagagatccgaggaatcacaccacaaagccaacagattatagtacctctcataatgtgataaagttgttccccatggatcttcacttattcattacaatactcagaggcacttaaatactcaccatgctcctcaaaatactcaaccaatcgctttaagaacccatcgctactaactgtttcagtgtcacatacaagacaacactgtcttcttgctcgtgtcacagccacattcattcgccttcggtcacttaaaaaaccaacctctttctttgagtttgaccgaaccattgaaatgataatcgcttccttctctcgaccttggaaaccatcaacagttgagatttccacattctttagcttatcttcattgctt

SEQ ID NO: 2925 - DNA, 549 bp, Gossypium hirsutum
  Clone ID: LIB3825-019-Q1-N6-H3
gacaaaaacgcccttgagcattggttgaaaaatacgatcgaagccgaagagcatccaacggtccatgagggattggggcagcagccggagcccaagggttgatggggatggccctgtggtggttctggggtggctgatgatgggatcttggatcaacggtggatgatgcacctactctctcacacgatgggcacatggtgagggtcgtaggtggggtcatttgcatgtagaactgaggagaaagtttcagtgctctcagctcctgaacttccttctgcaaccgcctgttttcctccgtcagattctcacagcatctctttaggaactcacagtcaacctcagtttgcttcagcttggtcctcgcccttctgttttggaaccaaacttcaacttgtctgggtcgcaatcccagctgcttagccaaagccatcttttgttttgggttcagagtgttgttttctttaaagctttcttcaagaatagcagactgatccttcgaaagcctaagtttttttctcgaagcgtcaccatcttcctcatcactgatgc

SEQ ID NO: 2926 - DNA, 549 bp, Gossypium hirsutum
  Clone ID: LIB3825-019-Q1-N6-H4
cagtagtacggtgaatatatattaattatataacacaatctgatacatttcctgtaaaacttaaaaaggacccagaaaataataggatagctgcctgaagaaatgactggaattcaaccaaccctcaacccttgttagcaatgttgttggaaagccagtccagtccctcatacagcccttcgccagaggtggcacaagtactctggatataccagtggcgctgacgaagggagtgaaggccaagcttatcagtaatctcagcagcattcatagcattcggcagatcttgcttgtttgcaaacacaagaagcacagcatccctcagctcgtcctcatttagcatacgatgaagctcatccctggcctcaaccacacggtcacggtcattgctatcaacaacaaagattagcccctgagtgttttggaaatagtgcctccacaaaggtcgaatcttgtcctgaccaccaacatcccaaacagtgaagctaatgttcttatattctacggtctccacattaaagccaatggtgggaatggtagtgacaatct

SEQ ID NO: 2927 - DNA, 568 bp, Gossypium hirsutum
  Clone ID: LIB3825-019-Q1-N6-H6
gcaaacacaactctaaatttattccattaatagcatgaaaagatcctaggcctattacatgcataatttcgcaaacctcacaaataaagaacgataggaaggatataggaaaagagggtgggcataccctcacacggtgaaccgatcttcaaaatagatgattttgcataagcacatcaatattcttcaccttcctcttcagcatctccaccttcagcaccaacttcttcataatccttctcaagagcagccagatcctcacgggcttctgagaattcaccttcttccatgccttcgccaacataccaatgcacaaaagctctctttgagtacatgagatcaaacttgtggtcaatgcgtgcaaacacctcagccactgctgtattattgcttatcatgcaaacagctcgctgcaccttagcaagatctcctccaggtacaacagttgggggctgatagttaataccgcatttgaaaccagttgggcaccagtcaacaaactgcacagtcctctttgttttaatagtagcaacagcagcattaacatccttaggcacaacatctcctc

SEQ ID NO: 2928 - DNA, 543 bp, Gossypium hirsutum
  Clone ID: LIB3825-019-Q1-N6-H7
gaggtgatcgtattcaaatcctagttcttactcgtatttacaactccaaaaaacattcttacgattgggatttagtacatgcaactatgcaatgcaagtatttttttcccttcattccatacatagtagaatttggagtctttggtaaaaacagatttagggatttaagtaaaagtatcctcccgatctccttccacagtttcaccttcttccaagttgctgaactccaggaaatgtgtcggcctatgctcctcattgtagtactctttcggcgtccccagcttcaccccgtatttcatgctcactgtatgcttcactcccatgaaattgtaattccacggaccattgtcaggtatcatataaaatccaaggaaccgatcacttaggagcatctgcaccttctcataatgcgttgggaggtaaccatgagggttgcttcctgtatctttgttaacccgtccccactcataaccacttggggtaagcttgtaggctgttaatgagcaagaaccgggagtgaaactgcatgtcaagattatgcac

SEQ ID NO: 2929 - DNA, 562 bp, Gossypium hirsutum
  Clone ID: LIB3825-019-Q1-N6-H8
aacaataatccatatctatatatattttaaatatatgccattctacagaaatctatactcgggaaaagatgtttctactctaaagagcatcatattgacaacctgcaactcacaaatattaagtgtcatgtttttgtaggttaaaggtctgatacggtgccacagatgtagtgtatcagaaagtgcagggggctcagcttcagtctgtgagtcctatacaaaatctaaatcctacttaatataaatgttaatttaagctatccgaaaatatgggagatggagggttggtggggaaggggcgttgcgggattcaaatgtatttctccactcagttctatccatgcaaagttgatgagaatttactgccttgatttctgcagaacgctaaccgcacttgaaatatctgtcagctgttgcttaattttagctttccacttcaccaggtccttcaacatttcctgaaccagaagcaaattatcaagatctgactttgaattggcagttacagaagaatcaggtgtcacattagcttgatcttccccttgcctccttggtgctagct

SEQ ID NO: 2930 - DNA, 565 bp, Gossypium hirsutum
  Clone ID: LIB3825-019-Q1-N6-H9
tttttttttttttttttttttttttttttttttttaaaaacctcccccctttccaataattttggaattaaggggcaggcaaatatacctggcaaggggaaaaaccccccttccatccggtcccctaaaaacccttttaggcggggggggagggaacaaacggcggcttggcaataccaacccaaaaagatgcctaaataaaaaggcgacgggcggaaaaaaccaacctttttgaactggcttgggaaagatccaaagggaggggggggaaaggcaaccaacccctaaaccctggtttggagggatcccatggaatcggcccagggccgtggctggcccaagaccaggcttccttcataaaggggggggaaacccccctttggaaaaggtgggcaaccccccccaggggttcaagcccgattggggccaaggccccacagggggtttgaaacagggggcccccggttttaaggcttggccggccttaaccagggggcaacccagttccccttacaaatgtggaaaaggcaagacctttggggggcccctaaaaaggggtcccaat

SEQ ID NO: 2931 - DNA, 541 bp, Gossypium hirsutum
  Clone ID: LIB3825-020-Q1-N6-A1
acttataagctacgttattcagattcagtggtaagtacacgatacaaatatgccttgacttgacataggtgtgttcatttttgggggggctgttattttcatacctatatttaacatagtgtcgtacatgaatattcaaaaagaattaagaacccgagtgacagctggtatctggatactttgttgaccaagatttaagcctttggagtattctcttcttttttgcattcttgaaataaaataaaatatcattatcccaaccattgggatcccttgttttattgcctacgttgagctagaaatggttcgaatgtcaacaaaaatccaactgcctcaactatattcaagacgaaaaataccatctgagtacctggcagaaatgaagcgtctagacgcttttccgaccaagaaaacaatgcaccacctcctgcagggccaactgctttgaaaagagacattccagtcatggcaatgccattagcagctcctctttggtgctggtccacagctcgattttgcagaatgaataatccggttatga

SEQ ID NO: 2932 - DNA, 552 bp, Gossypium hirsutum
  Clone ID: LIB3825-020-Q1-N6-A10
aaatattcaattttactttattgtaattgaagtggaaccaacaaacacacaaactaacaacaaaaacaagtagtgcttattacagtcaattacatgggagtttttaacataaacagacagccacatcatccccccgaagtttctaatgctgcttttaaatttagaaaaaaacatcttttcatcatcaacaacataacaacaacatcattaaggatcggtttaatggccacttgatcctgaacttttgcacagctccattacaaaagcatgcagtagagaactaatttaagaagccgccgcaccggtgagctgtgccgccctatctttcatctcccgtgccttgctagccaatttcatccccgcactatccaactgatccgccgccggtgggtgcctccccgtcacatacctgtaaatccaggacagaaccgtggcggctgcaacaccgaaaccgccggaggcgacgaaacccgttgctaggagagctgttgcaatgagagcagggacaagaactggactgaaaaaacgaagagtggagtggctatagtgagt

SEQ ID NO: 2933 - DNA, 558 bp, Gossypium hirsutum
  Clone ID: LIB3825-020-Q1-N6-A12
gtgccaataattattcattatgcatttaacgagactaaatatatatcccaacacaacatacaagggagatctctcctataaataccctagaaaacaatgaataggggattgaccttttggcaccttaaaattactctgagcacttgtctttgagatcagtctctccttgtcttaactctcgacctcttcaggtgaactggcttccattaccctaccttgacctcctccttgctccgccttattctcttcccttgttgtatcgaaagtagctgtagcaaatgtgggagttccatcaacaaagttgtggctgccggaaattaaagtctttgttttgccatcaccgtaaatcatcacattccacatgtgtttatcaagaatcacattctcaacatacttgccttccttcacatatataacgaaccttgattcattcttttttcctaccaatttcaccgcatcattaatggtcaagacattcccagaaccatcttgagccacaataacattgggggtaggcttggattcctgcaatagtctcctttcagtgggactaaccca

SEQ ID NO: 2934 - DNA, 564 bp, Gossypium hirsutum
  Clone ID: LIB3825-020-Q1-N6-A2
acacaacttaatagactatcatattctcatgcattatgcatcatgatccacctaaatacctgttcaaaacattaactattcaagaaacaaatgcaaataatcactatacgatacaagatgagcccaagtaactaattacaagaagaaacaaggattatacacatttcaaacagcctcacccaaatttgaaaacccaagactgggagaacttctgattgtcttttgcattcgtattccacaataattaattatcactccagttatcatcgtcatcactcccaacagcctggcgaattgcatttgctttctgcaaaattgcagtgacctggacatttgcagtgggaccagaaataacagttggtcttgcagtggctgtgggtcttaggttgaaagatttagttctgatctgatgcaagaaatcttccttttcatccatccctccgccaccactgagcaggcttaccccttcctgtccattatttttctcttcgtccaccttcttctctggtttcaatgcatttgccttatcatttatttcctgttgattaactaaaggtggctcaa

SEQ ID NO: 2935 - DNA, 567 bp, Gossypium hirsutum
  Clone ID: LIB3825-020-Q1-N6-A3
caagtagaacatctaacatgttgtacataaaatagtcaaataatgatgttttgaaaatcgtaaatacaaaatttctaacaaaactattgtaagaaaataataccattgtcgtatattggtttttaatttgaagcaaaaatgacccctttttgcttccatatgacaaaaatctataatgcctcgtcttctaagcaaaaaaatattaccttatcttgaactatgatgtgatgatatgcctgcatctggctttttggcgattatggcgacgttcctcggggatattgctggatcgaaaataggtaacattactgattctaacacatcaccttgttcctggagaaacaataatctatccagaagactaagagtttccaagagaggcccaaaagcagcacgaagtgaccagtaaatcccaataaggctgacatagggttcaactcccttccaaatgccatggaaatttatattgtcggaaggcttaagcccgagacgacataatccagactggcaaaatttctcgaaaagtgaatacttatcggtagacgtagtcctttcacatgtactacc

SEQ ID NO: 2936 - DNA, 565 bp, Gossypium hirsutum
  Clone ID: LIB3825-020-Q1-N6-A4
attttcttttttttttttttttttttttgcctcaaacaaagccgaacaaaacttcccaatattacattaaaaagcttgcttaacaaggtaaagtaagcagtatcgcccccatctgcatgtgctccttatttttaactgctacagaagggggggattgatcttcaaatgaaatttcatttatgatctaactattacaaaaataatctgactccgatttttggaggatgacatcaaaaccatcctctcctaaaaccaacagtttttttcaaaacataactacttgataaaaatgttctcaacgcaaaaaagaatatccttccaccagcttgacaaaccattccagcaatcctatgtttacttgtcccccatgacaacaggatttccaacattatatgccttggcaagctccacagcctcaggagcaggagcaacaccaccagttgttggcagccccacaaacactttgaaagcatcctagataccccactgagctccagttagagttccaatcatcacaatacggaggggaagaccacgggtaaacagaccccataatccaagcttc

SEQ ID NO: 2937 - DNA, 556 bp, Gossypium hirsutum
  Clone ID: LIB3825-020-Q1-N6-A5
aaggagttggaagaaacttctcaataaaaaaaaatggctcaaaaacaggattttgaacaaaatatgaaaagataactaaagctggctttaaactcacctgacaatccaaaaacaaaaactaatgtctttaacaagtcaaataccaaaacatagtcctcaaagaaagcaaccttacttcttgtcttccttctcagcctcagcagctttcttcaatcgggcaccaatgtgtcgttcatttgtacgttccacacgaagcttgttataggccttgaatgacttcatctcctctgtgaccttcacaagctccacggaaggcttctcacgagaaataggcatgtatgatccctggacttgggttgcagttgcaagctcctcagcaattgaatcaccagccttaaacttgcgagctcgtcttgggaagacaacaagtttggccttgtaagttttaagcctctgaacattggcttgaagaccttcaagggacttgttcttacgacggtgatcgactgcaataccaatggtaggtgcaagtttctttgaaataccagcagcctta

SEQ ID NO: 2938 - DNA, 312 bp, Gossypium hirsutum
  Clone ID: LIB3825-020-Q1-N6-A7
aaattgtattaaaaagttttgcccagtccataatcatacatggacagatttctgtgttcagattacaaacatcatacatatgttaatttgcaagcaaggcaatgcttgggatatcattttatttcatatcatcttacaagcgctgagcagaactaatgagtaaggacgacagcttctcaaagtgaaaaaggtgcttccgaatccggtatagatggcatgtgtagagaaatgaagccattgtcaccgcccaaaaggataccaagttcaacttccagaaatgctgtggattagagattactattcccatgacat

SEQ ID NO: 2939 - DNA, 568 bp, Gossypium hirsutum
  Clone ID: LIB3825-020-Q1-N6-A8
gtagcattagttttagaccataaatcgacgaacatggatacaatcctgtgaaggttccttcaaatttcttgttaggcatagcgcctattgatcaaattaattcaaaaggaaaaaagagttgaaacaactaacaaacattagaatccatctactttgatagttagggagcgaaaaagacagtcacaggaccatatgagtgcaccaacactcactacatgtgacattaaaagcatgggcaaatagattatagatatgctacttggactcaagtggtgtgagtagaggcacgcattttatatgggtatgtttgactttttcttttttggtaaatttttcactatattaacccaactcttcattttgcctaaataactactgtctgtactactgtgttttaactactgtatctgaatttatctccaacacatgctcgaacatgggcatcaagatatggtcctccaagagtcctccaaatacattcaattctagaaaaaattaaaaatactcaagtcagatgcctatgtccaacacttacacccgagtccgagttaacataaccttttcatga

SEQ ID NO: 2940 - DNA, 552 bp, Gossypium hirsutum
  Clone ID: LIB3825-020-Q1-N6-A9
acttactgcatgaacgttattataataaagactttatgaccaatactcataaaagacattccaaaaacatggtgcaggaaagcataatatcacacaatacactgttgaaccaaacatacaagcatactatccatgcagaaagttttacatgataatatgtatatatatgtgtgtgtatatatataaaactagatagtaaagaccaacaatctgcaccggtttgtgatccgaaatgtcgattaccatgataacatgttaataaggttgcttcgcatacaagccttcacctttgccattttctatcatttccttttgcacccgacgatggttggattcttggagaatgctgcttcccattaacaccgggtaaggaatgtctctttttgatataaagatctccattttgcacgtcgggacttgatctcggtgagttattagcattaactttagctcttgcagattccgtggcttgcatgaaacggggaagagaattgctactgttactatctcttggttcctcatcgatgttatcaggttttgttgaaccaaaaa

SEQ ID NO: 2941 - DNA, 560 bp, Gossypium hirsutum
  unsure (1)..(560): unsure at all n locations; Clone ID: LIB3825-020-Q1-N6-B1
aataaaatggtgacaccatcttatttatgttcttatcaactgattaaacatcangaaaaaagaactaaatttataaatttgctaaagaaatactaataaattcataccccaaatggactagaatttgattataccaagtataccccaagtaactaatttgatgatatcaatccatctatcccaatcccccattacaaaattaatatacaatcctcaaatatatgctgagaatcctaaactgtctaaaggactcaaattgtacttggcaaaaagtataaaaacctatactaggctgaaattcgttttcttcttttatctttacactaccattcattttcctggaaaatgtgaagcagcccctgtaagtttagtcaggcaacaaagtcgggtaacaattgtgctgcaaaccttttcctgttctgaatgttgatgttgtcatatgcagctgaagagtgtggtgtggaagggtttatagacccaaactcattgggttcaccaatgtcgacccttctccccatttgcatggcttggttagggagaaaagtttgatgaggggtgcc

SEQ ID NO: 2942 - DNA, 354 bp, Gossypium hirsutum
  unsure (1)..(354): unsure at all n locations; Clone ID: LIB3825-020-Q1-N6-B11
aataaactccanatttgtgtaatcatatttaaatgctgtagaataatacagagattagtgcatcaatatgaaataaatgcgaaaaataacacaacttgaaaaataatttttgatataccaaatcggaaatgggtttctttcaccaaatatgagataccgagtaatcagaatcattcaatcaagttaaagaacagtgtgcactccatgatggtaattccagcctctaagtgttactcttggagacacacctggagggaccttgaatgatatcttaattgacatctcttcacctggtactaatgaaaaatagttatccgagtaatgaaccggaagtattcgactgtcttctccttc

SEQ ID NO: 2943 - DNA, 575 bp, Gossypium hirsutum
  Clone ID: LIB3825-020-Q1-N6-B12
atgaaatgtaccttggctctattttgtttaactctgattctcaaattgtatttatttgacataatataacctaaaattgagaatgtttctttaagaaacatagaacttaaattatatgggtaattacaaaaatgaaaagtatgctttccaaaagtggaatgatcttcagcaatggataatgatgagcgtatgtgaccactggcagagatactcacagacagcttatcattctcatggttttgatggagttggtgaagatggtggcttcagatccgggtactacatagaaaagagggtgagtttcagtaaaattaattcatgtattaatgtaaaagatttaacatgtaaattagtcttcgaattggacctcaaatgaatatattcatttctttcctatgtattcaagggattgttaaaatgtcatatcgcactagggtaaggagaagagagaataggtgagtgtccaacatgaatatgttcatatttttaaaagttcttcccgtactcgtattcgaatatgcaaagaaaaataaagattcggagcaacataatgtaaaagagagaagtcatacatt

SEQ ID NO: 2944 - DNA, 568 bp, Gossypium hirsutum
  Clone ID: LIB3825-020-Q1-N6-B2
atttttctcttttttttttcccaccaaactaaaaccgtaacttggagacgataaatgcttgccttgtagaacggccaatcaccacaagaagtcaatgagccacaaaattaatcctctgcttaacagtggtaaatactaacgctcatgaaaaacctacctacgtgggcagaaattaaaaatgctccggagagaaaaccatgtaaatacactctgtttattagtcagcataaatgccaacattttctaatagaaaaccacatctatgatcactaacaatgatataagctgattgcgcaataataggatgatagactacaagtcccaccaataaccattggtgactggacattaatgctcaaggtctatgttcttcacgagccatatgggaaataattgcctcatgtgaaccgggattagcatgatactgtccataaaatgcataaatacctacagaaactatgctgaggatgatgaatctgatccatgcttcatagtgcaactgaccaaacaggaagatgttgaaaaagtgcaaacagatggcacaatcggaacccatggacaagaaaac

SEQ ID NO: 2945 - DNA, 570 bp, Gossypium hirsutum
  Clone ID: LIB3825-020-Q1-N6-B3
tcgcgatctagacctacccgtcgcttgacccgaccatggaataccggacccgtgccgcgaagcatctcagcttatcctgtgtcgagttatatcttagcgtgatgatggcatgggcatagctgtgtgctgaatggaaatgcgatcacatcaccataccacataccatacgaacccgtaaagtgaaaagccaagcctgcctagcgagaggagtaacctacattacatgaattgcgctgagtgcactgtccgcattccagaaaccaaacctgccaggcgagttaattaaatgaacaacccaccgcgagaggagaggtgggtattgtatggcacgccagggtgtcttttctttagagcaacgagacagagatgatttgattgcacttcatcgccttgacatagtagagtcaaacgaagcacgctacgctggcccagcacacgaaaatactatcctatgggggggaacggaacgatataacatgacctgagctgtgtatcgtataatcccattacactaatctgatatccaaaccaaagcccagactggactatggaatggattgcattgagccc

SEQ ID NO: 2946 - DNA, 559 bp, Gossypium hirsutum
  Clone ID: LIB3825-020-Q1-N6-B4
gcatgaatgaaagttcccgttgtcacttttaaaaacgaaatctccgattatagatcaacgacacagtttctttacggagacggaaacctaaacttacaaaaaaaccgaaatttccaattataaatcaacaacatagtttcttcgtggggacggaaacctaaacttacaatgctgcaaattcagcctttttgtcctccaaaagctttagctcctcacgccaaccttctagttttgccagtttttccaactgttccggcttcatatcttgctgcggagttttctgctgttgagcttccactaaccggatcttctttttaagtgcccggatttttttatcgagatcttgagctggtgtcacagcatccgaggcatccactgagtttgagagaggagaggttgaaacaggatttgagaaacagcaagatctgtcattagattccgatccatgatctaaatcttcctcagttaaaccgtctcctttaatctcattatcggccactgcttccgagttcttacccttttcaagagcagcctgtacccgtttctctttctttcgttc

SEQ ID NO: 2947 - DNA, 563 bp, Gossypium hirsutum
  unsure (1)..(563): unsure at all n locations; Clone ID: LIB3825-020-Q1-N6-B5
gaccataaaatattacatagatttcttggtacttctatttcatccttgtcatacctattattttttacataatcataataaacatacagngaaatttaaaaaaaaaaatcctaaacccataatcaacctaagatattttcgtcatcatcacatcggccactacctatcattgtagagttataatggggaaggcagctctctggcagctgctgctgctgctgcttggcttgctgctgagaccagtaggtgtgggcgtttagaaccctgtccaagagttcttggggtaccggctctccccgcctttgctgcggggatattcttgccgtgtgcagtagtgttttccacttatccttcaaatcaacataagtgcgatgcttcgcattatcaaaagctcttagtttaacatcacgccaccttccagttccaagtttctcaacggcctgaaccaaggcttcaacttcagaaatagagaaaggtcgacgaattcttcgctgcgcaacttcagattgcttggatttcttatgaacgggaactgcagctaatgcttccacgctcattgctga

SEQ ID NO: 2948 - DNA, 571 bp, Gossypium hirsutum
  unsure (1)..(571): unsure at all n locations; Clone ID: LIB3825-020-Q1-N6-B6
aaagtgatatttatacatttctcgtcatcaaataggaatgtattaacatgtngaaaaagaaaacaaagaacgaaatgaaaatgatctgatgttgctagtatgaacaatggaactctaaaacaataaatctaactcacagttgttgcttctgttaatgggctctcactcttagcacaaggctgatcagcaatcacagttttctttgggaatttagtagctttaccaccagtcctcggattcccttctttacacaatgtttcactaggcatatcttttaactgatcgccagtgactgatatcggtgttaccactgcatttccttcagttagcttttttgaagaccgtgaattagaagtgttgccatttgatgtttccagtttgaccttcttcttgcctgagtgcaaagtactgttttcatcagtgggagttggctgctctgtagcattccttttcatctttttcaaaggaatcttatcttcagtgttttcttttgtggacaaggaactttcaagttctccagccaccttggtgttccgggtaccacagagagcatcccctatcagctcttgga

SEQ ID NO: 2949 - DNA, 563 bp, Gossypium hirsutum
  Clone ID: LIB3825-020-Q1-N6-B7
gacacaccaaaatgaatggagatttccattaccatcaaaaataaaattacagggttaaagtttcatgttccattaacagcctcataacagaatttgactatctaaagattttccaatctcaccaagacactaacggaaactaatagtctacactagtgacaaattacaaccaatatacaacacaaattctatcagattttaatcctctaaatgctgcaatgcaagtagtctcactgtgataatttggagttacttcaccttgtctgcactcaattaagtacttgtcatgttgcaatcacaaaagaatcaaagcaaaacatgggcttgatacccgcttgacagaagccatcagaatgaagagtcataaagcccagaatggttttcgaactgcatccgcactgttcttattatttagtgattcatcactgctctcctcggaatcatcatcttcgtccccatatgacattaactgcatcaaggtgtcagggacagcatcaagtttagctttactggtaactttgatcttgtcatgcaatttcctaggtgatgtggaggatgtgaac

SEQ ID NO: 2950 - DNA, 556 bp, Gossypium hirsutum
  Clone ID: LIB3825-020-Q1-N6-B8
ctgataataaaagaaaaccgtctatttcactagagttctgattattcaaaacataacacaaactgtatataaagagcaaaatatgtcatacatatcacaccaatacctagaaaatactttaaaattttatagaggaagagagtaaccacgtagatatctggagtcgacacccgactctctcaccagtgcgagacgtccagttcgagcaacctcacagataccgtaaggctccaacaatctctgcagtgcaaccatcttgtccagatctcctggaagctcgagggtgacagtgcaggtcagaaacatcgacagccttggccctaaaaatgttggcaatgtcaaggacatcccgtcgagcagcggcattcacagcaatctttatcaacattaattctcgttcagcaaatggcaactgtgtaagatcccgtacctcatgcatatctacgagcttatagagttgctgcactaatttgctaattgattcatcagcaccagggacaacagttgtaatacgggaaagcccctcaacttcagcatgtccaacagccaaactctg

SEQ ID NO: 2951 - DNA, 481 bp, Gossypium hirsutum
  Clone ID: LIB3825-020-Q1-N6-C1
cagtaaacctaatcctaaaaaagttttaaaaaggggcccatctaaatcatgtcaccccaaacccccccgaacgaaattcaccaacctttacactacattttttttataacatcccaagggaatttaaaaaaaaaacgggggaaccccacattgtttttaaaacaaaattggggccctaccaaaaacaggccccttgctttaaaaattaaaaataaaaaaaatgccgggctgaggggccattttacatatgggttaaaaattaaacccatacccccctgttccaaaaaatcctttgctcccctttcccaaagcaaaaaaacagtgggaaaaaaaaaaaggggacaaaatttttttggcccatgttgccaaagttaaacaaaacaatgacaaggggggttaaccatttttcccttgaccttggcctgcccatatttttgttcccaacaaaaccttttatccctgccagctaaaaatccttttg

SEQ ID NO: 2952 - DNA, 547 bp, Gossypium hirsutum
  Clone ID: LIB3825-020-Q1-N6-C10
gaagggatgacatcaaagtccattagaaaaaatgaagcatagttaggatttacaactatatgtcttagagggtgatcgacatcacccccacctgcatgcttgacaaactcagctggagatagaaaatttccatggcacacacacattatcctcacttcctctcccttaccatacttatatagaatgccttctattcttttcccatttggaccatctcccttggtgaaaacgcaaggcatgtcttccatcgcattccctcgttctttccctttattttcaaccgttttactcagtgtttcggcctcaagttccggagtatggcaggtttcacttttttttttccctgaagaacatgcagcctcttgactaccttgatcttgcaaggactgggtgctaccggagcttctcgcttcaccacaactgcctgctcctgcaatgcatgggacttgaagagctttattttccatttctgacatactagaagagcttcttcctagtgatcctatagagccttgtgaagtgatctgccttgcagatgcagcccgac

SEQ ID NO: 2953 - DNA, 443 bp, Gossypium hirsutum
  Clone ID: LIB3825-020-Q1-N6-C12
aaataaaaaaaaaaataataaaataataaataaatattttttaataaaaaaaaaaaaaaaaaaaggggaaaaaaaaaaaaaaaaaaaaaaaaggttaaaaaaaaaaaaaaaaaaaaaaaaaaaaaaaaaaaaaaaaaaaaaaaaaaaaaaaagaagaagaaaaaaaaaagaggtaaaaaaaaaaaagggaaaaaaaaaaaaaaaaaaaaaaaaaaaaaaagggaaaaaaaaaaaattttttgaaaaaaaaaaaaaaaaaaaaaatatttaaaaaaaaaaaaaaaagaaagaggaaaaaaaaaaaaaaggggggggaggtggaaaaaaaagggggggggaggaaaaaaaaaaaaaagggggggggagggaaaaaaaagggggggggggggggggggtttttaggttttataaaaaaaaaaaaaaaatgggggggggggttagaa

SEQ ID NO: 2954 - DNA, 547 bp, Gossypium hirsutum
  Clone ID: LIB3825-020-Q1-N6-C2
cattaaattactttcaaaatttcattaaattactttcaaagttaaggatcaacatttaactacaaattttgagtttgctagtttacaaaattgaattattttgggaatttgtttcgacttgaacatcctcgtcgagtaacaatctgaacttgagaatcttctgaagtcgagcgaccggttttacttgctttctcggagcttgatttggatctagtatatatttgcctgagaagagatttgcctctgatggacctgtctcttcatgtactacaggtgaagcttctccatgtcattgacaaaaccttcaactgaacgatagggtgcataaacaatgagatcaaattccagactctgagacactatcatctcgtaattgagaatcatttgatgatcctgtgaaatccccttaccaagctcctctgctgacacatgattttcttctatcttataggccgcatacacacaggttaacattatatgttttggatgatgttccatgaccgaccattgcaggtaaaacctcttgaaataaattagagcagttgcc

SEQ ID NO: 2955 - DNA, 560 bp, Gossypium hirsutum
  Clone ID: LIB3825-020-Q1-N6-C3
caaaaaagctctttcggaaagccgtaactagtttattaatgcatacaaagagatttaaccaaaagcaaaaattgtcaaggttggaagattctgacttgcctcaactcctgcagtaaatgcaaaatacaaattttggatgggttcatgcgattcctcgctgggttagtcttcgcctgcgagctaaatgagggtgctgaatcataaagggagagaatcatcgtacaactcggtgcagtttaagagtgcaagactatatacaaatttaatcccaagagtaagccccgtttgcaacaactgaatgagatcccccacctagaatattttcagtaaaagggggaattgaaacctcaatcttttccacctgctccttaccaacgatggatgcaaacctaatatgtgttccggcatgaaatcatgccttgtcaatatgcccaccactggtgctctgctagagatcttgggtatgacaagtaggtgtcgcagaccaacttcacggaaaagtatgagagccttagctagtgacatcgtctccacaactgtgtacggtgaagcattggtaa

SEQ ID NO: 2956 - DNA, 549 bp, Gossypium hirsutum
  unsure (1)..(549): unsure at all n locations; Clone ID: LIB3825-020-Q1-N6-C5
actcacaccttcaaaacaaaaaggctatngagaatcttattttagtaaacacaagggcgaaaagcctgttaacttgggatttagttcatatggtcaacctcaagtggtgacatccaataggtgcaggattagcctgactctactttaggtctacttctttttcaataagatatgagagttgtaattaaagtaaagtatttgaccaagaaaaaagattgataaattagatattggttgcccatgccgaagtaatgattatagcaatggagtcaagcttaacaagataaggaagaacaagcttacccatctaggtgtcacacgctcttcaaccggcctccttagctccacgggacggcggccagtgagaatttcaataagtaaaatcccgaaagagtacacatcactcttggttgtgagttgataggttttcatgtactcaggatcaaggtaaccaactgttcctttcactttggttgaaatatgtgttcggtctgagtccattgggccaactcttgcaaatccgaaatcagccactttagctctcatgct

SEQ ID NO: 2957 - DNA, 564 bp, Gossypium hirsutum
  Clone ID: LIB3825-020-Q1-N6-C6
caactgacatctattgatttaatacaaccaggtaaagaggcagacaaccatctgatatctatgaagcaaatgaactagcaatatgctagaaatatcaacaattgcaatcaacaaaggcaataggctccattgaagtccccaatttaaatagaaaagagcagtattccagagagtctattatgttgccatgatttccaattataacagcagtattccagagagtccctccatgatttatatccctctcaagaattgagcttataatgaccatgttatacttgagtgcaaattcctgaagaaattgtgtagactccccgttaacaggttctgcaaattcacaccacctcttttctcatgtacagaaggcaaatggcatcatctatgcttcctgcagcatagtatgttgactcctgaagcaccagcagcatcaattattggtcctaatttcaactgattattgtgcatcaattatcccgaaaactgattattgttttaggcagatagaaagattaaaagcacgaggaaaagaaagacaccgctatgtaccatattcactaaccatct

SEQ ID NO: 2958 - DNA, 556 bp, Gossypium hirsutum
  Clone ID: LIB3825-020-Q1-N6-C7
caattagaaattcataaataaaataataataataataataataaacaccagtttaacctgatttctccatactaccccgagcaacaacatttgaatggttcttcaaaatttcagaaccggtttcccaattcccaccaaccccacccatgtatataaagtcaagaaacagcttccaaaatttgatctttgaatcattatttcttctttatgaagcaagttaaactagctatgttactatatgactctttgtttttcttaaaataattgtatctgaaacccgtatccgacacatctcggatatgaatacagaaatataaatatgaccctccaattacatcaaaagtaaaacatactcatgtccgatacatatttgtatccgacaccccactccacaacacacagaactagcacacagttcgcccatagcaaattgatgctaggtacagattttttgcccatttttcctttacatgggtgctcgggaaggcggatgtgcgcagagtttcctgagtttcatccatcattttttgtttcggaatgcttagtatgaaggcag

SEQ ID NO: 2959 - DNA, 537 bp, Gossypium hirsutum
  Clone ID: LIB3825-020-Q1-N6-C9
agtacttggaaggcggatttaataaacagtacctttccagcagatatagctcaaaaaattttacagattcctctagcggaaacaattcacgacgacttccaaatgtgggaaggagaaccctctagtgaattctcagttcgaagtgcttataaactattacaagatgtcctaataattacttaatacaggctgaaatcaaggacttctacaagaaactatggaatctacagctaccataaaaaattacaatcacaatatgacgaatttcctagaattacatccctcccctagtaaatctcatacataaacgagtggccacaaatactatatgtcctcactggggtacttaggaagaagatagttatcatgtctttcgacaatccccacaataatagaggtctggtaaaatttaaacctcttttgggtcataaataaatgattcaaagcttttgagaatggcttacctaggttttcaagaggggtacttgtaaatagtgctgacttttttgctgtgctttatagttaatatatggatag

SEQ ID NO: 2960 - DNA, 528 bp, Gossypium hirsutum
  Clone ID: LIB3825-020-Q1-N6-D10
ggaaaagcaaaggcttctttatttaagaaatgaatatggagtttgacataaagacgccagtttacatatatgaattggaggaacccaattaaaggactaacttcctcttttataatttaccaacaaacacactcttattctatcaaattcattcacttttctgcaaatctgtgaaaaaccataatagttccttcttcttccctttgttttttcattgctccaaaaattacaagtttggaccagctgccaggatttcctctgacaacttgttggctttcccaatcttgtaattagtgaaggtcttaaagttcttcttgaatagcccagccaatttcaacagggtttccttgtatgccttcttatcagcccaggtgttctttggatgcaagatttacgaaggcactccctcgatctcagtggggatgtctagccccaacacctctgttttatggtaagccgcgttcaagaggctaccaaagtggatggcgtcaatgattttcctagtgtaaggcaacttgatacggtttc

SEQ ID NO: 2961 - DNA, 389 bp, Gossypium hirsutum
  Clone ID: LIB3825-020-Q1-N6-D11
actaaaacaaaaatgaattaggcaaacatatacaagggcatcatgttcatgatatttagggacaatacattgggagttacacaacttagtgggggaaacaaactaccccggggcagagagggaaaaaaaaaggggcaattttgacatgctttgccccaaataaaacgaaattcaatccccatttctatagctttttcaaaactataatccagcaaggaccatgccaccttcctcctttaaatacccttaaatttggggcaaggccccgatggcaatctctgggggaggaaaaactgatacatctttataacctagttggcctgcaatttctttcaaagaaacccgggcatttgctttaaaaaaacccaagcgtccccccacccgtccgg

SEQ ID NO: 2962 - DNA, 556 bp, Gossypium hirsutum
  Clone ID: LIB3825-020-Q1-N6-D12
gaaccaaatctctcaaagctgattgattgatttaattagcagaggcatattcaccatagcttttgaaactggccattccaaaaagattacaaaaaccctaattgaaaccttgcttccaatactcctacttactatacagaagcagaatctaacctggcaatgaaggaaaacaatacaaaacaaaatatagcgcaccatgcgcgcaaataaacctggtaaatgagccttttacaaatgatcttcgcatgaagtcctccttgttcttggccttgctccgtcgagggagagctttccactgaactcatctaatgaatcactcgtgagcggtccactgtagctccgttgttgctctgcccagaaccggccactacggttaccaacatcataccctggcgacgtgtaattggtgttcatgagcacatcaccttccagtatgcggagcacctgtgacatgcgcggcctaaaatgaggatctcgccttacgcataatgatgcagcatgaagcatgcaatatacctcatgttcggaatagcgatcttccaatctggggtccacc

SEQ ID NO: 2963 - DNA, 560 bp, Gossypium hirsutum
  Clone ID: LIB3825-020-Q1-N6-D2
actagattacaaatacaatgtccattagcatattaaaacagacttacaaacaaattccaagagaagaaatgaaaacaatatagtatgatagcagaaaaaggaaaaccaaaagtgtaaccagactaatttccaagaagcctggccaatggaccttgagtaatgccagccacaataatgtataaagtacaagaaggaatgcactatatttcttctgacccatttttactgatggcgctgaaactatgtttggaatgacagtggtgaaaaacttctttgcttgtgtttgattttagacgctttgtttcagagtcacactgcggatcgctattgaagatttaggcctataatgctcatctgtatccacttcttcgatttcctgaacaatatcctctcccttaacgaccttcccaaacacaataagcttctcatttagatctgggattggtgcagttgtgatgaaaagctcaaatgctccattatcatgcttcttcttagaagttccaagcatgaatgcttcatgcttcaaactggtatcaagttggctgtaatgctttcctttc

SEQ ID NO: 2964 - DNA, 491 bp, Gossypium hirsutum
  Clone ID: LIB3825-020-Q1-N6-D3
aaaacacaaacaaaaaggggatccaaaacccgaccaaagccaacccacccccccccacccaccagccccaaaaaaccccgacaaacccctcaaccccccaagcccaaacccggcgggcgcggggggccacccggaaatcccggaccggaaccggaaggcggcccaacttacccaaaaaggaggccgcttaaagcagggggtaaccatggccaaacccgccccccggggaaaaaggccgccccctcaaaaatccccaccaggcccaacccggaagcaaaaaaacaaaaaccgggggggcccaacgagcggcccaccacacaaaaaaggggccgggccaaccgcccgaattaaagaacgaaaacccggggggccagaggcattaaaaaaaccgccaacccggggggaaaggcggctagccaaacgggccccaagggggtttttttctccccccggcagaccgggaaaaagtgaatgccctccacccccggggc

SEQ ID NO: 2965 - DNA, 546 bp, Gossypium hirsutum
  Clone ID: LIB3825-020-Q1-N6-D5
ggggaaaaactattgagaacattttcattagctttatactaagggtaacaggagaacatattcatacaggtccacgaaaaaaaaaaagaaaaaaaaaggttcaaaagcttaaaaaagcctcacactaactctcaaatctcacccatttctttacaacaaaagcccacaaacttgaaaagaaaacatctactaaaaacatggcctaaaaacggggttttctaacaagggctcaaaagcatccccataactaaagcttctaaaaaaaccaaaatgttactttcttttttttcctcctttttttttttggcttttgatgataaatgagtgatgagtgaacttttttccatgtttattagggatgtagagggcttttttagccatgtcgaatacccgaaaaatagttgaagtcatggggttgaacgcttagttgctttagccacgaatcggcaacacccaaaagtgacaatagcctttcttggtcccctcctccacaaccggaggaggacaaccacacgtccccttgcatcttgtaagttgctaacccaa

SEQ ID NO: 2966 - DNA, 559 bp, Gossypium hirsutum
  Clone ID: LIB3825-020-Q1-N6-D6
cgttggaaggctggagtttttatttaaacatgggcccaaacacgtaaaaccaaagataatttacatattagctaggaggaggaggcttcttcttattcgggtttcatcttacctcaaaaacttacaaacatctctaattacatcgttctcgcatcagttttttcccatttcacaacattcacaacttcggcatttacagaaactactcggctaagctctcagccatggagctcctcatcttaacacacacacataacccctcaaagcttaaaccccacaactcccaatcttcattcataatatcggcctctttgttgccttggtccagggaaaaagaactcctcatcttggttaccaaagatcctatccacctcttcttccttgctcttgaatgccagttcctttgcttccttctcgaattgctgaacataattcccctcccctgcaagaaggtacctaacgttgttttctatgttgacctcaaagcatagaatctctagattattgtttcttgaagcaactgtaacgaaaggatgccctgctggaacaacgaacaccg

SEQ ID NO: 2967 - DNA, 559 bp, Gossypium hirsutum
  Clone ID: LIB3825-020-Q1-N6-D8
ataattatattcatatatagaggttgaacataaatataactaacaaaagacactaaaatatttcttgtagatgtacaattttactggaaatgttcccttattgttcattgaagcgagttgcttaagcacttgccaaggttccttgatgaaattgtgtgggaattgtctcaattttgctaggcgctgcacattcatctccatcttcctcagtttcccataggaaactagcataagctgcatgcacatggctatcttgaggagagacttgaactgctcgttcgaagtagcttgaagctctttcttcatcacgatgtagctcccacactaactttgcatattgtgacagtgtttcaccgtctttggggtctactaaaatggctcgactgtaatattcttctgctccttgaaggtctctctttgactgatacaaaaactgagcatagttccccaaaaacaaagggttcccaggattttcctccaccatcctcttgtaatactcctcaacttcatggttatcgccaccatctccgtttttgcctcccgaattaaactcaccacc

SEQ ID NO: 2968 - DNA, 559 bp, Gossypium hirsutum
  unsure (1)..(559): unsure at all n locations; Clone ID: LIB3825-020-Q1-N6-D9
aaataaaactttaatttgtaattcaaacttacaaatacttattagcttacaatanaagaaactgggaaaatacagagggaaaaagtacaaatacttaataggattcccgtcacttgttgggtgcctttatataaccaacatgggaagagttagaggttttagcaagggttttcaactcattagcgatccaacatttggatgtttccctgtggtaaaagtaccccaaacacttgcaatcagaggtgcatttcctcccacaatcactctcctttatcccttctccttcgttgtactggctcatgaaatggtcaactccttctagcttgtagtagctgaaaccattcggcctacaattcaccttcttcggctgacaattctggctccaaccgagtaatccgtttgttgacgggcaagcaacgcattggttctcctcacagagtccaaagttcccacacctctccggcagttcgcattcagtgccccatattgagtccctagagaagagagtgaaagtctcttcccatgcctgtgaatcaaccttgtcatagtaggtaaaaac

SEQ ID NO: 2969 - DNA, 566 bp, Gossypium hirsutum
  Clone ID: LIB3825-020-Q1-N6-E1
gaaaaaaatttggttacaattgcatttcacaattttaaacacaaacaaattgggaaaatacacgaagttaatcctaaatcctaattatcaaaagctaaactagaaaaaaagggtaagaattcacgacagaaaacattaattttcacccaatttacaacgcccaaacgcattaaaatgtaaacgaaagtcggctcacatggccgttgatgtctccggagcagcaacgccatcatcgtcgaagctccaaagttcaccgacgacactatcctgcggagctacgccgttttgggtcggcgattccccgtccagataaggtatttgataaaatttcatgtaattctcgtaagccatgagctcctcagacagtttctccacttcattgttttcttcttgaacccccacagccgacacggccttgttcatcggctctcgccgtttctcttcttcttcaagttcctcagccttcacagggacgtaacagagattcacattttggtcgtcggaccctttattttcatctccagaataacgatcgggtcagttgcgtacccaccgatttcattcaa

SEQ ID NO: 2970 - DNA, 549 bp, Gossypium hirsutum
  Clone ID: LIB3825-020-Q1-N6-E10
tttttttttttttttttttttttttttttttttttttttttttttttttttttttttttttttttttttttttttttttttttttttttttttttttttttttttttttttttttttttttaaggggaaaaaaaagggggttaaaaaaaaaaaaaaggggctttttggaaaaaccgaaaaaaaaaaaaggggaaaaaaaaaaaccaaaaaaaaaggggggggggccaaaaaatggggggaaaaaaaaaaaaaccttggggggggggggaaaaaaaaaaaaattttttctattaaaacccccccttttaaaaaaaaaaaggggggacccccccccgggaaaaaaagccgaaaaaacccgccaggggtaaaacaaaaaaatttttttttttttggggaggggggggagggggtaaaaaaagggccccctttcggggggggaaaaaaaaggaatttaaaaaaaggggggggaaaaattaaaacccgggggcaaaaacccaatttggggaaaaaccggaatataaaaaaaaaaaaaaattttgaccccccaat

SEQ ID NO: 2971 - DNA, 553 bp, Gossypium hirsutum
  Clone ID: LIB3825-020-Q1-N6-E11
aaaaatatcgtcataccatattacctgagattaaaagattaagtgggaaccatgatcaggtctaacaacaactaaaagagtccacatatgcaaaaaattacattcattcctaccaaccttatttcaacattttcactacaaacacagtaatgaactgtagatttgcaagtttgcttgccggggggctcttcatcgtcaacccaatttccccatgggattcaggttcacgattccattgcagcaaccgatttgaacccgagaacgctgttttataaaatttcatcaggcattgtggacaacagcagcccttgaacaaactcgcatctttttgccttctcttcctgatcctttaccgaaaggggagacgacttcacatttctttctgacttattcacgtccgaacttttcttagttgttcttgtttcacgagaaaagttaggctggacactaacaaagtcatcaaccatgggtaaaataaatgaagacaacaacggatcaggtgctgaattggaagacactgttcaagaagaacccccgaagaagactgtaaatt

SEQ ID NO: 2972 - DNA, 569 bp, Gossypium hirsutum
  Clone ID: LIB3825-020-Q1-N6-E12
aatagcagtaacccatgaaagttcgaaaaccacatagctaataataatcccagataagcttccagacacattatttaaaaccaaaaaaggccaccaacaacggcaaacaatccttacctagaaaccaccgcgaaggcgaaggacaagatgcagagtagactccttttggatattataatcagccaatgtcctgccatcttcaagttgcttgccagcaaatatgagcctttgctggtctggtgggatcccttccttgtcttgaatctttgccttaagattgtcaatggtgtctgaactttcaacctctagagtgatagtctttccagtaagagtcttaacaaagatctgcatcccaccacgcagccgcaacaccaaatgaagggtagactccttttggatattgtagtcggccaatgtcctaccatcttcgagctgcttgccagcaaagatgagcctttgctggtctggggggataccctccttgtcttggatctttgccttcacattgtcaatggtatcggaactttcaacctccaaagtgatggtctttccggtaagagtctttacaa

SEQ ID NO: 2973 - DNA, 572 bp, Gossypium hirsutum
  Clone ID: LIB3825-020-Q1-N6-E3
attgaaccatcatatattaacattaattactccatcaattttagcatctcatattttaatagccacaccatgagtcttaaggatctggtaactatgagttggttgtctcacaaacagatagctaataaaaacaaggaacaagtacaaggtttatcaccatttctatagattgctgaccatactattattattggccagcttattcctcttcttctgcttcttccagccaattcacaaatggctccagggccttcacaaaggtttgcctgcccttcaggttggttcctttgcggaaccaatgaagaatggtgtcttctgcaaggacatcctgatcatagagagatctcacaatctcgggaaacagcttcatcaattttgcatcctcatagcattgcatctgaactttatataagttccagctcaatgtttccactggtgcagaaagaatttaacagctttgcccatgttttgacctgtcgcaaagctgaattggcattctgctgctggttctttccagaccactgaacagcatccattattacatcccacaaaatccttataacctcaatatc

SEQ ID NO: 2974 - DNA, 548 bp, Gossypium hirsutum
  Clone ID: LIB3825-020-Q1-N6-E5
agatgcaaatgattatgattattattgaaaaaaaagaaacactaactgcataatttacactggacttcaaccggaaaaaaccagttaaggtttcagttacaatgcaagcaaaaggagaaaagtcacagctaaatcaacaatacctttttttttgacaatgtatacaaagaaaattcaggctcaagctctaaatagtctacatccatcaacatttttttccaattattttcttctaattagtattctgtccattctggacacctaggccatacaatacacctgcatatttctctgtggagccgttgaaaaagttatctctcaacttcctaaaggtgcacgaggtgagcaaactatcggaaccagcttgatggcacacaccgactctttccacttccaacaactcggcgagcttgttcaaaccaccatgaaggctgttgcaaaacttcatcatgtgcttgatatcatataccattgggaaatatatcttgatcaaatcgaaaaaccctgcttgactatcaggcaaactcctgcaagtcaaaagcttaagc

SEQ ID NO: 2975 - DNA, 568 bp, Gossypium hirsutum
  Clone ID: LIB3825-020-Q1-N6-E6
cgacatccttaatcaaatacgttgtaaaggccaacattttagacaacagaaaaatcaaacttgaggtagtctgtctctctatctctctctgtaactaagacttagaagacatcttatatcaggggccttgatttaagtgatgtgaagtatagcacgtgttgaggctcaattcggtacagttgtcacaagtcagtgtttcgggagaatgacggcaaaggcatggcttcctgtgggcgaaagatgactagcacagcgaacatcccaagcattggtatgacaagaagccacttcagcagtttgtagtaatacatatggaatgtgagggagaagtcgtctgagaaatagagtccgtttttatcaaccatttccacaacaacagtccctgtagtcctcacccctaccgttggaagtttaatccgatattttcccggacgctcaaagatctggctttgctttatccttctttctccttggtagttacccgggactaacaatgttgttgtgacattataaggtgcttggaaccctgaaggatatctatgtttatccacaatctcaatctccaccc

SEQ ID NO: 2976 - DNA, 534 bp, Gossypium hirsutum
  Clone ID: LIB3825-020-Q1-N6-E7
atagatcccacttgcagagacggaccgtgaagatattcaagtctagaaaggagaaccatccgaggaattttcagtttgcagcgcctataaactattacaatgggctaatccggatcctagtaatttcttaatacaaaccgaaactacagatttctacaaaaaattatggggtttacagcttccttcaaaaatcactataattatttggcgaatctcttgggatttcatccttcatctagctaatctcagataccgaagagtttctacaagtgacagatgtccctgttgccgttcttaggttgaaacagtccttatttttttcgtcaatgccctaggttttcaagagaggaactggggaacaatgttgccttttttgtattgctttatggctaatctggttttctagaaatcaactcattcacgagaggaaggaaaagacaggtagagaacttgctcatcgaatacagaggtatatggcagaaaatgaaggggtgagagaaactccgaatcctttcaacacaaacaagaatcaca

SEQ ID NO: 2977 - DNA, 563 bp, Gossypium hirsutum
  Clone ID: LIB3825-020-Q1-N6-E8
aggtaaaccattttcataatcatttctttaatatcatattgatcaatttacatatatgtcactttcttcataatcagttcttcaagtagaaaatacatatatgttgattaatttaatttagaaatgttactttttatcactaggaaatataattgaaaattcctatactaaacaaaatgaaaacgataatttcagtagacttgggttgccaccgctgagaccattgtgttgattccacacatggaatgacctcgacaaaggcgataatagccatgttctccccaccgtttgccccatgagttctttatgatccaatagggttgattcccaagtcttagaattgaaaacccttttgccccataacccactagtaatactccatggtttatccacctcttcccacatattattgggcatgacacccctcctatgtaggtttgcatgaagatagcattcaacccaactgtaatgtacaaaatatcaaacacgagtatcaaatacaaatatacgtacgagtgtgttagttatgtataagaagagatcctttaagaatcttctaaaaa

SEQ ID NO: 2978 - DNA, 577 bp, Gossypium hirsutum
  Clone ID: LIB3825-020-Q1-N6-E9
aaccaatgaactaaaatcatagattcaatcccatatctgaaaataaaccaaataaatgaaattttgtcaaagaaaatgatcttccaatgcaaacaacagccgaaaaaaaaaaagcactatcataagctaagggaagaggagaaaaaacttgatggttagcaagtaaaagatattgtacatcacatcacagatactttcttctttgatatccacctcttcctggcgctttccattgcttcttctctcatccttaagagctcttggaaacattgctggtactgtgaatctattgcatcaagctccgatttcatctcttccaacttgtccttgtctgcaagggatagagagccgatgcttgacaagctaatgtcttgtgaagcaaatgaacaagaatccattaaggacgtgtcagagttctttgcggaatgttttatcgctatatattccccaaggtttttctcgtcactggtatctttatggttataagccccaatatctaaaccaaaatcatatgcgttcaaaccgttatggcactcaacataactgtgatcagaagatcccattggtttgttgttac

SEQ ID NO: 2979 - DNA, 541 bp, Gossypium hirsutum
  Clone ID: LIB3825-020-Q1-N6-F10
aataacaaatagtattaaaatatagaaaagtagttagaatataatgaagactaaaaacgaaatttatgaatataaacatggatacaaaataataaaattgccttgaaaaatatatctatgccaaaaaaaaaaacatgtatatagcacctgtttttcgatgggtcccaattttagttgtgaaagaaactggttatagggcttatggcaggattttccacaaaaattctagttttgcccaatcaataatgttattagtggattatttcttgcctgcaagatagatgcctgatgcgatagccacaccggcagccgcaatgcccagcgataccagaattttgccggttgaaactgtcggtttctttgaaggaactgtcatgagatcatctatcaaaacaggctgcttccaatatttcttaattccttgcaagtggcctttaccgaccaccgcaacgactgaactatgctcactcgctgttcttagtaacgtggatgacatgaactggtctcgttcatgtacaagagtttccattagagtagggaa

SEQ ID NO: 2980 - DNA, 506 bp, Gossypium hirsutum
  Clone ID: LIB3825-020-Q1-N6-F4
gtacttgttcgctatcggtctctcgcccgtatttagccttggacggaatttaccgcccgattagggctgcattcccaaacaacccgactcgtagacagcgcctcttggtgcgacagggtccgggcacgacggggctctcaccctctccggcgcccctttccaggggacttgggcccggtccgtcgctgaggacgcttctccagactacaattcggacgccgatggcgaccgattctcaagctgggcttttcccggttcgctcgccgttactaggggaatcctggtaagtttcttttcctccgcttattgatatgcttaaactcagcgggtaatcccgcctgacctggggtcgcgatgcgagcaccgtccttgcgatgccgaaagggttcaagggtctcgatcgacggacgcgcacgactccgaacgaggttgcttgcagcattaccaccgatcgtcgcgacgatgatgtcgtcgaggactcgaatttaggccaaccgctggctgtg

SEQ ID NO: 2981 - DNA, 555 bp, Gossypium hirsutum
  Clone ID: LIB3825-020-Q1-N6-F6
gccacgagcatcctttttaagcttaaaattggaaagcaataatccaaagtgtatgtacataagcaagtgcgtgggtgaaatatgggatgatccaagtattgcataagcctatatcaacacggtctcgggtatatcatcgtgtttactaacttattaaacacgcccaaaaaaggaatcagcatgtataccccataatctgtggttttgctaaggcaccaggccactcatcttacatgtcttacatgagagctctttgctaaaagtttaaaagcatccagttgtgatgaattactgcccagaatttcccaggagtctctcaactgcagcatggacgtttcccgcagtagcacgaagtgctctgatattctcttgtgtatcatagaagcccatttcttggagttgtgataattgcgtggcatacagttcttctgggggaacatcaggttggttgggaacactgaggccgccagcacctagaccaccaaacatattcatcaacaaatccagactagcagtagggggtgctcctgtagtaccacttgtctgtgttgaatc

SEQ ID NO: 2982 - DNA, 541 bp, Gossypium hirsutum
  Clone ID: LIB3825-020-Q1-N6-F7
aaaaattattttctttaaataaacgtaaagatcaaccaccattacactaaaaaccaaacttatttgtaaaatacaacacgtaaaccccccatcaaactcctccttaatacttgctctcatcgctttctcttcgagcacgcctcctcaattccacaacatcatcatccatcctcttctcttcctcactcttcccaaccacagtttcctttatcttttgcgttgttccctttgcagcatcccaagctccttgtgcagtttgctttgccttctctccaacattttggatggtctccgacgccttatcggcaactgaaccggctatctcctccgacttctccatcaccccttgtgctctctctttagatttctctttcaactcgtacgcagtttgagatgccttatcagccccttctttggtcttatctttagcactttgggcagtctctttggtcccttgcgcgtactctctagctttctgttttgttttctcggtggcgctttgtgcggtctccgccgctctgttcgttgcatcttttgccct

SEQ ID NO: 2983 - DNA, 540 bp, Gossypium hirsutum
  Clone ID: LIB3825-020-Q1-N6-G1
gataagcatgtgtatatatgaataaaaccaatacatattccactaacaaaggaactcaaaaaatatttttaatcactggttataaaatcttacatttgtgaagcatgaagcctttcttcggattcctcttgttccttgttcttcggatcatcgttctcacgatatgagctcgacaacaaaccagcactttttactagggaaagttgatccatcacaattgcatttcttttgtaattccatactagcatcgatatgtagtcctgcggtgaaacaagtccctgctcttgaatgcaacctttttgctcttccagagtttttggatcgtcgagccttatatattcaattaatgccttctcatgatcaggcctccaattgctagggaaaggcgtataatcagtctcgggaatcagagacatccttgtatactgaaggccatcaattgactcagcaagacccattcttagtagattctggtactcgggtgactgtcctttcctctccttcaaaggacgactcagatttcttgcaccaattttataa

SEQ ID NO: 2984 - DNA, 546 bp, Gossypium hirsutum
  Clone ID: LIB3825-020-Q1-N6-G10
ggcggaaacgctaaatcctgaatttaaacactaaatgcaaatgctactatgttccatctctacaacaaaaaacacctcctttatctcttaagttatcatacaacatggattcctcaaatatgcaagcaactcaagaattgcttgatcctcactcaatttctatggccaatgctcagcaggattgagcgatttaaattcaaattttcaacatactaatactatttaataaggccgggcaatcctcacaacccttccatttataaaaaggatagccataaaaatttggttaaaaatggcttgcaaacaagcctatttgtctacagaaagtgacatttacctccttccacgagttccaggacctgaccttgggccagggtaccgagaaaattgcagcctcaagtagttagaatctgggtcatgttcatccattttataaccttgcaaggcactcattgcagttgctgcacaggcaggacttgaaaaatcaacaaaacaaaggagaatatgatctccaccacgctgtcggggttctttgctcactaaccg

SEQ ID NO: 2985 - DNA, 494 bp, Gossypium hirsutum
  Clone ID: LIB3825-020-Q1-N6-G11
aggcaaaaaaccggccccccttggtttattaaaaaaaatcccaaaaaccaaaagggcccccgggaacaagagttcctaacggaacacaaaaaaactagtctaaatcacatgttttgccaaccagccctcaaaaacaaacattttaaaggggcaaatcaaaaaaaggggctgtaaaaccccacctaatgcattcatcaagccaaagtttttttaggctggattcaggcaatccccaaaaccccaaaaagcctttgcccccaacaagctggcataaaccccaataaaacgggggcccattgggatacattgccccggggggaacctttggcccaggggatgtcccacccccttggggaacctgactagggaaagccccccaggaaaacaagctttaatgagcagtctctggataaccaccagtgggcatcccaactgaacccggggggattttatacaaagaaaaccctccacttggagcacccaacccacccccc

SEQ ID NO: 2986 - DNA, 556 bp, Gossypium hirsutum
  unsure (1)..(556): unsure at all n locations; Clone ID: LIB3825-020-Q1-N6-G3
aatatcaaattgaaattatggaatctcaaaaatagattacataaacgaaacaatcccttgtgttcttacaaatctataacagtgtaaaaggttccacaatatagacatgatacaccagagaaatatacaatgcacaacaccagggtaacccaacatgccaagaacaaatttcaaaaccatgagcaacttgctgtcaactatgctcctcacaaagatgcaaaaacaaagaaaaatgaacaagtgatttgcccaaaatttagacaagaataaattaaatcatagtacgagtaataccctcagtcgcagaagggtttaaccttaaacctgtagagaagcttcttcttttttgaagttgggttgtcaacagttagcaatacttancccagttcaccaactttgaagctttgagacacaactggttcatcttttgcagtcatcttggtcggtttttgaatgatgaccgcgtagctatctttagcatcaggcacaaattcagctccatagctcacctcccatccaactaccctgatttcccaaacaagaatacatttctcaa

SEQ ID NO: 2987 - DNA, 552 bp, Gossypium hirsutum
  unsure (1)..(552): unsure at all n locations; Clone ID: LIB3825-020-Q1-N6-G4
aggagaacaanagaattgattctacatttagacaacactctcatggcaaacaatagcaaacctaccatgagacctactttaagttgtacacttgcaaacaacatcaactccaccgacagatcaaagtcattatcctagttcagtttgcatttcacaataataacacagctagtttagtttttatcaaatatatatagggattcgtatatgcttaacttatgcaacatgagctggagcttttggatggaattcttcttgagcaacaggtgatttaccaaagcaacccgattctgatgaagttgcagcactgaggttagctttggtgtcatcgaatgattttggtgttgatggattaggatatggattcctgttcaccagcctgtcccgccgcttctcaaaaaatcgctgaagggagtgtctccttgcaattggtagttctttcagtttgcagaaaggggtcctgttagtaggatacacctgtgcctgtggtgaagccagagcagttgcagtagcagtactttgaagcgaaggagacctcgtaagaacaggtga

SEQ ID NO: 2988 - DNA, 485 bp, Gossypium hirsutum
  Clone ID: LIB3825-020-Q1-N6-G6
atccaaaactagttccataggcattggcttttttccctgggtttggaaccccccctaaccctataccggcatcggaacagggttacaagacattaccaggcagtacagcccaatttcgggcattaattaaaaaaaatatttacacacatcctaatttaaaaaaggcgcccctttaaggggccctcgcgggccaatatgaacagaaaattcaattcgggactaatttaaaattaccaccaatttttagtaaatttcaaaattcatactacataccggggccaaccaaaatttactcatttcatgaggacatctacaacctaaaagactctcaaaaaacatcctagggacatgccattaccaaaaattaacacactttaccttaaagaattcgggaacaaactgggatgctgattaaacgttctatttttactaaaccggaattttcgagccaacccccgcggactttggcttggcctttcttaacc

SEQ ID NO: 2989 - DNA, 226 bp, Gossypium hirsutum
  Clone ID: LIB3825-020-Q1-N6-G7
gaaaatttagccagatgaccttatgagtataccaacccttcctacatgtcacattaaaagcttggccttctgaatgataaatgtgctcccttcgaattaaaggggtctttagtcacgcacgcttttaatttggctctctttgagttttttttttttggcaaatttttaactctattaactaaatttttcatttcgcctaaataactcttgtttgtactactgtgtt

SEQ ID NO: 2990 - DNA, 564 bp, Gossypium hirsutum
  Clone ID: LIB3825-020-Q1-N6-G8
gaaaaaataataataattctcataaaaaaaggaaaaagaaaagtgggatatttcataatagtgtccctactttaacagaggggagaaaaaagaaagggttaactattggtgctgattaacagacagcaccataaacaaatcataaatactcaaagtaacctattttaacccacatttactttcactactgtaagaatcaaacataaaatataaccccaatgaattatgctgttgctttcaattcaatccttggttgcctttttcaatcatttaatgcttcagcttcagggtccctttccttcattgctgtccaattttccatctttggtttgtctgaaattgccatcagccgtctttgcaagatggatgcaacaaggaggaaaatcgagcacataccaaacataacggtgatggggaatgcgtcgacattgtatagcacaatgcagacgaagatgttgagaggaatgcggaaaaagttcatgatggtgctccgagcctcctccgggatgtattgggatctcattttcataattgatggccagaatatccctacgcaagcctcaa

SEQ ID NO: 2991 - DNA, 545 bp, Gossypium hirsutum
  Clone ID: LIB3825-020-Q1-N6-G9
agctaagctcgatttaagtataacacagtaataatgtttgaacatcaaactttattcgatacagtaactaaagatgtggttcactgaccatttcagcaccacaaaacacagtgttcattatataacacccacagttccatagaaatgaaaattacgacaagaagcagaagacacccaattagaaaccaccacggaggcgaaggacaagatgcagagtggactccttctggatattgtagtctgctaaagttcgaccatcctccaactgcttcccagcaaagatcaacctctgctggtctggaggaatcccctccttgtcctgaatcttagctttcacattgtcaatcgtgtccgagctctccacctccagggtgatggttttcccagtcaaagtcttcacgaatatctgcatccctcctctaaggcgcaaaaccaaatgcagggtggattccttttgaatgttatagtccgcaagtgtcctcccatcctcaagctgctttccggcaaaaataacctctgctggtctggaggaatcccctccttgt

SEQ ID NO: 2992 - DNA, 573 bp, Gossypium hirsutum
  Clone ID: LIB3825-020-Q1-N6-H10
agaaaacgaaaacaaaagccacagaaaatgttccattagaaaagaccagaaacattacaaaccagataagctgcaaatccctgtatcatcttcacatacatcaaaggaagatgaaaagatcacccccaaccatacttacattaactaaatttagaaaaaggaacgagctgattattactcgctatcaaacaacaaaaccaaattacatattttagctagttttaaactacagtccctttcagaccctagatccagttacagcagtgccggtcttgtgccctggttcatcccccggtgcatgcatcccatagtcggaatctcgataccctggtccgtaccgactgctgaacacaccggcatggatcaacaacacatacaaaagttgagtgaatgcaaggattattatgaatgcttcaagtatcctcaacctccatcctccatcctcctatatttatatgcttacaagcaaacccaaaggctaatgcagttagagcccaagcaataagtgcagaagaaccagctgcagccaaactatcacttctccatgacctaatatgatgaccacctgcaaat

SEQ ID NO: 2993 - DNA, 568 bp, Gossypium hirsutum
  Clone ID: LIB3825-020-Q1-N6-H11
gcaatctcaagcttctttttctttttcattcttggaaatgttggtagtattacactattactattatcttttaagcttcacaatgaagttgcattttacgcaatgaaaggtaagccaagaaccgatacccgaaaatcattgcaaccaatgcccccacttccttcaacccactgtctgttttaatcccatttactgttggcataatgtcttggtattgtaccttgagaagaagcttgtatgtgtgataattgaaggacatgtatctgatccatgatatgaacactggtactttcttaacaaaatatccaccagccaacatgaaggtcatcacagttactgaagctaaagtagtagctctctttaagtccattagtgtagcaccaatggctagtccaagaccctgcaaaagccacccaatgtcatcccttgaagtttaaatgatatgttatggtttcattcggttgcaaatggacgtacctgggccgcaacgatgcagaggaaaactgtaagcatactgaggaagaaatgactagcacttagtcttagttctgccatgaaataaactact

SEQ ID NO: 2994 - DNA, 557 bp, Gossypium hirsutum
  Clone ID: LIB3825-020-Q1-N6-H2
ccaactgaaaactagtttttttatggattaatccactcaaattcggacaattgcaagtacaaatttactatgaaggaaaaaagcaattaagttaaaattgatcactttcacaatttatctcatttgcacaattccagcagagaccagcttttggatcttgttcatcaccatagggttcttcatgtgttcttgtgctgcctttggattttcctggaaatcaatcaaaacctgtctcattacaggatctgagagaatgttctgaatttctggatcttgcattgccttagcctgtctttccttcagttcttcggggctcaaatcacctcgattggctttgttgatctgttctacgcatcttcgaacaccatcgagcagctcctggttattggcatcgtgtttcaacccttcctggtatgtttctaaagctttgtcatactctttcatgaagaactgaacagcaccttttcttgtgtaacctttggaaaaggttgggtcaagctcaatgcacttttcagcatcttttagcccctcgggcaatgcacccaattttgtgtagc

SEQ ID NO: 2995 - DNA, 63 bp, Gossypium hirsutum
  Clone ID: LIB3825-020-Q1-N6-H3
atctatttttctcttgttttttacccttttatttttttccgtttccttgtttgctttccatct

SEQ ID NO: 2996 - DNA, 496 bp, Gossypium hirsutum
  Clone ID: LIB3825-020-Q1-N6-H4
acttactgcaccttttttattattttcatgacatcccttacaaacataggaaaaaaacatacaataagtagcaaaaaaagacttaagaaagcaacgacaagcatgatggatccctgaaggaccaaattatgtagctaggtacaggtccaggtccaaacacaaaacacaagaaacatttgactagtaatcttctggagccaagggctggtgcgttgggtgtgctggctcccccgctgggatcaccatgtactcgtacatcaaagccgctaaacctccacctatcaggggacctacccagtaaatccagggggggttccacctccatcctaccaaggctggaccaaatgcccttgctggattcatgggggctccatcaaatgggccgcctactaaaatgttggcgctcactattaagcctatagccaggggggctattgtccccacgcttcctcttttgggatcgatccctgttgcataaactgtgtacaccaatccg

SEQ ID NO: 2997 - DNA, 569 bp, Gossypium hirsutum
  Clone ID: LIB3825-020-Q1-N6-H5
agcaaaatactaaaagagccatataatatattccagaaacaaactacattttaagagtttgacaaaataaccaaaacctctgtcggttgcaaaaccattaaagctaagggaacgttcaaaattagagatcatactagtgaatgttggcatcaaaataatggttaagattttagtcaacttcctccatcttgctgccctcggcatctgcatcctccaatgggggcatgtcagcatcagcatctgcatcaccagcatcctcgtcgatgctcaacccaagtttcaacatcctgtgaattctgttgccgaaggtgtttggatcatcaaggctgaagccagaggtgaggagagcagtctcaaagaggagcagaacaaggtccttcacagacttgtcattcttgtcagtatcagctctctttctcagctcttccatgatgggattctcggggttgatctccatcgtcttcttgcttgacatgtatcctgccatactgttatccctcaaagcttgggccttcatgattctctccatgttggcagtccaaccatactcgccagtgaccaaacagcaa

SEQ ID NO: 2998 - DNA, 432 bp, Gossypium hirsutum
  Clone ID: LIB3825-020-Q1-N6-H7
ggggaaacaaccaggggggaaaaaaaaaaaatggaacatttttttaaaagggggaaaggggggccaaaacccctaaaaatttcaaaaaaaaaaaggggttttccccaattttttttttttcccccaaaaaaaacaaaaaaaaaaaaaaacccccccggggaaaaaaaaaaccgggcccccgggggaaaaaaaaccccccctaaaaaaaaaaaaaaacccggaaaaaggaatcttaaaaaaaagggggggggaaaaataaaaaaagggggaaaacccaatttttttttgggggggcaaaaactttttttttttaaaacccacccccggggggggaacggaaaaaaaaaaatttaaaagcttttggaaaaaaagggaggaacccggggcaaaaaccccgggggggaaaaaaaaaaaaaacgggggaaaaacccc

SEQ ID NO: 2999 - DNA, 567 bp, Gossypium hirsutum
  Clone ID: LIB3825-020-Q1-N6-H9
aaacttcaacattcttggaccgccagcaatggctttagaatataataataatcttagtacgaacatcaaaatagggtcactgaaatgtatcatttatcaggtgctttatctaggaatcaacaaaaattgttgtatctgtgaagcaaagatttatcataattaaccaaaaactagttctaatcttacattatctcaaaatacattgtaataaagctgaagatcgagtcaccaaaaccggacaaaccgaggtgcgcagctagaaccggcggatatccttgggtggtttgaagttaagaggatgagtttgttcggttgcggtttcatcttctttccacattttaatggtcttgtctgcttcacaggaaatcaatcttgtaccagttacatcatacgagagagcgtagatgccggcttcactatccaacgagccaggttgtacgatcgtctgagcttgctggaaattgtgaccactcctccaatcccaaaaccacaaactcccgttgtcacctccggtagccattacaccatcctcattgacggccatggtgttaattatagtcttctgct

SEQ ID NO: 3000 - DNA, 573 bp, Gossypium hirsutum
  unsure (1)..(573): unsure at all n locations; Clone ID: LIB3825-021-Q1-N6-A10
aatgaaacagacaaatattatagaaaaaaacaaagtatagnttccgcaagatcagacacaaaacttgactaagacgccttggcaaaccaaagcatctcaaactttaaaaatcctacataaaacaggcaaaaacttcaaaccacatataaccaaagataaaacactcaatctgcttcacggctaaaaccttttggcctcttcacttcttcttagcagcagacttggtgaccttggcaccggttgggtccttcttctcgacactcttgataacacccacagccacggtctgacgcatgtccctcacagcaaaacgacccaggggtgggtactcagagaaggtctccacaaccatgggcttggtaggaatcatcttaatcataccagcatcaccattcttcaagaacttgggttccttctcaagctccttaccagatcgcctgtcaatcttggtcaaaagctcagcaaacttaacagcaatgtgtgatgtgtggcagtcaaggactggagcatatccatttccaatttgtccagggtggttcataatgatgacctgagaagtgaagttggcagcct

SEQ ID NO: 3001 - DNA, 541 bp, Gossypium hirsutum
  Clone ID: LIB3825-021-Q1-N6-A11
aaatataatccatgttcttcaattaatacttagccggaatattcaacaaagggggcagccacacactccattgacttaaaacaaaacaaaaaccccatcttttgcttattttacaaaacaggacaccatttttatatatagctgctacagaatgcatactatcttaaacacacaagatttcacttccccagcattatatataactttaaaaaactacatatagatgatgaagctatgtatatattattatgcgttgacattctcattaagcctagcagctgccgccataaatgctgccactcctcctggatgtgtggctacatttggattgtttctcagctctgcactcaccactccttcagcatcttgccttgtcactgctttatccgccggtaacttcgccgttgcacccgttaaaacttgattcagcttgatcttttcctcatcgcgatccagggtcgcgttatgagccgcggcggattgagcagtagcggcgagtccgccggggattatgacattcgaaccagtcgctcgaacttcc

SEQ ID NO: 3002 - DNA, 571 bp, Gossypium hirsutum
  Clone ID: LIB3825-021-Q1-N6-A12
gttctagatttttaagtaatattgatcataaactataagttgaagtgatgtcgtacacaaggcaaggagaaatatgaagttgctttgggcgaaaaaaagaaactactatgaccaaccaaaagctacaacaatgcaagagatatcatctcgactccccctggctaatgcttctttgatcagtacttgggatgcttcctatgcatcatcatactctctaatttcatcaaaagcttcttcatttgacattaccttccagagcccatcactagccaaaatgatgaactcaacagtattcggctcaatgatttcaatcctcacatcgggttctgaagtgatatgttccttcaattttccatctccaaaggcccttgtcatagccaactgcccatccactcgaggaacattccctggcttttttgacacaaatcctcctctactttcaactacttgtttctccttattcggctcatgatctattgttacttgtttcaccccatctccgccacataatatagcccgagaatcaccaacattagccaccattagcttctttctatctattaatatcgct

SEQ ID NO: 3003 - DNA, 562 bp, Gossypium hirsutum
  Clone ID: LIB3825-021-Q1-N6-A2
aaatcaattaatggtaaatattaactttaaataaatatccagagattgttgcttaatttatttttaaggaagatacatctaaaccaaatagctgagtttatttgaaaataaataaatggaagcgttatacatctaaaccaaatagctgagtttatttgaaaataaataaatggaagcgttggaaggcagcagtttaggatttgggagcgatgcttcgtcgaatttttaaatatccaaacttgcctacaccaggggatgaaccttcaaaaatgaagggcaaatatcctgttgcttttttgtacctttgctgaatctctagaatgtgttggctgcttcggagacaatttcttccaactacgcaaactgttccaccagagccgccaccggtaattttagctccatatagagttccatcatcaactctagaggctttaccatgctgcatctcctgcaccaactgtaccagtctatctgtcccatcggaaccgagaccacatgcactatagctgtagtggcactgatacaacagctctccaagtgccgtaagttgctcatttgaact

SEQ ID NO: 3004 - DNA, 567 bp, Gossypium hirsutum
  unsure (1)..(567): unsure at all n locations; Clone ID: LIB3825-021-Q1-N6-A3
atggaatctgaaaaaagattacataaaccaaacaatccctcgtgttcttacaaatctataacagtgtaaaaggttccacaatatagacatgatacaccacagaaatgtacaatgcacaacaccagggtaacccaacatgccaagaacaaatttcaaaaccatgagcaacttgctgtcaaccatgctcctcacaaagatgcaaaaacaaagaaaaatgaacaagtgatttgcccaaaatttagacaagaataaattaaatcatagtacgagtaataccctcagtcgcagaagggtttaaccttaaacctgtagagaagcttcttcttttttgaagttgggttgtcaacagttagcaatacttancccagttcaccaactttaaagctttgagacacaactggttcatcttttgcagtcatcttggtcggtttttgaataataaccgcgtagctatctttcgcatcaggcacaaattcagctccatagctcacctcccatccaactaccctgatttcccaaacaagaatacatttctcaaagattgttatttcgacagtttgctttgtc

SEQ ID NO: 3005 - DNA, 516 bp, Gossypium hirsutum
  Clone ID: LIB3825-021-Q1-N6-A4
aaaccgaaaaaagaggtttattttttcaaaagcatatatgtttgtgtacaatgtttggattgtagggagtacaagcaagcaatgtggaattttagattgtaaaattagattgtctagtgttgatatgagctacaataagggcttcaatgtttccatctagaacggaatttaggtcgggtaattcgaggccagtttttacatcccgtactaacttgctgggatgaaacatgtaccttcgagtctccttttgccacatgtccatcatggcggctgtgttgatgctacttacatcggagactccttgctcgtttgctactacaagaagtttggcctttaaccgattgagagttttgatttgattagcaaagtagctcctctcacctgaagattggaaagttaaggcggtagggatatgctgcacacagactgtatatccagttcggctttgtttctctccgagtgacaaaacagacgaaagaatcaaatcatcatcactaatttggaggtccggagttg

SEQ ID NO: 3006 - DNA, 550 bp, Gossypium hirsutum
  Clone ID: LIB3825-021-Q1-N6-A5
attaccttcataaagttttataaaccattacaactacactatccatttcatctatttatagggaaaacacagtacaacaggagacatgaagtgagttgcttagctaagatcctccctcacaatcccaaccaccattattgagcaaaataaaagtaaagagggcaaaatcattatttaaacattgacaaggccatcacagggtgcaatcatgtgatgcttgtcagactcatcatcatcatctatccactcttgtctgctttggtctttggaagggttccaaaaactctgtcccacaatgttgtagttatgccaaagcccttgttttgaatcctaaagtgatggttcaagtgatatttcttaagttttttgatagattgtttggtaggctggccatggtgcacatagtaatgtatcatatcatatatcacatatccaattagtccacctccaaataatgcaggtcttgtggagatagtgaataaaatcccatacaagttccaaaacattatagctagtatagcagcttctgcaggtggaatcacaagcctta

SEQ ID NO: 3007 - DNA, 558 bp, Gossypium hirsutum
  Clone ID: LIB3825-021-Q1-N6-A6
acaatattatcaggctacatggcctcactttgtattgaatatatattataaacgaaagcaaagaacaaaaatacaaaataaataaagaaaattacttagtgctttaacttattacaaagggatttgtctccttagtatgtttctaccatgggagatccccacttttatcccaaatatcaggttatcattacgttgccttggagacatccttacttgacctattgtacttcatatggctcctaactagttgtcctgctgaaattgcagacataagcgacagctccccggcaagaacagcagacgctacaatggttgccagcgtcctaaagtttgctcctggtgtctctttgcttgcacccttcactccaagtaagttcaaacaggctgattgagatgcaagctgagttccaccaccaacagtcccaacctcgatggaaggcattgtgacagagacgtggaggtccttgccatcattaacagcttccatcatcgtgatgcaatgcgagctctcgacgttttgagccggatcttggccggtagctatgtagattgcagcaa

SEQ ID NO: 3008 - DNA, 570 bp, Gossypium hirsutum
  Clone ID: LIB3825-021-Q1-N6-A7
gttaagaccacaagtttagatgagcaagatttcatacaaacatgccaaattagataattttgtacaagcgaactcaaatatggaaaaaggaaaatccctaacttttttgcggtgcatcaaaataaacatcaaacaaccataaagaatgtcaaaagagcgagcttttgcgtctttgactggtcggatgacttctacaatcacaatccattacctggatgcccaggacttgcagaagacttttggggcaaacttgcaggaccttccccaattcctatgtctttgacaccagagcttaatgatgatgatgaatcaccctccacttcatcatcttcatcctcaatgaaagaacccttacgtcgcagttcctttattttcaaaaactcatcatagtgtgctttcctttgctccttaaaactcttactattccgatcttcttcatcatgatccataggatcagcctcatcctcagaagaagtccaaccacctgattgcccagttgtttttctacttgaggaagccacatctttcaaagcagagcataattcctcagcatccacatcaatgacacaa

SEQ ID NO: 3009 - DNA, 535 bp, Gossypium hirsutum
  Clone ID: LIB3825-021-Q1-N6-A9
ataatatattataaagtacataaattcatgtttagcatattcataccttaaatccctcagcattagaattatgatgagggttggcatcaaaaagggtttctaatgatctggcttttctgctctcaactcttcctgcttcctttaatagttcagccaaccttttcttctcatcatctacctaaaaatttgctgtccccagtttttcctttctcgtctgaacaacatactccagtatttcaacggcatcatccaacctgccaattgcgtcataagtgcctgcgagattactgtatacgctgagtgtatcagggtggtacggtccacactcttgctctaaaatgcttttggcttcttcaaacaactcaacagcctcctttatagcatagcgttgcacacaagccagccccatttgattgagagcaatgccgaaaaaggcagatttcttgtctctacatatgcgtagcttcaaaatggcactgccgaaggagttgtaagattctgaataattccccaacatgtagtacataactcccat

SEQ ID NO: 3010 - DNA, 559 bp, Gossypium hirsutum
  Clone ID: LIB3825-021-Q1-N6-B1
aatattcaaaaccagatataaaaggaaggtttacatcattgttccaataaaaatatgttacacaagtctcagctgaaactgatttctagaaaaaaaaaggctgatagccacaccttgcaatgcaagcagtgtcagatgcatttttatatgatgaacaaagctggaaaacaatataacctgcaaaacatctggcgcacaggaagaggcaaccaatatctccagctaaaacatcatcagtgcctgctaaaaaacagcaagaatgatcttctgaaaacaaagttcgcaacttccgttgaatgcatgtctctcacctcaaacacggccctctaacaataatgagaaaattctaaaaaatgaagatcaaacagcactgatggatgaattttctcttagccaaatagaccaccagtccctagttccccttgttgcaactcctttctacgttgctcttgcaaaggatctgggctcttcagtattcttctcattcgcctgtcttgagcatgttgggcagggaaagtgggcatgaaagctttggtcttgggaagaggaacttcacgaa

SEQ ID NO: 3011 - DNA, 331 bp, Gossypium hirsutum
  Clone ID: LIB3825-021-Q1-N6-B10
agcccgggctatctaattccagcccaataaataaataaaacccaaataatcgacataaaaaattcaaaaaaaagagtccaaaattacaaaaacaactaacccaattataagcccaaaataaacttaaccctagagcccaaacagcccaaaactaactaatttttcagcaaaaagagaaaacagccgctgcttccctctaccacgctcgtcgacacaccaagcacgacccccaactcgctcgttgctcgcccacgtctctccacgtcttcacgatttgcaatttgagcaagagaataggcagaaaccgcttgtatttggctataaaaccttc

SEQ ID NO: 3012 - DNA, 553 bp, Gossypium hirsutum
  Clone ID: LIB3825-021-Q1-N6-B11
gaagggacaacttaaaaattagatacattccgtctctttaggaaaattagatctaccaatcattggatgaccagttttcaaaaccaatactcaatatgttgaagaataagacattatagtttaatatttattacacaaaggcacagaattttacagttctatccataaaataaatggtaaaaagaatcttttgcttttgacatattttattgtattttcgtagcatgtaatttgccaattcacctttctcattcagcttgaagacccttccaactgatctcgaagaatttcgtacttcttaagctctgccatggaaagggatggtgaaagctctctcaataccttcacaaagtcatcatattctacaacaatggagtcagcttgatccatggaagatgaatctggactcaacaccttacgctttgcagcatgaaaccaagcatctgcacacaaggcatacatatctgcaccagtaaagtttggtgggcatctctttgcaattgagtagagggatatatcttcgtgcaatctaaactttctggtaagtgcttta

SEQ ID NO: 3013 - DNA, 547 bp, Gossypium hirsutum
  Clone ID: LIB3825-021-Q1-N6-B12
gcacatccgcaatttattctattagtattataatttatacaatcaaggtacaaagattatgtaaagatgctccacttggaaatatggattcaacatgctgaaagattctgatcgattaactgcacttagtaattgtaaatgaagtctcggaagcacacatccagagtccacttttccctgtgtgaactcataacgaaatgtctttaccaaaaagtccacttattccttttccagggtcgctttgcttcactatcgactccccaaccaaaaccttactgctttaacacccgcttcttggacataagcaacatcatcaggagtaaaaagccctgattctcctacaacaattatatctttcttgcaaatcatctggccacgctctccttcaagaagcttctttgggttactgatatctacctcaaatgtttcaaggttacgattattgataccaataagttcaatcccctctataccaagaacacggtccatttccctttcatcatgcacctctacaagagccgccaaaccaagcattttgcagatttta

SEQ ID NO: 3014 - DNA, 564 bp, Gossypium hirsutum
  Clone ID: LIB3825-021-Q1-N6-B3
cccagattcatactgttctgtttatttagaagatatgcaacaaagaacgtacttgtattacaaaaagataacacaaacagaagttaaaacaatgaaaagcaacgcaaatattccacccctatattaagggtgtgtgcagtgtgagatcacattttggttttgctggagcgatcacgaataacgccttcctccccaacacgcccaacatcattgaatgtttcatcagatgatctcagtgtagcatcaacggctcctgccggggattcttcaaccttaatcactatcgtctctgaaaacccttcacgaccgtggcgtttcgcatcatcatcataagtcttccttctaccttcatcacctctcagcttcatctcttccatcttctgtctagctgactccgtcgtttcactcaatgtctccttggtgttctgtgcagtctcggatgccttctgcttcgtttcttccgtcttcccagtgaggaaatccatagccctcttagcagcgtctgcagctgaatctttcaactccccaagcttactaactgttgtatccttaccttcctttgct

SEQ ID NO: 3015 - DNA, 512 bp, Gossypium hirsutum
  Clone ID: LIB3825-021-Q1-N6-B4
aaaacaaaaaattaatttggaaaaaatggaaaacctaaccaaattaaaggggttatcacttcacccaacttaacccaaccggtttcactggaataaaaaaaaataaccttcaattcaaagggaaaatggggggaaaaataactaagagagagaagatggataaacgtaaaccaaaaaatacaggggcctttaacctaatagccttacataatagcaggggggaaaaggaatacaggggtaaaagcatagctcacttttatcacttaacctacactaaattttttaatcgggaaaaaggtgctttggcagggaatttaaacgggcgggatcttttggggggacgaagacgtatccggaacttggggtagaaacctttcccaaaagccatggtttacactaccggggaggggataaccgggcgccactggttttggcgggttttttgggggctgatcgggctccaggggaccagcatggggggggtttaggccaattccaggggggttgggggg

SEQ ID NO: 3016 - DNA, 560 bp, Gossypium hirsutum
  Clone ID: LIB3825-021-Q1-N6-B5
tttttttttttttttttttttttttttttttttttttttttttttttttttttttttttttttttttttttttttttttttttttttttttttttttttttttttttttttttttttttttttttttttttttttttttttttttggggggggaaaaaaaaaaaattgtgaaaaaaaaaaaaaaaaaaaaaaaaaaaaaaaaaaggttttttttaaaaaaaaaaggggaaaaaaaaaaaaattttttttttggaaaaaaaaaaaaaaaaaaaaaaaaaaccccccaaaaaaaaaaaaaaaaaaaaaaaaaacccgggaaaaaaaaattgggggggtttcccgaaaacaaaaaaaaaaaaaaaaaaaattttttggaaaaaaaaacccgggggaaaaaattcccccccctggaaaaaaaaaaaaacccccccccaaaaggaaaaaaaaaaaaaaaaagggggggtttaaaccccaaaaaaaaaagggggaaaaaaaaaaaaagggggaaaaaaaaggggggggggcaaaaaaaaaaaaactggttttaaaaccacccctgg

SEQ ID NO: 3017 - DNA, 565 bp, Gossypium hirsutum
  Clone ID: LIB3825-021-Q1-N6-B6
ggtaagaacacaaataaatttgaagtaaatttactactcttgtgttttcaggatcttttttccctcattcatgattcaatctccatgtaagagatcctgaaccatgccattcactcgcatctttcaaacccgagctctactttgatcctttgcggtatttaagagtcaaggatgtacaatttttatagtaaaatgtcatgctcacccccctgcccctcaatgccacagaaaatacatacttgcaagttagaaggtttgtgaaaaccacaaccacaggctaacttgacagtgaagaagctgaagatacgaactcagggggccaaccgaacaattttccaaactcgttttccgtcggtctcttgaggggaatattccaacctgtcatgtaaacgggatggctgtccttgccaaaactcgaaacgttctggtttaagtctatatcctccccagtatttaggctttggaattaaactctccttggagtatttttcttctagttctttgtattgctggtgcagtacatggcatccaggaactacagtactctgcttgcttacgattgctc

SEQ ID NO: 3018 - DNA, 568 bp, Gossypium hirsutum
  unsure (1)..(568): unsure at all n locations; Clone ID: LIB3825-021-Q1-N6-B7
aactgtgaaaacagattcaaatataggnggaagtttttactgtatctttatctgcctcttatcatcagagatgtttgaggtgattatgtacaacaaaagacatgaacatccatttacatgatcacgtccccccatactataacaaccatctttcccaccatcccatattccaaaagtccagtgaaactatacaaaaacgatcagaaaaccctttcttgatattcccctccttcaatcctgggcgtccatcactgtatccttctcttcaaacttcactcccaccaagaacctcatgctcacctgttgtcaggaaaacataattttagcggggttccaaacagttttcactgataaaaaagaatctcccgagacacacctgtctgggatcatagactgtgtattcattatattcgagagggctatcctggtgttctgaggggatcaaactgccacaagggactttgatatcatctttccaatctatatattctgattcatctggtttctttctccccagtcccttcacacacactttcttctcttccaatggcttattatcctccggcgg

SEQ ID NO: 3019 - DNA, 433 bp, Gossypium hirsutum
  Clone ID: LIB3825-021-Q1-N6-B8
tcgcgatctagaaaccggacgcgtgggttttgatacaactgtccgcatttgggatgctgcacaagtataacttcttgctctttccttttttttatttgtgtaattctctcttattggcccagtttgcatgtttctattttatcggtcttcaggtttttacatagactgacactttgccatcgttgtctatgctgaattaatgctcacaccattaaacgtgacactatttccagaaagacaataagcaaacttcttatcattataaaaaagatttaggattctactttgttgaaactttgatgaatacggttcacattccatgtacttatattaattgtttgcagccaagttattccatctggaaatataccgggcatacggcacaagttatgtcccttgatttccaccctaagaagaatgaacttttctgctc

SEQ ID NO: 3020 - DNA, 537 bp, Gossypium hirsutum
  Clone ID: LIB3825-021-Q1-N6-B9
cacaaaaacaaaccgtaaacataatgataattgtaacaaaatttttctacagaattgagcaaccatactcccaaatggctataaatagaaaactgaatctagatttcttcacaacagttagatgccaaaaagattgctagtttttttaaaatatgaaacattttcctctcttaactatctcatctgtaagtatcatatctgtccagctcttgactctttgattttctgtaaattggattttatcctctgggctcagtcggaggcacagattattaaaacatataatcaatggctcttccgttctgtcaaatagtaatcacccactgtcaaaaaaacatgttctcccagcttcacttccactggggccaagttctaaatgcaatcaacctttatcttgccacgtccaagctgaaactccgacttcaaacaggaatggtcccttgacaaaaggtaaatctgcaggccttgtgcaaatttaaaatttcctgcatataaggcgagaatagaatttgccttgaaaacagggctggtctgacc

SEQ ID NO: 3021 - DNA, 568 bp, Gossypium hirsutum
  Clone ID: LIB3825-021-Q1-N6-C1
cattcaacaacaagattatcccataaaattcgttttattaattaaaaattacaatattaatttttatgttaacgtttagggtaattattctatacattgctagcagaataaaaaaaaaaaaactctacaagaaggtataagatattaccattgtccataacattttgaaataaaaaaatatatattcattgagtagttatgtaacaataaaaataatgttaaaaatattcaataggatttttcttaaaaacatcatcttaactcgtcataataagataaatttttttgttggagtagtgttcttaaaaaaaattagcgctaacatttttattgaaataattaacaatattaattatttaggctaactaatgacattataaaagtagagaaactaaattaaataaaaataaataaagtatatagattaaacttaagttttagtataatataggtgtcaaaactgaaatttgacctttatcttataattaaaaaaaaaaccaaaaggctaaccaaaaacacgtgtcaagtggtaaaactgtaatgacattacgtttatttatagtagtat

SEQ ID NO: 3022 - DNA, 565 bp, Gossypium hirsutum
  Clone ID: LIB3825-021-Q1-N6-C10
gaaaaaagaaatagtttttggataatttccccactaagttggtaagaccgttaaaaagaatagtatagatatagatacaccaagaaatggaattcatattattcatacaagttttacatgcctgacaataaatgcattatttgttgatcgaaattcttgaatctaaatcatagaagttgaaccgcagcgatggtgggaattttctctcgcaatttttgagtaacagccactctaacagtcatgacccctgctgcaggacccgtgattctaactttcactattggctcctcaatggcaactaattcaagagatccacccgctgcccccaccaggtagggcctaatctcttcaagtaccttctcaatattttcttcattcagctcaaggccagtttcttcatcagttataggctccactgcaacaatttcaggtatcttttccattaaacgtttctcaatacccatcttcattgtcgtaacagaactcggacatgagccacatgctccttggagcttcaaccgcacaacattaccatcaatctcatgtaatgccacattccccccat

SEQ ID NO: 3023 - DNA, 515 bp, Gossypium hirsutum
  Clone ID: LIB3825-021-Q1-N6-C11
agacctcaatccaagtatgttttctttttttttttcacccctgcaaccagaggctatcaaagccctccaaaaattttcttttatgttttttcgaaaataaaaatcgaaattccccagatttaaacaccaacatcaccaataacaaatagtaaaagaaaatccaacatccccatttgtaaaaaggaaaagaacaaaggaaaacaattcggtaaatttgctgtacgaaaaatcgggattcatcgtagcaaagttcaaaaaccagtaccttcaagagaggcaaataataacccatggggtcaaaatcattctctattctttatcttccaggaatttttagcaaggaaaacgtacatcaacagattttgcttcgtttcaattacttgctggcccaccatgagcaccggggggtgatccctcattgttgaatagctgaaactgattactgaagtccccatatgatggtctaccagcatcagaatcttcagggttacttgcaccactctggtttgcagttc

SEQ ID NO: 3024 - DNA, 560 bp, Gossypium hirsutum
  Clone ID: LIB3825-021-Q1-N6-C2
gatgataaatagaattgtttattgtcattcatcactatgctttcttgtatcttgacataattatttgggcagctacacaaataatgtaaaaaaacctatttcctcccaaataacactcaggattacaagctaacataattgtgtatattctctacatggtgcataacacaatgtagcaacttaagtatctttttgagggttgttgatcggaactcttcagtccctctgtctgaaccaacttcaccatcagttcgagattttaacctttgctttttagttttaccttgaaatacttgacctgttgatgttggtttattcagcactggatgtactgtttcctttgataccaccaacccagtactgtttaactgcaactagaattttctctggcacaaggggaccatcctcgtgatcattcatcttggtgtcccatctcatgcctccagcaattttcctaaccttgtttaggacatcgacatcatcccggaatatcacagccccttcaggccgtaaaatgcgatccatttccagaaggatgtcttcaaagctacacttatctt

SEQ ID NO: 3025 - DNA, 556 bp, Gossypium hirsutum
  Clone ID: LIB3825-021-Q1-N6-C3
aaaaaaagagcactgataacatcaatatccataacttccagagtgcaattcaatttggaactttagggtcagatatataatcaaaacaaagcagttctggtcctaccaaagagtttaatccaaattcaactccatttaactactactaccaccttagtttcttgacttaccaccttttccacggcctcgtccgcctcctttcccaccacgtcctctccaactgccaccgccacccgatgccctgtttgaattgctctttcccttcaaatcttcaggcaagggaaggatatgatcaatacacttgcggaagctaaaatcatccatagtttcatcatccctaatcacaaagaaacatttactcttccactggggatgattacggatttggaaagctttgacccctccaccaatctttctctcaggctctagatgaccttttttaagcaagtccagcaataccatatgttcatacttgttaaagttcagttgagtaccccaatgataaagcaaatagcaaaagtaatccaacatctccgaagacgacccgaactccttc

SEQ ID NO: 3026 - DNA, 473 bp, Gossypium hirsutum
  Clone ID: LIB3825-021-Q1-N6-C6
gaacaatatcaggtgatgatttcaaacttatttggcaacatccaaatatcaagttgatagtttgcagtttcttgtatttaaaaaatatgcccaaaagctatcctttgagacgaatacaacccatatttattcatcaaaaacaaaagtcaaacatccgtcccacagcttgcaaagtcaaaagattactactcagccttggttggttgccatgattggtaccttgtccagtctctctgacccggattaagtgcatgtcctttagaatggtagataaactcattccccttaccagataagttctccttgtgctccaccccgtacctcttgggttttagcatcaaaagctcatcaccggtatggtcagttatgaagtgaagccaaccatgccattctggtggtacctgagaagcatcataacgatcctttttcgcatattcaacccacctgtgtcttccagcttgtgtgtctccgag

SEQ ID NO: 3027 - DNA, 464 bp, Gossypium hirsutum
  Clone ID: LIB3825-021-Q1-N6-C7
gacatatgaacttgcatttataacacagagatataaattagagacacttgtttcttaagtcgtctgcaataacagtctcttaatttatttgactttgcatccctaaaataaagaaaaaaaaaaagaaaaaaagaagaagaaagaaacatcatcaggatatccaaagtccagtcctgtaattagtaggggactatgatggattcaatgagctcttgaagtggagctagctctttcttgtcaatcagcccaaactcacaagtaaaaagtatgaaatgcttaaagcatgtgttcaaatgggcttcctccttaaggctcacaattttctgaaagtgagagtgatagatgtgggcatatactcggaacagtcttttgaatattgtcttcactacatctttgaagtttggaggaaatggtgcaccccagttttgaggaaatattgattcatcatcaagttgtgtttcgat

SEQ ID NO: 3028 - DNA, 550 bp, Gossypium hirsutum
  Clone ID: LIB3825-021-Q1-N6-C8
ctaaagcgattaagacagatcatctctataaagttaaaaagttcaaacaactcattttgacatataaaatggtaataatcttcttgaggttttgctaagcataacagctacacaattgtggttacaaaaaaataacccaccgcttacgaaaacgaatcatttcgagatcaacatcagttgcactgctaacgaaatctacttccattatggggctgaagaaacacagaagttttgacacttattatatagctgagataattttatgaaagataatagccagaacgtatgaatactactcttttcaggggtaacatgatctgtgacttattacattgctttattaaattttccaacccgatttaggatatttttaacaagaaaactagggtatcctatcgggcatccttagataagaggctgttagtttcaacttttcgggcattgcacagctcatcaacacaatcacccctttcgaagaccgctgccgcccccattcctgtgcctatgcacatcgagaccactccgaatcggcagtctttgccacggcgct

SEQ ID NO: 3029 - DNA, 540 bp, Gossypium hirsutum
  Clone ID: LIB3825-021-Q1-N6-D10
aaatgaaaaatctcaataaagatcatttaaggatggcaagcattgtcagcatagaagattcaaacagcatgcttatgttttaactttattactagccataatcagcactagaaactaaacaatcaactttgaagtcactcatacagtgctgatacaaacctaaacttaaatcatctagacaactaacgtggagaaatacttccggatacatactaacccagccaccttcaaatcagtcacctagaatagtccaaactttggctcctgctcctactaaagctccggctaggactccttgagccatagggtgagctcgagtaagaccgttctctatatctcttatctccaggagaaattgaccttgagtaacgtcttttcctaggagaaggagaataatagtatggactgcgggagtaacttcgagcatatcttggtgatcgagaataacttggtggagagcgccttctgcgttctcttgccctcatttctgaaggtttcttcctgttttcctcagcaaatacaacagtaagttctcttcca

SEQ ID NO: 3030 - DNA, 508 bp, Gossypium hirsutum
  Clone ID: LIB3825-021-Q1-N6-D11
ggggggaaagcctttttttatcatcccttcaaatttcgttcttttgactggttacagcccaaatacaacccaggggtttccaaagggaaaatccaaaataaaattttttttttatcaaagggaaatttccgaaattttaaaccccttcgggtttacccattgaatatagcccttttatgggggaaagcattcaatcccccatgggtttaaaaaacaaaacctgtttttagttttagcccaacaaaggcagggaatagttggctgggatttttatttatagggtttttggcttttaaaaagggattttaaccgccttccaaacgggttagaaaaataggcatctacagttgcagctctgttaggggaataacattatacagccaagtccaaaagttgctttgctgcaagggtaaaaaataaacccctggaatcggctttattcgaactatttcacagtaggaatggcctttaagggccactcgggcactgagttcccatttccaccaac

SEQ ID NO: 3031 - DNA, 566 bp, Gossypium hirsutum
  Clone ID: LIB3825-021-Q1-N6-D12
caagtagaacatctaacatgttgtacataaaatagtcaaataatgatgttttgaaaatcgtaaatacaaaatttctaacaaaactattgtaagaaaataataccattgtcgtatattggtttttaatttgaagcaaaaatgacccctttttgcttccatatgacaaaaatctataatgcctcgtcttctaagcaaaaaaatattaccttatcttgaactatgatgtgatgatatgcctgcatctggctttttggcgattatggcgacgttcctcggggatattgctggatcgaaaataggtaacattactgattctaacacatcaccttgttcctggagaaacaataatctatccagaagactaagagtttccaagagaggcccaaaagcagcacgaagtgaccagtaaatcccaataaggctgacatagggttcaactcccttccaaatgccatggaaatttatattgtcggaaggcttaagcccgagacgacataatccagactggcaaaatttctcgaaaagtgaatacttatcggtagacgtagtcctttcacatgtactac

SEQ ID NO: 3032 - DNA, 548 bp, Gossypium hirsutum
  Clone ID: LIB3825-021-Q1-N6-D2
aaaagtggtaatttagttaattttctgctttagcttaaagttcagcacactacactctttatgcgaaaaactaccgactattaagaaaaagatttgaactcaaaaccaaaacaaaatacaaaggcacccaaacatctgcaaaacattatggctctgctctgctacggtgatcacatgcggtggcaagtttctactgtgatctaaccctgtgattcaacaacatctcccggagctccgccgcatcgatctcagccccacaattctccggccggtaataccccgtaacagggtcaggcgcccaagctgaagaataagcccttgtctccgacgacgacgactctttcatcgcatctcttcgttccactttccccatcgccccaggcctaccaaagctagccgtcactgccgccggcggtgcacccgagtaacctctccttgatatggagacataaagaccatcaaaaatagaagcaccaaggagcttaaaggaagaaacagagcgagccatatttatttttacttgcttatatatggagttgtagggtaaa

SEQ ID NO: 3033 - DNA, 96 bp, Gossypium hirsutum
  Clone ID: LIB3825-021-Q1-N6-D3
tcgcgatctagaacgtagcggacgcgtggccggacaccggcagataccgggaccggcacgcgcacgagctccacctatacctatacggagtagagc

SEQ ID NO: 3034 - DNA, 543 bp, Gossypium hirsutum
  Clone ID: LIB3825-021-Q1-N6-D4
aaggagaacaaaagttttgacttcatcaatatttcataagtagataaaaagaagacatattagatctcttaaaaaaaagccttacaaattgaaattaacttggtttgcaatatgaaaatatttaaaaacaataatcagatcagcaatctttttaaacccaatcacacataaaatatatacactttgaagatcatatatatatatatatcttcttcctctacatcaagagctcattaacccacccgaggtcaagatcatgatccaaaacgacaccgtttccattgtttttctcatcatcaccaccaccattgaaatattcaccagaaccagaaggacttaccattgaaggagctcctttgaatgaaacatcaagccatggaatgtttgtatttggagtagtagccattggtgaaggtacttcggacaaagtcatggttcctaaacaactcatgacttccttcaacaaaacatcatcgtaactggttgtcatttcggttccaaatttactaatacgatcaccgccgtaccttggtgttcgttgct

SEQ ID NO: 3035 - DNA, 568 bp, Gossypium hirsutum
  unsure (1)..(568): unsure at all n locations; Clone ID: LIB3825-021-Q1-N6-D5
aaaaagtagagtatattttatttagagtaaaaaaacaagcatgattaagacataaaaaggaaacatacatgngaattgaagcaaaacccacatcattcaaccacacatgcacgctaacaacataatacaaccccccccccccaaaaacaaaaaacaaaaaacctacattcttttttattcccaaaagccctgttatcatcttcaagtccttccaacttgaccttcatgtgccttgttctcaatcttctgcccaacttcctttgtcttttgccccacatactctgccatgtcctgtacccttctctttgcatggtctaaatctagctgctccgtccctgttgcgtacctcagcctgttaagcacgtaactcaacgacgacaaccctgttaacccaaacgcccccgacgacaagaaccccgtcactgccatggcaatggcaatggcagctgggacaagaactgggctgaagatgatgaacagcggtgtggctagcatcagcccaatgacggtgccggccagtgttaacccggctaatgcaagcagtgtaccaccaatgggggagaagtgt

SEQ ID NO: 3036 - DNA, 531 bp, Gossypium hirsutum
  Clone ID: LIB3825-021-Q1-N6-D6
gggcaagaaaaaaacacaagggctagtaattgaatatttattacatatcatcacacttcacaaaagatcaaaagcataaattcatgggaaaccatgcattttattaattattacacaacaacatcatccaaattattcatggctagctcttcaatggctgggatgaccaggcaatatttcctttatcttctccatcatactcttcttctcatgttgatcatggggggggtagggctcctcaggcggcggcgttgttgcgttgctggttgttgggattctggttttggcaacgtaggttacggtttgtgattgccccttttcccccccctccgttttatgctttccacccgttagtttctcctttattttctcctttagccctttcttcttccttctaccgcccatcccatcgtcctcagactaaaaaaaaacgcagttattttatatataatcaaaatacagccaaaaccctgaactggcatcatcaatataaataattttatagatgatatgagggggttttcttcaccg

SEQ ID NO: 3037 - DNA, 531 bp, Gossypium hirsutum
  Clone ID: LIB3825-021-Q1-N6-D7
ctctattccttccacccactcggatcaaagaactcagtaaacccaatttttacggccgtctaaactgctggaattctatctatccaatcaacactcttccttcctttctctagctgaaggtcaacgcttctccgagatttctcgtggtattccacgcttcgacgtgatctctccatcctttccatctggtctagtgatgttctaagcttttcaagcttgtcaatgttattgaatttgttgtgctcctgaactttcagcttttcaggcctatcgatgcttttccttggtttttcccgggtatcggtgcttttccttggcttgtcccgggtatcggtgcttttccttggtttctccctgcggtcgatacttcttctcggagcctcgaaatattcagtactttgcctagactgttcgataccatctgtacttttccgagaagcatttcttcgagaaggtgacttctcaactgttgagatgaatttcttgagatgcctaatataatccgggtacagttccaaatcacagtgattt

SEQ ID NO: 3038 - DNA, 528 bp, Gossypium hirsutum
  Clone ID: LIB3825-021-Q1-N6-D8
gaaataaacaaaataaagctatccccaaaatataagtagctgtacacataatgaaacctattatctatccatatatgtctaaggctagatttcatttgaagatctctcagatccccagcccgagtctcctacaccatcccatccatccaaaatctttatcccaactctgtgtgtgtgtgccaagtgccaaccactaacatttcatttcatttcacttctccctaacactgtcattaaataatacagtaacattctctagtctagactctaaagttagtcatacatttatttccatatatatgtgtttgtttacatagagtcagatagatgcccactgttacctttcttctctgcactttgcatttgcctactgcactggcttcttaaaacctgatttcccaactttaagcttccacttacaaaggggctcatcatcagaaatcccggaatccacatctactgaagatgacatcaatcctttcgaggatttctttgaaactcgagatttggtctcaatttggtcacttt

SEQ ID NO: 3039 - DNA, 559 bp, Gossypium hirsutum
  Clone ID: LIB3825-021-Q1-N6-D9
aaacaaataatataataaatatcaatagataaaataaatttcgtattattcttacaaaaatgttaaaagttaaaatgataattaaaagtcaaaatcgaagtatatttacacgatagtctaagacggcggctgttgcgactgctgaaacatcttcatcatactctgaagctgctactggagttcatcgaacttttgacgctgctctgcttccctcgctacagcctctgcttccctcgctgccgcctgtacttctctcgctgtcgcctctgcttctcttgctgccgcatctgctttaagctgctactggagttattcatactttcgttgaacctcagcttctctcgctgctgcatctgctttcagttgtagctggagttttttatatcttttttgaacctcaacttctctcgatgttgcctccgctttaagttgtgtaatttgatcaattgttgtcgcttgcatctgagccatctggtctcttaacctctgaacttcaacttcggctcgactccccgaaggcatatattgttgcgagctagatccaaaatattgggatggg

SEQ ID NO: 3040 - DNA, 429 bp, Gossypium hirsutum
  Clone ID: LIB3825-021-Q1-N6-E1
ggggttggggggggggggggggaccggggaaggggggggaaggggcgaaggggaaaaagggggaaaaaaaaggggggggaaaaaaaggggaaaaaaaaaagggggaaaaaaatagcgggggaaaaaagggaaaaaaaaaaagaggcaaaaaaaaaaaagggaaaaagaaaaaaaggaaaaaaagggggggaaaaaaaaaaaaaaaaagggggaaaaaggaagggggcaaaaagggaaaaaaaggggggggaaaaaaaggagggaaaggggaaaaaaaaaaagaaaggcccccggggaaaagggggcaaggcaaaggccccccaaaaaggggaaatttttaaaaagggaaagggccaaaaaggcctgccccaaaaaaaggggacaaaaaaaacccccggaagggccccaacggggaaaacccccgggggg

SEQ ID NO: 3041 - DNA, 554 bp, Gossypium hirsutum
  Clone ID: LIB3825-021-Q1-N6-E10
acgccgaggcggcgcgtgctgaatcccacgatcgaggcgacgacgtctccacgggcgtatcaaaggcccgggcttgggccgccgccacgacccgcgtcggtccacgccccgagccgatcggcggaccggctctcgccgttccacatccgaccggggcgcatcgccggcccccatccgcttccctcccgacaatttcaagcactctttgactctcttttcaaagtccttttcatctttccctcgcggtacttgttcgctatcggtctctcgcccgtatttagccttggacggaatttaccgcccgattagggctgcattcccaaacaacccgactcgtagacagcgcctcttggtgcgacagggtccgggcacgacggggctctcaccctctccggcgcccctttccaggggacttgggcccggtccgtcgctgaggacgcttctccagactacaattcggacgccgatggcgaccgattctcaagctgggcttttcccggttcgctcgccgttactaggggaatcctggtaagtttcttttcctccgcttattg

SEQ ID NO: 3042 - DNA, 534 bp, Gossypium hirsutum
  unsure (1)..(534): unsure at all n locations; Clone ID: LIB3825-021-Q1-N6-E11
aaaccagtaaaataccagctcgaccttatgtattatggcaaaattaataatctgtgcataagttgcatgtaatatcccatgcaatgaactagtggctgacatgcacaaagtcatgcacagtcaacttcaaaccccaacaattctactttcaggagtttttttttttttgggggggggnggggggcacaagataatcaaatactacaatttttggaaggaattatgagtgttcaataacagggcttgacttgggggtaatgaggctgcttgaaatgattgcatgcccatatgataagaaaaagccttaaattaagcatgttttggagtgaaatgtgaattcctggattaaaaggccgacaaacagccactaggaaaatccattaacaacacttacttcaagggggcctttttactatcctttagctattacgtcaactacaaaaatgctacccgaatcacaccatccaccaagtatatccctgttagagcactgcagcaaaaatcgacaaaaaaaccagttaaatgacttctgtt

SEQ ID NO: 3043 - DNA, 561 bp, Gossypium hirsutum
  Clone ID: LIB3825-021-Q1-N6-E3
attcatgtatgagtaattttatcattattagttttgaaaagaagggatgtaacataggcgagattgccccaataaataacactacaccgtaagaaccaaaatgctaaaccttttctgtccttcacactttattattgcaatcttagttatagagctcaggagcaaggcgaggtgagaccaatgcttcaagcggggtagatttaatgttggtcaatccaactgtgccagtcaagtcaatcaaaccattggatggtgttgagaaatcaaaggcgtgcaagaaattagacatggtcaagtatagcatatggagtgcaaacgatgttccaggacaactcctcctaccactgccaaaaggcatcagttcaaaatgctggcccctaacatccacatctttgtgggttgtgagaaacctctcgggcttaaactctgatggttctggccattttttaggatccctttggatcttatgaaggtttatgatcagtcgggtgcctttggggatgtcatagcctccaatagaacaactttcactgagctcacgaggtgctgacaaaggtgcaa

SEQ ID NO: 3044 - DNA, 556 bp, Gossypium hirsutum
  Clone ID: LIB3825-021-Q1-N6-E4
atgaacaaaatagcaaatcaagatgtttttttcatttttattccacaaagctagaaacatccataaccataaccatctcttcggcacacagaaaaacctgttacaaacgagggaagataccagttgcacacattcatatagattttacagtatttgccacgttgcacatgcacagagcttgtaaagcagatcaactagaaggaaaccttaatacccagcaaatccattaattgagaaatgaactcagggtgtcctggccaagctgctccggtaaccaaatttccatgagtgaagcatcgatctataggctcaggttctaaccaagttgctccggccaacaccacgttcagtttcacagctgggtatgcggtacatttcttccccttgagaacaccagcagcagctaaaatctgctgtccatggcaaatggatgcaaccggtttctcggactccataaaatgcttcgctatatcaatcactttcccatctaacgctaaatattctggtgctcgacccccagggatgacaagagcatcataacttgaggcatctatgt

SEQ ID NO: 3045 - DNA, 548 bp, Gossypium hirsutum
  unsure (1)..(548): unsure at all n locations; Clone ID: LIB3825-021-Q1-N6-E5
gaaaacgaaaagcaaatgaccaggaatttatttgaatacagagagctgcttacaagttacaatatacaaccacatagagcagcacaaggacataagcatagaagcagaacagagcaacaaaattgatagattactttctagcatatcagccgactgctacaacaggaaacttcaacccacagtcttgtttccaccttcttgtgtcctactcttgccaccttcttgtgtcttactcttgccaccttcttgtgtcgtactcttgccaccttcctgttctctgcctccctcagagatccttcctcctccttggctcctattctggatcttctgctccatactcactgccgtgtccggcaagggccacttcactgggtctagcccctgagacatagagctcctgcttccacgaatataattagcaatccacgacagcgatgacagtccagtgatcccaaatgctccggaggtcaagaatccggctatggaacccgcaatgagaagagcagcaggtaccaaaacagggctngaaaatcaggaaaagtggggcg

SEQ ID NO: 3046 - DNA, 563 bp, Gossypium hirsutum
  Clone ID: LIB3825-021-Q1-N6-E6
caagtaaataatgatattccattgcataaaaagtagttgggatggatcatgacattcacatagatacagctagagtcaagaggccatgaatttataaacctataaaatcccatttaatcacttctcatactagtagtatattagcgctcttgattctccgcccatcctaatataacaattttcttcagcctctgcacataccaccttcaccatcattaaacaaccaatctttcattcatatatataactaagaaccctaagccaacgatgaatctgatctgaatcgtagatctaccctcgttatccttttagaacagctccatcaactgctgtgaaacatcttggagaatagctggagttgtttgaaattctagccagatatcatggtaagaagcaagatcgaaatttagaaacttggctgcgagataagcagctccggcagcaatatggtggggcttaaattgaagccacaatgagctcctaagcctacaaaagagaatccacatacattattaaaataaatgagtgatgggagttacaacaagacagtgatcaccgtttta

SEQ ID NO: 3047 - DNA, 551 bp, Gossypium hirsutum
  Clone ID: LIB3825-021-Q1-N6-E8
gacataaagaatttcaatgcaattacactttgtcaaccaaacacgttaaagaaattacaattcattgtaattacaatctcattcaattactctattctacccaaaaataccctatatgtttatgttataagaacaatgcaaggctgcaggagagcaaccagcttttgcattgctgtactacaaaataaactttggacccgatagatctatgaaccaaccattgcaataactccacggaagagcttccagttctgaaccaataagctaatgttagtatagggatggctgctccttgcactctggccatgctcagttcaaggatatcagtacattgaatgcggatgcggctctccaatccccaacttttttcctcaactttttctcaaaacttacaaagtttcaggctcacttctctcatctttgtagcctgatgcctttccacttcttccaattaaatatggctccggtgaggagctgttggcttgtgtttcaagaccatgataagatcgtgaaacgaaaaattcagctcccgatttcgctattcctttgac

SEQ ID NO: 3048 - DNA, 544 bp, Gossypium hirsutum
  Clone ID: LIB3825-021-Q1-N6-E9
gcaattgagtaccaattcatcacttaccatgaatgaaaattgttaaaaaataacaaacagtcctgaaacttgaacaagtttcatagtagacatccactcaagatgtggctttgagttttgttttctgttttttagcatccaatgaagccaagcctttgcctaatccaacaggtgctgcttctccttccttggatgttgttgactcatcttttttggaatcaactgctccatttggattatgatgcccatttgcttcttccctcttctccccagaagcttctccgccatctcctgcctttggagtcgcccccatgttgatcatgttaagaagctgagttaatgggggcacagcttgaactggtattccatgtgagcgagtcacaagaccccttgcagcagccttcttccttacttctgccgccgctcgagctgctctttcatcgaatcctcgtccacgaggtagagtctcaccaatcattgccgcattaagagacttgttgaaagatgcactagaactcccagatcctccagctgcagcagcagc

SEQ ID NO: 3049 - DNA, 564 bp, Gossypium hirsutum
  Clone ID: LIB3825-021-Q1-N6-F1
gagatgaatacctatgtgaattctcattgatttttgctaaaattttagtcccaatacaatgaaacagcaaaatggctgaccatttttataatatatataaaactatgtttaatatgtatatatacaacaaaaaatggatcaaaatagacaattgccaaaagttagatagcagccaaaaaggtgaaagaagttggactgactgtagtttttatggaacaaaacttacaacactgtttgcatcgtcttggaagatctgagatgaatgtctctgaaactagaagaggcgaaaagtagtgcaattagactcaacacttcaactcgaaataatttcgttgctgactttgcgttgacgcctagaatcggacctcttatctcttccacgtcttggtaagatgttccggaatggagcttttagaataatattttcacctgaaatttcaactgcaaatttcccaggtggtttgttggccgaacgtagcggttgaggtggagggtaaacagtcggtggagccatatgcgctagaacatccttatggtatttctgaacgacaaagttacgccttt

SEQ ID NO: 3050 - DNA, 75 bp, Gossypium hirsutum
  Clone ID: LIB3825-021-Q1-N6-F10
aaaaagaatttttggcccttttttcatgttttgggataccagtcctttgaaaaaaaaattggccttgaaggccat

SEQ ID NO: 3051 - DNA, 537 bp, Gossypium hirsutum
  Clone ID: LIB3825-021-Q1-N6-F11
attgattggccagacatcacatcaaaacttaaatctctattttaattggtcaacgttgcgcgatctgcacggttaatcagtttcccacttacaatattctaatataaaaacaataaaataaaatcacaattaagtccaccaaaatctgggaaagctccataaatctcgatccatgtcgaggctgaagtattagacacttgtcgccaccacagagttaaagcctccccgtttcgcttcaaagagtaagtaacatcacaatctctctcgagtttcaacatttattttaaaatttttattttaattgaattttttgggggtttatcaaaaaaaaaaagtctctttccttgcttcattccttgctctctcactctcttttttgtctgctgttctattttattgtcattttctcttctttttttttttcttgaaatgggttaaggaatatattttgtacttggtgtttcgtttagctgattatatatctgttctataacgagaggaatttctttttaagttgatgtttacatgcttttgata

SEQ ID NO: 3052 - DNA, 502 bp, Gossypium hirsutum
  Clone ID: LIB3825-021-Q1-N6-F12
ggggggaaattttaaaggaaaaataaaaatttaaaaccaaaaccaaaataaataaaccatagggaaaaacagacgggttgggggaacccccctagggctttccccatggggggggaaaaaaaaaaacaaggcattaaatgggggaacccgcccagggcctttttaacaggggaaaaacccattaaatgggggggtaaaacagggggattccatcccaagggggaaaaaaaaattttccttttccttttccccttaaatttagagaagggaaaaaccgggggcccaaccccaggagggtaaaatttttcggtaaaaaaaacacagctttagccccacccaaagggcctttaaattctaatttaaaaatcgggttaaaaaaagggggggaattcccccccggggggggggggggccctaaaacaggggcctttaaaacgggaaaaggaaaaagcaagcccccccacttgaaaatcggaagggggggcttcccaaccactggggc

SEQ ID NO: 3053 - DNA, 551 bp, Gossypium hirsutum
  Clone ID: LIB3825-021-Q1-N6-F3
aagggaaaaataaaatagtatattacagggatagattttgaacacgcagtgggtctatgtggcaattgcagcatttccacacaaattaaatgttttctatttcactttaatgtatcgatgaaatttagtagcatcaatgcttcttccatgtcagagacgaaagttgcagaaaattttttcattttaacttcattgaagcaaatgaagttgccaagtccatggcctccttaacatgtgaaccatccgttccctgtcctgtagcaagaccgcccttgcctttgccacacctcccctttagaggccctacggcatttgtcaaccactctgatacttccaatagcttgctctgttcaaatttctcgggtacaccagcataaacgacagccttgtttgtggtttcgtcaatactgaaaaccataaccggcatacccttttgttgaataacttttgaaaccgcttcgcggagagcagctgcatctaaaccaacatcaatacgagtgacacagaaagtctttccctctttggcagcaacttcagccaattcggttgct

SEQ ID NO: 3054 - DNA, 562 bp, Gossypium hirsutum
  Clone ID: LIB3825-021-Q1-N6-F4
aaaaaaaaaaaaacaaaatactaatattacacatttcacaaacgtagcacacttcaaagttcaaaaataaaagacatagaattcacaaatacaacatcacggtagaaagtaaataattcacacaactacaaactttcagtggttaatgagcatgatgaccaggtagtttttcctttatcttctctatcacactcttcttctcgtggtgctggccaggcgggggatcagtcgtggtggttgtggttgacgcggtggttttgacagccgaagttttggtctgagattgatcctccttctttccacttgttagcttctcctttactttctctttcagccctttcttccttctaccgcccatcccatcatcctccgactaaatccaaatccataaataaataattttaaaaatttattcaagacatttttttttaaaacttcattaacaaagaaattttctttaagtaactttaaaaattataaatataacataaaattttaaacatataaatatgtaattattaatagcaaaaacacttcaaaccaacttttgattttgataata

SEQ ID NO: 3055 - DNA, 547 bp, Gossypium hirsutum
  Clone ID: LIB3825-021-Q1-N6-F5
aacaaagtcgagcaaatttgtagtcatatttaattaaaccactacttaagttcacaaaccaattatttataaggttctattgaaactacaaggacaacatcattcatcaaaatatacatcaactaaagcactacccttcacgatgaagaatcagacctgggcgtcgctgatcttgaaaacgatctggatgacgggcttgcacttctacttctagagtggctgtgaggggtagttttcttacgtggtgtaatgctcccccttgacctcctctctacaggtgatgcactgcgcgagtaactccgtcttgagctgctcctttgcttggggctcaaactacgtgagaagctcctcctagaacttttccttgaccgagatggtgtagcacttccagaagcagagcggtaacgataacttctacagtcagttgaatcataggaccggtcatgtcttctatagtatcgatcatcaggtgagtaggaacagtcccgccttctgtagtatcgatcgtcaggtgagtaggaacgatcccgccttctatagtatcgtt

SEQ ID NO: 3056 - DNA, 569 bp, Gossypium hirsutum
  Clone ID: LIB3825-021-Q1-N6-F6
cattaggaaaatttataatatatctaaggaaaaaacaaatttacattcagccccctcaaccactaaaatattacaaaactcttttaagtttatttgtttatcaagttgacttgaataccagccccacacctggagccatgttctcctgcgccgcgccttccccgtgccggtgctccccttcgtatgttacaatcaacatcgacggatcatcggtcgctcgctccacgtgtttcctagcgggacaccctctgaccgtactacacttgtaatatccccgtgggtatggtgagcccttgatcggtttttgaccgtacttcctccatgaatattcgtctgccggaatgtcggcgatcttagaactaatggctggaactctgattacttttttcaccctgtttttccttcgctttgagcagtgacacttgccgttgccggagacgttctcggagtgctcatgttcgcggcacctcttcttgaatggagcagaggatagtggtggttttcccgcggaaacggccgccgccggtgtcaaaaatagagatgatccttgcttcccattcgaaacgctg

SEQ ID NO: 3057 - DNA, 567 bp, Gossypium hirsutum
  Clone ID: LIB3825-021-Q1-N6-F7
atcaaaatcaagatttatatgatttcatataaatataaaatatcagacacgaaaaaacaccttgaaccagacacaaattatggtctcagtaggaagagaatacaacactgtttccgacaccacaacaaaaagtaacatattgcacacaagaattaataagggtggtagaagaaaaattaagtgcctaattatacccataatagtactttcatcttaaattaaataaattaaaggaaaaagagaaaatctgatcacacctcgagttgacctctgagcaggctaatgaatctgcaatctaatggcatagagatccaaagggggaacagctccttccatagcttcttgtactaacatttaataattctcatagagatgtttctggtttatgtttctgaatgctatgaaacaaccacttcattggcaatttagggtctagcgttcttcatctaaacacctggggcacctgcatctaaaaccgtaatctgcaagcaatgcttgtctctcttcaaatgaaaggtcctcgtctatgtatgaaatggtcacctcctctccattgcaaataggccg

SEQ ID NO: 3058 - DNA, 550 bp, Gossypium hirsutum
  unsure (1)..(550): unsure at all n locations; Clone ID: LIB3825-021-Q1-N6-F8
gaatgaaaactttcgaataatacattanaaaaccaacactggaaataaaacatcatctacaataccttattggaaccatttcccttaaaanacccacagtgaaaatgacgattatgattatttgcttatttagcaatggcactattttttttttcactcaaaccccatagttctaagatttcatggaagcttcatcaaagcttagaagaaacatcctttggatgatgaatgacaatgtaattataagcatcaagtgtcaaaaactcatccaaagttgaagcagtgcattggcgagtaaaaatcttgcatgcttctttatacattcctttcttaaacttctcttttccgacctcacgttcgatccgagccatttcttcttcaaccactcgcccgaacacatggttcactcgaaccccaagtccatcaccgtctaattcaacaccatatttcaaccactgccagatttgaaccctactgatctcggctgtcgcagcatcttccattaggttataaagcgggaccgaacccgaaccggttaaccaagctgcta

SEQ ID NO: 3059 - DNA, 574 bp, Gossypium hirsutum
  Clone ID: LIB3825-021-Q1-N6-F9
acagaaaaatgaatgttcatgccaaagaaaaaactgaaagaacattggtcgtatcagatgtatctctttgatccaatttatacatatacaaacacactataactacaactacatgtttcagtttattattcagtcagcaggcaaagcaataatttcatttgtgaattctaaaactaaaccccctacacctaacactacagctatcctccaagtagataataatattacatcctttggggaccaatcagcagtccaaatcaccattgtcattgccaaccactgccactgccactgccactttgggttccggcactgccaccctaaccaccagggaaagcttccctacctggagagttttgaactttagcaccggggaaattacccaaaccatcttcccctcttttgttacctgaatcccgttttggagttccattgtatgatgaatcctgcccctcattttgtcctctgctgctgttatatgaacccctacctcgtccccgtccaccatagggccgtggtgcaccacttggatgcccatctcgactactgctatttctgtaatcgtttcggccag

SEQ ID NO: 3060 - DNA, 552 bp, Gossypium hirsutum
  Clone ID: LIB3825-021-Q1-N6-G1
aaatgttaatcgagtctattaagctgagcaatcaagtaataaagggccataaaggaggtttccagcagcatcaacaaagtaataacataattctaactccaactattcatctctagtagcagggtccattcctgttgaagggctatccgcaaaatactcctgctgcttcacattcactccatactgctcattcaaagaacacaaaatcaaataatttctggatatcaatcgaaaatgatgagagaaattaatactctttagctgttgaagacgaaaaacaaaaaggcatgaccaattttttttaaaacatctgaacaagtcacaggaatgcctacctcacgcaatgacttggagaggtcgtccattgtcaagattaggcgtttatccttttgctgcttctcccttttgtccttcacaactgcagcctgtcttgccttgcaatgctgaagtgcatcgtttgcaacctctgcaacgaacttttgagtagcaacagctacaagccttattccggaaccctagaaccatcctaacgaacgataagaacccctattc

SEQ ID NO: 3061 - DNA, 130 bp, Gossypium hirsutum
  Clone ID: LIB3825-021-Q1-N6-G10
ttttttttttttttttttttgtttttttaccaactttaccttcttttttaatattttggggctgtcttgctggataccttcgaagaatcaaggggacatttttatgtataaaatacataattaatccatt

SEQ ID NO: 3062 - DNA, 562 bp, Gossypium hirsutum
  Clone ID: LIB3825-021-Q1-N6-G11
acaaaataaatgaataatttttatggcatcattatgcatattgtaattaaaattgaaacaacaaaatttgtacaacagatctattttgttaaatatattcaataaaaaaaacttaccatacccatgtcagatacataattgtatccaacaatcacacctacacatatatttctattacaataaaaaatatgatgaaatgtgtttggaatttggtgttataatcataagaattacttatacttgaggttcacttccatggtttttaactaatcatcataacatgaacatggaaatgtcaatcaggcaacattacagataaaagaaatattactatctagaacgcacctgattcaacttgcaacgctttccatagtggcaattctacatttgatgagttactcagaaagttgaacaatttcttaagggaggaaagtcttgagagagagagagatggagagagagagagagaagtcttcaattgataaaaacaaatcattccagcacatatatgattctgacttggaccccggatgctttttcagccattcatcaaaaagtcgaa

SEQ ID NO: 3063 - DNA, 553 bp, Gossypium hirsutum
  Clone ID: LIB3825-021-Q1-N6-G12
attctaaaaaatcaaatgagaactattataacttcaaaaatcattaaaaataaatcatgcacttttttttattgtaatagttatcaatatcaattatatataatacaaattttcttttcttaaaacaagaaattgactgaaaaccaaacaaaaattaaaaggtctaaaatcaaatccaaacatgtgcacgtgaaacctctgccattgtggtttgcacgacaatttcaatatctaatcctaaaaaaccagtattatatgctttcattttaaatatctaaatataaatacttaaaactacgaaataaaataaagaatcataaaatagatcttcatagtggagccctccctgtgaaaggcaaactccaccctatggcccaccccatgctgcattggggggaaaaatattaaataaaatgcaggcggagaatatttcgaggaatccaaacacaagtttttattatttgggtttgctggaattttgttcgctttttcttctagcaattaataacaatattagagagaaaaaggtgaagttaacgccaggctgatgcga

SEQ ID NO: 3064 - DNA, 529 bp, Gossypium hirsutum
  Clone ID: LIB3825-021-Q1-N6-G2
agccaatactactaattttcattattgaaaaccaatagaacaagggtggaatgcaaacgtaacgagtaatacacacaagcttttcacatattttaaactacacaaaacagcacataatcgccaaacttcgctctttagtataaggaggcattaccacatgacatagtatcaagtagcataccacctttacatttcatgaacaccttcctcgtcttcatcctcgtattcaagttcatcctcagctgttgcatcctgatattggtgatattcaaaaacaagggcattcatgttgctctcagcctcagtgaattccatttcatccatcccttcaccagtgtaccagtgcaagaaagccttcctcctgaacatagcagggaattgctcactcactcgcctgaacatttcctgaatggaggttgagttgccaacaaaggtagatgccataaacagggcccgaggaggaatatcacaaacactggacttgacattgtttggaatccactcaacgaagtaggatgagttcttgttt

SEQ ID NO: 3065 - DNA, 561 bp, Gossypium hirsutum
  Clone ID: LIB3825-021-Q1-N6-G3
cgaaggttctgatatattggaaattataagcttagattacaaatcttagagaaataacaaggatttccctgcaaacttccctatatatgggaaaccttaaaaatacataaggagaggcatgggactaagccatgactgcattgcatcaaagaaatatttatatgaaactacaccaagcaaatcataaaacttgaaacacattgttggcatgcaaagaggctgatcagaagcagtggaattgattatttattaatggccaccacccattcctggcgaaagggacacttgtttaggtgggttcggcaatgccaatatagccaacaacgcactgacagcagccgctatggaccccagcacaaaagcaggcaagttgccacccccgaatgcatcatccaacggtccactaattactgatacgaacatctgtgggataactatagacaagtttagcactcctagagaaagaccttgaccaccaccagtactagaacagtagatggatgccaaagcgaatggaatactgtatgttaccgcaagtggaatacccaagacaccgaatac

SEQ ID NO: 3066 - DNA, 553 bp, Gossypium hirsutum
  Clone ID: LIB3825-021-Q1-N6-G4
attcaaaatccattggacagccataattgtattatagacattgttataataataacaaaacccttcttagtagtcattctggcccataaatataagcaaactggtaatgaaaacttcaaaatttcacttggatgatgatcttcgtatattacagacaactgaggcaaataagagaacttagaatacaaaaatatgcttcttacctgaagcatgaagatcattccgggaagcactctctaaaccttaaaaataaagaatgaaagtattgcccatgttggagatcagtctatttcttccgtttcttcttttttctgttttctgttttggtctctgttcttgcttctaaacgtttcgactgctgcgaacgaatctctagcaacttcgactttgcatctcggaataaagcatctgatcttgaagccatcaattgctttagatgatccattgctgcaaggttgaaaccaagagtatctttgcattccttaactcgtgcataaataatctcctttagaacagccaacactggtctggcagatggggtactaattaactg

SEQ ID NO: 3067 - DNA, 561 bp, Gossypium hirsutum
  unsure (1)..(561): unsure at all n locations; Clone ID: LIB3825-021-Q1-N6-G5
atagaaaattcattaaatcttgttcatttttttttttgtgcattgagagatattatttcactttcatcaattgagtccaaaagttatgtacagttaaattataaaaatcaaatcgtaaagggagtaaaacttggaattttacctaaaactcgaagccgtcaagatttggacatcgtttctgtgtatcggaccaacacaacaaaaataacaaccggttcggtccgagtcatttcagcttccatgactcgaaaagtttgactagcgcaacacgagaggaacctccctcactcgtcgctacctcggctgcacgtttcatatctaacgttcgctgcctaactgagtcactttctttcgactcaatcaactctttgactcgcttctccacctcagttgaacaaacgaaccctgtttccgactccaccatcggcaatgcgatcttcatttcttctaccatcaacaccctattgagcctttgttctgcataaagtggccaggccaacattgngaacccctgcacgcaccgattccagcaccgagttccagccgcagtgagttatgaat

SEQ ID NO: 3068 - DNA, 563 bp, Gossypium hirsutum
  Clone ID: LIB3825-021-Q1-N6-G6
aaacataaaaaaaaaacacatataccacaaatctaatatattagtatattacccattatttcacaactaggagaaaaagaagaagataaaatcaacatgccacgaaaatcgcaaagacgaaagacttctcgaaaatgaaacacacttaaagtacattttacaagcaagcaaagcaaccttccatggttcatattcatgtcctaccaccctcatgagccttgttttcgatagtctgcccagcttccttagtcttttgtcccacataccccaccatatcttgcatgcccctcttggcccggtccgcgtcgagctgctcggtgccagtcgcctgtctgaagcggttaaatacgtaggagagcgaggacagtcccgtcaacccaaaagccccggacgacaagaaaccggccacagccatgaaaaccgcgatggcagctgggagcagaaccgggctgaagatgacgaagagtggcgttgccacgcataggccgatgacggtgccggtgagggttagcccggctaatgcaaggagagtgccgccgatgggaaggagggtgaggacggtt

SEQ ID NO: 3069 - DNA, 487 bp, Gossypium hirsutum
  Clone ID: LIB3825-021-Q1-N6-G8
agcaatgaagattgggtctttattgacaatatgtacataatacatctcacgaatcaacatcaatgaactaacaatggtcagccacctggacttttgagcaaaagaatccataaatgactttgagctaagcagtaagcacacataaattattacatccttgatctttacaccaccatcctctatgtacatccccccccccccaaaaaaaaaaaaattataccaaaaccaacccctgcaaaacttcaagctgcttttttttttatacctgtaactgaagcagccagaaacagtatatataatatcccaggttgaacaattagtattatttaaagactcgtgtttaccggtcacgaattcgcattgcactcctcaagctacacagagcctctgcagataggctacaacacctcaatcttctttgccgaggagatggttgttccctgtaatcaggttcggagaagcatatgacgatgacggttaaattatc

SEQ ID NO: 3070 - DNA, 573 bp, Gossypium hirsutum
  Clone ID: LIB3825-021-Q1-N6-H10
gacagttaaaagaaccaacaatttataggtataatagaggccacaaattgtttcatgtaatataataataaaaataatggagaagctccacattctgccgtacaaatggcagtatcaagtccaggtttgctggcatagcgattgacttgataaaagacaaaaaaagtactagaatagaaacacacaccatgctttatcaccaggcaatgcctgggtagcaatttatttaatagttataacataagaaaataagccgttttaattataataatactcttcctcctcttcccagaggcaactcagagttgatctaggtgatccacatcccccaatgccgttgaagctctggtaaatgatggaaccgcctgaaccaagctcttcgatgctactctcccggcaatggtatccttcaacagccagcagacaggtctgttcaaatgagtgacaatcaacatccacatgcacggcaacagagaaattacttggtttgaagcaaactaaaaccctttgcaccaactgctccagattcaactctttcagatcatagcccacagcttcgaagcttgcataact

SEQ ID NO: 3071 - DNA, 555 bp, Gossypium hirsutum
  Clone ID: LIB3825-021-Q1-N6-H11
aaaaacaataatcagatcagcaatctttttaaacccaatcacacataaaatatatacactttgaagatcatatatatatatatatcttcttcctctacatcaagagctcattaacccacccgaggtcaagatcatgatccaaaacgacaccgtttccattgtttttctcatcatcaccaccaccattgaaatattcaccagaaccagaaggacttaccattgaaggagctcctttgaatgaaacatcaagccatggaatgtttgtatttggagtagtagccattggtgaaggtacttcggacaaagtcatggttcctaaacaactcatgacttccttcaacaaaacatcatcgtaactggttgtcatttcggttccaaatttactaatacgatcaccgccgtaccttggtgttcgttgctggtgttttaagggagatagaggcggtgacagggatggggatctcgagaattgagataaacccaagagagtacttgttggggacaacgacgacgacgatgtaaccgaccggcaaaacaagcagcaatggttataga

SEQ ID NO: 3072 - DNA, 502 bp, Gossypium hirsutum
  Clone ID: LIB3825-021-Q1-N6-H12
aggcgaaaggaagcatacctgttaaatcctttttgctgcaaaccaaaaaaaataaagccttgcctaaaacgaacaacccaaacaaggaacacaatttattaacccaacaactgctaactgttttgaagttgttacccatcaacatgttgcactaatattacttctttaacatacgtaaaccaaactggccttctgattatcattattagataatgaacaaagcgtgaagcaaaaatttattataccctttttccaccatacactacgtttggcttgtacctactacatttttgaccaaaatcgggtcaagctagcttcaatcgatccgggagggtcgtccgtcggaagatatacatcatcattgaactttacaatgctgccgggatccttgcttgatatattaacaggtaaaaaatggatattcggcatttttagtttaactgatgatatgtcaccaaacctgccaagtacagcctttgccatttgcaaaaaatgctttgaa

SEQ ID NO: 3073 - DNA, 572 bp, Gossypium hirsutum
  Clone ID: LIB3825-021-Q1-N6-H4
agatgattctgcttcattattatatatgagtaaatttttgaacaactttacaacagctcaactttgcgtttagtcacattttgaaggatcagatcaagtgatgtatggtggatgttgaaatactagagagcttatgacaactagtctaatctgtagaactgattcacactttcacttttgctgctgcttctttgatttgttcaatggtgaaaacgccgaagaagtcatcatctcttacagcattgacgactgcataagcaacgtcatctacgctaactggtggaaccaagatcagatcagatgctggaagagcatttaaaggcttggtaaagttctccacagcactaaggattctttccagtggttccccaaccagatcaagtggaagctcaaaaccatccactcgcctctttccatatataaaccctggtcttaggacaacacccgagtttggatatttggatagtacttctgattcagctttcctctttcctgtgaagtatccagatgatagtaaaaatgatggtaggttgtaatcatgcactgagattaagataaactttggaatccca

SEQ ID NO: 3074 - DNA, 525 bp, Gossypium hirsutum
  Clone ID: LIB3825-021-Q1-N6-H6
aagtacatgttcagtctaatatccttgcccatagtacctaaaaaggcaaaaaaaaaaaaactggagagaaaaggggaaacaataataatgtctaaactccatatggatttacttatgttcatccaccgtcatcatcatgctttcctgcaaatttttttttaccgtgacctaaaaaataaggcttcaatgcaagctttctttggtgttctacaaacgggacaagaatcaagaaaagttgcacaatccttacacgaacaaaggtgtcggcaaggaaggaacaacactgacgaatttcgacaataacaacatttgcaaaccattggcgttttttcttcttgttcttcttggctttgattgctgctatcaaccgctgcgaaacttccgtttccctttgtttccataatcccttcgttgttgtcttcgcattcacagcaagactctgcgtcatcgacaccattgttaaaacgacaagaagcttgttcctcccgtacttgttcaagcctgttgtttaaagacacaaccatg

SEQ ID NO: 3075 - DNA, 568 bp, Gossypium hirsutum
  Clone ID: LIB3825-021-Q1-N6-H7
cacacaactaatacattattaaaaagagatgaaggtttttatccttgatacattacaaacttttcttttattttacctttaaaaacttcgaaaattttccttcattcatctaaaatgctacaaagtccaacccaaaaatccatcaaataatcccttgtaatttcaacttctgaaactatatatatatataactagaatcaaactgaaaaagaagacggtaccagaaaagcattacataactagcaaattactaaatccaaaggtcaaaagagatcaatgacaggaggtaccatgccttccacctgaggtccattagcatatactcatcttcccctctcctgctgagtcaccgcaccatcttccccaatcaccagcgtaaggtgaccttgacctctcaagaattgggctacatgaatttcagtgttcgattgaattctaattattttgaagtggcccacgctattgggatggagacaaccggtcccgtttcatccccacctcaagaaaactgcgcgttggggaacgttgacgtccagcaccactatcatacctttcagcactacaactc

SEQ ID NO: 3076 - DNA, 562 bp, Gossypium hirsutum
  Clone ID: LIB3825-021-Q1-N6-H9
aatcgaatgatgcgcatatgattccatctttaacataatcacaaacgaccaaacccagaacatcctctgtttctggttttctttctaaacaataataacaacattatgaaacaatggtctagaacaaaataaaagtcaagcgacagtcgagttatcggagggcgacgtccagacgatgtccttaagcgccggtcggagctctttactgcaaaactggttgtattcaagggtatcaccatggtcttttttaacttccaccaccagaaacgacggtgttaatgcgaaaatgtcagcagcaatggctaatttccctttccttccacattcttgaccctgcagtcttacacttgactcgctcttcttgacgctgaacttcatcgacttggccacctcttccagtctcgatattacactgctcgctggccttgttgtagcgaatcttagctcctctttctcttctctcttcttctcttcaaacaacggtgacaaatcgaagccctcggataaggaaatgatatggaaagcgttcagagtctcaggcttggatgatttctcgccattg

SEQ ID NO: 3077 - DNA, 559 bp, Gossypium hirsutum
  unsure (1)..(559): unsure at all n locations; Clone ID: LIB3825-022-Q1-N6-A1
aaatagtaaaccgatccttgtagaaaaacatataaaagaaaatttcgatacactagaaatcagaaaattactagttaagaaattacttgcggcaggaaaaacaaaccttgtataacgtttctctatagtagtattacattcactgatggctgagattcgcatggtcttgcctttatgctccccggaaggccagaaagttgcagcttcttctatctccttagatttgcacttagcctttctttattactttccataaagctactttggcttcctccaatgtctctacaccctgcccttcttcaaatgataacctctgtacgttgaactgaaaagaatgtaacatggctacatataaatctgacatgaatcctgaacctcctccgaaacccgagctgtgcaccttgacggaccctaatgtcaattcccttgctgtcaattgatataagagctgcatcgtcaacctcagcctctgctgatagcaactctttgaggggctttgaaaagttacattgagttcctttagattttgttcacctncatcaacagcaatcttatcagg

SEQ ID NO: 3078 - DNA, 567 bp, Gossypium hirsutum
  Clone ID: LIB3825-022-Q1-N6-A12
aaacaaaatcatggtggtagtacaagtaaaactttgaaacaaaaacagtgattaataggtaatggaattacagagattcaaaacacaaacttgcaacaccgtcattttcaaaaatggaatcaggtaaaccccacattcaacaacagtttctccacagcaatcccacttgaaaacccatttctacaaactcccaaaacattttatgtacaaggggaggctagtgtatgtatgataataacatttatatcaattggtctcgtggtcaggtgcaggagagtaccaggcaggaagtgtgcctttggttctaagcattctggtaaatggggaatccagcattcttgctctctcttcttcctctatttcttctgcagattttggcaacccatctgggatatgactgaatcttttaccttcatgttcagtctgcaatggctttgccttacttgaaattcctttgttgtttccattgttgtggatggatgcgattccatgtaagaaaccaatcagtgacttaactccccctgcttgtataatcaactgctctacctcttctttcgctacctcttt

SEQ ID NO: 3079 - DNA, 473 bp, Gossypium hirsutum
  Clone ID: LIB3825-022-Q1-N6-A2
aaaaacgaaaaccggcggtttttttaaccagaaaggggggtgggaattggggtttattatgggggcccaagccccaaacagggggtcatccccccccccccaaatctggggcttcattctccccctgggggccgggaaaggacaaaaaatcccctggatccccaaaatggggcgggtcccatcccgggggggcttttcccttacccaaatgggggaagaggaaaattttaaaaaccggggggggcaaacccccttttttgaggggcaacgggttttgggccccccccatcatttttaatggccataggaaaccccgtttttttaacaaaaaaacgccttaaagtccccgcaaaaattggcccgcccaaacaattggggggggggggggcattttttaaaaacccagggaaccctgggggctttttatccccggggggttttccttttaaagcctttttaggcccccacggggg

SEQ ID NO: 3080 - DNA, 560 bp, Gossypium hirsutum
  Clone ID: LIB3825-022-Q1-N6-A3
ccaaacaaaaaaaaaaatggatgatttatttattttaatggtaacccattacataagagcagtatggctatgcgagatcgtgcaaagaagatgaaaacaaaaactattagcacaacataagaacatttggactgctattgccaatttgtattgtgtataacagcgtgataaaatagtttaagaggtggtggcattcaatgtattcccaatgtcgatgacaaatcgatatttaacatcagctttgaaaaggcgttccatggcaggattcacatactccatagctataacttcaatctcgggttttacgttgtgtttagctgcgaaatcaatcatctcctgagtctccttcatccctccagtcatgcttcctcctacgactttcctcccttgtagcaaaggaaacacaggcaactcaagtggtttctctggagcgccaacaagaacaagcttcccgtgagacttcagtagcccaagcaatggcaacagagggtgttgagctgacactgtgtcgatgattccatccaatgtgccaatggcaccctgaagctgatctttgtctc

SEQ ID NO: 3081 - DNA, 549 bp, Gossypium hirsutum
  unsure (1)..(549): unsure at all n locations; Clone ID: LIB3825-022-Q1-N6-A5
agaaaaaagaacagacaaattatagaaaaacaaagttagttccgcaagatcagacacaaaacttgactaagatgccttggcaaaccaaacatctcaaactttaaaaatcctacataaaacaggcaaaaacttcaaaccacatataaccaaagataaaaacactcaatctgcttcaccgctaaaaccttttggcctcttcacttcttcttagcagcagacttggtgaccttggcaccggttgggtccttcttctcgacactcttgataacaccaacagccacggtctgacgcatgtccctcacagcaaaacgacccaggggtgggtactcagagaaggtctccacaaccatgggcttggtaggaatcatcttaatcataccagcatcaccgttcttcaagaacttgggttccttctcaagctccttaccagatcgcctgtcaatcttggtcaaaagctcagcaaacttaacagcaatgtgtgacgtgtggcagtcaaggactggggcatatccatttccaatttgtccagngtggttcataatgatgacc

SEQ ID NO: 3082 - DNA, 527 bp, Gossypium hirsutum
  Clone ID: LIB3825-022-Q1-N6-A6
aaaaaaaaaatgcaatgtactgggacatatatgaatcaacagttcggggatgaccaaaatccaaacaaaatctgcattggaaaaccactaaccatcaacttagtttgctagtcttccactactatatacatcagtagttatgtctaattgagttccaaaaggataactgaaaaaatgggtacaatcatatagatggattgggcacgtataccacctggccaggcaaatattaaacaagggtgttactgagtttacagggaaaacattgcatattcagtaagcaaatacctcagggttctaaaattcattatccaaagctattcttccttcttttctagttccagggctatctcattacggggggtaaatggaagcataaatgggggattgtactgggaaacttccaccgaagcaccttctttaactcgaaactccctgtcatttttcaaagcatctcttaatctcaattcccttcgtttaacttcttcatcagtgacaaaacctgaaaaacaacaactgcaactact

SEQ ID NO: 3083 - DNA, 554 bp, Gossypium hirsutum
  Clone ID: LIB3825-022-Q1-N6-A8
gtagcaatagttttagaccataaattgtcgaacatggatacaatctgtgaaggttccttcagatttcttgttaggcatagtgcctattgatcaaataaaaatcaaaggaaaaaagagttgaaacaactaacaaacattagaattcatctactttgatagtttggagcgaaaaagacagtcacaggaccatatgagtgcaccaacactcactacatgtgacattaaaagcatgggcaaatagattatagatatgctacttggactcaagtggtgtgagtagaggcacgcattttatatgggtatgtttgactttttcttttttggtaaatttttcactatattaacccaactcttcattttgcctaaataactactgtctgtactactgtgttttaactactgtatctgaatttatctccaacacatgctcgaacatgggcatcaagatatggtcctccaagagtcctccaaatacattcaattctagaaaaaataaaaatactcaagtcagatgcctatgtccaacacttacacccgagtccgagttaacataa

SEQ ID NO: 3084 - DNA, 571 bp, Gossypium hirsutum
  Clone ID: LIB3825-022-Q1-N6-A9
gaatataaaaaggtttttaactgatgatcacatttctttatttttctctaattattcccaacttttattgatttatagaactgccctggctaaccctataacattacaacaggaccaaacttctttttatatggtacaacagtacgatcttgaaaaagaaaaagtagaagcaaacaaacaacaaacacagactcaaggcagtagcagagcacaaaaactcgctcctttcatttaataggatcgataataaggatcatcctgggtacctccgcgggtgttccttctagtcccagcattgttagacgccgcatttgggaagtcttggttccccgttgtaccgtaagcaccctctgtatctccgccaaaccccatactgctgaggtcatcttgcctgcctgtatcatacccactacctgcggtggggtacccacggttgtcatgtccaccggtaccgccatagccaccagtgtcgcctatgttgtacccagctgtggtgtagccagtgccaccaataccaccaccaccagcatggccagctgtggcgttatgatggcgggcctcttgtttccta

SEQ ID NO: 3085 - DNA, 510 bp, Gossypium hirsutum
  Clone ID: LIB3825-022-Q1-N6-B1
accacacaacattgtttataccaccagcaaaatacaagaaagattaggaaactctcacaccaacatgggaattgttcaagatactgagtactttgggaacttaaaaatggggagctacaccactcaatgagaaactgaaaaactagggctatttatcagggaaccttcataacttatggctccacaaaaattttgccaggggcatggccgtcaatgcttttggcccaagccttttcagccttacttaaaggatggactgaatcaattactggcttaagctttccttttttcaccaacttcacaaaaaattcgaggtttttttttttaggggaggggaacaagggtatgagttgcttctttgcaaatgttatttttttgaaagcaacactcatcaaagtaccgaaaccaggagggggatctactaccttcccttttgaaggcaagttagcctcaaaggtaaaccaaggaatgttgtgtgcccaggggatgattacatcgtattttcgacca

SEQ ID NO: 3086 - DNA, 187 bp, Gossypium hirsutum
  Clone ID: LIB3825-022-Q1-N6-B10
aaatcggaattccaacaagttattctactaaaaaccttccacggagtttggttaaatagacaggggcgggattcatagtaaagatgaaatacatccattatccttaaacttttcaaaatgaaacaaaaaatgggcaaaaaaaaaagaagcacattcttctttggtctcttcatcaggaagcatcaac

SEQ ID NO: 3087 - DNA, 567 bp, Gossypium hirsutum
  Clone ID: LIB3825-022-Q1-N6-B12
caccaaacacaataacctaatcaccatatataatcaacatattttttcaatcagttgtgttaaataaaagaccatccaattttcagcaatcatataatcagccttataattaattcatcaaaaaggaatgggcaaaacacccgcttaccctactttaattatgctcctcggggctcaggcgtttaagagggtatcggattggatgggatcttccacgtcatgaggatggtcaagagacataacgtgattcttgaaagaacatgcagcttcttccctctgttctggttgccccagcttgtcaaatacaatggccatcaagtagaaagcttcggccattaattcatgatgctccaaagcttgcaactcatctgcagcttgccttaagggatccagcacaagttctggatttttggaaactgagaagcttggatctgagagataacattttgcttctgtaatataggcccgagcacagagttccaaacctccatggccaagaatcattggaaaagcaccatgtaaaagagttaaagcagtctttgcatgattggatccaagtgaaagcca

SEQ ID NO: 3088 - DNA, 561 bp, Gossypium hirsutum
  Clone ID: LIB3825-022-Q1-N6-B3
acatgaattataaaataaatcagattttaacttggtacaaaaacacataaaatgtgacgatagacgaaaggcatacaccccaaaacctttcgaatatacttgaaattaaaatggagcaaatcccaaatcaactacacaaaaagcaaaagtcaatcctaatctgatatgtgccttcagtttccacggtgtacaaactacaaatcccatcactcttaaaagacgctgcaaataacacaaatgacattcttcttcaaccatgccattcttatatcagatccgccacattcattggcatttcgtctatctgggtactataatactgctctatatctcgcagaatcttgatgtcatcactttttacaaagttaatggcaacaccctttcgtccaaagcgacctgaacgaccaatcctgtggatgtaaagctctcgattatttggaaggtcataatttatcaccagggacacctgttgaacatcgagccccctggcccaaacatctgttgtgataagaacacgggttgcaccatcacgaaactcagccataatcacatctctttcct

SEQ ID NO: 3089 - DNA, 558 bp, Gossypium hirsutum
  Clone ID: LIB3825-022-Q1-N6-B4
aatgtaaaggcattaaaattaatggattaattatgtattttatacataaaaatgtcaccttgacttcttcgaaggtatccagcaagacagccccaaatattaaaaaagaggtaaagttggtaaaaaaacaaaaaaactgtagtggtagggacaagttagtgctgtatcaactctggaattagctttaagagaaaagagagctcctgctgtgagaactgcagctttgacttggtcccagtctcctcgtccccttctcttaatccctcatttaaaggcttgataatcatgtcatccactgcatgcgagatctcttgaacaaaatcaactatcactccatcaatccccatcaaatgttgcatgcaaacagcttcaggcacattgttaagtttgccgtatgtgaggagagagagcttagactctttgatcctaggcactgctcctggatttccgaacactcctttgacctcagaaacaatcccttgtaaacctccttccatgcacacctttatggcctcctccagggagtttcttcttacatcatagtaaacttgagtcccg

SEQ ID NO: 3090 - DNA, 566 bp, Gossypium hirsutum
  Clone ID: LIB3825-022-Q1-N6-B5
gttgaatgttttggctttgcaaaaattaatttggtaatgttaataagattaaacaacaaattaaaaccaaatcaaaaagttactgtgctcgccaattcataatcagaacacacataccttccttctgaaaggcatgaaaactctctgttttgggcctaatgcacgatggcgaaactaaattccgagtacctttgcagttgattgccaaggccttgtggtaaagaccagttagttcaatcccatcatacctcctcataaatatcttcatcttgggaaggaaatgacaagctcttcacatgagttgagctcaaatgttcggttccatccgcgatcatagaccgagctatcttctcgatttcgtcacgtagaacagggttgtctctcaagtattgtaatgctctatctctgccttgccccagcctatggtcaccatagctgtaccaagagcccttctttgtgacaacatccatcatttcagcacaatctaaaatgcatcccaatttgcttactccctctccgaatatgatttcaaattctgcttgcttgtatggccttgagaccttact

SEQ ID NO: 3091 - DNA, 558 bp, Gossypium hirsutum
  Clone ID: LIB3825-022-Q1-N6-B6
aaatcaaaaacatcaaaaaccataaataatttatgtctttagcagagtactggaaaataagagacaaaagcaataataaaaaggactaaattcttcagcaaccactttttttttctttgcttcaaacctcagcacttgacctccttcaatgcatacgcaaagtacaaaaatgtcgggtcaacagcaccatccttgtagtaagcaaataccaaacatccatcatcgtgcatgctctctccgatgaaaaattgaaggtccttcaattttgaaagcaaaaacttggttgctccctcaatgtttttcttgaaggactcttgcttttccgcatccagtttcggtgtcaagttcttgatgaacttcttcatgaacacgacaaactgcttcttgtcgaaagggggttgctcctgaagcctgaaagtgtcaacaatgtcaacaaccttcacagattggtcatcaacaccttcatcctcatcagcatcttcggctgaaggattggcaccaatgtcaacatcaatagctccttgcacaacccactttccctcaacttcccacagcatc

SEQ ID NO: 3092 - DNA, 543 bp, Gossypium hirsutum
  Clone ID: LIB3825-022-Q1-N6-B7
aaggagtctaaggtgtaattttatcattattaatttaaaattttattggcagttgccacttggattcgtcactgatcagaaacaacttagccaaactaaaagagggtttaataattcttaatacaacccaaagtacaaatcattgttgtttaactcagaccagactaaatgaatgaatgttagttcttgtctaattcaactctaaccaataatctttacatgaacatgattcgagcctgaaatgattgaatcgagttcggtctctaacgataacattctaaggttcttcacagaccttaaggtaaccccaggttccgaactactcaacccggaagccaacaccaaccttttgctatgctggtatcttcctctcctatgtcaaggaacacctcggaagtgtccggggaataccctgaaagttttaagtcccttgtcatattatctaacttcaagtatatttcttttgatcgaggatgtgtccggtcgccggccacaaattcgtgaacaactccattcatctcaatcaaactgcagcctggggtc

SEQ ID NO: 3093 - DNA, 543 bp, Gossypium hirsutum
  Clone ID: LIB3825-022-Q1-N6-B8
ataaaataaatgacatgaaaatttatgtgttaaaacaataaattccaaaatatgtcatcaagataacggtcacatcagcggggcatttaacagtttcggaccagtcattgaacggttttagactaaaaagatggtgaccatttttgctacaatcttaacacaaaattggagctattactagctttcttgatgctttaggctttaattcagcccttgaatctaatactcctactgattccaacattgataccagaggcttctccgccgtattgaccaactggttttcgagtatcccggacctgacctttcctttgtttctctcgtttcttgctttgcaacctgtatttcttccttggatttttgatgttcttattccgttgtcgagtcaaacctctattcttctctatctgatgagttatcagtcgttttccatcgacggtttcaggtaacgagggaggcgctgaggtccttgtatatatctcagcctttgcagcaagttttgaggctctttgttgcttaacttgtttgtaaaattcatcttct

SEQ ID NO: 3094 - DNA, 552 bp, Gossypium hirsutum
  Clone ID: LIB3825-022-Q1-N6-B9
ccatacaagaaatctcttcagatataaagtacatacaacaaaatataatatcctttataaccaataaaacaataccaaaacagaaaacaataaatatgagcattcataaaacatatatgattcatgtgatacggcttcaggacacaccgggaatatctcctccaaacacttcatatccacaggagactaaggggaacccataaacatctatgtaccactacataatccaaaaagtggggggtcaagaagatcccaacaactccggcttccttttccagtactgttgaagcctctgcttggcatattctttgtagtcaaagtcaatttcattgacatattccgatattattccccacaccccccaagtgaggtgactcgctagagtatatttctcaacatcttgaagcagctgctgcacttcagagtctctaggtttcttacctgaagaattcaggtatacacgcagaaatcttaggcgctcttccaaacctatgaatgccacaggactaaaaaacgtttttaccattcagggaatatagcgcattttataaa

SEQ ID NO: 3095 - DNA, 574 bp, Gossypium hirsutum
  Clone ID: LIB3825-022-Q1-N6-C1
gataaaagcattttacattatcatctagaccgctagagcctagatttaaagtagtttcatccatgccaatagctcatccactatatttcccctattcacactattaacaaattcatgatcgtaatcgaagaatgaaacaaaatgaagactcaagaagagagcattagacattcatcatctatgttcttgcccaaaagatttgcaacgatgaggtcaatgtcttgcaacccaacacccgtgcatgtaggattaatcccaagtctaacagagtcttcattgattctcgttgtagtttccgtttgagagttcaagaccctcacatttggagaggtcttgcacttccccatgcatctgcacgccacaacagtgccttctgcacccaccttcctttcaaattcttctaacaacgccgcagctcccatcttcttgcacttgccacccatgcaaacttcaatcttcttggttgatgtcccttccacaagggtgttgctctgcccatccttgaagccatttgaactgcaacattcaccatccaatccagtaagaggaactcgtatccgaatttgggggcttg

SEQ ID NO: 3096 - DNA, 551 bp, Gossypium hirsutum
  unsure (1)..(551): unsure at all n locations; Clone ID: LIB3825-022-Q1-N6-C10
caagcataaaataacttgatcactcatcttcaatacatagttcaaggtttatgacaacgcataaaaagcaaaaaaaatacacggccgaatggccattcagtccatacaaatgccttcaaaatcaacatactacctatgtaaaaacagataataaccaggtaaacttatcgctttccaccaccaccaccaagcttgggacctttgggtgcaccaccctttgaaaggttacccttgccttgggtcttctgttgcttcgctgctacttctgccttttttgccttcttttcatccttagtcttcttgatcctttccttgatttctcggaaagcagcttccctggcagcatcacaaacttcaggtttctcactcctcttcttctggataacctctaaggtggcacccacaatggatctggagtatggcttctttgcagaacgtctcctttttttcacagcttcttgggcaatgtccttcttgggttgcttcctgtacatggccgnccatgtaagttttgatggcttcaggcggttgtggaagtacctcttgcattt

SEQ ID NO: 3097 - DNA, 540 bp, Gossypium hirsutum
  Clone ID: LIB3825-022-Q1-N6-C11
gggagaaaagaagagacaagaactattttagaacaataaaaacatacattggttaaacaatagctacaactttattcgtccaagtaaacacgatacaaaatatgacgcaacaccatcatcaacactgaaccctccattaatgacaatccaaagctttagtatgtttcttgggaaatccattcatcccaacacccatgaaactttgcttttaaacctaggcgctcttttttgggggggtattgccatatttccaagggaattgctttaaatcatcaggataagtaccccctgcaaccttttggattgggatcgcatctgaaatttctttcaaatcttcttttgtcagctttactttcactgattcaatggtgctgtctaaatttttaatcttggttgttccgggaataggagaaacatcatccccttggtgaagaacccaggcaagtgcaagttgggccggtgtacatccatgcttttcagccaacttctctactttcgaatataggatcctattttgctccaagttttctccttgaaacc

SEQ ID NO: 3098 - DNA, 559 bp, Gossypium hirsutum
  Clone ID: LIB3825-022-Q1-N6-C12
cataatcatttctttaatatcatattgatcaatttacatatatgtcactttcttcataatcagttcttcaatagaaaatacatatatgttgattaatttaatttagaaatgttactttttatcactaggaaatataattgaaaattcctatactaaacaaaatgaaaacgataatttcagtagacttgggttgccaccgctgagaccattgtgttgattccacacatggaatgacctcgacaaaggcgataatagccatgttctccccaccgtttgccccatgagttctttatgatccaatagggttgattcccaagtcttagaattgaaaacccttttgccccataacccactagtaatactccatggttgatccacctcttcccacatattattgggcatgacacccctcctatgtaggtttgcatgaagatagcattcaacccaacggctaaagggccacgaagtactaaatttgcggcgatttgattttcatcgatggggatgttagtgaaattcacaacttcaacagctactttctctgggttgaacttgcatt

SEQ ID NO: 3099 - DNA, 528 bp, Gossypium hirsutum
  Clone ID: LIB3825-022-Q1-N6-C2
gaaaacaacaaagactgaaatttattgaggtcgtaacatgaatattttgtttgaatcccacataactctcattaccccaagctttttttcagcatcttcaaatgaggtacctgtggattcagatgggtagggtagcttcacccatctatcagcctttaggtcgaccacatcaacaacacacgcccctgattcctccaagctctttccccaccatttgccttgcacctgatgcacttttcctttgccaatctcctgacctcttccatctacaagcactataaactgacctggcttgcactgaacaaattctgcagcaccataatcaacaaattctggagccactgagttctcactggtgttcattcttgacatgcttcgagtgcctctggtattcgatggggtagtctcttgaccaggactatcaggagctcttaatgaatgaccttgttgtggcccaccctgctttcccgcaaaagcgttgtcaggctcgggagggggacgagcatccttacttaagcgtgccagcct

SEQ ID NO: 3100 - DNA, 542 bp, Gossypium hirsutum
  Clone ID: LIB3825-022-Q1-N6-C3
acttactgcaccttttttattattttcatgacatcgcttacaaacatacaagaaaacatacaataagtagcaaaaaaagattaagaaagcaacgacaagcatgatggatccctgaaggaccaaattatgtagctaggtacaggtacaggtacaggtacaaaacacaagaaacactgactagtaatcttctggagccaagggctggtgcgttgggtgtgctggctccgctgctgggatcaccatgtactcgtatatcagagccgctaaacctccacctatcagtggacctacccagtagatccagtggtggttccacctccatcctaccaaggctggaccaaatgccctggctggattcatggcggctccatcaaatggtccgcctactaagatgttggcgctcactattaagcctatagccagcggtgctattgtccccacgcttcctcttttgggatcgatccctgttgcataaactgtgtacaccaatccgtatgtcagcactatctccaatatcagaccacgcaactcccctactcctg

SEQ ID NO: 3101 - DNA, 524 bp, Gossypium hirsutum
  Clone ID: LIB3825-022-Q1-N6-C6
ctagaagggatttaaacttgaattgtaagcaatcatctgtttcttgattgtaggcacaaaagtggtttaactgtgaaaacagattcaaatataggggaaagtttttactgtatctttatctgcctcttatcatcagagatgtttgagatgattatgtacaacaaaagacatgaacatccctttacatgaccacgtccccccatactttaacaaccatcttccccaccatcccatattccaaaagtccagtgaaactatacaaaaacgatcagaaaaccctatctcgaattcccctccttcaatcctgggcgtccatcactgtatccttttcttcaaacttcactccgaccaagaacctcatgctcacctgtttgggatcatagactgtgtattcattatactcgagagggctatcctggtgttctgaggggatcaaacggccacaagggactttgatatcatctttccaatctatatattctgattcatctggtttctttctccccagtcccttcaacacactt

SEQ ID NO: 3102 - DNA, 540 bp, Gossypium hirsutum
  Clone ID: LIB3825-022-Q1-N6-C7
caaaacagatcttaacaacacgtttatccttacagacattacaaaatactccacaactatagatgtctacactaaaataagatatctgcaatcgtcaagctcatggagcctcgacgccgaatgttggattttttcaacaaagtaagtcccttatctcacctttccttcaacaaaagtttgtttgatttttttggttcccacagcggtagacagcctcttaagggtgattgtaaaagtactgaagacttctgccgtattgaaaccgaagataggcaactgaaggcacacctcagcctcctcttctcgctatcgtatggttgataatttggatcatgcttcacaaccgatgtcttcagtgcttccggaagaatgcagttgcacattgaacctattcttgccaatcgatttacccatttaggaatgtgtttcccagtcagcctgtaacaaatatccttgcagaagtggttgcagttcttgacgatcaaatgatatgtatcccctttgaacctagccgaattgcactccatgaactcccttact

SEQ ID NO: 3103 - DNA, 517 bp, Gossypium hirsutum
  Clone ID: LIB3825-022-Q1-N6-C8
aaattaaaaacacgtgggggtgttttcaaatttcaccaaccagatcacaaataatgtaaaaccctgttcctcacatgccttttgtctactcaaattaacagccattatgaatttttttttatgtaaattaaatcaatctccagtccacccatatcctactatagggtacctttttgagaaaaattttacagaacccaaggtttacaatgaaatccccatccatgcctgcatcccttaaaacaatcaaagactgcaggttttaacatcttcttcatcccttagctcgagcagcaaccccctttcttcattgcaaacacgtttttactgacatcaattttctcccccttggatggaacagctgaagcagccccttcatcacttgtctccattgccttcttgcttactatgtgatagatctgtgtcaacacttttgcgaatgcgttttccacgtttgttgcttccagggctgaagtttccatgaagtagagggattctttctccgcaaaggattttgcat

SEQ ID NO: 3104 - DNA, 517 bp, Gossypium hirsutum
  unsure (1)..(517): unsure at all n locations; Clone ID: LIB3825-022-Q1-N6-C9
aaataagaacattaaaatccaaaaatatgattggtgtgtaagtttttttggtacatgctcggtcgttccaatgaccgacaggaaataatactacaaattacaaattcatgaaatcctcggtttgctctctatcaccacctcaaaaaattcctcttctaaataaaagaatattacaaggccatatatcacacacttgaaacacaaaaatggcattattccaaattttgatcttcactcatcagacaaatgaaaaagaaagaggggaaaaagaatgaaagcctcgaaattgcagctatatagagccccattgatccgtaacctaaaatgtttcaattgaacagacctgttatgacttaatagctgcccattggtggcatgccgaaagctggcattggaggcattcccattcctcccatgggtggtggtggtggtgatggaacaaaacctcccatgcctggcattggcggtgcgggcaaggcaagaggtagcaactgtgcatacatgtntctgttgtgcg

SEQ ID NO: 3105 - DNA, 561 bp, Gossypium hirsutum
  Clone ID: LIB3825-022-Q1-N6-D1
accagcatactcccctgctccctccaccatcctcgccgccacctttgttccttccactgctttctcagtcgtatagtgtgccgcactccatccagctacaacggccttgtccttcacatcgacagccactttccccgctacttcagcggcctccttgcttttctctaccgtcacatccttggtcaccactgctttttccccagcataactcgcaatgtttttgctgacatcaactgcggtgtcttttgctttcactgccgtttgcaaggcatagtctttcgcctgttctactctaggcgctgtgtagtttccggcacttgctagggtttcagctgcagtatcttttgtctgggttcctttctctgcaatgtattgtgtagtcctttttgcaccttcaatgatggtgtcctttgcttgtccgcctttctctgtggcgtactgggcgctttgaacagcggtttccttggcttgctggcccttttctttggtataatcagcggcggtattaagcgcttgggcagccgattccttggcctggttataccgttcttcggcagccct

SEQ ID NO: 3106 - DNA, 517 bp, Gossypium hirsutum
  Clone ID: LIB3825-022-Q1-N6-D10
cggggaaaatagctgaaagaagaaattcgtaataatggccccaaaaaaggaataattttttttttagcgcctaattaaggggcggaccattaattctgaattaattatttttggggggggaaaattcaaattcaagcccgaccaaaaagcccatccttgtaaggggggggcgtcccaacagggggggttttgaccccataaacttccattttcctccgcagggcgtaaataatgagcggcccctgcccttccctgccttaaaccaacccgttttgggctcccccccccaatttctaaagcctaatcccgttcatttgctgcattttgaacacctttaccacattcggaaacccccctataataaacattacccccccacatatccctaaccacccccatttttttcccagtaattggaaaccatgacgaataaccccagtttgctcgcggccgttgaaaatagctcccaccatgaacaatacactgccaattaaaaacgggacggggacactttgtt

SEQ ID NO: 3107 - DNA, 573 bp, Gossypium hirsutum
  Clone ID: LIB3825-022-Q1-N6-D12
attattaaatctaccgataaatttgttaaaatatattttaaaaaaatattctcaagaaatcaaataaaaaatttaccaccattgagtataaccgattagctattacattttgaaaactctgctaataaaaactggtcaaattatataaggttatggctacaaagggagatgagttctcatcattaacctctcttttttccccttctaccaccatgcctcggattccatcaaattttccgggcatttcacaccatcgttggatatttgcttcacaagcttttggcgaccttctcgtataaatcacgaggccaattctgacgcatattatttgcaaggaaggttgcaatctttgatctcatggctcgaagtgatccatctgtatcggatacattgtccaaacaagttatagcaacctttagcaaatcaggcaaacaagcttggacatgaggagataaattttggaacacatcagcagatgtatcaggtgctcgtggatcgaatggaaggaatgggatcttggcaacttctcgtagagcatcaagatactggcctagtctcatcaatttatggatc

SEQ ID NO: 3108 - DNA, 555 bp, Gossypium hirsutum
  Clone ID: LIB3825-022-Q1-N6-D2
gaaaacgaaagcaaatgacaaggaatttatttgaatacagagagctgcttacaagttacaatatacaaccacatagagcagcacaaggacataagcatagaagcagaacagagcaacaaaattgatagattactttctagcatatcagccgactgctacaacaggaaacttcaacccacagtcttgtttccaccttcttgtgtcctactcttgccaccttcttgtgtcttactcttgccaccttcttgtgtcgtactcttgccaccttcctgttctctgcctccctcagagatccttcctcctccttggctcctattctggatcttctgctccatactcactgccgtgtccggcaagggccacttcactgggtctagcccctgagacatagagctcctgcttccacgaatataattagcaatccacgacagcgatgacagtccagtgatcccaaatgctccggaggtcaagaatccggctatggaacccgcaatgagaagagcagcaggtaccaaaacagggctgaaaatcggaaaaagtggggcggcaatagca

SEQ ID NO: 3109 - DNA, 180 bp, Gossypium hirsutum
  Clone ID: LIB3825-022-Q1-N6-D3
gatatggatccatatgctatgtgacgatatgttttcatattgcatgttggttggaatacattgagttgaaagtttttcaaaaaaaaaaaaaaaaaaaaaaaaaaaaaaaaaaaaaaaaaaaaaaaaaaaggacaaaaaataaaaaaaaaaaaaaaaagaaaaaaaaaaaaaaattaaggg

SEQ ID NO: 3110 - DNA, 564 bp, Gossypium hirsutum
  Clone ID: LIB3825-022-Q1-N6-D4
atacaactatgcaagtttttttttgaacaatctcattataagttctgatcatatctgctctttttgacataatgcctagaactactcatagtccttcaactcataaataggaagataatgcattttagcacaatcattgtgaataggtaagaatttcatcctacgatcctaaatgttgatatactccttgtgataatctcaccaattctcatcggtcttccctcgtaaattaagcttgtgcagtgcttccatatctcgcgatggcggcaaaattttttgccttcacccgaattatcgcatcacttgatctgatttgtgcatcttcaccgtcacgtaaacaatcaatgacaaatttgcgtcctacatatttcgaatggccaaaaattcgagcgggatgcattctataatatctagatcgatgtatgacacccattcaaactgtagtgcacaattatcaattttgttatgtacaaaattttaaatttcaaatcattgcataattattataggtttgaaaaaaatcaataactaatcttggcttccaagtgttgatctaacaacaac

SEQ ID NO: 3111 - DNA, 565 bp, Gossypium hirsutum
  Clone ID: LIB3825-022-Q1-N6-D6
gaaaacgaaaagcaaatgaccaggaatttatttgaatacagagagctgcttacaagttacaatatacaaccacatagagcagcacaaggacataagcatagaagcagaacagagcaacaaaattgatagattactttctagcatatcagccgactgctacaacaggaaacttcaacccacagtcttgtttccaccttcttgtgtcctactcttgccaccttcttgtgtcttactcttgccaccttcttgtgtcgtactcttgccaccttcctgttctctgcctccctcagagatccttcctcctccttggctcctattctggatcttctgctccatactcactgccgtgtccggcaagggccacttcactgggtctagcccctgagacatagagctcctgcttccacgaatataattagcaatccacgacagcgatgacagtccagtgatcccaaatgctccggaggtcaagaatccggctatggaacccgcaatgagaagagcagcaggtaccaaaacagggctgaaaatcagaaaaagtggggcggcaatagcaagacctatg

SEQ ID NO: 3112 - DNA, 553 bp, Gossypium hirsutum
  Clone ID: LIB3825-022-Q1-N6-D8
cacaaaaaataagcacttgcttgtcaagtaaattatttggtttaatgtacaatatatttgagagaaacactcatacaaaccttaacaagccaaagctcggaatcttaaaaaaacaaaccaaagctatgataacaaatctcacaaaatcactttttgcacaaatatttccctactatatatcttatcataaaacctgaaacaaacactactgtttcatatcggtctttggttctccggcgcatgcattaaaaagggagtaaccgggcgaaaatggaggcccgagttttctttttctttttggtttactgtacagcaaattctcaaaagcagaagatgagttagttaccattgagtatcatcattcctcgtattggattccgcccatcgtcagtattgttgcgcttacaccaacacatatactggggtatcggtccatattttccgataacccaaggatgcttggctacatcattcaaagtcattctctcttttgggtctttgcaaagaagtccttctagtaagctcctcaactctaggttcaagtcgttcggca

SEQ ID NO: 3113 - DNA, 548 bp, Gossypium hirsutum
  Clone ID: LIB3825-022-Q1-N6-D9
ggaaaaaactttattgaattaatataagccaataagtacaaagacaatagatttggactttcttttataatatatgaatattataaaacattattaattagaacttaataactatttcttaggaaacaagcttggagaggaaaaattaacataattttaaagtgcaattggttcaatgagcaatgaagtgattccacccttagccgcttttccaacatatgtatatccatctccttccctgtaaagtacatccatcacccttgcaaggtttaggctacgatttaaaacttctgttggcatttctgttggtttcagaaactcttgattcacatccttccaggcactctcaacatgcttgttgaatacatcgtatgcctcttgtgctgatacgccatattcttccatgtaacactctattgctgagcaatcgtcttctctcctatgcttaaacttgtgttccgcaacatcatccataaacctacaaataattgtggaagcttgaatgatcttagggtcattggctgcccatttaaaggtctctggtgtta

SEQ ID NO: 3114 - DNA, 559 bp, Gossypium hirsutum
  Clone ID: LIB3825-022-Q1-N6-E1
ggcaaaggctccaatatattatacaacaacattcagcagtcgacattgaatcagcaataagaaataaaactgtattttgcatacattacccgcttgccttctcattctcctcatcatcagcctgctgctgtatttttgcaatttcggcctgcgctcgttccatgatgtgttgcttctgcatttccaactccctgtgaaaatccattctcatcttctctaactccagcatctgctgccttttactatcctcaatcttttcatatgtatcgctgaacttttggatcaaatcagcaagcaatctgaaagaagaaccctcatcatattgcctcccgaatcttctcttttttggtgggagtccatctgagacatcctcttcactgtcagcagattctgaatctgctggactatccctcatttcatctaaaccatttgcacggttcaaataaactctggggttcatgaatacatactcacccgagtccaaaccacaagagagcccaccctgctgtggaggagtcgacattaacatatccatcttcttgaaatacacccatttgct

SEQ ID NO: 3115 - DNA, 569 bp, Gossypium hirsutum
  unsure (1)..(569): unsure at all n locations; Clone ID: LIB3825-022-Q1-N6-E10
aacccanaaccaagtccccttcataacattgggtgaataaatatcactacataataatgaaaaaattactttgtaaaattacacaacatcaacatcaaacttcatcagcaataccacgtagacgaatagaagtgaacacaaagatactagggttgttggtcttaggtcccaatctgtgttacaaaacatataaattcctcgagacataaactgatatcatgcacatgtatggcctccgacatctcttttttctctttggttatatacacaatagccaacttgaaggagagacagcatttaccggaataaaaagatccgaaaatgaaactaacagttgatgccacattgaccattagcggcagcttttgtagcttctgaggtgaaggggtcgatacgcacccacagcaatgagaagatggaagcaagaagtatagaccacacgatgacaattgtaggggtacgattttgacgacccaccaaacctttcaagaaaggatacaaatgagcaatcacccagatggcaaagaaaagcttgccaaaaagaggaccccaggattggtaaccactgt

SEQ ID NO: 3116 - DNA, 560 bp, Gossypium hirsutum
  Clone ID: LIB3825-022-Q1-N6-E12
caccaaaaaaactgtactttttattttacttcagaaagaggaaaacgtacaaaaagccctctttacctagcggtatcttctatgagtagtgaaacaagaaattgatggccaaatatagaaataaagaagttttgaatgactatgcatgtatataaggcaaggtttttgaaaaatttgccactgactctaactagcttatcatcaagcatcagagccttttgtcatttgtattgttttcagttggcatcattgttgagtgcttgagtaacaccaacctcagcaggtcgaattacccgatcgtgaagcatgtaccccgccttcaaaacatgagcgaccgtgacaggaggcttagcattatctggtacttggaatactgcattatgcctgtgtggatcaaatggttcatttgtaggatcgaatttttccactccaaacttcctaaatacctctccaagctgtttctcggtcatttcaactccttctagaagtgtttttaaaagaggtacagctccagcagtgtctttggactcatctagcttagcgaaactgcctttaacatg

SEQ ID NO: 3117 - DNA, 541 bp, Gossypium hirsutum
  Clone ID: LIB3825-022-Q1-N6-E2
aagtgcaattctctttttgcataataattgaaagcaaagtttttataaatcaaggacctaaaactgcaacattcagagtcagaatttatttcagtaacctttgtcaccacatcatcatccatgatctccaccgattcaaacgacctcacttcactcttttttcatgttatttgtattcgaagtggatagatgatgtggtgggaagagttgaagaaatatttttttcaaaatcacaaaacacgtgatgaacatgaacctttaagttaaaaggaaaaccccataaaagtctgaatggcctgtgtagtatcattacattgaacttggaagaactcgtataagaaatgtactccacttatctatagcagaacctcaatttgcttctgtcagattcttaaagagcaagcagaaactgatttcttttggatgaatccatcatttgtgcttctgcaatcctgtgaatatgtaactatccactctatcaagtattccaccatgtccaggtattagggagccagagtccttaacaccagcatcgcgcttg

SEQ ID NO: 3118 - DNA, 522 bp, Gossypium hirsutum
  Clone ID: LIB3825-022-Q1-N6-E3
aaacaggggtctctgtttcattaaacgggtataaactacttataaaaccatgactctcccatcgatacagggaacaggcttgtgacatgtccctgttttggtaaaaaaaccaacatcttacttataaaaccctcaatttgagagatatacctggacgggtgaggcatcaacctataaaaaataaccccccgactgatccttgtgctcactttatttaaaacttcttatttttggctagaatttttttgccaaaatgattgctttttttaacatcaaactaacccttcattaatctatggttttgcttacaacggctcattgcaaactaaacatccgcattgatcttttactatacctgaacgtgaagattcatcctaaaactctctctttcccaacgagctctattgtttgatctaagaacatatggctactgaacctttctttaaacatgatcctaccctcttgctcatataatgacatccaaccatcctgcccatccactcaggccagtggcctccatac

SEQ ID NO: 3119 - DNA, 549 bp, Gossypium hirsutum
  Clone ID: LIB3825-022-Q1-N6-E4
gattaaaaatgttaagtattattatttattataaatattacatcatcaaatcttaaaatctatttcgtcgacaaaaggacagaggagcaagcaaccaggtcacccttgtttatttagtgcttcttcaagagcatggatctgagctcggccacgtcgatctcattgggacagttctcgggtctgtagcatccggtaaccgggtcgggaacccacgaaaccttctctttagctccgccagacatatcttcccctgttttcttggccaccgtagcagcgctccttcccgctcctcctcttattccactcgacacaattccttgtgatgccgccgcatatcctcgtctggagataacgttagagattacatcgacgacaaaagtagagaaaagcttagcgttggagagagagcaagccatttctcttatcttaatattgatctgttcaattcaaattcaaactctggattgataaaaacttgagcgctgctgtaggaaagctttttttattttttattgttgaagagcaaataaactttctacagcagcgaag

SEQ ID NO: 3120 - DNA, 555 bp, Gossypium hirsutum
  Clone ID: LIB3825-022-Q1-N6-E7
aatcagcaatagagatatgaattatgctttattatcatgtactaagaccataacagaagttcatctcactcatcctcaatctttgattcattctactccttgaagcctgcaaatgacaaacaattacatagatttctcataatatgtcagtttccattccatgttgtctcttttcttacccaaatcctcgaaagtaagatattcaaaaccgaggtgacttattcacaaggcacataacatcaatcgtaaaccaacaacaaaccaccttcttgaagggcagcaggtttttggcacccatcatcatcgttaattcccacatgaataccagtatcttctacataaaatcctcttcaagttcctgcaaagatctgctcgtctcagcaatttgtttgttggatgtcatcttttcagataccatgagacccttgtagcttcttatctccgcttgtctttccttttcaagcctttctagctcctcacgtcgttttttttccctcatatgttgctttctctcagctctttccgctgcattgactgcttctctctcagctttca

SEQ ID NO: 3121 - DNA, 542 bp, Gossypium hirsutum
  Clone ID: LIB3825-022-Q1-N6-F1
acaaagttcaacatcatctgtattaatgaaagggttctggttattacttattacaatatttttctacttttaagggtgtaaaaaggcttatataaaacaaaccctcatcttgttgagagtttgctagacatcgtaagatgtctcacctgaaagtagacaccggcagtggcggcggtgactcaccaatcaaaagcttctcaaaggaggatttcggttacggtttgagattggcaaagagaatttcccattgcaagaaaatgatctcttcatgaaaattggcctaatttgcaaagatcttcttcctatggacgaattgcacattagtctcaataaaccttgattccctgcacctctccttggcacaattctcaagcttgattctttccctttacccaattcattatctaaattgcttccattagacccttctgctagaccattattagcaagtgcttggctgatctgtgaagctgccatggaatccaaagaaactgatcttcttacaggttgaagaaccccatcttcatcctctgtatttctct

SEQ ID NO: 3122 - DNA, 503 bp, Gossypium hirsutum
  Clone ID: LIB3825-022-Q1-N6-F10
ggggaaaagggatttataaaaataactaaaaattacaaacattcaacgttgagattcttctgcaaataccaaagaccaccaaccattggttccgacatatattccacattgtttcctgcattcatgggggaattaagccaacgagtcacccgaggatcgataaatttcatccccatgagctgcaggcacataaactgcatccagcaaaaagctgtgggatcgaccatagaacacatatacaaccacccctatcaaaagccacaccgataccctagcccatgttgcagcccccaaattgatgagcaggtagacattgatgaaaatgcaaacaattggtaaaagtggaacaaaagggcatatgaaacctccggtatggccgaaattatgccttgcatcatcttgatctatacaggggagcacaatcaaaccagacagaagaagaacacccccaactccgcaacatgttaaccgaataaaactcggaatccacacatttgaagctg

SEQ ID NO: 3123 - DNA, 548 bp, Gossypium hirsutum
  Clone ID: LIB3825-022-Q1-N6-F11
agcatatgacacatgggatatcaatttcatagcacacaacacaagttttactaagtatcacctgcaagatacaaatgcttcatggttgtaatatctattattcattgtttaactaccatctaaccctctatttttcactactactccctagagattcatcatgtgactacctcattagctatttattcccctctaatagtataatatcaatactaaatatattagaactacatagtctcctgtgcttattctctctgctttgtttaagtttctatttttgcctcttgtatatctttgccagaaaaaatttcaacaccgcttgtactgctttgcttggatgaccctcgatttgtttcattatcttctcgtaactcttgctctcgtactcctcaaacgcaccctgaatatccagagtttgatatagctctttcactttggcaagacatactcgatcatcttttccatagttctcatataacaacttcttttgctcctcattagcacgttccagagcttttactaccaaccaagagcacttgaagtcttca

SEQ ID NO: 3124 - DNA, 495 bp, Gossypium hirsutum
  Clone ID: LIB3825-022-Q1-N6-F12
ggagtgggagggaaaaagggggggggggggggggggggggggggggggggggaggggggggggggggggggggggggggtaggggggggggggggaaaagggggggggggaaggggggggaaaagggggggaaaaaaaagccagaaaaaaaaaaaaaaccaaaaaaaaagcccggggggaaaaaaaaaaaaaaaagggggggggagggggaaccgggaaaggggggggggggggggggggggggaaaaagggggggaaaaaaaaaaaaaaaaaaaaaaggggggggggggggccagggggaaaacgggggggaaaggggggggggcaaaaaattcccaaaaaggaagaagaaaaaaagaaaaggggaaaagggggggggggggacgggggggaaaaaaaaaagggggggaaaagggccaaaaaaaaaaaggaaaaaaagaaaaaaggggaggggggggggggtaaaaaaaggggcaaaaaaaaaagaaggggggg

SEQ ID NO: 3125 - DNA, 564 bp, Gossypium hirsutum
  Clone ID: LIB3825-022-Q1-N6-F2
gacttaaaacaaaacagaaaccccatcttttgcttattttacaaaacaggacaccatttttatatatagctgctacagaatgcatactatcttaaacacacaagatttcacttccccagcattatatataactttaaaaaactacatatagatgatgaagctatgtatatattattatgcgttgacattctcattaagcctagcagctgccgccatagatgctgccactcctcctggatgtgtggctacatttggattgtttctcagctctgcactcaccactccttcagcatcttgccttgtcactgctttatccgccggtaacttcgccgttgcacccgttaaaacttgattcagcttgatcttttcctcatcgcgatccagggtcgcgttatgagccgcggcggattgagcagtagcggcgagtccgccggggattatgacattcgaaccagtcgctcgaacttccgcggcttgaacggcagcggcatcgctttgatcgacgggcttgtcgcccgctgttttagcggttgcttcgagggcttcacctatggttattgcgtt

SEQ ID NO: 3126 - DNA, 572 bp, Gossypium hirsutum
  Clone ID: LIB3825-022-Q1-N6-F3
ataaacggaatcaaagctgttgatatagactcgatttccacgcctctgttttggcttgaaatataacagacactaatggtatgtagtactttatgactctaatccctttaacaagctctttaagttactacactcgtacgggtacaacacaaaccactgtaaaataatattacaaaccttttcttgtatcattacaggactaggctagcaacaaggatagattctcaggttggcttttgcttctcctggttagcatcgatttgcttgcttgttctttagtagtatttcatctggtcgtcaatggaggatgacttcaatcatggcttctctgttaaaattcttcttgaggtgtctgtaactgtaaaacgaatcccttcataggaagtaagatagttgctccttttttcttgaacccccttctccgtacaagtcattccactgttttaactcattcattccagctccctcagatgcgaagctagccgccacctgattctttgcttgcctgaaatcttccatagataatggccttagggtaatgactctttcatctgtaccatcttctttgtttt

SEQ ID NO: 3127 - DNA, 563 bp, Gossypium hirsutum
  Clone ID: LIB3825-022-Q1-N6-F4
ctggaaacaaaaattttctcttttctgctatatatatatatatagtgcgtgctagtgtgtcgaagcaacaccatcccatgtacgagcgatcttctatatgaaacttcatctacatcttctgccacctatcaaatccatatgaaacagctgtcaaaagaatagagaaaaaaaaaaccgtgagggatagcgactttcagtaaggaaatctgccggtcatccgaatatgctcaagagttcttctaaggccatatttataaactgcctgattccctgctctaaacccatctccatatacagaccatgtgtatcattctattggatgcttagaaaaactcacccaactatctataaaattcggcccttttgccttttacttattctactagaaccctaggataatgcacagcgcaacatctctgctcgaaataacaatcgagctgcgtattctatccacatgtgacactaatacctgacaaataccttcccttcacgtcactgactcagagtctgaaaacctcgaattcaaattcatgcatgcctcatttagtgcgctaagatcaacc

SEQ ID NO: 3128 - DNA, 551 bp, Gossypium hirsutum
  Clone ID: LIB3825-022-Q1-N6-F6
ggccaatctttttattgtcacaactatttacccttcattaatacaaacattaaagtcttaagcataatcatatcaaacataacattaccctaatttaaactttttaatttctaataaaagagctgaggctgttgttgatgatgtgtcacaaggtgatcaagcatccaaaggttcactgactcaggctcagcgcttccactcaactcagttgtcatctcatcaggctccaaacccaggaaggactccagactcgagatttgctccttcagctccatctcgctttccattgcttcactcggcctgtaaactccattctcgtaaccaaaacccataaaaggttgtggggttggtgggctcttggtttcagaactcggtggagtcaactcaggagccatcatacaccttttcttagcaggaggctgagttaggcgtggagtttgagggaagttgagcttggctttgtccccgcggatgcgcttggcggcttcatcgtaggctcgagccgcttcttcagccgtgttgtatgtaccgagccagattcggacaccttt

SEQ ID NO: 3129 - DNA, 542 bp, Gossypium hirsutum
  Clone ID: LIB3825-022-Q1-N6-F7
atgtaattatccacgtgtcattaaaccaaaagaagggaaaacagccgtcggaatttagaattcctatttatttaaaagactagcaaataaacacaatatctaagccaatcacatcatatatattggtttgggttccacgttgtatgttgtcgcgtgctgggtgcttattatcgtcagtcacaacggttggcgctctgagtactgggttggtcgtcgggtccgataacaaggtccttggtgttttgggcaatttccactatggtttcagcaatggctcccaatacacctgtttggttttcctcctcctcctcttctctaacgcctgaaccctcaactgttttctctgccccactctccattcttctctctacgccctccatcggcacttttttgattctctcttcttccacctggcttctcttctcagtttcctgtgttaattcaccggttttgttaggctctgatgacccctgaaaggtttgcgtcagggcatttccaattggctttgcagttttctcgaatttctctttgggttttatggc

SEQ ID NO: 3130 - DNA, 460 bp, Gossypium hirsutum
  Clone ID: LIB3825-022-Q1-N6-F9
acaaacaatgaactaacttttctttcaaacatcttgtacaaaatggtaaccgaccaacctcatttctaagcatccacaaaaaacttaaattcataataaattccaacatatcattacaaatagtacaactttaaggttgaaaaattatcagacctcaccacagcatatgcctaaaatcctgacattgtccttcacaaaaatgagattcctaaacaacacacaagccattgttgccatttaagcctcaattaggacgagctcagttctcaatgtgctgctagtcccgcaggccaagctcgacctcgagctcatcatcttcttcaaacaacttcaaaagacgggcatattgttcgtctcgtttcttcttttgccacaacttgaaaaggaaaaatgaaaacaacccaactgcaacaagtccaagcactatgaagattaccttggtcccagtattattaatcgc

SEQ ID NO: 3131 - DNA, 571 bp, Gossypium hirsutum
  Clone ID: LIB3825-022-Q1-N6-G11
ataaagtgatattctatcacaaaactgaagttctatttaaaaaggacttacattaaggataaactacaacaaatgattagaaagttgagtttagtggctttaagagacattcataaaagaacataaaaaagaaacacctatgtcctcttccacaatcctaatacatttcattccaagaaagtttccatgacatcattgtacatcctggcctcggagttccgatactcgctgggtcgtgctggtgatggtcggccaaagttgattacaaaaacatcatcattctagccggcaattgaaggcatttctaaaacttgtttttcatccttgtattatctggatgactgtccaagctcaatctaagctcaagaactcgttcgggtttgcgccgatatctgcgttatggttcgagtcttttccttcgagtataagagagtggtggtttgtttctggtttgtttcctaaattctcggagttgaataaaagcttggcatcttcggttcgtccggtgagggcactgaagaagctcaagccattaggccatttgatgtcgttttcatgctcaaccatcatg

SEQ ID NO: 3132 - DNA, 566 bp, Gossypium hirsutum
  Clone ID: LIB3825-022-Q1-N6-G12
attcaaagtccacttttgatttagatattataactaacctgaccttctgtaatatagtgcaccacaggtcgatagcaaacatgtttacaaccaccatctagcagcaacagaatagtgggaaccctgctttattgggaaaatcataaaactatgattggttcttagtagttctcaagttgatgggataccatattgtgaaaaaacaaactgaccctttgggatatacgataaggcccacccccgggccccaagttcaaacaatcacaataactaggaatctctgctgctaccctcccagggcttttacaaagttaacgaccaattccttgttatacaacatcaacacttcctaccacactttgtctacctcctttcctgttgcctactaattatctttttggaggggcagaaatggcagaaattgaaggtcaccagaaagctccatgtatggagtgaagcttatcaagtactttaggtacatgcatgaaacaaggtatcttatatcatctctgaaacacaaaaaattaatttacttctattccttagctgaaacatgattctcgcct

SEQ ID NO: 3133 - DNA, 348 bp, Gossypium hirsutum
  Clone ID: LIB3825-022-Q1-N6-G2
gttaatggctctatcaattggacataatttttattagtataataataaatttaacttttgatgtttacattggaatgggccaaatctgcccgggcccgtgttaacccaaaacaaacaaaaacaaaacaaaaaaaatccaaaaatttttaaaacccaatacatgacccaaaaaccaaacttaatatcctagcccaataagcccaatcccgaatagcccaaaaagcccaaaaacttcaacactttcgggaaccctaggtcacccttttgcgccgaaacagccttgaaacgaccgtaccacctccgtaccctaacctaaacccgtacccgagcgccaacgcacaaccccgg

SEQ ID NO: 3134 - DNA, 566 bp, Gossypium hirsutum
  unsure (1)..(566): unsure at all n locations; Clone ID: LIB3825-022-Q1-N6-G3
atgacaacaaaatctcacaaagttcgttaggaacatatgatgccatcaatccttaattgatacactgaccacatcaaaccaaagtatgatcctccaaaaactttttggagtacatgaaaatactcaaaaatttaaacgtaccccatattggacacatactcagtatccaatattacatcccagttcatgcaacatatgaactatctaactagtttaaatgaacaaaataacctttcattaacttccaatccaagaaaaaagaacataatattaaatgaaaaacatataccaagatacgctaaagataaaggtctagaagcaagatacgtaccatatctaataaaggggagaaggaaatggcaagctccaaaactatttaagggtaactaagggtggtagtacccctctaaggttttactcatcttcctcttcatcgccatctctgccagcagccttcttggcagctgctctttggttctttctcttcactcttccaggtcggccacctccaaacgnactagtgagagagaaatcgatatgtttttgcgagtcaacccttaccatga

SEQ ID NO: 3135 - DNA, 577 bp, Gossypium hirsutum
  Clone ID: LIB3825-022-Q1-N6-G4
atgggaatctgtaacgttcaaattattttttatgaaccctgtcaaaaattttgctagagtattatcagtcacttaggatactccaatgtagtcatagacagaggcagaataacaaagatgtacgtaggttatctagacaggccttgaacagcttattcattttttcactttcgtccaaagtagttccgtgccttatcagacaacccttataggggtatgagtttatgtgataactgtaggtgcggatcggccagtgaactccagcattttagaaagttttagagcaacctccacaagaggagcaagcgctccttgggaatctcttccagtttttgatgagtccttttcatattgttcaatgtagaggcggatagttgcaccttctgaaccagttccagagagacggaaaaccaattgcgatccatcctcgaacaaaaaccgaataccctggtgctttgaaacagagccatcaacaggatccttgtattcaaattcatcagcattgacaacatttgacacatctgaacgagcccccttcacaatactattgatttcatcaagagatgattgcaatttg

SEQ ID NO: 3136 - DNA, 564 bp, Gossypium hirsutum
  Clone ID: LIB3825-022-Q1-N6-G5
aagtccacctctaatatttctagaagaaaattgttcttttcagctttttctacaagttgcactgaacctaatattcagtccccttcatttttccttgcatatacataaaagaagagaaaagaaataagcaaaatcttatacatctttaattgcattttctatcttaagttgtctctatagttgcttcttcttctattagacacaatggttatcctttgatcctgaagcatgttcatgtcaggggcaagcaaccgtgtataacggtcaaaatacagaagttgtttcattagaagtgcaaactccctcggaaatcgcagtccatatgactcactcacccgaaccacatcaagaaaaagtgcattcatctgtctctcatcaacaattatatttgcagagacagcagttgcatttgtatttgtccctcgggcagtggcgacgactacctctgtatcaagttcctgtatagatgaaaatatcttttccaaatctcttgcaaaggccttggagtcaatattctgattggttgcacccatttcaatcaaggcagatgccattgattcatac

SEQ ID NO: 3137 - DNA, 535 bp, Gossypium hirsutum
  unsure (1)..(535): unsure at all n locations; Clone ID: LIB3825-022-Q1-N6-G6
catataaaatgtccacgtaattcaaatccaaatcaaaatatatgaaggttttaacacatatatggcatcgtcccaaagccaatacgttttacacactaaccaccatcatcccatggcatacttctgggtccagccacatgctgtcgtttcgtactttgcccgatcagtcttatacatgtgtgcaatctccggaacaagggggtcatcagggtttggatcagtcaacaacgagcagatcgagagcaaaaccttggaaatggttagggctggactccactgttcttttaggatatcaaaacaaatgctcccattgctattgatgtttggatggaaaaccttggtcctaaatgcaaccttagggggcttgaaaggataatctggaggaaaatgaatactaactaaaaatacacctcccgcataagggctatcggaagggcccatgagtgttgcttgccaatgaaacatgttttcagctacaggacctgcactgaaaaaagtgggtgngatccttttgcaaatccttgagttccttcaa

SEQ ID NO: 3138 - DNA, 597 bp, Gossypium hirsutum
  unsure (1)..(597): unsure at all n locations; Clone ID: LIB3825-022-Q1-N6-G7
tcgcgatctagnattcataacattgtggcaagaagaagaatcaatggaaaaagacacttcatattatgatatattgggtgtcagtgttgatgcatctataccntgaaatcaagaaggcttattacctcaacgcaaggcgagttcaccccgataaaaatctagatgatccgaaagctgctgacaaatttcacgtaagctaccaccttttaactatgcttttagttgatcaattgtttgaaaaatgtcctaaaagaagacccctttagctttagtactggtttttaactacttgttgaagggaggttcgaccctcacggaaaatattatcctcgtgttggtgttttgcctcccatactttgagcagagactaaagggcttcacggagttaaaggagagcctcggttggcggagataccacctacttgcagggaggaggtgtcggtattgtgtataatattaattatgcatattgcgcctgggggtgttcaaactaccaaggcatataggccttatctttgtaacaatggtacttcgaacccaccgaggtataggatgcataattaatcttacgcacaatactgatacctctcttgtgag

SEQ ID NO: 3139 - DNA, 567 bp, Gossypium hirsutum
  Clone ID: LIB3825-022-Q1-N6-G9
cacgtaaattaagtatataagttcattgaacaaaaaagaacacgataggtttacagccgttttaccaacacaatgatacagctgcttacaaacaaacagacaggcctccgccatttacaaacagaaacatcaaagaacacaaacaagacaacataaatactatcaatggagggaacagcaattttagaaacacaaaagtcggtcgccaatcctcccaatattaactcttactacgggtattctggaactgcaactttggacgactgaaaactatggaactgtctgcggtaccaatggcttgaaggagatttctgcagttgttcgagaactcagctaattcttctgcattcacaagcacgacccaccaatgtctttgaatctgtttctcccccatagctagaaaagggtttctcatcaagtcaatagatcatctggaggtttcactgtacagtagcctcttatacaccaaaagcagcgacattggtaccatatgtccaagaaattagatattacctcggtcaactgaattgtaatgcaagaaagatacctaatagaagggggtttcta

SEQ ID NO: 3140 - DNA, 569 bp, Gossypium hirsutum
  Clone ID: LIB3825-022-Q1-N6-H1
ggaaaacaaaatcacaatcttttgttggaatccagggcgtagtaccccctccatgttctaacaatgccgggaaaaataaaacaacaaaaaaaggaaaagagatacaaaagaggctttttcttgtccggccataaatatgaaaacaacaaaagataattattattattattattattattattattatgaagaactcagaaaaatcctccagggaaaacccgcctcttcctttgttttactcctcctctgccagaggaaccgattcagccagcttgcggtacttaagagcgtaaaacatctccaggtaacggcggctctcgcgacggtcaaggttggaaacgtgcttccagaatccatacactcccgtcaatgttaatagcctctccgaatatatctgccatgtgtatttctcctggatacgtttcaagccaccctcagagatgtcattccagtgagatggttcctttttacatttgtcgaagaaatcaacaaggatttctgcagcttgatcaccatggtaaggatcaatgttgaacccagatttaccgtggacaatgatttcagctggt

SEQ ID NO: 3141 - DNA, 446 bp, Gossypium hirsutum
  Clone ID: LIB3825-022-Q1-N6-H10
ggggggcaaaaaaaggggggggggaaaaaaaagggaaaaaaaaaaaaagggggggcaaaaaaacccgaaaaaaaaaaaaaaacccccaaaaattaaaaaaaaaaaggggcccaaaaaaaaaaaaaaaaattaaagggggaaaggggggggcatttttcggggggccccggggaaaaaaccgaaaaaaaaaaaaggggcccaaaaaaaatgggaaaaaaagggggaaaaaaaaaaagggggccccccccccaaaaaaaaaaaaccccggggtttaaaaaaaaaaaaaccctcccaaaaaacccaaggggggggggcccacccccaaaaagaaaaaaaaaaacccccaaaaaaaaaggccggggaagggtttctttttaaaaacggggccccccccgggggggaaaaaaaaaaaaaaaaccccttttcccccggagggccaaaagggg

SEQ ID NO: 3142 - DNA, 554 bp, Gossypium hirsutum
  Clone ID: LIB3825-022-Q1-N6-H11
ataggcttacttctttgattactgatatttccaatgacgaaaaaacgaccataaaatggctggtttagtctttagaatcttatcatatgtaacttcaatcatacttgcccccttgactgagaggaatgcttataatgtagtctttgatggttttggataatgttctgtgaagttggcctcaggtgccgggcaacgtgctgctcgtgctagaaaggataatgaaggcacaaacaactgaaagtgagaacacagatacccaggtattttctgtgtacatttccattgcatccgtaaacgagaaccgagtgcggttttcagcccagtttcggattcggtctgcctctgccgcatataatgcccttccctgttcatcgaaccagcgaccttgtcgcaaccaggcagtgattaaagccaatagtatccgaggtggggtcaagtagttgatggccttccctgcccctttcacaacccgcattcgtggaactagacttcgagcaacagtctccggaagctcacaaatgagattaaacatttgtttatttttcaaggttgac

SEQ ID NO: 3143 - DNA, 560 bp, Gossypium hirsutum
  Clone ID: LIB3825-022-Q1-N6-H2
aacattcaaattatttatttattttaaataaaagtgaaattaacattaaaatcttactaactcattcatagagatacaagcaatccaggaatttgttcttcccttaaattaattccttggataagccatcatcaacatactgttaggaggaactaaaacaagtatcatatagctttccctgcaaggaatctgctataaaaatcgaatgcctcttgaggtttgtattctggaacagtatgtcctgctccctttatggttaaaaaggtcaggttgttcgcataaccttgtaaatacccagcaacttgtccattggacatccatggcctccattcatctactatctcgtatccaatggatctcgtccaggcttggctcccagtgaatggaacacacatatcatgatccccactgtatatgagtgctcgatacccaccagaagtaagattcttgtgatacatgatcatgcttccagcatcgtgatcatacaagatcttgtccgtgcataactcccatttgccgattgcagtctcctcttcagcatgaattgccttcctaactgc

SEQ ID NO: 3144 - DNA, 564 bp, Gossypium hirsutum
  Clone ID: LIB3825-022-Q1-N6-H4
agaacaatagtagtccaacatcatgattttgtcaatgttcaacacgagatggagtagcacacaaattaaccaaaactgtggacgatgagctacttctagaaatataaaagttatctaagcctacaaagttaaattggcataacaaatgcatgtcttaggcaaaatgatattagcatgagcaaatggtgcactcatgataccactatgtgaattcaagcacatgagaagagatgctaatgccaatgttgataatgaaatggatgcatgcaacagctgcaagatgcatcctagaatgtagcagttgtatttgttggagcacagaaaacagagaagatccccatgatctactggtatgtcagaactggtggaggcccattggcactaggggaagaaacaagatgaccagagtccttccttttaccaaaaggattcttggaatattgtattcgcatgccaacagaaccagaactagggatcacagcaccctgtaaactgtggtgcacattggttgcagtactcacatcttcaaactctataaagcaaacagtatgcctctcttgtctc

SEQ ID NO: 3145 - DNA, 545 bp, Gossypium hirsutum
  Clone ID: LIB3825-022-Q1-N6-H5
aaaaaaaaaaaaacagccattttctataaatttaagacataaatacataatatttgcaggcattttaacagatcaaaacatgtaagtttgaaaaaggcaattcaacttcactgctccatagagttttaagagtcaagacctgctgttgatgtacattgtctcagtcgaaatgccttaccggtggaaacacgcttttctcgtggtggcgctgggaaaaacaggcggtacagaaactcttacacagtcctctttggatcacgagcggctgcaagatggtccaaaataaaatcaaacgctctggtgtcctctttcttagaattgttcatcataaaactagctgtttgagttggcaaatttgactggaaaatatcaggcataggtgatcctccatttgatccactggaaacatgattaatcccagcattttgtgcattaagattaccaaagtgttgtaagttagacattgtagcaagcaattgctgctgcgcaaagaaactccccatagcaccataattcataggctgagaggaaaaggctgggttcaa

SEQ ID NO: 3146 - DNA, 555 bp, Gossypium hirsutum
  Clone ID: LIB3825-022-Q1-N6-H6
atgttcaaagattcgttgtcactaaacaaagaaaatgatttacacaaataaaagacaagagaaaatgaagtatctaatgagcaaattattttataagcaatcagaaaaaatagtataggaaattcttagtatcctacttgaagtaagtatcgaaaaatacaaagaagagaatgagtacgaggaagcatctttaagttgaaccattcttgatgtcaggttccttgcctgtctcatggagaaaacacctgcacacaacaaggacatgatgtccctgtctccatttgacttaatcacccacattctctcataccctttctgccaacagcaagtgttcaagttcttctcttcttctctccaattcttacctccagatcttgaactgctacctccagatcttgaactgcttgttcccttgtaatttccttttgctggcgagaacgtttgagaaagccaatgcgtaagattcctctttatttttcttgaagtaaacatatccagcatcacattagacatattttcatattttgccctggcaagttcaaattttccctcttt

SEQ ID NO: 3147 - DNA, 572 bp, Gossypium hirsutum
  Clone ID: LIB3825-022-Q1-N6-H7
aatcgagtaatcagctgattcagctttgtaattgaaattaattcactgtttttttctcagaaaaaatatcatgttttcttgtagttacagttcataagtcgtccggttgaatggggggatttctataacatttcactaaagccccacacattatgggtattttaagaaatcatgataaaagaattatatgaatttatattcctttctttgaagtgataaagaatcaatacgtttgttgaccgagcttaaacaacctgcacggaggttggttgaaaaactgctctcggaactgaatcggtgttcaagtcaatgcattacggactcgtaaaagccaaaaagctatctgcagtgctaaaaggcgagcttcaaaaaggaattcctcgaaccagatatcaatccgggaaaataatgatttcatctgcatcatctttgcttcgacaacagcttcggaagaaactcttccgatgatcaaaaatgtctcgagtgaagaaccctgtaacagagagttattgactgctcttaagcaatcatttgtcttcaacattaatagaataacacggggcagtcgactg

SEQ ID NO: 3148 - DNA, 563 bp, Gossypium hirsutum
  Clone ID: LIB3825-022-Q1-N6-H9
cccattctacaagtactgggactcagttattcacatgggagactgatccatatgctatgcatttgcagctcctatattcccatggatccatagatttagaaggagaaagcaaaggactactctgtggcagcaacaactgttggcccttccaccttgaatttagcaccccatatctcctcttcttcagcaggcactgcagtgatcttgttcttaggattctcatagcttcttaatcctcctactgctgtggagtagaaacagccttgaggaaaagaagcaagagatttgccacaggcacctttcagcaattcagcattatcagcaaaggccacatatccgtcggcggtgattccccaatagagaggaaccttaccaaattgatcagaagccacaaacaaagtggaggtggatttgtcaaagacaatgaaagcaaagctcccaattagatggccaaccacatggtttggaggataaggtgctcggtcacgaagggccttgtaagcttcaatgaccaaaatcacttcatttgccgactttgccagaccatattgctgctttaaact

SEQ ID NO: 3149 - DNA, 341 bp, Gossypium hirsutum
  unsure (1)..(341): unsure at all n locations; Clone ID: LIB3825-023-Q6-K6-A1
cgaaaaaccttttagggaaanattgttgatttcttcatcggttacgtgatcgaatagtcggtttatcgacaccctcctcattattggtcgacaacaagtagaaggaaaatatcttccttgtagattcaattttgtacttgtttgcatcagtttgttcttacaaatacttggtccaactgatatcagttttcttaacccatgtatttgataatattactaagggataatttcgctaaactcattaagttattgtttatattcttaaattggtccttcaagtagacttcaaaacattataattgagcctttaaagtgttagtcttttaaaaaataaatatatt

SEQ ID NO: 3150 - DNA, 604 bp, Gossypium hirsutum
  Clone ID: LIB3825-023-Q6-K6-A2
tcgattttctgaaaacttctaaaccctaaagcttctctcttttcttctccattcaatcaaatatcatttaaaaaaaaaaccccttttttttggcagttttccccccttgttttccttgtcaaaaatggcaacacttcaagtaacaagcccaaaggaattgatatcaataaccgcttcttcttctttgttttcttcaagactacgttcttcttcaaaaatttcattgaagaaaagctttttgaggacgcgtcaccgttttggagggatagcctgttcatttgctccaatggaaactgccaagataaaggtggtcggtgttggtggaggtggtaacaatgctgttaatcgaatgattggtagcggtttacagggtgttgatttctatgcaataaacacagattctcaagcactattacagtctgctgccgagaacccacttcagattggagagcttttgactcgtggactaggcaccggtggaaatccacttttgggtgaacaagctgctgaggaatctagagatgccattgcaaatgctcttaagggctcagatcttgtcttcataactgctggcatgggcggaggcactgggtctggtgctgct

SEQ ID NO: 3151 - DNA, 591 bp, Gossypium hirsutum
  unsure (1)..(591): unsure at all n locations; Clone ID: LIB3825-023-Q6-K6-A3
tactgcttctctcaggcttctggcttggctccggtttccatctcaggtggttctcatctcaaggcacgtgaggtttggttcactaagtccagcacctttggngaaaaaaccaagtttggtagttcgaaggaaaccattgtcattgaaaaaccagttttcagtttctgctgaatagccgggtggcagcaggggtggaggaagtgattttgttactggttttcttttaggaggtgctatattcggaactttgggatacgtttttgcacctcagattagaagatcccttctaaatgaagatgaatacggattccgtaaggcaaagcgaccattatactacgatggaggtttagagaaaaccagggagaccctgaatgaaaaaatcagccaactcaatgcggccatcgataatgtatcctcacgattgcgaggcagcaacaacacacccactgtgtcggctgagactgaccctgaagtagaagacaccatgtgagacttgcgttttgttactgctgagtcatgatggttgagtttcagtggattggaggatgtttaggttctctatagcatagttgattgaaaattatatatgga

SEQ ID NO: 3152 - DNA, 385 bp, Gossypium hirsutum
  unsure (1)..(385): unsure at all n locations; Clone ID: LIB3825-023-Q6-K6-A4
cggtccggcctcccggtcgaccacgcgttcgcttttgcatccaacttcaccttccttcttatctttctcgaaaaagcaaattttaagattgtcttaaagaagtgtatatctatctatctatatatatatatattagaaatgggtaaacctccaggtggacaaaaatggttgaaaaggtccatggactgagaaagatcaaaattgatgttatattaaaacatggctgggagaggcgaccctcccaaaagcagggttgaagagatgggaagagtgcggcttgctggactaattacttaggcctgattaagagggggagntctcatcaagagatgagtaagtatatacatacacagggtaggaaacagtggcaccttgttctttctgc

SEQ ID NO: 3153 - DNA, 601 bp, Gossypium hirsutum
  unsure (1)..(601): unsure at all n locations; Clone ID: LIB3825-023-Q6-K6-A5
cagacctgctgctgatattcgccctgaagctgctcaatattgtattcaaaaacaggatcatggncttggatatggctttggaccaaaaactcattaaactatctactgctgctctagagaaaggtcttcctgtatacattgaaacacctatatgcaatgtgaaccgtgcagttggaacaatgctgagccatgaagtgactaagcgctaccaccttgcagggcttccagctggtacaattcatatcaaactctcaggaagtgcagggcagagcttgggagctttcctgtgccctggcatcatgctggagcttgaaggtgatagcaatgactatgttggaaaaggattatcaggtggaaaaattgtagtttatcctcctaaaggaagccggtttgatcctaaggaaaacatagtaattggtaatgtggctctctatggagctacttccggggaagcatatttcaatggaatggcagcagaaagattttgtgttcgtaattcaggtgctaaagcagttgtagaaggcgttggtgatcatggttgtgagtacatgactggtgggactgttgttgtacttggaaaaactggcaggaaatttgctgc

SEQ ID NO: 3154 - DNA, 512 bp, Gossypium hirsutum
  Clone ID: LIB3825-023-Q6-K6-B1
attctgttataaatatacatacatgtaccatgcgcagtgcccatcatggtaaaacaaaatctaacctgttcaaacaaacattcagctatagttttggcaaacaagtgtaaaaaccagatagatagatagaccagattctgagcattttacaccaaaaatgcacgactatttcggactgacaggggcttcgttaataacccgaataggggtaggcgggatcgattcccaccactctttcaatcgtcgatcacgatctcctccttggttgtttaccatatgctttgctagcggtgatgttgtgatcatggaatgaaacacaacagcaattatgagatacttgaaaggaatcactgcaaatattattgccaatccgatcattgcgagcattaccgtgtttttatgcttgtgtgcccttgaaaccagaaccgaatgcaatttcagtattgttacattcgcttcctttattatctcacgaaccgtcaaaaatccatattgagctgaaactatgttct

SEQ ID NO: 3155 - DNA, 607 bp, Gossypium hirsutum
  Clone ID: LIB3825-023-Q6-K6-B2
tcgcgatttcaagtggtatgatgggttcttcttgtctatgctggctacaaaatcattgttgctatcaattggaagcgttatcatcattgtacatacccgttgcatatatggatcgtggttgactactctactgtcttcatttttcgtcttttgatgtttgtagataatggacttgccgctggaatgggtttggattttgggtggcagcagaggtatgctcgattttgtggaagaatagtggtcctttcaattctgtctatgctactttatccgtttctttgggcctggactgtaattggcactctatggttcactagtgctaggaactgtttgccaaaagaaggtcagaaatatggtttcctgatttggctgcttttcagttactgtggactgctttgcattgcttgtatgtctgttggaaagtggatgacacggagacaagcacacttattacgtgctcagcagggtattcctatttcagaatatggggttttggtagacatgattcgagtaccagattgggcatttgaggctgctggtcaagagatgagaggcatgggccaagatactgcaccataccatcctggacttttattgactcctgcta

SEQ ID NO: 3156 - DNA, 523 bp, Gossypium hirsutum
  Clone ID: LIB3825-023-Q6-K6-B3
ccggtttcgacccacgcgttcgttttaattgtcaaaatgaagttattggtcctttctctgctgctaagatccttttcagacttgctgctcttcattgctaagaaaattgtgtaggcttatatctggattatcccatcacatggcttttacttatactgttattattctaatgatggaaattaaagaaattcttgatgtggtgctggtattattacacatacaagattagaaaaaagggcaacaaataattaaacttagccgccatacctgattggggatgatgcacatcagcaatgcatgaacttggggtatttcacattggatttttgaaagtaacttaaccatcggaaatcgtaatggcgctgaggatattattcagaccagacgttagtatagttgatttacatagttacttttatgggatggtacaattttgaagctataatttcagtatttgtgtaattcattaactattatgacttttaattgtcaaaatgaagttattgttccccttgggtgcatc

SEQ ID NO: 3157 - DNA, 604 bp, Gossypium hirsutum
  Clone ID: LIB3825-023-Q6-K6-B4
cggacgcgtgggggcaaacatgggtatcagttacgccaaccagggtatgtatgaggagtcgatccgatattatgttcgagcactggcaatgaatcccaaggctgataatgcatggcaatatctaagaatatctttaagctgtgtctcgcggaatgatatggtggaagcttgtgattccaggaatcttgagcttttacagaaggagtttcctctatgaatagaatatgatttcgaatttttaagtaggatgggtatcatgactaactgaaacaggggcaaaatgttactgtcaaaaatcaattcaaaaagctgtagatgctgatgtacccctgacagtttgcagctagggccatgctggtagatggtatctggggggaacgaataatgttttgtatattttatttatgtctcaacgccatgaagcatgtaattttgttaaacggggtatgggatggttgatagcgaaagataatgtttgttaggtgagaggaaagcagaaaaagaaattatggactagtgattagctgcaataagctactttttctctcacttaaatgtaattgctgattgttgaaaatggtacggaatgacgaacaactggtct

SEQ ID NO: 3158 - DNA, 508 bp, Gossypium hirsutum
  Clone ID: LIB3825-023-Q6-K6-B5
cgggtatttatgataatgaagggaggtttactcctgcaaacatcgaaagcatgtttagcaaatacgcgcgtacggtacctgacaaattcacattaggagaactttggaaaatgactgaggggaaccgagacgcattcgacctcttcggctggcttgcgggtaagttcgagtggggtgttctatatgttctggcacgggatgaggacggtatgttgtcgaaagaagcagtacgaagatgttttgatgggagcttgttcgagtattgtgcaagaatgaacatgggtaggcatgggaaagtggcttagagttggtgtttatgctccaacttctctatgtatagcctagtctgcatttgcatgatgtggtgtttatcttgtatttggtagctttatttctatggtttatgtttagttttggatttggcatttaatgtgcgtgtagttgtgtgccaatgagcttatgttatttgttgattatgatttgggtacttgaatctggttttttctgg

SEQ ID NO: 3159 - DNA, 595 bp, Gossypium hirsutum
  Clone ID: LIB3825-023-Q6-K6-B6
accggttgtgtattgggcatggagttggatcgcagtgacagtgctcatacagttaaaagaaggttgcaggttgccctcaatttccctgccgagcaaagctcgctgacttttggggatgtggagttgaagaatgatcttagtgccattcggaacgactctccgcttctcttaacaaggaactatctacacagaagctcctctactccctgtctttcgcctactggaaaagatcttcagcagagagataaaagtggtcctattgagatactgggacattctgatagctttaacgtattaaaagttgtggtgaaggacattgttaaggcaattaagatgggtgttgatccagttcctgttcatagtggtctggggggtgcctactactttaggaatcctagaggtgagaatgttgctatcgtgaagccgacagatgaagaaccttttgcaccaaacaatccaaaaggctttgttggtaaagcccttggtcaaccaggtttgaaacgttcggttcgtgtgggggagactggtttcagagaagttgttgcctaccttctggaccatgatcattttgccaatgtgccaccaaccgcgctgg

SEQ ID NO: 3160 - DNA, 617 bp, Gossypium hirsutum
  unsure (1)..(617): unsure at all n locations; Clone ID: LIB3825-023-Q6-K6-C2
gctgttccagcggctaagacagtgaaagccgatagcagttcggattcttcttctgacgatgattctgatgaggatgatgaacctgctgcaaaaaaagaagtagcagctgctaaaaatggtgcagcacctgttaagaaagcagagtcttcagattcttcagatgcagatagcagctcgggtgaggatgatgaaaaatcaaagcctgctcctaagaaagcaccaactgctgttaataaaaaggagtctagtgatagttcagaaagtgacagctcttcggatgaagatgttaaacctcctccaaagaacgtaccttcagcgactgcaaaggctaaaactgaatctagcgacagcagctctgaggaggattctgatgtagaggatgtaaagaaagcacctgctgtgaagaaagcttctgctcctccccccaagaaggttgatgattccagcagtgactcctctgatgacagtgagtctgaggatgaagaggctcctaagaaagaggctaaagttgctaaaaaagcaagcagtagtgaagaggaagaatctgaggaatcagatgatgacgaggaaagtgacgaaaaagaaggtccantagaaaaagacacagatgtggaaat

SEQ ID NO: 3161 - DNA, 526 bp, Gossypium hirsutum
  Clone ID: LIB3825-023-Q6-K6-C4
attttatttattttacgaatgaagaaagaaaagaaaaaaacatagataaaataaaacaaatataaaaaaacctgtaaaaaataaacctttgaactgatctttgctttcgtattgagttctctttttgattgaaagtacttattttttatgatttcgaattcggctcctggttacagtattaacaatggctttatatagccgaatgaaaatacaagaaatagaaacaagaaatattcttgatttgatttggtttgattttctttcctttcttgtgtttgcaggtgaagatcatgaagattcggcttggtgatggttgcggttgcggcgcaaaagtcttcttcagaaaccctagggtttctgcaaatgatttgggccattgagctttgggcccctgttgtatttcgggttttgggctctataggcctatttgtaaaaaaatggactacttatttatttggggccctttattatttgtacccgggcaaaatctgttattacagtttgaatacagtataagtttcaaaaa

SEQ ID NO: 3162 - DNA, 597 bp, Gossypium hirsutum
  Clone ID: LIB3825-023-Q6-K6-C5
tggggactgcattgttgtggctgtgattcttccctttggcagtcctcttgctgagcgccgagtcaatctttcaagcattagatgtccaaaaatgggcaatcctcgaagagatgaaaagccaactgcctatgcccgtgaagcaagggaatttttaagaacacgccttgtaggaaaacaggtgagtgtacaaatggaatattccaggaaagtccccatggcagatggagctcctgctgcatctgcagattcaagggtaatggattttggctcagtcttcctcctgtcttccatcaagggtgatggagatgaggtttctgcagcaaacgcatctgcagctggcagccagcagcctggcttgaatgtggccgagttggttgttggacgtggctttggcactgtgataagacatagagattttgaggaaagatcaaactattatgatgcccttctggctgctgaatcccgtgctatttctgggaagaagggaattcattctgcgaaggatcctccggtcatgcacattcaagaccttacaatggcatcagccaagaaagctagggatttcctgccattcctgaatcgtggcaggattccagc

SEQ ID NO: 3163 - DNA, 586 bp, Gossypium hirsutum
  Clone ID: LIB3825-023-Q6-K6-C6
tcgctcgaaatacggctctcgtgtcccggcttctgattcggccgtccttacccttcgctgcgaccgtctcaatcgggaatcatccgaggttacttatttaagcaccgatagcgtccgtgtcacgggagggtttgaattcgaggcttacgaggatgaaaagaagtattgttgtgtggctcgttggaaaggatggaaggagagtggagcatggattgttatctggcggcagcggctaaggaacctggaaattcagctttttttaagcccaagatgggtgtttcagcgccgagtattgaagtttatattgccgggtgttgtgctggcaggcccgtgatattgaccaagacaatacttgggagccctaggaggaaaggagcatcgaggcttaaatggatgttggatgcaattcctgaggacgaggaattcgggaaagggaatgataagggtggcaatgggtttatcagacaccggaaattgcaggttacagatgccgaagtcgaagattacgactcggatggtaaaattggacttagtcactatgctgaagaaatgtatgctggcgaagatggccaactttcatggttta

SEQ ID NO: 3164 - DNA, 579 bp, Gossypium hirsutum
  Clone ID: LIB3825-023-Q6-K6-D1
cttttctttacatctatcctctcattttttcccacttatttctcctccttctcataacccaacctcctactttcaacttccaatccaatgtcttcctccgtttcttcccaacatgatcaggttctagtagaagaaaactccttcgcaagaattctaaccttaaaccggcctaagcagctcaatgccctttcatttcagatgatttctcggttactagaactttttcttgcctacgaggaggatcctaatgtcaagctggtaatactgaagggaaaaggaagagcattttgtgctggtggagatgttgtagctgtggtacatgatatttgggcaggtggatggagagcaggtgccaacttttttatgaaggaattctccttaaactatttgatggcgacctatagcaaaccacaggtttcaattcttaatggaatcgttatgggaggtgggaacggtgtttcaattcatgggagattccgtgttgcaactgagaactcggtttttgcaatgcctgaaacagctttgggactcttcccagtgtaggagcggtatatttcttgtcaagactcccaggatttt

SEQ ID NO: 3165 - DNA, 542 bp, Gossypium hirsutum
  Clone ID: LIB3825-023-Q6-K6-D2
atacgacgacaggcgggcggtgaccaggatggcaggcttacgcacacgagcatcacgacctactcaatattttattgtggccgcggagttcactgaacctgaacgcagatttacatcggtgggacatgaaaaaacaatgtggtgaccaaactcatttgtgtggccatacattcacctttgagaaagagaatgaataacgagaaggcccggacggtgctccctttccctgaaacaagcaatctgcatgatttaatggaacggacgctgtacatttgcaggaaagcgcgtcatggccgttgcagtgttactgcgcaatcaacaacattacactatgcactgccgttgatccgctcattactgtatgatgcgtgcctttctggaaaccttacggaacatgtgcacgtaaagctatagatcaggtgctgcctttagggttgcgattggacggttaccggcaccatgcacacgaagaactccatcaggcagagggtaaacgtacctgggccataaaacatgatagacagcatgaagcgctgagacac

SEQ ID NO: 3166 - DNA, 614 bp, Gossypium hirsutum
  Clone ID: LIB3825-023-Q6-K6-D3
cccggttcgacccagctttcggctttagctaatttcttacccacccattctccgaattgtcattccgtggggagaccaccgaatgctaaacagcatttttgccctgaataagcctgtaacgaatagggctgtaatagcttattacagccaaccaaacaatgttttaataatgggcccactgaattgagctgtaatgcataggtattacagccaaccaaacatactgtaagtttttgctttcatatatatctgaggaagacatatgacaaccgctgctagacccacatggcagcttgccaaaggtgaaaacgaataaggtgatactcggatttttggcccatctcagaagtactcatccatggaccttgctgctcatactactctaatactctaaagcatagaaaagatgggcaggacacacaagacgagttgcagaagagaaacctccgtgctgagcttgaagagcgtgaacggagacatttctcatcaaaggacaaatccaagcatgctactaactgttcttcgtatattgcatgaatttttttctattgatatggtttccaaaggttacgggttgcgcaaaggagctcatgatttgatgattcatcttgttc

SEQ ID NO: 3167 - DNA, 601 bp, Gossypium hirsutum
  Clone ID: LIB3825-023-Q6-K6-D5
ttttaatatttgttcaaagctttcgattacaaatccctcgcgaaagagcagatctttgtgaaaactcttactggtaagaccatcaccctcgaggtggaaagctccgacacaattgataatgtcaaggccaagatccaagacaaggaagggatcccccctgaccaacagaggcttatcttcgctgggaaacagcttgaggatggccgtacccttgctgactacaacatccaaaaggagtccaccctccatcttgtccttcgtctcaggggtggcatgcagatcttcgtgaaaaccctcactggcaagacaatcacccttgaggttgaaagctccgacacaattgataatgtcaaggctaagatccaggataaggaagggatccctcctgatcaacagaggcttatctttgccggtaagcaactggaagatggtcgcacccttgctgactacaacattcaaaaagagtctaccctccaccttgtgcttcgtctcaggggtggcatgcaaatatttgtcaaaactcttactggcaagacaatcacccttgaagtggaaagctccgacacaattgataatgtcaaggccaagatccaagacaaag

SEQ ID NO: 3168 - DNA, 451 bp, Gossypium hirsutum
  unsure (1)..(451): unsure at all n locations; Clone ID: LIB3825-023-Q6-K6-E1
ccggtttcgacccacgcgtttcttcccgcgtccggttccacttactaggagcaaagcaagcaaaatccaaaatcagtgagatatggcgtcagaacaacttagtcgtggagaaaacaccacatccgagagagacattcatttggaggagaacagagtccctaagatggctactcatttcgaatctctggccgagaaatccaggcggtgcgatgtgggtgctgctgctgccaagcacaatcctattcatggtgagcgccatgaatttcactcccttgaagggaaagtcggtgacgtgaatgtttccgctaccataatcgccaaaacgggagcgggtgatcaggccggagaaggaagagggaatctgcttctggagaggaagggagaaccttacgcgattgggaaattgctgtgactgcgtgtggngctggagctggtgctggtgctggacagg

SEQ ID NO: 3169 - DNA, 306 bp, Gossypium hirsutum
  Clone ID: LIB3825-023-Q6-K6-E2
cgtggggtccagtttcgagggttaaaaacttcaacatctgaattataagtaaaccccatactcgggtaagactagagagtaaaatactgttcctttgttcgtcggatgcagtttatgtgtcacattttcgttgcatttttttttcatgtttccattgatctcggtacttgtctggtgtgggttcagccgtaaacatgcaaccaagataatggctatacttggtgcttcgtagggttacttttttttggttagaagtgtcagatattagtgttcaaactttggattatttgaatgcatgccatgttg

SEQ ID NO: 3170 - DNA, 584 bp, Gossypium hirsutum
  Clone ID: LIB3825-023-Q6-K6-E3
ttcggcaaatgtttggtttcgttcatctttacaatggccaagaaactgtttcatttagtttcattaagctcttaatgcagtaagattccatcgtcagtacttaccgtgatcacgtgcacgccttaagcaaaggcgtctgtgcacgtgctgtcatgagtgagctattcagtaaaactaccagctgttaccgtggccaaggtggattgatgcatatgttcttgagggagcacaatgtgctcggtgggttcgcttttattggtgaagggatttctatagccaccggtgctacttttacctctaagtataagaagaaggttttaaaaaaaaagcggattacgattacgtcactttggcatttttcagggatgggacttgtaacaatggacagttctttgagtgtttgaatatggcagcgttgtggaaattacccatcgtgtttgttgttgagaacaatttatgggctattgagatgtctcatttaagggctacttctaatccttaactttataataaagtaccggcttttgggatgcccagtattcatgtggatgggatgaatgtattgaaagtgagggaagtggcta

SEQ ID NO: 3171 - DNA, 512 bp, Gossypium hirsutum
  unsure (1)..(512): unsure at all n locations; Clone ID: LIB3825-023-Q6-K6-E4
gtcctagnatatttgaggtcgatacctccaaggaaaagaagaaacccaaagaaggtgacaatgttgtggaggagcctcctgctgatataccttcactattggagttgaagcgtatctactatgaactgatgattaggtattactttcataacaatgactaccttgaaatttgccgttgctgtgaggcaatatacgagattccatccataagagaagatccatctcagtggattccggtcttaagaaaaatctgttggtacttaatcttggccccacatgatccaatgcagtcaagccttcttaattccacattggaggataagaatctttctgagatcccaaaatttaagttgctattgaaacagttagttacaatggaggttatccagtggacatccctgtgggatttatacagggatgaatttgagaatgtgaagaacatgcttggaggttctttgggtgacatagctgcgtaagatttgagcaatgagaatctttgtacattatctcct

SEQ ID NO: 3172 - DNA, 581 bp, Gossypium hirsutum
  Clone ID: LIB3825-023-Q6-K6-E6
ctcttttcactctcccctcaagctccggcctaggtccggtcgaactccggtcatcgggccacctcccgtccgctgccgtacacggtggctggagttccaaaaaaaagcctttttagctttttgactccccaaactccgatctggggtcagtttctttagaagattgcccaaaagtcgccagaaaaaaagagaaaacctttcgactttttagggttctaaaaaaacctttctatataaaaaggaggtcactgttcctcgacagtgacgacctcggttgcttgcggagtcggaggatcgaccaccaggtaacagaaacgtcaaacgcgtgtggctgtggtggtgtgttggggaggagcaacggcagcttgtaggctagggtttcttttttctttgctgaaagttaaagttgtgggtttttgggctgttagggttttaatttatttgggcttttgttttttgttgttttagggcttgtaatggactgttttgtgattttgaagaaatagtgtccatttgtaagattttatttttattttttgtgattttgatgccttaatcaattccaatatgtttaagttgaa

SEQ ID NO: 3173 - DNA, 483 bp, Gossypium hirsutum
  unsure (1)..(483): unsure at all n locations; Clone ID: LIB3825-023-Q6-K6-F2
aggacaaagaaggaagcccacgcagaccaacaaagagggaggggggggggaaaacacnnngaagaggaagaacncnnngccgananaananccagaaggagncnacncnccannnggnncnccgccnncgggggggggggggggggggngnaaagacncnnaccggaaagaccancacnggggagggggaaagnnnccgaaccanngacaaggggaaggcaaaganccaagacaaggagggnanccccccagaccagcaaaggcncancnnngcnggcaagcagcncgaagaagggaggacannggccgacnacaananccaaaaggagncnacccnncannnggngnngcggcngcgnggggggangcagancnnngnnaagacncnnacnggaaagacnancacncnagagggggaaagggcagacaccanngacaancnaaaggcaaagaaacaagacaaggaagggancccaccagacc

SEQ ID NO: 3174 - DNA, 579 bp, Gossypium hirsutum
  unsure (1)..(579): unsure at all n locations; Clone ID: LIB3825-023-Q6-K6-F3
attgatcgtcgtaagaggctgatcatagccatggatgctgcatttggaatggagtatttgcatgngaaaaaacattgtacattttgatttgaaatgtgaaaatctgttggtaaatatgagagatccacagcgtccagtgtgcaagattggtgatttgggcttgtcaaaggggggagagcatacattagtttcgggaggcgttcgtggaactctaccctggatggcacctgagcttttgagtggtaaaagtaacatggtatctgaaaagattgatgtctactctttcggcattgttatgtgggagttgctgactggtgaagaaccttatgcagatatgcattgtgcttctataattgggggaattgtaaacaacacattacgtccaaaaataccatcatggtgcgatcccgaatggaaggcattgatggaaaagtgttgggcctctgatgctgcagagaggcctccattttcagaaatatctcagaagctgaggagcatggctgctgctataaacgtaaaataaaggcaatcctgaagtagcccatcatcatatcatacggtggaaaacaaaagtaaggc

SEQ ID NO: 3175 - DNA, 525 bp, Gossypium hirsutum
  unsure (1)..(525): unsure at all n locations; Clone ID: LIB3825-023-Q6-K6-F4
gtgaccgcagaagaattaacgaanaaaacttgcagagatcggattaaggggcaaattcgaaaagaaaaaaaatggaagattttgagaagaaggtttcaataaaagactcaatggagattgaacaagaaaacagcaattgcagtaaaagcaatgaaattctcaattcacttcgcaaattccttgaaattcaacagcgtagagctcaggcttactccaagcttaaaacgggtttttcggagtatatgaaatcgggaggggaattggcctaccagcagctttgcagtgagatcacagtagagttcaatgattgctcaaaacaagtccttgagatggaatctctgtttttaaaccccaattactgccgagttgatctagctgagcttctcagagccattcaaacacaggaaaagcagaaattacatttgactgccacgattcatgtcttgaagaaggcaggtcgtccgtcagagcgtttggtgaaccatgagaattgctcatttaagaagccaatggagcatgaatgtg

SEQ ID NO: 3176 - DNA, 601 bp, Gossypium hirsutum
  Clone ID: LIB3825-023-Q6-K6-F5
ctgtataattgcataaatttgactgaaaccattgaggagtttgaattatcatggagttcccttattgagaagtataatcttagtgcacatgattggcttcaatcattatatagtgctcgagctcaatgggtccctgtctattttcgggattccttttttgctgcaatatctctcaatcaaggatttgatggctctttttttgatggttatgtgaatcaacagaccacgattcctatgttctttagacagtatgaacgagcaatggagaattggtttgaaagggagatcgaagctgattttgacagtatttgcacgacacctgtgctgcggacaccatctcctatggagaaacaagcagcagacctatatacacggaaaatattcacaaaatttcaagaagaactagtcgaaacatttgtttatactgctaatagaattgatggggatgaaactatcagcacatttagagttgcaaagtttgaggacgtcaacaaagcatacatggttacattaaactaccctgaaatgagagctaattgtagttgtcaaatgttcgagtattctggcatcctttgtagacatgttttaacggtcttcactg

SEQ ID NO: 3177 - DNA, 580 bp, Gossypium hirsutum
  Clone ID: LIB3825-023-Q6-K6-F6
gccgtgcattcttgatgattttgaattttatgaagctcgtcagaagacaatccaagagaaaaggctaagcatcagctgttacaagaaaggttttgagtggagagcctaatgatgctgtaatggagaagaaagaaatgtggcaatagcaaataacgctttggaaaagtctgtggagtcagcgtcgataaaagaaccaactgttgcatcaacaacagaagtagtaaaggctaatgtcgatgtgaaacctgtacaagagaatggatcagttacagcaactgaagatggccccaactcagtttgtgttgcgagtgcttgctaattgccttcttagatttggaaatagtgttgtccttttggttggttattgacaagttagctgattcagatcagagcctctgattggctgggactggtctatagctttttccatggaggtaggaatgagcaacacctttcagcattgtaggcaaaatagcaattagcagcatggttagactgaatgtgactgctcaatagcgtgaggttttcttttttgtctttcatttctcatctgttttcctggttattttctttttcttaa

SEQ ID NO: 3178 - DNA, 595 bp, Gossypium hirsutum
  Clone ID: LIB3825-023-Q6-K6-G2
tcgcgccaatgctgtagctgcaggaagggttgctggaattgatccaatagaacagataaccaagagatgcattcgtattatcagaactccagaggcagaagttcctagtgtgtgtgtgctatgcagaggtcatgattttagcaagtcagggtttggtcctcgcactgttatactctgtggtgagggggagagagaatatcatgtgggttgtttgagagatcataacattgatgacctaaaggagttaccaaaaggaaagtggttttgttgcacggattgcaatagaatccattctgctttacagaaattggtcattcgtggggaggagcagcttcctgattcatctctggatgttgtgaagaagaagcatgtagaaaatagtttacggagcaaggccaaacttgatataagatggagggttctcagcgggaaaatgacatctttagatgacaccagagtaacgctatcaaaggctgttgcgatcttccatgagcgctttgatcctataagtgactctggatcgagtagaggtgatcttatcccatcaatggtttatgggagaactgtcaagggccaagattttggaggcatgtac

SEQ ID NO: 3179 - DNA, 600 bp, Gossypium hirsutum
  Clone ID: LIB3825-023-Q6-K6-G3
cccggttcgcccagtcttcgaaggaacttttcctcataccgctgctgctggctggcgtagtcagtattttgtactggaggttttttgatgacctccgaccctacgccgttgttcagtttgttccttgcattgtcatccccctcatggcaatcttgttgcctccgatgtacacacattctacatattggctttgggcggcaggattctatcttttagctaaggtagaagaagcagaggataaagtaatatacaaatggacccatcatattgtgagcggacacacccttaagcacttgtgtgctgccatggttccggtgtttttgacacttatgctggcaaagaggacgactgaaacaaacaggataagcctactgaagacatggaaggtttcatggacaaaggtgaatgaaaatggtaccagggtggaaagtggggagtatgtttacaccagtgttcaatctgaggattcacattgacttgctattctcctattttctttctaactaaattccatgcaacaatagaaatgggtctattactttgtttgggaatttgaacaaatttggttactcaagagtaactgccaaatgtctgtaaata

SEQ ID NO: 3180 - DNA, 582 bp, Gossypium hirsutum
  Clone ID: LIB3825-023-Q6-K6-G4
cggccgcgtgggcttggcaggtacaagagtacgttgaagctgcaacattcttcaaattctgccaaaccggaactcttttgaatcttgatgagataaatgctagtttactgccactgagtgatccatctctcgagcctttgcaaattaacctccttgactatctcttagggctagcagatttgactggagaactgatgcggttagcaattggtcgaatatctgatggtgaagtagaatattctgagagaatatgccagtttgtacgtgatatttacagagaattgactcttcttgtcccacttatggatgacggttctgacatgaagacaaagatggatacaatgctccaaagtgttgtgaaaatagagaatgcatgctttagtgttcgtgtgagaggatcagagtacattccacttctagggtccagcgatccaagttctttcttagtgggagtatctgatgtggaattatgaaattgttgactggaggagatgtttcctgctcaagattcaaaggtttgggagtaggtgaggaaatgtttgcgccgatattgaagatctttgaggcatttttggaccgcac

SEQ ID NO: 3181 - DNA, 282 bp, Gossypium hirsutum
  Clone ID: LIB3825-023-Q6-K6-G5
gttttgtaaagcataagcttcaggttattttcaatgctttgtaatagtttataggcgctccgtgttgtgaactcacccgtcgcttcaacgctccaaacttggaaatcttcatgcggactttcagctagtgggatactgaggatcatctctgctacatcctccggaaaggtagtagctgggtgcaattactcatcccatgccccattcttccgcattcaaaactgaatattggcaaattttcatacttgaagggtatccaaactttactaacataagcattag

SEQ ID NO: 3182 - DNA, 596 bp, Gossypium hirsutum
  Clone ID: LIB3825-023-Q6-K6-H2
gcgttcgggcagaacctcaccctcgagttgggaagttctgatacgattgtataatgtcaaggccaagatccaagacaaggaagggatccctccagaccaacagaggcttatctttgcaggtaaacagcttgaagatggccgaactcttgcggattacaacatccagaaagagtctaccctccaccttgtccttcgtcttaggggtgggatgcagatctttgtaaaaacccttactggtaagaccatcacccttgaggtggagagctccgatactatcgataatgtcaaggccaagatccaagacaaggaagggattccaccagatcagcagaggttgatttttgccggaaagcagctcgaggatgggaggacacttgcggattataacatccaaaaggagtcaaccctgcacttggtgctgcgactgcgtggtggaatgcagatttttgtgaaaactttgactggaaaaactattacattggaggtggagagctcagatacaattgataacgtgaaggccaagattcaggacaaggagggtatcccacctgaccagcagaggttgatttttgctggaaagcaactcgaggatggga

SEQ ID NO: 3183 - DNA, 585 bp, Gossypium hirsutum
  Clone ID: LIB3825-023-Q6-K6-H5
tcgcgcgtcatctctggaacctcaatcacctatcctttattctgtagaaaaaaaaaattcaggactttttttttatctgttgacttttttcccctccccttcctttttggccatgaatcaaatagctcgaagccatttgattatgtttctttttgctctttcctttcttgttccttcacttgaagctagtgaaggtgatgctgatccgatttacaagacttgtttagaagattgtgaaataagtgggtgtgtaggggaaatgtgttttcaacactgtaaattctcttccgatgggaaaccaattgatggaccatggtatttgcaagaacccctttatcagaaatggaaacaatgggattgtcggtctgattgtcggtaccattgtatgattgctagagaggaacagagatggaaactcggtgggaaaccgatcaaatatcacggaaaatggcctttccaacgcgtctacgctatccaggaaccggcagctgtagcattctctgcaataagcctcgcgattcagtttcatgagatgtcgagttgacagagaagctggattattcatctgccgttgcactagttgga

SEQ ID NO: 3184 - DNA, 424 bp, Gossypium hirsutum
  unsure (1)..(424): unsure at all n locations; Clone ID: LIB3825-023-Q6-K6-H6
ccccgcgtccggaaacaggnaactttattgtgtaagaaatgggtgatccagcatcagcctcagtcggaaatgaatcggaaccatcttcgtcgcccattgaggtcatcagaaactatcccatcccacaattgaactctccaactgctgtgagagtcaaagtgaaagccaccagcttgaactatgccaattaccttcagattttgggcaagtatcaagagaagcctcccctccctttcattcctggctccgattatgctggcactgttgacgccgtcggccccgccgtcaccaagttcaaggtgggcgaccacgtctgctccttcgctgccctaggctccttcgcctccttcatcgtccaagaccaatccctnctgtccgtcccctgcttaattaaatttattcaattcaattcaaaagtactgat

SEQ ID NO: 3185 - DNA, 586 bp, Gossypium hirsutum
  unsure (1)..(586): unsure at all n locations; Clone ID: LIB3825-024-Q6-K6-A3
tcggggagnaatagtccaagctcctttggggttgttccctcgaccttggccaccaaatgctgatgcttctgaagccagccagttttttaaagtcatcgaatatttccggctacttggacgtgtgatggcgaaagctcttcaagatgggcgacttttagacctgccactatcaacaccattttacaaacttgtgcttggtcaagagcttgatttgtatgatattctgtcttttgatggtgagtttgggaaaattttgcaagaactgcatttccttgtttgtcgaaagcaatatttggaatcgactggtggtgaaagtagtgctgctgttgatgaattgtgcttccgtggtaccccgatagaagatctctgtttggattttacgcttccaggctatccagaatacatactgaaaccaggggatggcactgtggatatcaataacttagaggaatacatatcctttgtcgttgatgcaactgtcaaggctggaattattcggcaaatggaggcatttcgagctggatttaatcaggtttttgatgttgcatcattacaaatatttacaccccaagagttggactatttg

SEQ ID NO: 3186 - DNA, 564 bp, Gossypium hirsutum
  Clone ID: LIB3825-024-Q6-K6-A6
aaacattcaaaagggacctgtttccaaaacacaacaatcacaggtgctactgatagagtatcccaaaaaggaaccaaacggtttaaatcccaaaaaacatacgagaacacaatagagaaaccagatgaagaaaatcaatgttttagtcaacttcctcaatcttaggaccagcaccacttccaccagccggaacatcctcatccatgccaccacccatgtcaccgccggcaccctggtacatcttagcaatgatggggttgcaaatactctccaactccttcatcttgtcttcaaattcatcggattcggcgagttggttgctgtctagccattgaatggcttgttcaatagcatcttcgatcttctttttatcagttgctgggagtttggcaccaatcttttcgtccttaactgtgttcctcatattgtatgcatagttttccaatgcattctttgcctcgaccttctttttatgttcttcatcttcggatttgtatttctctgcttcttgaaccatcttttcaatttcttctttggagagtcggcccttgtcgtttgtgatgg

SEQ ID NO: 3187 - DNA, 595 bp, Gossypium hirsutum
  Clone ID: LIB3825-024-Q6-K6-B1
gcgttctgtttctctcactttctctctcttctctgagctccgattcttcaaaccctaagacccccccttctctaatttcatctgatcgatcagttctttaagcttcacaatcccaatcccaatcccatgctcctttcccttttctcctaatattttctttcccgagaaaactgaagaatccgagacattggtttgtttggaagaagtcacataagaatcgaggaggagaaaggaggaggaggagctgtagatagaagatttgtgaaaaaatggcctcgaccacaacgagttcggtttacatcaacgtcatcgaagacgtcatcaacaaggttcgcgaagagttcatcaacaacggtggacctggcgaagctgtcctcaacgaactccaaggaatttgggaagcgaagatgatgcaagcgggagtaatattgggtccgatagagaggtcttcgcagaagcagcctactcccggtagcgcaattactcctgtgcacgatcttaatgttccttatgaagggacgggggaatacgaaactcctacagctgatgtgctttttcctccgactccattggaaacaccagttcctacaccact

SEQ ID NO: 3188 - DNA, 586 bp, Gossypium hirsutum
  unsure (1)..(586): unsure at all n locations; Clone ID: LIB3825-024-Q6-K6-B2
tcgcggncgcgtgggcggacgcgtgggtgcgaatgttttctaccccgtcccagtccaactcagatgccccttgttcatcttcttcttccgttgcagttcatttagctggcagcaagctttccttcgagaaacccatgcaaaaacatatgactgtttaatcttctgtctggtggagagatgagtggggcaataaaagcagtcattttcaactctcaaggcagctgtcttttccaaagggctgctttattccattccactcctgtccttgaacacaaaaaacgcaattactggcaatttggtaagaggaaaagaaggatgcgtgcaaaacaagaattactgcgcaattttggtgcttatgcagatatcatgtttgagaactggagagatgagtttcatgaagatgatccatcatcaagtagaggtccgtcatggttcaaaaaacaacaaagtaagggatctagaagagattggtccgacaataaaggattttattacaggggtagaagaccttttgagttttgtgaagacattgatgatgacatagagaacatatttaggtctgcatttggtggaagccggttctttt

SEQ ID NO: 3189 - DNA, 598 bp, Gossypium hirsutum
  Clone ID: LIB3825-024-Q6-K6-B3
tcgaaaaatggaaggagcttcgtaccagcgattcccagggtcaaaatccgggaactcaaagacgaatacgctaaattcgagctccacgacaccgatgcttccatggccaacgccctccgccgcgtcatgatcgccgaggttcccaccatagctatcgatctcgtcgaaatcgaagttaactcttccgtcctcaacgacgagttcatcgcccatcgactcggtctcatccctctcactagccaacgcgccatgtcgatgcgattctcgcgtgactgtgacgcctgcgacggtgacggacagtgcgagttctgctccgtcgagttccatcttcgcgccaaatgcataagcgatcaaacactggatgtcaccagtaaggatctttacagttccgatcatacggttgttcccgtcgatttcaccgattccgctggctacgaatcctctgaacaaagggggattatcatcgtgaaattgcggcgagggcaggagttgaggctgagggcaattgcgaggaaagggataggaaaagatcatgcgaaatggtcacctgccgcgactgtgactttcatgtatgaacctgagattcacatcaatgaaa

SEQ ID NO: 3190 - DNA, 602 bp, Gossypium hirsutum
  unsure (1)..(602): unsure at all n locations; Clone ID: LIB3825-024-Q6-K6-B4
agcacaccaacaaanaatatcttgcaaagctcaacatgcaaaccttacatgtcgttttgtactgcacctgaaatgttgtctttaatggtatccaattactaaaaaccaagaaattgagaatttatcctttgcatcactatagccactgcctgcctcaaccatacacccagataaaatattatcattttgcattttaactgtagcaacatgaatcacgttacattcctggagattgtttagttgcttaatatgtttataaacaatacataatgattaaataatcattagtttgttgcatatatttcaaaagtcttttaatttacgtgtagtttaaatggctttatgttcctaaggttaatggtgggcgagaagggcgatcaattggagcttacgagcttgcgaaagttgttgaagaactgggagctggagaaatactattgaactgcattgattgcgacggtcaaggaaaagggtttgatattgatttaataaagctgatatctgatgctgtcagcatccctgtaattgcaagtagcggtgctggtgctgttgaacacttctcagaggtattcatgaaaacaaatgcatcagctgctcttgct

SEQ ID NO: 3191 - DNA, 592 bp, Gossypium hirsutum
  Clone ID: LIB3825-024-Q6-K6-B6
gaaaaccgaaatttctttaaacatagaaaagaaaagcgtattttctcggataattaatgggaagagcgtttgtgtatgtaattcttggaggaggtgtagcagctggatatgcagctcttgaatttacgagaaaaggggtttctcctggtgaactttgcattatttctgaagaacctgttgccccatatgagaggcctgctttaagcaaaggctttttacttcccgaatctcctgcacgccttccatcattccacacatgcgttggtgctaatgaggaaaggttaactcctaaatggtacaaggaacatgggattgaattggtccttggaactcgagttaagtctgttgatgtcagacgtaagaagctattgacagcaacaggagagacgataagttacaagatccttctcattgccacaggagctcgggctttgaagcttgaagaatttggagtggatggatcagaagctgaaaattggctcgattgtttacaccgaagattgcaaactattatgaggaatattatcaagctaaaggagttaagttcgtcaaaggaactgtcttgacgtcgtttgaatttgattctagtgga

SEQ ID NO: 3192 - DNA, 618 bp, Gossypium hirsutum
  unsure (1)..(618): unsure at all n locations; Clone ID: LIB3825-024-Q6-K6-C2
cccggtttgacccagcgtttttggncgcgtgggtgactccggtcatgcgtgaatctcttcatctcccaggccccgttctggccatttcgatccaacttcgttaaagactccagcttgatgaagcaacctgaacaagtgagaaggggaaggggaaggtaaggaactcaaagtattccagcttgatgaagcaacctgaatgcggggggggagaaggggaaggggaaggggaagataaggaactcgaagaggatgatatcagccaagactccgattgtttctccagtttatccaattctaaaccggtaaaatcttggcattttgtacgcttggagaagacatgtcagcgtaatgagcaggtagctttgttgttaaaggtgcttaaatgtgataagtctgtaatcccatctatatatgaattccgtagcctcttgtcttttcatgcttacttgacgttggatgaggctgagaacttaagtgaattagaagaagtcgaggaaattggtttgccttcaatgtcggtgcttgctaggaaagcaaaacgaatcaggcagcattctctcgcagcggagacaaaacaaagagaaatggaggtacaatgaagatttgcattacccaaca

SEQ ID NO: 3193 - DNA, 256 bp, Gossypium hirsutum
  unsure (1)..(256): unsure at all n locations; Clone ID: LIB3825-024-Q6-K6-C3
tcggnanaaagctccaagnaccgaagcaagaaatcaanaactcaatcagctaaacttctatatgactgagtgtgtttaaagaattttatttgccaaatgaacttgaatttgctgtcatttataatttagctgcgcttaggttcatgtataatagttacaaattttgcaattacaactgcttgcactgtcatttatagcttaaaagtatttgttgaggattggggtattccattgcaatagaagaatgttttggaac

SEQ ID NO: 3194 - DNA, 358 bp, Gossypium hirsutum
  unsure (1)..(358): unsure at all n locations; Clone ID: LIB3825-024-Q6-K6-C4
tctgttcctctcgattccgttcccagcgggtcacctggcgacgagattctgtatccgctgtctgatgatgatattgaccacgatcacggtcacgaaaatgaagatgatcacggccaggaggatcaggttcagaattatgagatctcgtcggcggttgatgtacttactgatattctcagggggagggagatttttttcttttttgtggggggncagcgnngaaaagcggcccacccgccagcccttgatgggactgattaagaagaacaaagaagggtttgttcctatgtcagttgtttcttcgtttggggaactggantgacttgccagaaattatccatctgtaggtgccggtctc

SEQ ID NO: 3195 - DNA, 602 bp, Gossypium hirsutum
  Clone ID: LIB3825-024-Q6-K6-C5
ccccgcgtccgcccaatttgacttgatttcctctttccatcgaagagtttagagggattcagaaaatgcagggaggcagaggtggaagagatcctttcttcaattttggtggtgaccccttcggtggtgacctcttcggtggtgaccccttcggtggttctgggggctttggaggatttggtggtcctagaaatttattctccaacttctttggaggaaggaacccatttgatgacccttttatcacacgcccttttggaagcatgtttgattcaagcttctttggccccggtcaaagtccttttatggatatgcatccgactgggtttattgagcgtcaggctccagagccaaagagaccaaggggtctgattattgaagaactaaattctgatgatgagaaggaagaagcagataccgggatgaaagggaatcctaggaagcatggtaggtctaatgccgaaccttatgttgaggttccagatgatgaagctggacaatctgagagaaggaacaggcatttgcagtatatgaatggttacaatggtttgtatcaaaatcagcagcagcaacagcctcaaactagtagttttgtgtttcag

SEQ ID NO: 3196 - DNA, 571 bp, Gossypium hirsutum
  Clone ID: LIB3825-024-Q6-K6-D1
gtctcaagctctctcttcctgtcttcgtctacttcgcctctttctctatggatccctacaagcaccgtccatcaagtgctttcaattcaccattctggactaccaattctggcgctccagtttggaataacaattcatcacttactgttggacccagaggtccgattctccttgaggactatcatctggtggaaaagcttgccaactttgacagggagcggattccagaacgtgttgtccatgctaggggagcaagcgcaaagggtttcttcgaggttacccatgacatttctcacgttacatgtgctgattttctgcgagcacctggagttcaaacccctgttatcttgagattttcaactgtcatccatgagcgtggaagccctgaaaccctcagggatcctcgtggttttgcagtgaagttctacacccgagagggtaattttgatcttgtgggaaacaatttcccagtcttctttattcgtgatggaatgaaattccctgatatggtccatgctcttaagcccaaccctaagtcccatattcagggagaattggaggatccttgatt

SEQ ID NO: 3197 - DNA, 424 bp, Gossypium hirsutum
  Clone ID: LIB3825-024-Q6-K6-D2
gcaaggcttctgagtcacccttaagcttcactcatggacactgatagtacttcaaatccaatcaaacttttccataagctagtctctcaactaaacaatgaaatccgtggatttaaggcaaaggtaaaggagctgtggtatgtggaggaatatgatgtgttggcccttgccttaaatggaaaaatgaaggtgcgcaggttccaaatgggttgctcaagtacctgaagttccaaattcagatgcaattttaagcatatttcaacttccatttctcctacagagttgttacgatagggtacaattcatagttttattttggccgggattaaatatgctaagatacctttctactactccaaacatgaatttgggatgttatcaacgagtttgatttgatgtattaatggccttctttttatttatt

SEQ ID NO: 3198 - DNA, 366 bp, Gossypium hirsutum
  Clone ID: LIB3825-024-Q6-K6-D5
aaagaccttatggttcaagcctatcaactgttcgacaaaaggcttatgtggaggctttgaggcttgataccatgtttacacctcaggttgtggttcaaggcagggctcagtgtgtgggtaatgatgaagatactttgttatccatcattgccggtgctcccaggttccctgctccaacattccagggaaccatggatcaataatggaatacatatttagtgaatcaagatcaagcctagaccacctcaactatcaaatatatatatttgttagtttattatattttcttccataggtagtaaaagtattatagagaccttgtattcggagtaagatataaagattaatttactcatatcttagaag

SEQ ID NO: 3199 - DNA, 431 bp, Gossypium hirsutum
  Clone ID: LIB3825-024-Q6-K6-D6
ggcagcagtggacagaacgggcaggcaggtcggggaggatgggcacttccctctactgagtcttctcaccaaaaggaggatgatggtagatgcaagagacaggtcagggcctttgcgtagccaacacactaggatgaaaggatcagcagattttaaagataagagttctcactctcaagggaaacgtagggactaagttggagtgagttaacacggagatgatcttgtggtgcagaaggcattgcctttcctcttatatatatgtatgtagtattgtatgcttggctgttgccatgttttcctagtttagagcttttatgattcatgcgtctgttgtggcagtccttttaccaaggggggttgctaatgcagagagagctttagacaattactgcaaatacatagtgattatataatatctactttctagt

SEQ ID NO: 3200 - DNA, 581 bp, Gossypium hirsutum
  Clone ID: LIB3825-024-Q6-K6-E1
ttcgaacatttctattcctcttttatacaaacaaaaagcatggctaccgctgcttcatcttcttcctttaccatgcttcatttagcttcattaatctccattttcgcattaactaacgcaagaatccccggtgtttacaccggtggatcctgggaaactgctcatgccactttctatggcgggggtgatgcttctggcacaatgggtggtgcgtgtgggtatgggaatttatacagccaaggctacggtgtcaacacagcggctctaagcaccgcattgtttaacaatggccttagttgcggtgcttgttatgagatcaaatgtgctaatgacccgaggtggtgtcatcctggtagcccttctattttcatcaccgccactaatttttgccctcctaatttcgctcttcccagcgataatggtggttggtgtaacccgccacggcctcattttgaccttgccatgcctatgttcctcaagatcgctgagtaccgtgccggtattgtccccgttttttttcgactgtgccgtgcctgaagccaaggggaatacgattcactatcacccgttttccgtttctt

SEQ ID NO: 3201 - DNA, 605 bp, Gossypium hirsutum
  unsure (1)..(605): unsure at all n locations; Clone ID: LIB3825-024-Q6-K6-E4
ctggnnatcagtcttacnntctggtgggtgtgaagttcattattgtnnctggtgttaccttattatanncgtttccttacagcanntgagcatnncaccttggnnacggcnnctatcaatcannaaactttnnggaagccttcctgnnatggattttctatttacttttttgggaatgtgttntgatccccggcaaatgcgtgtttctgtacagggaagtggattatatataaacagagaaaggggttatagcatcgatcctatacacatagatgatcctctttttccaacaaataatgtggggagaaattgcttccggatacatcagtgtatcaaggcattttcagaagcctattctattctggaggatgagcttagctgcctatcaaataacaccacttcatcttctaacccaccatgcagattgcttcaaaaaatcatcccaagtatcactttatcatagtggcttattttgagcatctttctcattcagaaggatgccaaactgaatattctgtgaagttagttttgagctcagctgattgtggtggtgccattggccacggttagcatctgcactatgttcattgtgtcaaatggcattg

SEQ ID NO: 3202 - DNA, 89 bp, Gossypium hirsutum
  unsure (1)..(89): unsure at all n locations; Clone ID: LIB3825-024-Q6-K6-F1
aaaaaannnaaaaaaaaaaaactctgggggggggaaggggggaaaaaaaaaaaaaaaaaaaaaagagaaagggcggccccttctagggg

SEQ ID NO: 3203 - DNA, 588 bp, Gossypium hirsutum
  unsure (1)..(588): unsure at all n locations; Clone ID: LIB3825-024-Q6-K6-F3
tttggtttngactctacgagtctatgtgtggggtgggggagatccgtgtatccaataagtggtgatagagtccgctttaagtttcgtaaactcaagagccaatttatcatatactgtgactaaatgtgattgatatgtgttggaatatatgtatatatgtattcctaaacgtttgtatagatggggggtgaaaaaatacatggaatataactaaatatgtgaattatgacacttggttaatgatgctttgggaatatgttgtatgtggtttggttgatgcatgacgacttgtttgtgtagtggttgttctaggcattcactgagcttgttaagctcatccactccattttatcctttgcaaagtagttgcgttcttagtgtgagcggtgtggctgtcgagggatcgatccaaacgattctttattcattatagtaggtgttttgcttattctagttctagggaataaaaaggcaatgtggtagacatttatatcggttttgttaagacgtatttggaattatttgtatattgtgtatgtttggaagcttgtgaacttggacatggtgttgggtttattgtttagacat

SEQ ID NO: 3204 - DNA, 293 bp, Gossypium hirsutum
  Clone ID: LIB3825-024-Q6-K6-F4
aaacaattctgctgcatctgtttccggttttaagtagatttcagtccaactcctaacgaagtttctgcacatttttccccttgaatcaaagggcaacagagatcgaaaaagcctcttgtctgagatgcttgttcactggaaccttgcaattttgatatgttgctgactagattattgcatggttcaagtggtctcttcccgaatgatccgaaaaagctcgagattatttattttcagttggatttttgtatcgtcacttgtaagataattttcaagatttatggttgatggtt

SEQ ID NO: 3205 - DNA, 575 bp, Gossypium hirsutum
  Clone ID: LIB3825-024-Q6-K6-F5
cttggtattgcttgggcctttggtggcatgatcttcatccttgtttactgcactgctggtatttctgggggtcatattaacccagcagtgacatttgggctgtttttggctcgtaaggtctcattgatccgagccattgcatacatgctggctcagtcattgggagccatatgtggggttgggctggttaaggcattccaatcagcatactacaacaggtatggaggtggagccaacactctagcagatggttacagcacaggcactggtttgggtgcagaaattattggaacctttgtgttggtttacactgttttctctgctactgatcctaagaggaaggctagagactcccatgtccctgtattggctcccctccccattggatttgctgtattcatggttcacttggctaccatcccaatcaccggcactggcatcaaccctgctagaagtattggagctgctgttatcttcaacaacaagaaagcttgggatgatcattggattttctgggttggtcccatgattggagcagccatagcagcattctaccaccaattcatcttgagggc

SEQ ID NO: 3206 - DNA, 586 bp, Gossypium hirsutum
  Clone ID: LIB3825-024-Q6-K6-F6
actttttgaattatccgcaggaaaactgaaattattggttaaacatatagttgattcattttggaatcagttggtaaggtttgagcacttgccttctcttcagtcgttcaaagtcaaatacaagcagttcttggaaaattgtggacccgaaatgaatgttaatgcaccggacccaagaaaacggattgatgagcgtgctttggagaaagaagaggaagactattttaatgaggagagtgatgaagaggatacaacatctggatctcatcctgagaaagtgcaatctcagcctgttttatccaatggagttgctgtcagctgcccatcgtcatgccctagatctggtgggcttgttgactatgatgatgacgatgaagactacagaccacctccaaggaaacagactgaaaactcggaggatgatgaaggaagcatggagtcccttggcttgaagcgtaagttgactcctaaggaaaaggaacctgggctagctaagaagcagcgtttgggtaaaagctctaaaccaagagatagtgtatttgcggctttgtgttcaaccctaagccaggcagtgctgcctagtaag

SEQ ID NO: 3207 - DNA, 539 bp, Gossypium hirsutum
  Clone ID: LIB3825-024-Q6-K6-G1
tttatttcgttttttttgtccttttggttttttgtactaaaaaaggaagcaaagaagaagggaaatggagggcaaagaagagatgttagattgggagccaacaagttcacagagaggcaaccaattgggaccgcggctcatactcaatatgacgggaaagactattctggacggcgggcggctccatttttcgagcctggcgagttaacctcatggtccttttatagggctgggattgccgagtttgtggcgactttccttttcttgtatatcactattttgactgttatgggagttgttaaggaaaaaactaagtgcccaactgttgggattcaaggaattgcttgggcttttggtggtatgatctttgctcttgtttactgcactgctggcatttcaggtggccatatcaacccggcagtgacttttggactgttcttggtgaggaagcttgtgttgacgagggcaattttctacatggtgatgcagtgtttgggcgccttttgcggggcgggtgtggtgaaaggtttcatggggaa

SEQ ID NO: 3208 - DNA, 596 bp, Gossypium hirsutum
  Clone ID: LIB3825-024-Q6-K6-G2
cccggttcgacccagcgttcgtacaactctcctagttctccctcaggacactagctcgaggaacaagacaagcaagtccagatcaatcaaagttcttatttaacgaagtacatggttgagttagacattcaaatcccaactacttttgatccttttgctgaggccgaggaattcggaagaaccggaaccaaagactatgtgcatatccgaatccaacagaggaatggcaggaaaagcttgacaactgttgaaggtctgaaacaagaactgagttccgataagatccttaagtctctgaaaaagttctgctgtaacgggaatgttgtgcacgacaaagagctgggcaaaatcattcaattacaaggtgatcagcggaagaaagtagcacacttccttgttaatgctggaatagtgaagaaagagcaaatcaagattcatggtttttgagtgctttttgggccgtcttgtcttttgattttaatacctctggtgtgtgggaagaaccctaatggaatatgatgttggagtttcagtttcatttataataaataatggatcatttatttgctttcaaaaaaaaaaaaaaaagggcggcc

SEQ ID NO: 3209 - DNA, 429 bp, Gossypium hirsutum
  Clone ID: LIB3825-024-Q6-K6-G3
gtcagcctaagaggtggctttggttcttaaagcgctatatgacaatgacatcttggtagatgagttcatcatggaatggtaatcagtagggtgttgccggaggtaataagagttctcagatatggaagaactgcaagcccttcatcaaatggctacagaatgccgagtctgagacaggaggtaggagtgactctaaagctattgctatatgcgattattgtgccttttatggcagacgtgctatttatagcgcaataattttctctaccgtggctatagttctcaccgtgagggacttggccgcgttctttaaataaaatagagagctacgcctggcgtacatgctcgctgttgtgtagcgctttctatggtttttgttgtctgtattgaggtcgggtatcggtgtaggaattattactggttgtgctt

SEQ ID NO: 3210 - DNA, 601 bp, Gossypium hirsutum
  unsure (1)..(601): unsure at all n locations; Clone ID: LIB3825-024-Q6-K6-G4
cacgaaaggactagcanaaaaggattctatagctttagcagtgcagaactaaaaggttcgctgaaggcttggttacaggccgtgaatcttcatctcgccgcaatcctattgaaatcttgaagcggctacaaagagaatcattttcagacttgatgaaactccgagacagacaagacaaagtggaacgtttattttcattttacaaatcatccaaggggaacccattccaagaatcaagtaccgttttgagaggggaagttgattttctcggagctgtattgcttatgtccagggttgatgaggaacactggggtgggattggtcgggcaggaattagaactggggttgattccaggtttagatttgaaacagctgttggggataaaggttctgttgggattgaattcgtggctaatcagaaaagggttgcgagtaatgatggtgatgtacttgaaactccactttccctatctaagctgttttataaagcaaatgctgctaatgggttttccgccattgcaattccaattggagctcangttaaagatctagatgtcgcctcggactattcccttcangaggaaaaggcctcactgattta

SEQ ID NO: 3211 - DNA, 587 bp, Gossypium hirsutum
  unsure (1)..(587): unsure at all n locations; Clone ID: LIB3825-024-Q6-K6-G5
cggncgcgtggggcaattggttgctggtggaagtggtgtgaagtttgtaaaggtgacttatgcctcggctagaggtccagatgatctcgatactcggttgctccgagctatggtcaccaagggtttaattgagcctatatctagtgtttttgtcaacttagtgaatgcagacttcataggtaaacaaagaggacttcggctaactgaagagcgtatagtattagacggttcacccgagaaaccactcgagttcatccaggttcgaatagccaacgttgaatctaaattcgctagtgcgatttcaaactcgggtgagatcacagttgaaggaagggtgaaagatgggaaaccccatttgaccaaagttggatcctttggtgttgatgtaagccttgaaggaagtattgtactttgtaggcaaagtgatcaacctgggatcattggaaaagtggggaatatattaagtgaagaaaatgtaaatgtaaatttcatgagtgtcggtaggattgcaccagggaaacaagctgtaatgacaattggtctggatgaggaacctagtagagatgcattaaagaaaataggagaaa

SEQ ID NO: 3212 - DNA, 563 bp, Gossypium hirsutum
  unsure (1)..(563): unsure at all n locations; Clone ID: LIB3825-024-Q6-K6-H1
ttgttgaagcatcctgcgtaagtatttgtgctattttctagagnggcggttggnngagtattgatatanntcacttggtgatcagaagtttggtnggtccagtattagtnnctttggggaggnnttctgtgttgaacttaggcacctaaaaagcacctnttataagtatttntgatggtatttgacaatggtgggggatcgttggttgctttcgctatgacagaactacatcatggctcaaatgttcaaggtcttcaaaccgttgcaacatttgatccaattacagatgaatttataattgacacaccaaacgatggggctattaaatggtggattggcaatgctgcggttcatggcaagtttgcaacagtttttgctaggttggttttaccaactcatgactctaaaggagtttctgatatgggagtccatgccttcattgtgccaataagggatcttaaaactcaccagccacttgccgggattgaaataaatgattgtggccccaaaattggcctgaatggggtggatattggtgcactgggattgcggtgagttgggat

SEQ ID NO: 3213 - DNA, 586 bp, Gossypium hirsutum
  unsure (1)..(586): unsure at all n locations; Clone ID: LIB3825-024-Q6-K6-H2
cgccggnaaacagtcacgggtgtcggacgataatccctcagccggttttgactgcaacatttgcctcgatactgtgcaagatccggtggtgacgctatgcggtcacctatattgttggccttgtatttacaaatggcttcactgtcaatccatctccactgaaagccatgaccaaggacagccgcaatgccccgtatgtaaggccgaagtttcggcttcgacaatcgtaccactttatggtcggggccagatgagtatggcatcaagaggcaaggctccccaacttggcatagtcattccaaagagacctgttggtcctgattttggcacaccaagatcacctaatagtgccactagtccacaatttacacatcaaatacatcaccatcaccatggctattcatatcaaccacaagtgtccgattatccgtcttcgccgatgcttagtcccggcggcacaatgatgaacgtgccggatccagtgacccgaatattcggtgaaatggtatacgcaagggtatttggggagtcaattacgaacttatatgcgtatccgaattcatacaatcttaccgggagcacccct

SEQ ID NO: 3214 - DNA, 560 bp, Gossypium hirsutum
  unsure (1)..(560): unsure at all n locations; Clone ID: LIB3825-024-Q6-K6-H3
cttcgttgatttgcttcaagnccttgatgaactcacaagtttagcatctaaacttcggaaagatccaacccttactgctgaacaacttgtgaagttgaagttgattgaagagatcccgtcattttgtgaggtttttctcgagaacagggaaataatggaacaggctgacaaattctttacaacccttcagctcaataagaccaaggtcacttcactcaagcaagaatacagcgagttaagacagcaagtaacaagcctgcagtcggaagtagaagccaacacattgacagtacaagaaatcgacaatcaaatagcgcaactgaaatcccatcgcgcacagctcactagattgatagaaaacaagaagaaagacaaggaggagttaacgtacaatcaaaagttggtggcgaactccattcccaaagtcgtacacgaagttcagctcgctaatgccaggaaaccagaatgggagataaagaaagagagcgctgacaaacgcgaagctgaaatacttgctaaatttgctcctctaaaagggttttccctttgaaaaaatcaat

SEQ ID NO: 3215 - DNA, 615 bp, Gossypium hirsutum
  unsure (1)..(615): unsure at all n locations; Clone ID: LIB3825-024-Q6-K6-H4
ggtcgacccagcgttcgggtgaagccaaccgggaanacgtgttgttgttcagactgtgagtgaagttgatatactggatgatgggtatcgttggcgcaaatatgggcaaaaagtagtgagaggaaatcctaatcctcggagttattataagtgcacaaatgccggttgtcctgttagaaaacacgttgagagggcgtctgatgatccgaaagccgttataaccacatacgagggaaaacacaatcacgatgtgccaactgcaaaaactggtagtcatgatacagcaggaccagtagcaatgtgtgggccatcaagggttagatcagaagaaaatgatgccattagccttgatcttggtgttggtattagttccgttcccgaacatgcttcaaatgagcaacaacaattggattctgaactggtccaaagccgcccacaggctggtggttcaagtttcaaatttgttcaaccaactatgatggcatattacggtgctctaaatggcagcatgaatcagtatgtttctagagaaaatccgagcgaaggccgtggtgttgaaattacacccctaaatcactcttatgcatttccacagagcatggggagaatactaac

SEQ ID NO: 3216 - DNA, 507 bp, Gossypium hirsutum
  unsure (1)..(507): unsure at all n locations; Clone ID: LIB3825-024-Q6-K6-H5
cggncgcgtgggttttaacgttcccaggcagttcccatggtctgctccaatactttggttgcacgagaggattctggaggagtcaaagaaaagggataggaaaaatgcttgtggcctgttgagggagatttatcagatggagaagtgttctcggttgttgggtgaattggctgattccgtgcagtttcctttgagtgaggacaaggaaagggaagttaagcagagagtgaaggaattggagcaggttcttgatgcattgaaggaagatttagaaccgctggaaaagctggttagggaagtgttccataggattgttcgaagccggactgaagggcttgattcttttgcaaggggacacaaccctgagtgaaacctctcttgttgtgttggttgatttacaccattagtgtcaaatgtgcaacttgcaaatatgtctgtttttggctttggggaagtcatggatcatgaagatgaagatggataaaagggcttgaggtatgcaccacc

SEQ ID NO: 3217 - DNA, 569 bp, Gossypium hirsutum
  unsure (1)..(569): unsure at all n locations; Clone ID: LIB3825-024-Q6-K6-H6
gaaagagtatgtggtgctaccaccccatgnatcggatccggcggtgggtcagttcttctgctactaacatctagaggagatcctggtataatatcgcgcaatgcacaccctccagagccagaaggttttaatgggaatgtagatgttggtgctgttaaaactccacagttacgattgccacgcattaaataagtggcggtgaacaatttgatcaccactgtccttgggtcaggcaatgtatcagactgcaagactatcggttcttcttcatgtttgtgttctctacaacccttctttgtatgtatgtatttggattcagttgggtgtacattagaaggatcatggcatcagaggagacaacaacttggagagccatgattcaaactccaacttccatagttttaatagtttacacattcatctcaatgtggtttgttggtggtttgactgccttccatttgtacctaatcagtacaaatcagacaacgtatgagaatttcagatatggatatgatcattgagcaaacctctatagaaaaggagtgattgagaatttcaaacagatattt

SEQ ID NO: 3218 - DNA, 487 bp, Gossypium hirsutum
  unsure (1)..(487): unsure at all n locations; Clone ID: LIB3825-025-Q6-K6-A1
cggccgcgtgggttacagttggccagcattgcagaaacacaagcaaagacggactcactatcatttgttcgaaaagaggcggaaatgtgttcttgcatggtcactccaactggctccagactgtacctgcgaaacccgagggaattttgttcaagttcgttcccattacttctcttctgactgggattccaggaagcgggtatctcagtcatgcaatcaacttgtatcttcgttacaagcctgctccggaggatttgcggtttttcttggagtttcaagttccactacagtgggcccctatgttttgtgagctgcctcttaggcatcataggaaaaaagcttcttgcccttccctgcaatttgctntcttgggtcctaagatacaagtcagctccacgcaggtttcaagtgatctaaaacccgctgttggcctccgactgtacttagaaagaaagaaatgcaacaaggctggcaatacacgtgcagc

SEQ ID NO: 3219 - DNA, 606 bp, Gossypium hirsutum
  Clone ID: LIB3825-025-Q6-K6-A2
gcgttcgcggacgcgtgggcgacaactctagggtttttcatcttcttcgcccctcctctctagtttcatcgtaaagaaatatgcctaggtatgatgaccgacgcggtggcactcgtttgtatgttggtcatttgtcttcaaggacaagatcacgtgatctagaggacatgtttagcagatatgggaggtctgttggcttttgcctaatctggaggtctatgagtacgtgatgtggatatgaagcgtgactatgcatttgttgtacgtatttctttactctttttatttaatcccaaagaacatttcttatctataatattcttcactagtttagtaaatatgatcattttgcttggaacttttttccttctttatgttttgtatattgttggcctccttgattgtaggaattcagtgatcctagagatgctgatgatgcaagatatgcattgaatggtcgagacatggatggaagccggatgattgttgaatttgccaaaggagtgccccgtggttcaggtggatctcgagattaccctggaagaggccccactcctgggtcaggacgctgcttcaactgtggaattgatggtcattgggctcgtg

SEQ ID NO: 3220 - DNA, 569 bp, Gossypium hirsutum
  unsure (1)..(569): unsure at all n locations; Clone ID: LIB3825-025-Q6-K6-A4
ctctttgtattgcagtctgccaaacgnaacaatttaccactctcccaaaaaggaaattcttcttcagtccagtgatagtattatagtggagagtcgaaaagtgtttggtttggttaacatgggtccatttacactggctgttgacaccgagagctcttctctagtatcttctgatgtatcaaataggaagattaaaaacttacagctgcaaacaaagaagtgctttgcatcagtcagcatggaagaggaaaagccttttgattttcttcgtattttatttgagggaatcatagctggaggtacagctggtgttgtggttgaaactgctttatacccaattgatacaataaagacacggctgcaggcagctcgcggtggaggtaaaatagttttgaaggggctttattctggattagctggtaatcttgctggtgtcctaccggcttctgctgtatttgtaggtgtgtatgaacctactaagcagaaactattgaagcttttcccagaaaatcttagtgccgttgctcacttgactgcaggagccataggaggaattgccgcttcactta

SEQ ID NO: 3221 - DNA, 515 bp, Gossypium hirsutum
  Clone ID: LIB3825-025-Q6-K6-A6
aaaggtgaaagctacagtagcgtctcaagcacatgaagcagatacagagaagtctcaaaatcaccactcacattcctcaaatggtgaaaagaacgactctgagaacaccctgatagatgttttcagatggtctcggtgtaagaagcccctttcccagaaagtcatgcgttcaattggaattcccttgccactcgagcacgtagaggtattggtggagaatgttgactgggaagatgtgcagtggtcgcaaacaggggtttggatagctggaaaagagtacacacttgctcgagtgcattttctatctccaaattagctgttatttttcgagtttggtatcttcacatgcacagaccctttgtcatgttcttatggaggagtaaaaagtcagtgttatgaaataatatattttgaagtgttgaatactacatactagtgttttagtgtttactacaatttagtgaaacccaagttactcttttggggtacccatcaatagatattaatttgttgtc

SEQ ID NO: 3222 - DNA, 615 bp, Gossypium hirsutum
  unsure (1)..(615): unsure at all n locations; Clone ID: LIB3825-025-Q6-K6-B1
cggnnacgcgtggggaaaaatcgggatgttcgtgaagaaacggtgctttgggttttcacttgaagataattttgttgatggtggtgctaagcaatgggccatagttaactcctgatcagtgattttttgtttgtttgttcatttatgagccaaattggatcatctctttacttgcaaatgggcaacaagcaccggagcaatggtggtttccgatatcaaacaaaattccaagtagcaattgcaataaattgtggaagcataggagggaccattggaagaatcagatgaatggagtcatgactggaatttattgaacaccaggcaatggacaaaacatgtcccccccttgacagctggtattttaaccgatgaagaagatgcactcaaaggatctaaatatagtagtgggacacaataatttccttggaataaagctaaaatatattcacaacagaaacagaataaagagttcccttcaatccaagacacaaaatgaacaagtacaatataggagagaggactgtagatattggattaaattttaaaaaaagtctccaactccagctgagctgagttttaattaattaaaagaagtaagaggttgtgatttctggt

SEQ ID NO: 3223 - DNA, 616 bp, Gossypium hirsutum
  Clone ID: LIB3825-025-Q6-K6-B3
ccgggtcgacccagcgttcgtttcagtatcgttgaagaggcgagtttgcaattgaggcgagagagtagcatggatcagcaagagagtccgaggagtccagaggcaaagcttgggatgaaagtggaggatctatggggtgttcaagaaccaaagcttagtcctaatgaaaagctcaacgcttgctttgagagcattcctgtctctgctttccctcttgctcctcaagggattgagataaaatcggatgctagtttagcagaggctgttcaaatactggctcaaaacaagattcttagcgcaccagttgttgatgttaatgcccctgaggatgcaacctggattgacagatacattggcattgtagagttcgctggaattgctatatggattttgcaacagaaccaccttcacctagaagcccttcatctcccagtggaacttatttcgcggtatctattaatggaatgacctctgctgtgggactcggaactttaggccccgaagatgcttcgattacttcgggagacttttttgaggctctaacgtcctccaagttttacaagaacactaaggttcgcgatatctcggggacgttccgttgggcaccattccttgc

SEQ ID NO: 3224 - DNA, 582 bp, Gossypium hirsutum
  Clone ID: LIB3825-025-Q6-K6-B5
attttgacgaaggtagccaacacagtgttcccgtaacttgtccagtggaccaaaacacttcacagcttttggctaatcagaaactgtttcttaatggttttcttggaaatgtttttatggctaaatcttacaatctctcgatggatattgattggatggaatttgtatgccctaactgtttatcgcttcttggagcttatcctttttataatggtgctgcacccattgatggtggagttcgactctttaaatgctacgtttccacttcttcatctgctggtggatcaggggacttattcagaaaatatagcttggaaagaatgttcactaatcagctagtggagaatgcaaaagatgaattatcatttcgaactttgattagagattttaaaaccaagtctccattgttgcaaattgttctgctaaatccaaactcttggtgctgttctggttattgtttggacacaactagtgcagctgaatctattctgaagttagatttactccctattatcaaggtgatcttttctgattgtggtgaaactcctgcatctcagccgagggtacatgaagattggataa

SEQ ID NO: 3225 - DNA, 595 bp, Gossypium hirsutum
  Clone ID: LIB3825-025-Q6-K6-B6
aggtctaaagcatgctttgaaatagaactggaaaagcttctcctgccctcgggcgcagtgcaatttacttgaaagagtcccgaattaatggtttaccaaggtatttgactattcaatttgttcgttttttctggaagagggagtcaaatcaaaaggccaagatattgcggaaagttgattatccactggagttggatgtttatgatctatgttcagatgaacttcgcaaacaattggaaggtcctcgtcagatcctgagggatgaggaaggtaaaaagctcggtttgaaagctaatgagaaaagctccagctcaaaagatgatgatgtcaagatgattgatggagaggggtcatccaatgcaagtggagaatcaactgtgactacatctcaagaaggggttccctctgacaaggaaacacgtttaactgggatttatgatttggttgctgtgctgacccacaagggccgaagtgccgattcagggcattatgttgcgtgggtcaagcaagaaagcgggaaatggattgagtttgacgatgataaccctatcccgcagcgagaggaggacattgttaaactttccgggggaggtga

SEQ ID NO: 3226 - DNA, 558 bp, Gossypium hirsutum
  Clone ID: LIB3825-025-Q6-K6-C1
caagttactgtagaccctttgccggccagttcattttcaagggtcttgcaaggtcaagaattctcgaccttgagaggcacatttgctgagagtaatgattctgaaactgctgataggtcagtgatgtggccaccttcaatagatgatgagaagattgatgtagctcatggtgaaagaaaatttgggtcagagaattggatgccctctaggaggcatgaaccaacttacacagatttgctctcaggttttgggtcgaatgctgatacatcgcgcggatattatccttcctttgttgatcaaacttcagtagctggtaattcggggaaaaaacaattactaggtcaagaagggaagcttggctcttggtccctcctgccatctggtctctcactcaagttgtctgacagtagtacagaccctcctttgcaaggttctgatgtgccttgtcaggcgcggggaaatggtagatttagtggttttggtgactaccctatacttgaaggtcgtaggattgaatgctcacgtggtaattggttgatgcctccccaaccacttctt

SEQ ID NO: 3227 - DNA, 603 bp, Gossypium hirsutum
  Clone ID: LIB3825-025-Q6-K6-C2
aaatatcaaaatttcttggaacatacgattttgatagcttgccttttgactggggagaagactacaagctcccaaatatccccgagagagatcttgtcgtatatgaaatgaatgttcgtgcatttacagctgacgaatctagttgcttggatcaagatatacggggcacttatgctggtctgatagagaagatcccacaccttctagaacttggaatcaatgcagtggagttgcttcctgtctttgagtttgacgagttcgagtttcaaaggcgccccaatcccagagatcacatgatcaatacatggggttactcgacgataaatttctttgctcctatgagtcgttatggtagtggtggtggaggagctgttagtgcttctcgggagttcaaagaaatggttaaagccttgcatggggctggaattgaggtgattttggatgttgtttataatcacactaatgaagctgatgataagcatccttataccacttcatttcgtggcatagataacaaggtttattacatggtggacttaaacaacgaaggtcaactgctaaacttctctggctgtgggaatacattcaactgcaatcatcctg

SEQ ID NO: 3228 - DNA, 595 bp, Gossypium hirsutum
  unsure (1)..(595): unsure at all n locations; Clone ID: LIB3825-025-Q6-K6-C3
caagnacccccaaaagnaaaaccagacgcagttaaaagaagcttctatcaaagtgccattaacaatggccactctctcaattggcatcgcctcctccgcccccgccgccaccaccttcttttcgacaaaaacaaaacgaacccacttcaagctcaacatctcctgcgtccaatgggacccagaaggtattttaggaaagccggggtcaggacacttagctcgtcttgaattcaaaaggcggctagagagggacgcagaggctcgagaagcatttgagcaacatttacgtgaagagaaggaacgtcgccgagctcttcgccaaggaattacccgatactgctgaggagacgatcgagtattttcttgacaccgaagctcaagagatcgagtttgagattgcaagattgaggcatagattagatgaggacttcttctcccacctgaaatttgagatcgggcagattcgatttgctgtttcgaagactgaggatatggaggacagattgattgaactggaggcattacaaaaggccttacaagaaggcaccgaagcatatgataaaatgcaagccgaacttataactgcgaagaaaag

SEQ ID NO: 3229 - DNA, 593 bp, Gossypium hirsutum
  Clone ID: LIB3825-025-Q6-K6-C5
agacccgaaagtagactttggttctctgtctgctgcttctttcttctcttggtacttcattatttttcctttcacttcctttttgtgaaaaaacattgaaacccttttcaagacgcaatagaagatgtgtggaggtgcaatcatttccgatttcattgccgtgaaacgcggtcggaagttaaccgccgaggatctttggtctgaacttgacacattctccgacctgttgggtctggattacggaaatggaaaagaccctttcactcagttcgacaacaccaaggccggttccaaagccaagaaccttgaaaaagtgacaaacgagtcgactcagaagacaagccgggggagagagaaagaagggaagactcagcgaactcgaaagaacatttacagaggaatcaggcgaaggccatgggggaaatgggcggctgagataagagatcctcacaaaggtgtccgaatctggctcggtacatacaacacggctgaagaagcggctcgagcctacgatgaagccgccaagcgcatccgcggggacaaagccaagctcaacttccctcaaactccacgcctaactcagcctcctgcta

SEQ ID NO: 3230 - DNA, 593 bp, Gossypium hirsutum
  Clone ID: LIB3825-025-Q6-K6-C6
catactcaaaactattcaccagagccaccactgaaaacatggccgccacaaacgttgggaggatcaagttgggttctcagggcctggaagtgtcggcacaaggccttggatgcatggggatgtcagctttctatggtcctccaaagcctgaacccgacatgatagctctcatccaccatgctatcaactctggagttacctttcttgacacctctgatgtttacggtccacataccaatgaaatccttcttggtaaggccctaaaagatggtgtaagaaacaaggttgagttggctactaagttcggtatagattatactgatggaaaaagggaaatccgaggtgaccctgtttatgtaagggctgcttgtgaaggtagcttgaaacgtcttggtgttgattgcattgatctttattatcagcatcgggtggatacaagggttcccattgaagtcacgattggagaactgaagaaactagttgaagaaggtaaagtgaagtacataggtttatccgaggcttctgcatcgaccattaggagggctcatgcggttcatccaataactgctgtgcaattggagtggtcattgtgg

SEQ ID NO: 3231 - DNA, 575 bp, Gossypium hirsutum
  Clone ID: LIB3825-025-Q6-K6-D1
cgtctctctctctttcacctctctaggaaaccctgcatttcaccttcttcactcccattttcttatatctcgaaaccccataaaccaaaggatcgaacccatttcagattgtattcaatggcatcatcggacttgaaagaatcagctgccaataaccctgggcttcatactacccctggtgaagctaccaaagactacatcatgcagcaaactatgtttcgaattaaggatccaaaagccagtcttgatttttactctcgtgtgttgggcatgtcgctgcttaagagagtggatgttccagaattgaagtttaccttgtactttatgggctatgaggatgtttccaaagctccaagtgatccatacggtagaacagtttggacctttggaagggcagctaccattgaattaacacataattggggtactgaaagtgaccctgagttcaaaggatatcacaccgggaattcagaacctcgtggctttggtcatattggcatcacggtggatgatgtgaataaggcatgcgagagatttgaacgcctgggagtagaatttgtcaagaaattagatgc

SEQ ID NO: 3232 - DNA, 323 bp, Gossypium hirsutum
  Clone ID: LIB3825-025-Q6-K6-D3
gatacatatcatgtttcgggggatgaagtgataactaataggaccacaccgaccgaacttaccaatattggcgctgtcagagtggaaaatgggactcacgctgaatcggcacattatactgcgcagctgagattggttacaacgcttctataacaatacacttcgccatattcctaccgcccgataatattgataacttacatgatctttatctgcacattgggcgcatatcacggtccagatgaagaaaagagtgctgcctttaatgatccaatgaattgtttttaccactctagtaccacagactgctcgaaaccggatga

SEQ ID NO: 3233 - DNA, 587 bp, Gossypium hirsutum
  unsure (1)..(587): unsure at all n locations; Clone ID: LIB3825-025-Q6-K6-D4
cccaagtgggtttttccaanattgatgaggcaccacaggtgtgggcagaagctctgcagatagagtccaccgatgtttgtgctctcccatatgttattccatactgatttttttcttcattactggcttctggttaaccctcctacaccacagcaggatttggcccttgggcggattgatttctcttcagcattctttttgttgttgaactccggtgttacagtgaatgattttgcatgactgaccaccaaatttgtcgaaagcaactgatccaccacgtcaacaatcacatatttatttgaaacacacgatggcaacggagtctcggctgagatggtgccttccaagaaagagaggtataaagcttctgcaattcttattataattgcttgaaaaggctgagaaggcagtttgtaattgagaatgtaagaagaagacgacaagctgtggtgaatgaaaactccactgcaattttgatttgtaacatagaagggtcttagttacaagaaatgtaagatagaaggaaaaagaaagtaagggcattcggtttccaatttattcacctccatccgtgtttatattttaac

SEQ ID NO: 3234 - DNA, 610 bp, Gossypium hirsutum
  unsure (1)..(610): unsure at all n locations; Clone ID: LIB3825-025-Q6-K6-D6
gcgttcgcggncgcgtgggcggacgcgtgggcggacgcgtgggcggacgcgtgggggatgatgttcataaaagcattaagtacaatgtttgggcgagcacaccaaatggtaacaaaaagcttgatgcagcttaccaggaagctcagcagaaatctggtcactgccctatatttctcttcttctcggtcaatacaagtgggcaatttgtcggcattgccgagatggtaggggcagttgattttcaaaagaatgtggagttctggcaacaagacaaatggactggctgtttcccagtaagatggctcattattaaggatgtacctaataattccttgaagcacattaccttagagaacaatgagaataagcccgtcacaaatagcagggatacgcaagagatcaagcttgatcaaggccttaagttgctcaaaatcttcaaggaccattccagcaaaacttgcattttagacgatttcgaattttacgagattcgccagaaagcaattcaggagaaaaaggctaaacatcagttgcaaaagcaggtatgggaagaaaagcctggagatgaaaagaaagatatagcaacaacaaatggtgatttgatcaaaga

SEQ ID NO: 3235 - DNA, 600 bp, Gossypium hirsutum
  unsure (1)..(600): unsure at all n locations; Clone ID: LIB3825-025-Q6-K6-E3
attttctttctctgtttatattttactacctactccaacagtttctcaacgcagctgtacagttagaaacaaagggatactaattgttaataatatnaaaaaaaaacgtcaaaaggaaaaagatgaagcagcgtgccatccaacagaacgctattggaagcagctgtgaggagttgcagagctctatttcggtttcagttatggttacggatcggagagagactatggtctgcccaaaaccacgtcgtttgggtctcttaaacgcctctttcaacgacctgccagttcggtccctcagatggcaacttagccatcaaactgagctttgtgattcgaaagcagggagtgatattttggatatgattcttacaaagggtggttgtagagcagaacaagtagcgtcgtcgcccccatttttttgtgggtcgccgccgagtagagtagctaacccattaatacaggatgctcgatttggggatgagaagatggtcaacccgccgtctccaaatccgcctcctccttcgtctccgtcatcatcttcaaggaaaggagggtgtattcgggccaattttggtaacaaaccagcagtgagagtggagg

SEQ ID NO: 3236 - DNA, 601 bp, Gossypium hirsutum
  Clone ID: LIB3825-025-Q6-K6-E4
cgagtgttgactgccttgcagagggaaaggtgctggaacagcatctacatgagattcagtttgagttggagactcttgtttgggacaggaaggagcttgaggaccatctccaagcagctgttagagaaagcagaattatggagtcaatgttaattgaacttgaaggggaacatgacaaggctattgccaggattgaactattagaggttgcaggatttaaaggatgaaaaccttcggctgaaagaagttcaaggtaaagcggcaagcagttatagaggtcatgatgcgacaaataaagacaaaagtctgaataccgttgatgataatcatgtcgttccctacagtattgcatcatgggtttccaattataaggggagtggcatctccttccaggagctgatggtgaacagagaagtatgggaaggtaagagcaagagtactactgaaatgatcaatttcttaaaagcaggccctgcaccaagcggatccgtggaagtattttcaccccgtgttcaaaatttggaagttgacactgttatcgaacaacgaaaagaggttgcactttcacagacactttttagtgcaatattatcactcttgg

SEQ ID NO: 3237 - DNA, 592 bp, Gossypium hirsutum
  Clone ID: LIB3825-025-Q6-K6-E5
ctcaggtaatcaaggtgttctgggtagtagattatcaggagggcagggttcagatgatcaattagctgctgctaatgctgtctctcaagttcttcaaagtcctgcattgaatggcctattggcgggggtttctcagcaaactggtgctggttcaccagatgattttaggaatatgttgcagcaactgactcaaagtccacaaatcatgaacactgttagtcaactagctcagcaggttgatagccaggatattgggaacatgttttcaggttttggaggaggccaaggtggtggtattgatctgtcacggatggtccaacaaatgatgcccattgtttctcaggcgcttggttgtgggccatctgcaactccatccttccctgctgtagaatctaaatcacaggatgacattcaacaaattgctcagagggtcgagcagtctagtgtaccagatgacgtcttccatgctgttgccgaaaatgcagttcaggtatatggcaatgggaggaatgctgaagaacttctaaatgagttgtggggtgatgaaggtcttgccaaggaatacacagagatgctaaagctggacttgcgt

SEQ ID NO: 3238 - DNA, 424 bp, Gossypium hirsutum
  unsure (1)..(424): unsure at all n locations; Clone ID: LIB3825-025-Q6-K6-E6
accagacattttgttggtctttgttcttattacctgaattaacaaaggtttttaaaaaaaaaaaaaaaaaaaaaaaaaaaaaaattaaaaaaaaaaaaaaaaaaaaaaaaaaaaaaaaaaaaaaaaaaaaaagagaaaaaaaaaaaaaaaaaaaaaaaaaaaaaaaaaaaaaaaaaaaaaaaaaaaaaaaaaaaaaaaaaaaaaaaaaaaaaaaaaaaaaaaaaaaaaaagggggggggggtttttaaaaaaaaaaatttttaaaaaggggtgatgaaaaaaatattttttttttttggggaagaaaaatataattatggggggggtttttaaaaaagggggggggggaaaaaagttggggttaaaaaattttatttttttgaaaaaattttntttttttaaaggggggggaaaagaaaaaggg

SEQ ID NO: 3239 - DNA, 565 bp, Gossypium hirsutum
  Clone ID: LIB3825-025-Q6-K6-F1
tctccaattagctctggtttaggcgatggcttcaaagcggatcttgaaggagctcaaggatctacagaaagatcctcctacctcttgcagtgcaggccctgttgctgaagactgtttcattggcaagcgactattatgggtccacctgacagtccatatgccggtggagtgtgggtggtcaccattcatttccctccggactatccatttaagccacccaaggttgcattcaggacaaaggtctttcaccctaatattaacagcaatggcagcatttgcctcgatattttgaaggagcagtggagccctgccctcaccatatccaaggtattgctctcaatctgctcacttttgacggacccaaatcccgatgatcccttggtgccagagattgcccacatgtacaagaccgacagggctaagtacgagacaactgctcggagctggacccagaagtatgctatgggttagtgtgctaatatgcatataataggagggctttattctatgtggctttgatcttcaatttaatatgtatgaatcaatgaaacagtatgtgtgatct

SEQ ID NO: 3240 - DNA, 588 bp, Gossypium hirsutum
  Clone ID: LIB3825-025-Q6-K6-F2
tcgtttcttactaaatcgaagatttgttttttttttgagtttttatagattttgtttgatttcgagatggttaattctagaaacggggaatttgttgacgaccgcgtggatcgagacgacgacgaattaatcggttcgtcggacgcatcttcgtccatgaacggcgtcgttgataccttgagggttggatctggaacaacgtcgggacagaacggtgaggtgaggaacgaaatcggacttacggaacggttaacggacatattcgtagaggaaaacaatggagatttgttgcttcaacaaagcgatcgagaagatagggttctgcaatggttacaagctttggatatgcaagtaatcggcgcttgtcgaaccgatgaaaggttaaagcctttgttgaaagtcaatgtttcgaacggcgtagctgaggatcgattgttagctcatttgagtcagcattttgagccatcggaagttggtatgctggcgaggtgcttttgtatacctttggtttcaattcgagtggggaagattaacaaacaaggaacctgttttcagcctactgctgcaaggtaaagtgggcgtattcta

SEQ ID NO: 3241 - DNA, 573 bp, Gossypium hirsutum
  unsure (1)..(573): unsure at all n locations; Clone ID: LIB3825-025-Q6-K6-F3
ttgtnagtttcccgtgtgccatgaactggtggggggtaggggactggttttgactgaggatttaagttaaggttttgggtgtgtgtatatgggtcctgacttgaatctgaccgataaagcccttcgatagtggtcttcgactgacaaggaaagctctgcccgaaataaagaaaacagggggaggcaaggaaacattggtttagaggttgatcttattgaatgcatgaattattttgagtctgagatggttgatgttgaatgccaggatgctactgagttttcgagttctttcaccgacacaatatctgttgatgaggatggttcgattgtaaatgatgaagtgagaatcatttctgccgaccttgaggctgtttggatcgttatctgatggttggaatggacattttcagatggggtactcttttgctttaaattcttgtttcctgtttgtattgatttttaaaaatgcactactgtgggagtgtaaacgagaaacttgtgcttgcaagtttcttaggttgtaatcactgatgagttgcttgacttgagtagcataggagctcactcaatctt

SEQ ID NO: 3242 - DNA, 584 bp, Gossypium hirsutum
  Clone ID: LIB3825-025-Q6-K6-F5
aaaagacgaatttattcacctccgagtgcaagccgtagggcaaacgagtaaaaaaaatcgaaaacaaaagaaagaaacaagaggaagatgatggcgaaatgctctgttgctccttccgttgaacctatgtttcagaccttcaatggccttcaacaccttgccgaaacgcgtcgtttcaaggcttggttcttggatcaatttggtgtccttcatgatggcaagcaaccttacccaggcgcgatttcaacattggaaaagctggcaacaactggtgccaagatggtgatcataagtaattcttcaagacgtgcatcaacaacaatagagaaattgaagaacctaggctttgatccttctctctttgtgggagccatcactagcggagaattaacacatcagtacttgcaaaggagggacaatgcttggtttgctgctctcggaaggtcttgcattcatatgacctggagtgacaggggtgctatatctcttgagggtttgggcttacaagttattgagaatgctgaagaagctgattttatcttagcccatggcaccgaagccttggggcttccttcaggtttggt

SEQ ID NO: 3243 - DNA, 587 bp, Gossypium hirsutum
  Clone ID: LIB3825-025-Q6-K6-G2
tcggcagcctttccgtctgaactgggcttggttcggtgtgaacgaaagagatctgatgctggctctgatctatctatattcgtgggagatttggctgccgatgttactgatacagtgttgcatgaaaccttttctagtaaatttcaatctgtcaaaggagcaaaagttgttatcggtgggagggcgggtcgttcgaaaggttacggtttcgttcggttcggtgatgaaaatgaaaggtcgagggccatgactgaaatgaatggagtgtattgctcaagtagaccaatgagaattagtgttgccactcccaagaaagcatttggatatcagcaacagtattattcgcaaggtagacaagcatcgaatggtgctgtggaacaaggtcttcgttctcataatgactcaaacaatgctaccatttttgttggaggacttgactcggatgttagcgatgatgatcttagacaacccttttcccagtttggtgagatcatctctgtgaaaataccacctggaaaaggatgtggatttgtgctttttgcaaacaggaaggacgctgaggaagcaatccagagcttgaacggaac

SEQ ID NO: 3244 - DNA, 601 bp, Gossypium hirsutum
  unsure (1)..(601): unsure at all n locations; Clone ID: LIB3825-025-Q6-K6-G3
ttcgcaaaagnagttttcaagcccaaaacccctgggaaaagttcgcatgtatagtctgcggtgtcactgcctatgatttcagtcaccttggccatgctcgtgctgccgtttccttcgatgtcctttacaggtaccttaagcatttgggttatgaggttacttatgtcaggaattttactgatgtggatgataagataattcgtcgagccaatgagactggagaagatccaataagtttgagtgaccggtactgtaaagaatataatatagatatgagtgatctacagtgtctttctccaacacatgagccgcgcgtttctgatcacatggagcagatcaaagatatgtatttgcattaacaaaagtatgattcatttaaatgggttatatttggtagttatattttcatatcattaccatatcattgtgataaaaagctattattgggcatgtcattgtcatgtactgtatacttgtaatttaactacatctgcccaatgacaatcaatgatgtagcaatgacccatgctctagtcttagaaggcattttagatgtttccttcaatgaagaagtagaagagcagtttttaacttgcaccaa

SEQ ID NO: 3245 - DNA, 590 bp, Gossypium hirsutum
  Clone ID: LIB3825-025-Q6-K6-G5
ctgcccttttctttgtaataatcgaactcccctcccgtcctctttcccgatttgtcttcttcattgccccgccatggcttgtgttagcttcgctaaactcaacgcgccgtcatcctcttggatcggtggccagcagtctctccctcaacgctccggatcatccgctcggctcgccactcgcagagtctcactcccgatccgtgctggcgcttacaccgacgaactcatcaaaaccgccaaaactattgcttcacctggtcgtggaatactggcaattgatgaatcgaatgcaacatgtgggaagagattatcttctattggcttagacaatactgaacccaaccgccaggcttacagacagcttctgctcacaactcctggcctcggagaatatatttccggtgccattcttttcgaggaaacactttaccagtcaactacagatgggaagaagtttgttgatgtcttgcacgaccagaaaatcgtacctggcatcaaagtagataagggtttggttcctctacctggatcaaacaatgaatcttggtgccaaggcttggatggattgtcatcaagatctgccgagtact

SEQ ID NO: 3246 - DNA, 589 bp, Gossypium hirsutum
  Clone ID: LIB3825-025-Q6-K6-G6
aaggatcttgcaaaaccttgcttgaggcagccttagagggcccagacgaggatgccgaccaggaccaagaggtcaaggaagaggaccagaagtctctctccgttgggataattggcgcccctaatgctggaaagtcagcccttactaattttatggttgggactaaggttgctgctgtgtcacggaagacaaacacaaccacacatgaagttttaggggtcatgactaaaggggatacccaaatttgcttttttgatacccctggactcatgttaaatagaagtggatatcttcacaaagatatgaaggttcgcgttgagagtgcctggagttcagttaatctctatgatgtgctcatggttatttttgatgtccataggcatcttacaaagcctgattcaagggtgataagattaatcaaacgtatgggagaagaaccgaatcctaaacaaatacggattttatgcatgaataaggtagatttgatagagaaaaagaaggaattgttgaaggttgctgagcagttcaaagatcttcctggctatggaaggattttcatgatctcaggattgaagggctctggagtaga

SEQ ID NO: 3247 - DNA, 597 bp, Gossypium hirsutum
  unsure (1)..(597): unsure at all n locations; Clone ID: LIB3825-025-Q6-K6-H2
tcttcctctcctctctttctcaaccctagccgccgtactcctgcgccgccnaccaatcggaaaagccaccaaacgatctgcctttcctctttcttttaatccaccgcttcatatcttttcagaacccacttgaaagccattaaaacaccaaatcgacttcgactttctcttgccccgatctaccgcctccgccgtcagatcgacacgggatatcaggggaagcttcccttccccgagatataacctctcaaatatgttctctcttcctcctttttttctgatttttctgctgtaatggttgtgaaatgatgattgagcagtgttggtgaaggtggtggctatggtttagagaggggcggagagtgatcttgatggtgggcggttgggggcctcggtagttatgagatggtggaggttctgggtagtgaaattgcggtggaaatggggaagatgatgggtatggtgggggattgggcggctttgactttgactcagtgaggataagtgatggcaaaaatgttgaggtttatggttagttaatttatcgatgtgtatgtaggataatttgacgtaggcttgcagctggccgagctggct

SEQ ID NO: 3248 - DNA, 610 bp, Gossypium hirsutum
  Clone ID: LIB3825-025-Q6-K6-H3
cccggttcgacccagcgttcgttttttaagccgaaaacacagccttggaagcaaatttctagggtttcttttgctagcagccgaaccaccattattttggtgatcaacagcatgcagatagaactcatcttcctcgttgaaggcattcgaccatgcctagagaaatttggtaagtattttcttccctccctttttattgtgtaaaaaaaaaaaacttcaaacttcacattattttaaaaaaaaaaaaaaaaacgaagataggttcatagagcaaagattcaacactatttgttccctcgccttcacctcagtatttttgaagtattcgggctttcattgggattgactcacatacaaaaaaaaatccgaaccaaatgaaaagaaaaataaaaataaaaataaaaaaaataaactaaaaaagaaatcataagagaggataaaaaaaaaggcttgaaatcacctttgctgatttaaaattgctatttctctattctctgtgcgtgtgtacagatatcgtggtcctcctttacatttgactatcctcagctttatagccgagaaaagaaaagaaaatcaaaaatacaaattttcttgctgttgtgtttgtgct

SEQ ID NO: 3249 - DNA, 202 bp, Gossypium hirsutum
  Clone ID: LIB3825-025-Q6-K6-H6
aaaaaaaaaaaaaaaaaaaaaaaaaaaaaaaaaaaaaaaaaaaaaaaaaaaaaaaaaaaaaaaaaaaaaaaaaaaaaaaaaaaaaaaaaaaaaaaaaaaaaaaaaaaaaaaaaaaaaaaaaagggggcgggcctttttaaaagaacccaagttttacttcccctttccttgcaaaggtattaattttttttttggggccccc

SEQ ID NO: 3250 - DNA, 612 bp, Gossypium hirsutum
  Clone ID: LIB3825-026-Q6-K6-A1
gtcttgagcaatttactgctactgatggatatgattacagtggtggaagcaatgtgttgaaggtgttggggtacttcagtatggtgggtttgttgcgagttcattgtcttttgggtgattaccaaaccgggttgaagtgcttgcttcctattgacatcagtcaacaaggtgtttacaccagtgttataggaagtcatatcgcaaccatatatcattacggttttgccaatcttatgttgcggaggtatgtggaggctattcgtgaattcaataagatgctcctttatatttacaagacaaagcaatatcatcagaaatctccacagtatgatcaaatattgaaaaagaatgaacagatgtatgccttgctggcaatttgtctttcactttgtccccaagtgaaacttgttgatgagactgtgaactctcagctgcgagagaaatatggtgaaaagatggctaggatgcaaatttttgatgatgaagcttttgtcatctatgatgagctcttctcatatgcatgtcccaagttcattacaccttcagctccgagctttgaggagccccttgtaaattacaaccaggatgcttatagacttcagttgaaactgt

SEQ ID NO: 3251 - DNA, 623 bp, Gossypium hirsutum
  unsure (1)..(623): unsure at all n locations; Clone ID: LIB3825-026-Q6-K6-A2
cgattatcgccaatctttgcagtttaaggatttggacaaggnagaaaaagaaaatcaccattcagcttcaagatggatcatgcaagatgttggttaccactgttgggatgagaactcaatggggcaaattgatggcaaccctcagtgaagggggagatgatgagaccccactgcaggtgaaattgaatggagtagcaactatcattgggaaggtaggcctgttttttgctgtagtgacttttgccgtaatggtgcaaggactgttaaggagtaaactgcaagaagggactatctggagttggtctggcgatgaggcactgaaattgctggagttctttgctcaagttaattcctaagattcaggtgatagctcgatcttctcctatggacaagcatactctggtggctaaggagagtgctgatgtcatcattcttgatgacaatttctcaacaattctgacagtggccaaatggggccgttcagtgtacataaatattcagaaatttgtacagtttcaactgactgtcaacattgttgccttaattgttaacttctcctcagcatgtttgacagggagtgctcctctgacagctgttcagctattgtgggtgaatatgatcat

SEQ ID NO: 3252 - DNA, 573 bp, Gossypium hirsutum
  Clone ID: LIB3825-026-Q6-K6-A3
ggaagcttttcatggatggcggcgaagatttgtgttctaattcaggtgctaaacagttgtagaagcgttggtgatcatggttgtgagtacatgactggtgggactgttgttgtacttggaaaaactggcaggaattttgctgcaggtatgagtggtggtattggttatgtgcttgatgtggatggaaaatttcaatctcggtgcaatcctgagctggtggaccttgataaaattgaagaagaggaggatattgttactctaaagatgatgattcagcaacatcagcgccataccaacagccagttagctagagaagtacttgctaactttgagagtcttctgcccaaattcataaaagtattccccagagattacaaacgtgttctggcaaagatgaaagaccaggaagcatctgaacgtgctgcaaaagaagctgaggagcaagatgaggtagagctgatggagaaagatgcttttgaagagctcaagaagttggcagctgcatcttcgaatgagaaatcaagtctgacagtcgaggctgaaccagtcaagaggcctactcaggtttctgat

SEQ ID NO: 3253 - DNA, 513 bp, Gossypium hirsutum
  unsure (1)..(513): unsure at all n locations; Clone ID: LIB3825-026-Q6-K6-A4
tgacaatgaaggaaggtttatgccaatgaactttgagaatacattcagtaaatatgctcgaactgagcccgacaagttatcattcggagaagtgtggcacatgactgaggctaatcgaaactcgtatgatttcattggctggctaatgacaaaggcagaatggatgcttttgtatctgcttgcaacggatgaaaatggttatctatcaaaagaagctgtcaggggatgttttgatgggagtttgttcgagtatgttgccaaaatgaacaaggctgggaagaataaggtttgctgagtgcaggttgctagtttaaaatatatgcattgcttttgttatcaaataaagttgtttgcagaagtaatgttacaacaattgtttcgatagaacaatgaaatagataattctacctttataaagctttatttgtgggtgtgcantcgtttgcacatgtaaaattcggatgctggtaatcattaattctgatcactattcgatatgatcggctactaatt

SEQ ID NO: 3254 - DNA, 617 bp, Gossypium hirsutum
  unsure (1)..(617): unsure at all n locations; Clone ID: LIB3825-026-Q6-K6-A6
cccgggttcgacccaacgcgtctcggttttcaaggnnaaaggcccgaaaatgcactgtggtaagatgcagttngaggagttacatnngaatggtcactcccggcaagngggagcgcccgtttnccgtttagtgttggtaagggttttgttagatctcatagaatgcagaggaaacactacaggggtctttccaatcctcaatgtttacatgggattgaagttgtgccatcaccaaacctctcaaatcttgatgatgaagagaagaggaggtggagagaacttaccggcagggatataaacttctctattcctcctgaagcaagtgattttgcagcttggagaaaccttacgagcacagaattcgagcttgagcgcccccctgctactttaaagagtagtttaaatgcccacactagaaaactgcttaacggtactggtttaaacctatcaactcagccgatagaacatagtaatggtaacgggatggatttatcacctgtctgtaataaacgaaaaaaggactatttccggcatggaaatgatgaagatccttgtttacccaataatttgcattctaacagagttttggatatgaaaattcaccggttcgagccaac

SEQ ID NO: 3255 - DNA, 611 bp, Gossypium hirsutum
  Clone ID: LIB3825-026-Q6-K6-B2
cggacgcgtgggctcctggccagatcgcccttcaccttcgagtcatcttatctctcacttcaatcgatgctgttcaggcagaactcactctctccactcgattctcagccggcagccgctacaacccatccgtcacagcctctttccgtcgctcaactcaacccttgtaatcggcagggaggcgcgcggcttgcaagcagtgcaattggtagtcagttgcgcagcaagctcgtcatcgccgtctcacaccctgaggtttctgcaaatttattaataggttcatttgaaatctgttgcttgtttaaatttcataatacagatcgttgaatatattctgctggaaaaatgcaccctcctctgactttacacaggcatcctatgtgtgctgaagtcatcgaggaattccaaaagtgtcatttagagcatccaataactaaattcttcggtgaatgtacagaattaaagataaagctcgatcgctgtttccggcaggaaaaagctttgaagaggaaggctaatttagaacagagtaagaaactgaaagaaagacttcaggcgttaaggaaggaaactgctgaaaacgattcatgaatctatagcaattcatgaat

SEQ ID NO: 3256 - DNA, 606 bp, Gossypium hirsutum
  Clone ID: LIB3825-026-Q6-K6-B3
gcgttcggtacccactcgtggtggcggtcttgctggacgtgccagaggatcacagaaagattctggtggctcaagggtgcatagtcaaggagatcgaacccgtcctcccacctgagaaccagacccagtttgccatggcctactacgtcatcaactattccaagctacgtatatggaagtttgtggaggattccaagatgatatacttggatggagacattcaagtgtttgacaacatagatcacttgtttgacatggaagatggttacttttatgctgtgatggattgtttctgtgagaaaacatggagccacaccctacagtacaagataggttactgtcagcagtgtcgtaacaaggtggagtggcctgctcacttgggtcctaaaccccctctttacttcaacgctggaatgtttgtatatgaacccaacctttctacttattatcaactcttggccactctcaaagttacccctcctacaccttttgctgaacaggattatctgaacaagttctttagggacatatacaggcccatcccaccaatttacaacctggtgatggccatgctatggcgtcacccggaaaacgttgatgcagaaa

SEQ ID NO: 3257 - DNA, 606 bp, Gossypium hirsutum
  Clone ID: LIB3825-026-Q6-K6-B5
ggcagatttcgactacttgacaaatggtgcaactttgttgaggaatatcagcgtcacaatatttcagaggatacatggcagcaagttttagcattcagtaggtgtgtacatgaaaatctggaagggtatgatcctgaaggtgcttggcctgttctgattgatgacttcgttgagcacatgtacagaatttcaggatccaacagagattcaaatgctttctgttgctgtgttgattcggagccccagttgtgtgcatatgaggacactttgcctggattaagagtatttcctgggatgaagaggaaattgctcgaatgtcatgatgacgaaatggagtcctcggattcgcacttgtcggacacaccagacctgaattgctcattgaattctaagagaagtaggttgattgcacacagattggttacccctgatgcatctgatgattgcatggaagttgctaaacacagtagtcctgtgtgttgttcgaagtctccctgtgcaattgaaggttgcctatcaaagggttttgcagggctcttatcgagttactcgtattttgcagtttgatcggtaaagaagacttcaattctctattacataagatag

SEQ ID NO: 3258 - DNA, 395 bp, Gossypium hirsutum
  unsure (1)..(395): unsure at all n locations; Clone ID: LIB3825-026-Q6-K6-C1
attgaattcccacnnatcccactgaagaagcaagagcccgaatccttcagatccactcaaggaagatgaacgttcatccggatgtcaatttcgaagaacttgctcgttcgaccgatgattttaatggagcacagctgaaagctgtttgcgtagaggcaggcatgctagcacttcgccgagatgcaactgaggtgaatcatgaggatttcaatgaaggtataattcaggttcaagctaagaagaaggcaagcttaaattactacgcatgatctggagagcatttagccattagagaaggcaagataaagacgataggggtagcaaaatgacatttttcgaatagattgattgaattcggtttcttcggtttcggttttaatgtgttttcttcggtt

SEQ ID NO: 3259 - DNA, 545 bp, Gossypium hirsutum
  Clone ID: LIB3825-026-Q6-K6-C2
ctatttcattatgtttattctaatcatgctgagatttgattcatttttctatcgaccttcctcttcttcttttttcgtttcttagatcgtttctatggtttagggtttcttgttctttttaataatttatcgatctgtaaagttcgattttgagtttcgctatgtctttttgtggggcggggtttcagtttctaatttgaaattatttctttaaaagaatcaatttttcaatggtcattttatttctagcattcgattcgtaaaaatgattgtttgatctgtagatcgtctttagaattaaatatgttgggaataggtttcttttgttcatgtgtcggcgtcaattttgtagatttctttgcagtttcaagatctagggttaggtttttctgaaatttggggcttttggttttttcggttaattaacttacgggagggtcaatttgcctctcacatggcgatcttaatcctttgttttcttgctgctttcgacctgctttccccattgtggcccgatccgttcttttcgtggcgggccctttttt

SEQ ID NO: 3260 - DNA, 578 bp, Gossypium hirsutum
  Clone ID: LIB3825-026-Q6-K6-C3
gtgcagtgctgactgtttaacttgatttctcatgctatgagatccattttttttttgttgcatttaaaggtatttaagcaacttaatttgcctcctcaagcacaaatttccctttgtgatgagaaaggagacatcgatagggcttcaagaccgtgggagataataccagctgggcataaaatcggagatccaaaacctttatttgaggaactggtatcattgcatcttctatgttatatgtcaatatgccatcttctttattttatttttactatttggtggtttggagtcgacggattggcacagtacttgtttttctttttggtcatacttatattgtaaacataataaatgacagaaaactgaaagagttgaagagctaaggcaacaatatgccggaagtcaagctgataggcgtgcaagggcagaagccgatgctgcaaagactgctgagcaactgaagaaaacaaaaatttcagatagcaagaaagagaaagctaagaaatcttcagccaactctaaagaaaagcccactgctgaaccggaaatttccatcacaagactcgatattcgggttg

SEQ ID NO: 3261 - DNA, 567 bp, Gossypium hirsutum
  unsure (1)..(567): unsure at all n locations; Clone ID: LIB3825-026-Q6-K6-C6
ggttgttgtggtctngatttttaagatttgtttattcgattgctttgtctttaagatttgtatagggtggtgtttttgatgaacgatccattgttgtgttctttcagattaatggataaaaacaagctgggttctttctcatttgaagttaagttttgttttttttttatgtgtggataaaagacagtttctttagtttcttttactgctgatttttttttcttttgctgattgttttgtttttgttccattactgggtttttggtttaatttgcatattttagtgcaatactgagatttttgggtttgggagagtgtttccggtaattcaaataccaaaacagaagtgaatatatagttgaaaagcttgcccctttttcttgtttggtgggtgagaaaatcaaggaaaatgaaaggaaaatctgggattccagggaatttctatgtattgaacactggagctaaaatccctgccattgggcttggaacatggcagagtggaggagacctttgtgttgatgctgttaaaacagcattgtcggtcggttaccgacacatagattgtgc

SEQ ID NO: 3262 - DNA, 463 bp, Gossypium hirsutum
  unsure (1)..(463): unsure at all n locations; Clone ID: LIB3825-026-Q6-K6-D1
ccgcttnncttcttccacnntatcttcttgcaagatccgttgacctactcagcgtcgtgcagactccaagnaagaaagcctttngctctgaccccttnnctgcctccacnncctcaaacnntgggtctttttgtgacanccgccactaacnnactgccgctgcatcgtcgtgagagttcaagaaagcttaatnntatgggaaaggggatactcttnnnctggtgttctctnngttgtcgtgtaaaggctnngtctcggnnttaagccctgacgcccccgagatcgaaggggcttaacccattgctgagggatgttacctcaggcttgattggggagaaacacccaatgtgtgtacctgtgaacaatcattgtgtaaaggggctctgttgcgnatgtctgtcggccaaggcttggggatcctgggaaccatgttgccagtgtgaaggccggggtggggtgtggt

SEQ ID NO: 3263 - DNA, 173 bp, Gossypium hirsutum
  Clone ID: LIB3825-026-Q6-K6-D2
gttaataaactgctggtgcaccgatctcgccggtgccatgcatgacactctcagtgcctgcctatggatccaacacatgtgtagaagaaaccgaattttaatgtagtgtctcgtagaatctacaatcatctttctctgagcaaatcactagctatgacaataactcaaaactc

SEQ ID NO: 3264 - DNA, 571 bp, Gossypium hirsutum
  Clone ID: LIB3825-026-Q6-K6-D3
ccccgcgtccggttatatatgatgatattatggaccttcaaaactaaagatttatggatctttcaaaatttaaattatttattgtcgatggacctatatagagtaattaatgaggttgtgtgtttacatctttagggctgttaatgtcttttcttgtgcgtatctgatcaatttggttcgtcctgcacatcggcaaataccttcgaagcaccaaaaagcactttgctacagtggacttcgaggggcaatggcttttgcccttgccctgcaatctgttcatgatcttcaagaaggacacgggcagattatattcactgcaacaactgccatagttgttttgacggtgttgttaattggaggttcaacaggtacgatgctagaagctctgcaagttgtgggggatggccacgatgcccacttgggagaaggctttgagggtaataatggatatgttcctacatctcgcgaggaagatgaaacaacagggaataagttaaggatgaaactgaaagagttccacagaagtgcggcatcattctctgaaatagataggaattacctcaccccattc

SEQ ID NO: 3265 - DNA, 494 bp, Gossypium hirsutum
  Clone ID: LIB3825-026-Q6-K6-D4
ccctgatgggccggcttagtcgcacacatcaatactggtaaaaccaagatagagaaacatggagggacagtctccaactcagtcattggtgtaacttgcttggttgcttctcctgctgaacgagagcgtgggggctcatccaaactggtagaagcaatggaaagagaggtacgagtggtgagtgaagcttggttacttgacagcattgagaagcaagaagcacagccattagaagcttatgacatagttacagatcttgctgttgatggcaaaggaattccatgggataaacaagttcctgaagaacatgcaatcgaatcactttcagctgaactcaagttgtttggaaaaagaggagtctacaaggataccagattgcaagagcaaggtggccaaatatttgaggaagatgggatattatacaactgtgtcttttcgctttgcgacctaggaggagccattaatgagtattgccttatgcaactggtcaaagt

SEQ ID NO: 3266 - DNA, 569 bp, Gossypium hirsutum
  Clone ID: LIB3825-026-Q6-K6-D6
cggccgcgtgggcggccgcgtgggcggagactcatttcaggtatcaatttcttttttagtttcagctttcgaaatctctgtttcgtttgtctttcagatctatagatgtcggtcttgttcttcatttttgtttgtttatcgtatactatatgttgttgtttatttttggattgtttgtttccctctgtttaatattatagcttttgtgttattttctatttcttttaaatctttgcttagcagaatactaattgcttaaacaaaaagcatccgtatgtaaattgtttactgcatctgtgttggcttgattttggttctaggaacccagcgggagttgtgacgcatgtagagtttatttgttagtttttctggatggtaataaaatgtctttttaattcgttgtgagttgtgacattctgtttcttagttttctcaaaaagtctgtactttagttttaaaaaaatagtaataatctaattgggatgcttgttgatattgataagaattggagaatttcaactgatttgctaattgcaaaggtttttgtcgatttgggtttcatgattata

SEQ ID NO: 3267 - DNA, 412 bp, Gossypium hirsutum
  Clone ID: LIB3825-026-Q6-K6-E1
aaactcaagctctattcttactggaagagctcctgctccttccgtatcagaattgcccttaacctcaaaggtctggaataccagtacatacccgtgaacttgcttaagggggagcaattcagtcctgaattccaaaagctgaaccctattgggtatgtaccggggctggtggacggtgacatgatcatttcagactcttttgcgattttcatgtatctggaggagaaataccctcaacaccctttattaccatctgatcttgcaaagaaggcactcaatttccaggctgcaaatattgtttcctctagcattcagcctcttcagaatctagctgtcctgaagtacattgaggaaaaagtgtgtcctgatgagaaaattccttggcctgaattggttattggggaaaggcttt

SEQ ID NO: 3268 - DNA, 596 bp, Gossypium hirsutum
  unsure (1)..(596): unsure at all n locations; Clone ID: LIB3825-026-Q6-K6-E2
ctngaatgttaaaccctgattctccccatccccactaatatctccttgatggctttaagggcggcggcgacgagagcgatcttcgctggggcagctccccagggattcaggcgcatgtgttcaacagctacggctaattcctttatgccgccgccaattacggcgatgggcaacggcgagggaaccccctggtagagagcaagcgcctccaagtaccaacctctttgtctccgggcttaacaagcgcactcagtcggagaaacttcgagaagccttttctcagttcggacgtgtaattgatgccagagtagtgactgatcgtgtatcaggatattctaaaggctttggtttcgtaagatatgccactgtagaggaagctgagaaaggaagagtgggaatggatggcaagttcctcgatggttgggttatatttgcagagtatgcaagacctcggccagaacgaactccgcctcagagcaacatgtctaattcaaatggctataattcctatggccgngaataacttcgatctgaaacatgatttgtcattttttgttttaacagaggcgggtttacaacaggtcgaactatcatct

SEQ ID NO: 3269 - DNA, 588 bp, Gossypium hirsutum
  Clone ID: LIB3825-026-Q6-K6-E3
cccacgcgtccggcgatgtttcaccttgcctccacaatctcctccttctccgacgtcgtttcttctattgccttccgtaacgacggcctcctcttagccgcttccgatctctccggtctcatccaggtcttcgatgtcaaaacccggaccccgcttcgtcgcctccggtctcatacccgggcggttcggttcgttaagtacccggttctggataagctccatttgctatctggtggtgacgatgcggtcgttaagttctgggacgttgctggggagagcttggtattggacttgatgggtcataaggattacgtacggtgcagtgattgtagtccggtaagtcctgatttgtttgttactggttcttatgatcatactgttaaggtttgggatgttagggtagagaattcgaggtcggttttggaagtgaatcatgggaaaccagtggaagatgtgatttatttgccttctggtggattgattgcaactgctggtgggaattcagtgaagatatgggatttgattgggggagggagaatggtttattcaatggaaagtcataataaaactgttacatcgatttgtgta

SEQ ID NO: 3270 - DNA, 525 bp, Gossypium hirsutum
  Clone ID: LIB3825-026-Q6-K6-E4
ttcaaaaaaaaaacaagggttcggccccctttctccttctgctagggcgcagcgcccatcgtcgcagcgcttctcctcccctgcgcgctcatcggcgaccgtcggaaaccaggtaaggccttcctaaaatctttttattttttaaactctgtttttcaaaaatacaagatagatccacaaaaagctctaaagattaaaaaactaaaagaaaagattgtaaccaccttattctattcgaatgtatgaaagcttttactcaaaacttgctgttttcgtatatttctctctgatttttgtagtaaaaaaaaaccgatcgctttacattgtttagaatggcttttatagcatagaaaagcaaataaaatcttctattggttgctatctgtttggttcctgttacaggtgttgttgcggatatctcggaggcacgaggcgtgacaaagagggactgctggtagcgcacgtctcggaggtgcggtggatggtggagtgggacgctggtgagaggcgtgcgacgcgagggct

SEQ ID NO: 3271 - DNA, 570 bp, Gossypium hirsutum
  Clone ID: LIB3825-026-Q6-K6-E5
agaacatcttaatgctatatatggttcaccagatagttgcaatcagcagtatggaagggaatatatgagatcaagctccatgcctataccaaatagaaaccagggtttcatagacatggacacagaaaaaagcctggaaaatatcgtaaagcaaagtgggtggtggacaaggagcacttgggcattcttgaatgaacctccagttcttgaccgacctacaaacaattaccaaccacagttccatgttgccagcctcgctacttcaaagtttaacaagaattctggaatcagtgccaattagtgtttttaactcctaatggtatcttatgtgggtgtatttatctacttaatctgtttatatagaacataatattactgagataatattctggtttgtgcgtgttgagtgtgtcatggttttgaatctgtacaaagtatagagagaggactaaattagtgatagtagtgtggggatgaatctgttgcaagtattggtctctagggttcctttgacagcttaagatttgctaagcttttgtgctgtatacagatctgtatgacggatttttc

SEQ ID NO: 3272 - DNA, 358 bp, Gossypium hirsutum
  unsure (1)..(358): unsure at all n locations; Clone ID: LIB3825-026-Q6-K6-F1
ttatggnatatggggtgatatgggaggtaatnngatggatcttatgggaacgctggttatggggnctgctggaggtcggtctggtggtacaccaaatagtaatgctagtgcaggtgggggagatctacaagggagcggtgttgtttacatgggaggtggatttggtgatgtggggggaggttcagggtntggaaatgcatcatggaggtctgattcatcccaaggttcaggaaattatgggggtngtcaggccaatggtcctcatggtggacaaggtggctatggtggtgggtttggtggtgctctgggccgcccngctcaaccgcggtgttcctatcggttgaacgacaccttgatc

SEQ ID NO: 3273 - DNA, 619 bp, Gossypium hirsutum
  unsure (1)..(619): unsure at all n locations; Clone ID: LIB3825-026-Q6-K6-F2
cccggttcgacccagcgttcgnccaaagaagacaagggaccctaatgagaaagagaggcgagggaaaggaaagaagagagacaagaagatgcagagctgaggaaacaagaggcccgccatcataacgccacggctggccatgctggtggtggtggtattggtggtactggctacaccacagctgggtacaacagaggggatactggtggctatggcggtaccggtggacatgacaaccgtgggtaccccaccgcaggtagtgggtatgatacaggcaggcaagatgacctcagcagtatggggtttggcggagatacagggggtgcttacggtacaacgggaaaccaagacttcccaagtgcggcgcctaacaatgctgggactagaaggagcacccgcggaggtacccaggatgatccttattatcgatcctattaaatgaaaggagcgactttttgtgctctgctactgccttgagtctgtgtttgttgtttgtttgcttctactttttttctttttcaagttcgtactgttgtaccatataaagaaaagtttggtcctgttgtaatgttcagtgttagccagggcagttctataaatcaataaaagttgggaataa

SEQ ID NO: 3274 - DNA, 611 bp, Gossypium hirsutum
  Clone ID: LIB3825-026-Q6-K6-F3
ccggttcgacccagcgttcttacaaataaaatgaacttgttatttgaggaaataattttgtgcagaatcgtatgagaaatccagcaatggctggaggttatcaacagcaaggatatcaagcacgaccacctgcaaactggggccaaggggctcctcaaatgcagcaacctggctatggttatatgcaacctggagcttgtgctggcccttcaccacagtataacatgtctcagccaccttatgggggctatccttcccaaccttcatctggtggatatgcctctggttgggaccagtcagctataccaccaaaccagcaaagttcttctgcaggtggttatgattactataatcaacagccttcttcacagcagcagcaaacgcctggtggttcagcagctccaactgataatagtggttaccattacagtcagccaccagcttctggctacatgcaaccaggacaaggttatgctcaggatggctatggtggataccatgcacctccacaatcaggttatggacaaccagcatcatatgaacaagaaggttatggctcggcacaaagctatggcagtgcaacgaaccctactcaagagggtcacactccc

SEQ ID NO: 3275 - DNA, 497 bp, Gossypium hirsutum
  Clone ID: LIB3825-026-Q6-K6-F4
atcatcgcaaattctgaaagaagaggatccgatctgatctgctgcaaatgggggagaaatgggtgttgatgaaaacggctcagacgcctaccaacattgcagtgattaagtattgggggaagagggatgagacccttattttgcccgtcaatgatagcatcagcgttactcttgatcctgctcatctctgcaccacaaccaccgtcgctgttagccctgctttccaacaagatcgtatgtggctcaatggcaaggaaatatccctttccggaggaaggtaccagaactgtttgagggaaatcagaaaacgggctagggaagttgaggataaagagaggggaataaagatagagaagaaagattgggcgaaactgcatcttcatattgcatcttataacaatttccctacagctgcaggattggcttcctctgctgctggttttgcttgtcttgtttttgctcttgcaaagcttatgaatgtctttgaagatgagagt

SEQ ID NO: 3276 - DNA, 583 bp, Gossypium hirsutum
  unsure (1)..(583): unsure at all n locations; Clone ID: LIB3825-026-Q6-K6-F6
actaaacnaccgtgggtcccatccatcgccctcccgttctttctaaaatgcaactgggtctcatcactgcccttttgttactctgtttacccttggtcgccaaaaggatcttcgccggcgaaaccctcatacacgatcccaaaatttggctttccggagccgtttttgtttatttcttcagtgtttcgggtgcaatgcataacataataaggaaaatgcccatgtttttggtggataggaacgatccaaacaaattggttttcttttaccaaggatcaggaatgcagcttggagcagaagggttcgcggctggttttctgtatactgttgtggggttattgctagctgtcgtgacccatgtccttgtctatgttaaggatgcaacagccaaacgtttggcgatgctttttacgcttttagtttccttctgggcagtgaagaaagtgattttgttggacaattggaagaccgggtatgggattcatgggttctggccttccagttggaattaaagagattatcattttttgttttcccggttactatgaggtgaattatggttttaacatggaggctttaggtg

SEQ ID NO: 3277 - DNA, 441 bp, Gossypium hirsutum
  Clone ID: LIB3825-026-Q6-K6-G1
gcgtgggtagaggcttaatggtgggtgtggaacttgttaccgacaggaaggagaagacaccggccaaggcagaaactgccatcctgttcgagaaaatgagagaactcggagttttacttgggaaaggtgggctgcatggatttgttttcagaataaagccgccaatgtgtgtgggggagatgatgccgattatcttgttgatgctttggattatgcaatgtcagagttgtgagcaaaaggggttatctaacttgtggatcctttggcatcaaagttcagcaaaatcttgtgtttaatagtaataataaaagtacattttatttgcatttgtatttgtcaaaaaggatcatcaaaatcccttttataatgtgaaatatgttccactgtgtttgcatttgttgattggattcatctggaatagcgtagttagaggtgggaaac

SEQ ID NO: 3278 - DNA, 441 bp, Gossypium hirsutum
  unsure (1)..(441): unsure at all n locations; Clone ID: LIB3825-026-Q6-K6-G2
tttggcgcccatcagaatnntggttctcgtagcggcgggacccacaaattgcagcnntgaagtcaccaccggagaaccaatcatcctcagcgacggcttaatgtgtncgggagttcggaaagttccattggcgaatctccgatgcaacgccccaggagaagctctgtcccctccaatattaactccaccgttgacgccgcgaagcgcggaaaacaggccggctatgatgagtccgtctctgtccgccgcttgccaggctttcgggacgttatcaccgctggagacggctgaggagtcatcggcgtctgtggcgtggaaggagggagggaagaaagaggagaagaaaggggttccggtttacgtgatgatgccgttggatagcgtgacgaacgggaatacggtgaatagaaagaaggcgatgaatgcgagtctccacgcgct

SEQ ID NO: 3279 - DNA, 575 bp, Gossypium hirsutum
  Clone ID: LIB3825-026-Q6-K6-G3
accctaaaatccttcgatcaggtctgagcttgtggtttgttaggcctctttgatcaaactaagtttcatgtctgatcttgacgttcaaattcctactgcctttgatccctttgctgatgcaaatgctgaggactcatgtgcgggtgcaaaggagtatgtgcatattcgtggggagcaaaggaatggtcgcaaaagcctgacaactgtccaggggttgaagaaagaattcagctataacaagatacttaaagacctgaagaaggagttttgctgcaatgggaccgtggtccaggaccctgaattaggacaggtgattcaacttcaaggtgaccagcgtaagaatgtatcaaccttccttgttcaggctggcatagtgaagaaggaaaacatcaaaatccacggtttctaagcctgcgcggtggaagcaggaaatactatctgattaggacatatcttatgttggttggatgacaaagtatgcatgttgtgttacatgtgctttccagttcagtggatgattatgatatgtttggaagtttgtttggctatgttgcttatgttagaccttaatatgt

SEQ ID NO: 3280 - DNA, 131 bp, Gossypium hirsutum
  Clone ID: LIB3825-026-Q6-K6-G5
tcgatcaaatataccctgaaaaaccctgggggtgaatattgaagatgcaatacaatgatagatgctgctgcctctgctaaggccggcatggagaaggccaaggcctgcatgcatgaaaaggtggacctaat

SEQ ID NO: 3281 - DNA, 397 bp, Gossypium hirsutum
  Clone ID: LIB3825-026-Q6-K6-G6
atccttttcaaaatccagagtttttagtaaccaaattgattggccttgggagttacggttacactgcaccattttccaaaaaaatagacgcctacgatgttcctcaaggcgtgaatattcgggggctattcgatgaagaattcgctaacattttaagaaaggatgccttacagtacgtgcgctgatttgcagagagagttcaggaaccatattaagtatgcgattgaatggactagagaggcgaaaaaacaatgcaatgaatgggcggaaactggtttacatcctctaacgaggtttttttaataatggaaatggtcttgtgtgccgattccgcctgctgtggatgaccgacggtgcgtaatgccgggccggcggagaggaagataatcatcagcgc

SEQ ID NO: 3282 - DNA, 546 bp, Gossypium hirsutum
  unsure (1)..(546): unsure at all n locations; Clone ID: LIB3825-026-Q6-K6-H1
ccgggttgacccagcgttttcccagcgtccgcaanattctggggttttagcaaatggtgatttgataccaattatctttgggtttattggtttaatcaaagctttttcatcacttgcaaagatatcgtttgagaaatctggttccaagagatctgaaaagcaattcagtgcaatttttggtgttttagggtttatttgggggattataatttgttctgggattggaccattggtttttgatttccatttcgattcaattgaagggtcttggaggatttttgtttctatattgatgggattcattgctggttctttatatatgcctgctgggaaaaatgcaagatccttttggctcggtgctgatcaacttagatgtaatttatccataatttcttgtggatggttctctagattgattctatatgccaattatatattgactgtgtttactgctttactttggatcaatccatttgttgaaatccttagttttgtgagtttttcggaatccgnatttaccagatttaggcttttctgcttattgct

SEQ ID NO: 3283 - DNA, 600 bp, Gossypium hirsutum
  Clone ID: LIB3825-026-Q6-K6-H3
gcgttctatcgagttctttgtttaagaataaggatcttttaagatcgccggatccgctaaaatacgccgatccccgtccgtcttccgatcatatggggctgcttgaccagttgtgggatgataccgttgctggtccccgacccgataatggccttggcaagctccgaaagcactccactttgagtgtgcggcctaactctgccaaggaatctgatggcgggagtgtaagatcgtacggtgatgaagcgccggaggaagcgacgagagtgacacgtagtattatgatcgtaaagccgcctggttaccagagcggatcgcctccggtttcgccggccggatcgacccctccggtatctcctttttccggaggcagagaatcatatcggtttcggagaaggtccacatcggatgcatacgagaaggctaacgaggttggaccaaggagcccttgtcctcctccttacgacgtgtgagatatgagtcctctcccatatttggcgacaaatcaaatgggttttggtactgtttgcatgcttaggtctttcaaatgtgtaacttaatagtgtagtatggggtgatgtatgcaagaatgtagtctgg

SEQ ID NO: 3284 - DNA, 584 bp, Gossypium hirsutum
  Clone ID: LIB3825-026-Q6-K6-H5
caattttcaaccacaattaagacggttcgtagtgataatgggactgaattttttaaaaatgaatgcaatgagttttttcatatgaatggcattcttcatcaaagttcctgtgtttatactcctcaacagaatggagttgcggaacgaaaacatcgccatttgctagaagtagctcggtcattaaaattccagtctcacatgcctagtaaattttggggtgaatgcattctcactgcttgttttttaattaattgtctacctacccctgttttaaattggaaatgtccttttgaactcttgcataaagttgcccctgatttttctcggttgaaagtttttggttacttagcctatgctacaattccaaactaccatgacaaattttcccataaggttgttccatctgtttttatgggatattcacctgtacagaaaggttacttgttatttagtcttgaatcaaaaaaaaattttgttaaccgtgatgttgtttttcatgagactatatttccttttgcatttcctaatcaacaatttttaccctttcctgatactgataattcagttttccttcaccttgaacc

SEQ ID NO: 3285 - DNA, 588 bp, Gossypium hirsutum
  Clone ID: LIB3825-026-Q6-K6-H6
gcttataaaaatttgaaatagatctataaggccagttgttgaagaagaagcagatcaatggcgaaggagttggaaggattcaatttcgagcaaaggcatggaaaggcgagggtgagagtgggtagagtttggaggagcaaagatggatgccgccacttcatggtcgaatggaatgttaacatcagcttgctttccaattgcgttgccgcttatgtccgcgatgacaactctgacatcgtcgctactgacaccatgaaaaactctgtttatgtcaaagcaaaggaatgttcagaacaactttcggcagaggaatttgctattctacttggcaagcacttcacatcattttatccacaggtttttactgcaatagtaaagatagtggaaaagccatgggaacgcatttctgtcaatggccaaccacatgaacatggctttaaactgggatctgaaaagcatacaactgaagcgattgtacagaagtctggtgttttacagctgacttctggtgttgaaggcctgtctttgctgaagacaacccagtcaggatttgaaggattcatcagggacaaatacacagcacttcct

SEQ ID NO: 3286 - DNA, 644 bp, Gossypium hirsutum
  unsure (1)..(644): unsure at all n locations; Clone ID: LIB3825-031-Q6-K6-A1
cggncgcgtgggcggccgcgtgggcagcggtagggaaccaactgttaccacacagcagcagcagccatggtgaagtactcaagagaaccggacaaccctactaaatcttgcaaagctaggggttctgaccttcgtgttcattttaagaatacacgagaaactgcctttgcaatccgaaagctacctttgacgaaggcaaaaggtacttcgaagatgttattgcccacaagcaagcaattccattcaggcgcttctgtggtggagttgggcgaaccgcacaggctaagaatcgccattctaatggacaaggccgttggcctgtgaaatcagcaaaattcattctcgatttgctcaagaatgccgagagcaatgctgaggtgaaaggcttggatgtagattcacttatcgtatctcacatccaagtaaaccaagcacagaagcaaaggcgccgaacatatcgtgcacatggaagaattaacccctacatgtcttcaccgtgtcacattgaactgatcctgtctgagaaagaggaagccgtcaaaaaagagccggagactcagttggcttcgaggaaatcaaggggtgcttcattttaaactgctgagtgatggattgttagtcggaagcttttacaattttctttt

SEQ ID NO: 3287 - DNA, 644 bp, Gossypium hirsutum
  Clone ID: LIB3825-031-Q6-K6-A2
tggtttcgccttcagttttggtgatgtctcgtctttcacgccgaaaaatatggttcttacgatggttttaacaaagggtttcaatcatctccacaacacgtttcgatgtgtttagatggtggtgatgtcttcagctccacctttcttgggctgcaaggtactggatacggaaagggtgattcatttgggtcttatagtattggttacaatcagtccaatgatttgtcttcagtaccgagttggcatgataaccaaagaaactatcttttggagcagagaatggaacagagtaggggattggataatagggggatgttgctgcagggtgcttttaccactaggccctacattggtaacccttttgtttgttcccagcaatgtggaattgatggtaatggaggaagagctgccattgattcattgagttctcccgggttcttgcacagtaagattcctcttgaggagaatgtaatggaggatcatagtgttatcattcaaggaagaggtttgaaatatgatatcaagaacaagggctttgattcgttcaaatgttgtaagaaaaagactctcaaggagtttggattgcaaaacctgcaagagaaaactctaaacttgataaaagacatggagaaaatgtgatactg

SEQ ID NO: 3288 - DNA, 630 bp, Gossypium hirsutum
  unsure (1)..(630): unsure at all n locations; Clone ID: LIB3825-031-Q6-K6-A3
gngtgaaagtaaattacatataattgatataagcaatacatattgcactcaatggcctactttactcgaagccctagctacccgtagtgacgatacgccgagtttaaggcttacaactatcgtcaccaacaaaaacggcggcgtttcaacatccggcggtggagccgccgtccaaaagtgaggaaagaaataggtaaaaggatggaaaaattcgctagattaatgggagttccttttaaattcaatgttgtacaccataccggtgatttatatgacttagatttatcaaaccttgatgttaaagacgatgaagctttagccatcaactgtgttggcacattacattcgatcatggatactcgtcgggacatcgttatatcgagtttccggcgattacaaccgagggtaatcaccgtcgtagaagaagaagccgatctcgatatcggtgtcgatggggtcgatttcattaaaggtttccacgaatgtttaagatggttcagggtttattttgaagcgttagatgaaagtttcaatagaacaagcaacgaaaagttgatgcttgaacgagnnccgccgccggccatcgttgacttagtggcttgttcgccggcagagtcgatagagcggcgt

SEQ ID NO: 3289 - DNA, 529 bp, Gossypium hirsutum
  Clone ID: LIB3825-031-Q6-K6-B2
cccctgccttccatggctcgtgggtcacggtatttcctatatacatgctggacgcttgggaaagctagtggttatgaaattactttggctattgctgctaaaggcattggcatggcctacaaggaggtaatggaccacttaaatgaagagctagtgcatcaccgctacaatacaagactgatactgccggcggtagcgtactaaccgatcatacagaagtctcctgcatattatgtggaactgtgaaacacaatcttgatctcttaaacaccatcactttatgctgaacatgcctaaactctaaagaaaacaaacctaatagatctattattgaggaaacatttatacatgtattctaaagataaattagctgttgaaaactttcaggtccgaccccagcaacaagctagagacatgttaaagcattatgataggagacaaaacaaactggatgtctcatgaaggaaatgtctactctggctgacaagaactgatagcacttattcagaaaacaatcaacttattattc

SEQ ID NO: 3290 - DNA, 620 bp, Gossypium hirsutum
  unsure (1)..(620): unsure at all n locations; Clone ID: LIB3825-031-Q6-K6-B3
gttgttnagaaaaaaaatatagaaatattaagcatggctgaagttttggggaagtcaaatctgtttacagcttgtaactgtagtcagaagaagaatcaagaaggtggcgttcctttgttttctaggagaatctctgcgttttgtttgagaaaatagttttccttctttgaagttggaacctcaagctttgaggagtggttttaatggtcaaagagtggttgttttagagaaaagaagtctaaatgagagaaggttctgtcgagttcccattaaagcacagatgcaaacagggcttattggtaaaacccaaaagtggtgggagaaggggaatcaaccaaatatgaaagaagtgacatctgcacaagacctggtggactcacttttgaatgctggggataaacttgttatagtggattttttctctcctggttgtggtggctgcaaggctcttcatcccaagatttgccaattggcagagatgaatccggatgtgcagttccttaagctgaactatgaggagcataaatccatgtgttatagccttaatgtacatgtgttgcctttctttaggttctatagaggagctcagggtcgtttatgcagctttagctgcaccaatg

SEQ ID NO: 3291 - DNA, 651 bp, Gossypium hirsutum
  unsure (1)..(651): unsure at all n locations; Clone ID: LIB3825-031-Q6-K6-C1
ggggnaactctctcaggtgtccatgatcttcgtgaaaaatatctggaacaatgaatgcacagccaataaatgctgatccacgaaaacaaaaagtgaaggctgcccaaccagccaggaaaagcgtagcggttgaaactcctgaactagatcccaggagggctgcaaatactccagcaagaaagaggggtaagcaaagcgctgatacatccgtggagggcttcctccagtccttgggtcttgaaaaatatgcaatcacctttcaagctgaggaagttgatatgactgcacttgtacacatgacagatggggacctaaaagctttaggcataccaatggtaactttaaactgaaccctcaaatatggatgcagtcatgcgattacattacatgccctcgttgttttatctagttttcaagtttgtgatgatccaaatgttttcctcttttgaagagccaagccataccttaactttgcaagaatgtcctttttcttctggacctagaaaatccgtttattttggtcacttttctttaatttcttctatgtgcatttgatcatttatgggtattatttgaaattaacagtttatatgccagctaatgctgatctcttcaaagaaactggaatttttggaacgtccagataattag

SEQ ID NO: 3292 - DNA, 649 bp, Gossypium hirsutum
  Clone ID: LIB3825-031-Q6-K6-D1
cggccgcgtgggcagaatcaacgtaagaattagggttgtgtttagaaatggcggtggcagcgcgcttcagatccactctccctatctttcacaggcttttgagatccgattccctgccttctcacactcccagagctactcttcaccgaactctactttgccccgagctgtcgaggaaatattctacttctctgaagaaggacgagaatgttaaggtgcctttggctttgtttggtggatctggaaactatgcatctgcactgtaccttgcagccgtaaaaggaaatgctctggacaaggttgagtctgaacttcttgaccttgttcaggcatcaaaaaacagtcaattgttttctcaattcactaaggacttgtcagtacctgcagagacacgggtcaaagccattaatgagatatgtgggcaagctaaattttcagatcttacaaagaactttttagttatactagctgagaatggaaggctaagacatatagaaagcattgcaaagagatttgtggagttgaccatggctcataagggagaagtgaaagctattgtcacaagtgttattccccttccttctcaggaggagaaggaactaaaggagacgttgcaggaaataattggacaggggaagcaggttaagct

SEQ ID NO: 3293 - DNA, 626 bp, Gossypium hirsutum
  Clone ID: LIB3825-031-Q6-K6-E2
cccagcgtccgcggccgcgtgggtcacggtattcctgttattgctgctggaggcattgtagatgctcgtggttatgttgctgctttggctcttggtgctaaaggcatttgcatgggtacaaggtttctggcaactcatgaaagctatgcgcaccctacgtacaagcggaaactgattgaatacgataaaaccgagtatacagatgtctttggcagagcaaggtggcctggtgcaccacaccgtgtccttcaaacacccttcttctgtgattggaaatgccttaatgctcaagaaaatgaaactaatcagcctatcattggtcgaacaataatacacggcgtggaaagagaaattcggcgttttgccggtacagttccgaacccaacaacaacaggtgacattgaaagcatggtgatgtacgcaggccaaagtgtaggcctcatcaaggaaattctacctgccggacaagttgtaaagaagctggttgaagcggctcaacttcttatccaccaaacatttaatccggactcgatctaaaattgattatgtgaattttatacctttatttgatgaagttacacagttttaaaagctatttcattagtattctagttttacacatatgt

SEQ ID NO: 3294 - DNA, 600 bp, Gossypium hirsutum
  Clone ID: LIB3825-031-Q6-K6-F1
cgactgtggctgccatttttcgggctatgacttttagaaagtactagaagctgcaaaaggcttaaaacgagagagaagagagagaaaaagagagagaggggaggggaaggctggtctcctgacttggaccgtatatcaaagcgtaagaaaggtcctttatcactaaacatagccgaactactgtgtgtgcagtcgtcatcaatgcataggacatgtcaaccccgtctttctaacatttctcccaaatcccagattttctttctctttaaagctgagatagaaggtatattgtttggggtaggtgaagttttgagtttctgagaaaggaatgtaagtggtatggagatagatgagattcagacacaacaaggttctaagttctcaagagttggtaatgggagaagtgagtcgagcaggatgggtcagaaaggtagtgacaaccactaccctgatgatgaagaaggtagtgaggtcatgaaaagggctagtgcaaatggaggtggaggtgatgctctagctgacaccgctgctgctaatacgtttcgaggctggcaccattcttcgagaattattagggttttttgagccttcagtggggaa

SEQ ID NO: 3295 - DNA, 192 bp, Gossypium hirsutum
  Clone ID: LIB3825-031-Q6-K6-F2
tgtacccgccctttaaccgcgcattatgcgctggttacgtgctggttacccgcatcattacccatacacttaccagccccttatttccctctcttttctttttttttcgtcactttctccgcattttcgccggattttctcaataagctgtatattttaggcttcctttatagtgcttatctagagctttac

SEQ ID NO: 3296 - DNA, 643 bp, Gossypium hirsutum
  Clone ID: LIB3825-031-Q6-K6-F3
cagcaatggcggctcctctctttcccgccattttcactggtttcttcttcttcgtcttcctcatctctctcacgtcgcaagatcaactaaataacaacgaccacaacctcttgatccgtgaattggatgacgccaagctaaagctctctcgtttgggaacgcgagaagcttctcgaagacatgggaaaacaagatcacttatctgcagtctgttatatccactcttgaggatgattcattacttgctgatgaaaagcttaaggctctagaagaggagtaggcctcgttctcctaggtacgtttgctttgggatgcttcgagaaagaacaactttgaacttcatgttttggaatcagaagcacaggacactgaagatagggtggaagctgttaatttaaaagttgaaaagatggcagaagttgttacagaagaatggattcaaattcaacatcttgagcaggcgcttcaacttgcacaaaggagggcattgcaagatcaaaagcaaagttgcaaggtttcatcaaacaagaaatgcgaagaaatgaatttactgcagcctttgtcaatgatgaatttgtattctttctggcttcggcattgattaccttccctgtactgggtgcttggatggtgctgtcatcac

SEQ ID NO: 3297 - DNA, 442 bp, Gossypium hirsutum
  unsure (1)..(442): unsure at all n locations; Clone ID: LIB3825-031-Q6-K6-G1
tgcttcttggaaagcacggnttgggagcgagtatgcatgnggaaatctcgtaggtttgccagtaattgttgttccgactgggttcaaaaacatacctaatccacctccaactggtactcgtagacgaaccacagtcaacacgggcatatatgctcctcctaaccatgatcacatggcgttagccttagcaatggcttaccagtctgcaacaaatcaccataagcagcggcccccgatagatgagctgggaccaaacgacacaatatccaatccccctaccgttcccatccctcctagacgcttgcatatgtaacaaagtttgtaagaaaccctttagtgcttaccatttgtcaaagcctgctccagactgtaacctgtacctgagaacaatatcatcgttcaaaatggcaagatttgacggataacacgtctaggttttttt

SEQ ID NO: 3298 - DNA, 628 bp, Gossypium hirsutum
  unsure (1)..(628): unsure at all n locations; Clone ID: LIB3825-031-Q6-K6-G2
ttcgcggccgcgtggggnaaaattggaggatccttgatttcttctcacaccatcctgagagcttgcatatgtttactttcctctttgatgatttgggtgttccacaagattacagacacatggaaggttctggtgtaaacacatacactctgattaacaaggctggcaaagcacactatgggggggggggggtgggaagcccacttgtggggtcaaatgcttgctggaagatgaggcaatcaaggttggaggagctaatcacagccatgccactcaggatctctatgactcaattgctgctggcaactatcctgagtggaagctcttcatccagacaattgatcctgaccatgaagataaatttgactttgaccctcttgatgtgactaagacctggcctgaggacatcttgcccctgcagcctgttggccgcttggttttgaataagaacattgacaacttcttcgctgaaaatgaacagcttgcattttgccctgccattgtggttcctggaatctactactcagatgataagttgctccagactcgtatattctcctacgctgatacccagaggcacagacttgggccaaactatctgcaactcccagccaatgctcccaagtgt

SEQ ID NO: 3299 - DNA, 641 bp, Gossypium hirsutum
  unsure (1)..(641): unsure at all n locations; Clone ID: LIB3825-031-Q6-K6-H1
gtgaacganaagagggaactattgcaggcagcgaaacgatgataagacttcactagagactgcgattaatcaaacaagaaaggaagaaagggaagttgttaatgctaaagaagcaattgaagggctgaaagatgaagggatcagtgaaaatgctctcattcttatggagctactaaagccactcaagagtggattcgtgtggttttggaaaacactttcatgggaacgaccgggaacaacccttgtcgtaattgccatagttacagtaattgtgtacaaggagtgggttggcaaggcgatatctgcaggcttgcttgtattggtggcaaaaatgatccaagctagacaagaaaagctcaaagacaaacaaaaggagataaccgtgtgcactgcatttgagccgactgcctcgacgagggagaacatagtttcagctcaatatatgtatatgacgatttgccagataatacaccaagcaaatgtcacaattctgaaattgcattcagtcctggtttcaagggcacccaagcatgcaaatgtgatgatggttggcatcactggtttggcgatattgtttgcagtaactccattgaagtatttgataataagtgctgtatttcattggatgataatgaggtcaa

SEQ ID NO: 3300 - DNA, 645 bp, Gossypium hirsutum
  Clone ID: LIB3825-031-Q6-K6-H3
cttcaaagctccctcgaaacggtttctttgacgaacatagtctcctttttttccttctcattcagtcgcttcaatcgaagaaaaaaaaatggcaatgaatttgggacaccatattggaactctttccggcaaacaaattccgacggaattcgccgccggagaacaaccatcatcaacaacagcgagtccatcggcagtttggaaatcacccgccggtaatctccgatccaatagcccacaagaaaatgcatccccacctatgttaacaccgccactgacaccgaacagcgccggggagtggtcgtatttgatcaatctcccaatgctgcgtccggatctttcagtagcatgccaggcattcgcgacgtcgtcgccgctggagatgacggaggaagaggtggcggggacggcggagtggacagttggaggtaggaaggatgagaagaaaggagtgtcagtgttcgtgatgatgccgttggatagtgtgacgaatgggaacacggtcaataggaagaaggcgatgaatgctagtcttcacgctttgaaaagcgcgggtgtggaggggataatgattgacgtttggtggggactggtggagagggaaggcgccggtgcttacaattggggtggctacaccgagctcct

SEQ ID NO: 3301 - DNA, 631 bp, Gossypium hirsutum
  unsure (1)..(631): unsure at all n locations; Clone ID: LIB3825-032-Q6-K6-A1
cggncgcgtgggttgaaatgctctgcagaggggaggagagaggtcccaatcctggcctccggccacggtgcagtgcttgcacacgcgcctcacgcgccatcgtacacggtggtctgaaggcttaaaaacctttgcccttccacaggtgacctcttttcccttagatccttacttgtatatgataaaacaattcatatatgttcaaaataaagcacgagatatgcgattaaatcaccttttgagagactgttggtatttttttttgaatgaatgtctgtgagtatatttctttcttccccaaaaaagaagggtccccttacaccgttttaattcggacttttatagccactactgttattacataaactgggaaagaaatcgaagatttctttccatttcttgtctgttgtatctaccatatctttgattgtgatctgctgaaatccttttattttagtttcctttttttgttttgttcgtatctgctgtgtttccttttcttgcaggtgacttgcaaagatttcggtggtgacgaaggcttgacgatggtccactggtggcggtgatctcggcgtgactcagagccttaggattgtggccttgctggagagtagctggaacgacgcgtctg

SEQ ID NO: 3302 - DNA, 616 bp, Gossypium hirsutum
  Clone ID: LIB3825-032-Q6-K6-A2
gtgtcctaattctgggtttcccttgttgccatcatatcttcatgcttgtttcttcttgtaggttaagtagtggtcttctgcttgttttgatttgaaagtttttggatctgatgattttaacccacgtctgctgagccatatatatatgtgtgtgtcaaataaggttgagagattcagtgtggggggcgtaactagggtttctttttccttctttttggccattttttctaggtttaggcaaagaaggagatatttattgttggttaaaggtgagacaaaggggtggagctccttgaagtccaatagagggtcttgcagggtatatagagctgctgagctatggatccctaaagctctatcccatatatataacttctaaaagaagggatagacttttggcttgcatatctcaggagctgcattaccaaaaatgtcagatccttgtttggattgaagggagctctacacttagtcactgatctttgtttttagtagctatgatctgatttaactttatagaacccgttcatggttttgctttgaatattgcaagttgattacttgattttcttttttgaagtttatgcaggaggagggtgaagacattgaaaggggc

SEQ ID NO: 3303 - DNA, 620 bp, Gossypium hirsutum
  Clone ID: LIB3825-032-Q6-K6-A3
tccgaagactccccgtccttttcgagtcccaagttgaaaaaaaagacttttcaccggcacttacatgccttcaactgacctcaccggcggctaccgaatcctctcatatctcgacccttccgagcccaaacacgctaggctcaaacaactcctctttttcctcttgaaatctaggagagatcatgtaatccccgagttccaagcctcttacaatgagttattcgaaacgttagagaaagaagtcgccgagaaaggcaaaagcagctttcagacagctaacgatcaagctgggtttaacttcttgtgccgggctttcttcggttcaaacccaccggatactaaactaggaaccgatggtcctagtttgatcagtaaatgggtactgtttcaactcggtccggttcttaaactcggtctcccaaagtatgttgaagaactcttgatccataccttccctcttcccccggctttggttaaaaaggattaccagagactgtatgatttcttctacgaatcatctggttccattcaagatgaagctgagaaactgggtatttcacgagaagaagcttgccataatctgttatttgctacgtgtttcaattcattcggtggcatga

SEQ ID NO: 3304 - DNA, 626 bp, Gossypium hirsutum
  Clone ID: LIB3825-032-Q6-K6-B1
ttgttttttttttttgattttgatctcaaaaaggcttctttcataacacagctttccttcacttcaagattcgtctgaagaggaccaaaagaaagaggtttgtttgcaaggaccggtgatttgccccgccgttgatagcaagcaagttggggtttatacgctgccgtttaatgggccttttccgaggactagattgcatcgaagtgatatatggggatatagagggatagttgatggaaaaggtaagccacgtggcatttccggtcacctgaaacggcggaggaggtttaacaccacggtgcagtgtatgtttagttcatcttccgatgggaatggaagtatggctgagaatttcaatgagaacaatgaagattatgttaattctagtgtggttgaagctgttgaggtgaggagtggagctgatggatttatgatcaaaatgagggatggtaagcatttaagatgtgtccataacaatcctcaaggtggtcatctcccggattatgcaccgcatcctgctatcgttctgaaaaggaagatgggaccggtcttcttctcccgatcattgttttggagatgccaagtgcgttgcttatggcagcattacgtaatgtccaaatcgctag

SEQ ID NO: 3305 - DNA, 675 bp, Gossypium hirsutum
  unsure (1)..(675): unsure at all n locations; Clone ID: LIB3825-032-Q6-K6-B3
gcgttcgtagnaaaattacgaacatgccgggtgtcanatcctgaattgagttcccagccattgagtttcgtttatcggatttgaagcgaggaactgaaggatggaaccgtttgtgcaagagggttcaagaggcttgtgagactttcggttgtttcgaggtggtatatgaaaaggtatcgactaaactgcgagaggatgcgtttgggttgatgaaagaaatggttgagctcccagtggagacgaaacagaagaataatagtcccatgccttaccatggttgggttggaccatgcaagcaggtttctgtgttgtatgaaggctttggagttggagatgcctccaactatgactctgttaaaagttttgctcaacttatgtggcctaatggtcacccacacttttctgacactattcataccctagggacgcaaatggaggagttgaacaagttaatttggttaatgttaattgatagttatggattaggggatgactcattgaagatgaactacacaacgttggtgcggatgatgaaatatatggcccctccaccaggagagtatgaaagaggactctntgctcatactgataaaccagtaagcacactcatttgtgaggatcaaatttcangactggaaattgaggtcaatgatggtcaatggatcaagctaacta

SEQ ID NO: 3306 - DNA, 650 bp, Gossypium hirsutum
  Clone ID: LIB3825-032-Q6-K6-C1
caaaacagttttgcaccattcatggtagccatggcaacaaccctctcttcactatcttccacccccaaaccatccttcttagaccacaagtcatccttccatggcacccctttagcttctcgctttactcccattaaatcctcctcccaaatctccaccatttccatgtccttaatccctccttacgacctgcagtcctttaaattccaacccatccaagaatcctatgtcgctcgtgaaatgacacgccgttacatgatggacatgattacctatgctgacaccgatgttatcatcgtcggcgccggctctgcaggtctctcctgtgcttacgagattagcaaaaaccccaacatccgtgtcgccataattgaacagtctgttagccccggtggaggcgcatggctcggtggccaactcttttcagccatggttgtgcggaaaccggctcacagattccttgacgagctcggcatccagtacgatgaacaagaagactacgtagtgatcaagcacgcagctctgttcacctcaacaatcatgagcaagctcttggcaaggcctaacgtgaagctattcaatgctgtggctgctgaggatttgatcgtgaaggaaaacagagtcgccggtgtggttacaaactgggcttt

SEQ ID NO: 3307 - DNA, 640 bp, Gossypium hirsutum
  Clone ID: LIB3825-032-Q6-K6-C3
atccgctgccccccggcgtgcccccccctccgagccgaggtggggtgcgtctagccccccctgggggtcgggtcgtcccgcaacgactcaccacgggggtgagtcggtcgccggcggtggtggtcggggtgacaattttccggccggtcaagcccgcccatagaaatgtagccaacgactccaggaccaagttccctattcgggcaaagatctcttggggtggcttatgcattgctatgggctcgagcttggcttgccgttttgcccccgtcacgtttagggatgccttgtgcatcccaagtcggcgaccacacggtgccttggccttgccaagcccttgcccgcattcgaaactgcccgcgaccccagtaccaagtccctttgacggcaacggcccactggggggtgtaagttgagtttgtaggctcggtcttggctcgaccaagtcccggtgggacttttcccctcgtagttctcgtgccaagcggttgtggtgcgccctcgttcgttgttccttccgctcccctaccattcggttgggtgggctgttgggcggtgtgcgtgggcgctactactagtacgcaataggcatatgagtggtgttttggttgtgtgtattggcaggctccatgctactcgc

SEQ ID NO: 3308 - DNA, 651 bp, Gossypium hirsutum
  unsure (1)..(651): unsure at all n locations; Clone ID: LIB3825-032-Q6-K6-D1
cagnaaaacagaaagcagnaccgcatcactttttgctagctaagctactgtgggagttattgttcttcagaacagcttctgcagtagctaataatatcgttatatattatataaattttatacatcctttttaccctacaactccatatataagcaagtaaaaataaatatggctcgctctgtttcttcctttaagctccttggtgcttctatttttgatggtctttatgtctccatatcaaggagaggttactcgggtgcaccgccggcggcagtgacggctagctttggtaggcctggggcgatggggaaagtggaacgaagagatgcgatgaaagagtcgtcgtcgtcggagacaagggcttattcttcagcttgggcgcctgaccctgttacggggtattaccggccggagaattgtggggctgagatcgatgcggcggagctccgggagatgttgttgaatcacagggttagatcacagtagaaacttgccaccgcatgtgatcaccgtagcagagcagagccataatgttttgcagatgtttgggtgcctttgtattttgttttggttttgagttcaaaatcttttatcttaatagtcggtagttttttcgcataaagagtgtagtgtgctgaactttaagctaa

SEQ ID NO: 3309 - DNA, 618 bp, Gossypium hirsutum
  unsure (1)..(618): unsure at all n locations; Clone ID: LIB3825-032-Q6-K6-D2
ggaaacagnaaagcagnaccgcatcactttttgctagctaagctactgtgggagttattgttcttcagaacagcttctgcagtagctaataatatcgttatatattatataaattttatacatcctttttaccctacaactccatatataagcaagtaaaaataaatatggctcgctctgtttcttcctttaagctccttggtgcttctatttttgatggtctttatgtctccatatcaaggagaggttactcgggtgcaccgccggcggcagtgacggctagctttggtaggcctggggcgatggggaaagtggaacgaagagatgcgatgaaagagtcgtcgtcgtcggagacaagggcttattcttcagcttgggcgcctgaccctgttacggggtattaccggccggagaattgtggggctgagatcgatgcggcggagctccgggagatgttgttgaatcacagggttagatcacagtagaaacttgccaccgcatgtgatcaccgtagcagagcagagccataatgttttgcagatgtttgggtgcctttgtattttgttttggttttgagttcaaaatcttttatcttaatagtcggtagttttttcgcat

SEQ ID NO: 3310 - DNA, 615 bp, Gossypium hirsutum
  unsure (1)..(615): unsure at all n locations; Clone ID: LIB3825-032-Q6-K6-D3
cggccgcgtggggtttccaagnatttgacatagggattgatcaacctagcgagggatatccctagttactgggatgaattggttttgtagacgtgaagagagttatcaacggtacgagttgccatcccatcgttgaaccgtatatcgatggcattccctgtatcagtagagggtgaagaattgttatagatcaccaccgcggaggaaataacagccatgctggaattgtggtgtttaaaaccatatgactatagatatgactttatagcacttcattagataagtgagattaaagtcgataaggcctttatcttctcttacatttgcttgaggtaggttgttatttgcactttcatccttggtttgcgaggatacttcgactgtaccatattggtcttgggtagttatcagggacatattacccctactagcgttgtacttagactgcagttaacttcaatcggtgccttctgctaccaacttcagtggttagttcacccttaactntaagggttctcttggagtggacgaattaagtcttggagcgatgaaatgtccaaagtgtatcactttcttatcaatgccatgtatttccccccaaattaatgtcttaat

SEQ ID NO: 3311 - DNA, 650 bp, Gossypium hirsutum
  unsure (1)..(650): unsure at all n locations; Clone ID: LIB3825-032-Q6-K6-E1
cggncgcgtgggcggacgcgtgggcggacgcgtgggtgtgtttatatttttgttttataattatatattttgatatgttaatataaattagcatctgatatattgtgagtattaaattttaattccacaagtggaattaaaacgttatcagatgttttatttttataatactgattttctttttatactacaatctaataacttatatcacattatgcaaaagacactctaatagcccttcttttagatcattgagtccctttcagctgttccatcccctgaacttgcattaaggttgtacctgcaatgtgctgaggtaatcttgagacttgacttaaaccaactctgcataacagtcattggttaaatagtgaattgaaccctgaaaattattttagatgataacaaattttattgaacttcaagagatgccatttttctaattgatagttgggaaaaggcatactgagataaataatgttgctcacgagggtgcaaggtttctgatggaacaggtgcttacaagaataaatagctttatttgtgacattcttagggctgttaccaatgttccattaatttattatgttgattccaagcattagggatcaataattttattttaagatgatgcgaagagtgtgctatca

SEQ ID NO: 3312 - DNA, 551 bp, Gossypium hirsutum
  Clone ID: LIB3825-032-Q6-K6-F1
gatctagcacagcggacggtctatatgagaacaaccatagacttacgcacgcatgcatacgactagatattttatatatagagctaacataaaattaattgactggccgtcgacaaacaacggactgacaaaaaaatagcctgtacccaactaacttaatttgcttgacatacatctttctttagggggggggagaaataacaagacagcaccgatcgatcttcctaacaaacagtcacgcagactggataatgaaaggcaccctgtctggacccattaattaagcgcggtgtggggggtacttacacgcagaccgatccattcactagccagctacctaccgctcgtttctttttctttctttcctttctttctacgcacgtcggctttctctgccaagctatatataaatggctggctttatggatgcgatctattgattgactgaccctacctccaaaacaactaacttaagtagagggatgacgtacggagcgatccatctgcattgatagacggtcgttcttcgtcggacgagggcacccacttaa

SEQ ID NO: 3313 - DNA, 657 bp, Gossypium hirsutum
  Clone ID: LIB3825-032-Q6-K6-F2
gcgacgccagcaccaacctcaccacacctctctctgtctcgaaccctaagctctctgtttggcttccaatggattctgtccaaacaaatcttaatgatccccaatctttttctgcgcaaaccctaaattcatacaaccaaaaccctcctccgcctccatctcagacattcgactccgatcctggccttgaacacaacaacgccaacaacggtgccctgtctaatcctgatgcccattccaatactattaacaatacttattcatttaaacccgacatccacaagcctctactgtcggaaaatgggttaactaacacccatagcggtaccacagacaaggattattctggcggggaagaggagaccaccagcagaaggcgaaggaggagccgctgggacccgccctccaattccaacaaccaccagacaggtaatgatgagtctgcctctggaaccaagaagaggaagtcccggtgggcagatgatgagcccaagcccgtgattcagctccctgattttatgaaggatttcactggaggtatccaatttgatcctgagattcaagctttgaatagtaggctgctagagattagtaggatgcttcaatctggattgcctttggatgatagacctgaaggagctaggtctccttcgcctg

SEQ ID NO: 3314 - DNA, 259 bp, Gossypium hirsutum
  unsure (1)..(259): unsure at all n locations; Clone ID: LIB3825-032-Q6-K6-F3
ggaacaaagnaanaaatatattcatataagaacatatcggctactttttcagacagaatctattgaaggaaaaagagctggcaaattgagggcttattcttcgattgatttagtaatgaatttgtaggaagagacaatgattagttggctacataaaaatttttttagcaagtgcctcctatttctttcctaatgccaacggagacgagttcatttgtcactatttgtttataatgaagttcattttcttttttctttt

SEQ ID NO: 3315 - DNA, 571 bp, Gossypium hirsutum
  Clone ID: LIB3825-032-Q6-K6-G1
ctaaacttaggtctccattataacaaggctattgggtacattctatcagatccgagctgcgcgggtttgctcctgtgccctttggatcattggagagtattgcctatctctatctgaagttgagagtgggatagcaaccataaagcagtgcctcggagagctacctttctactcggggggggggagaggggaagctactgatgcttctaagaaaactccacaggcaaactccattactgtctcctcaaggagaccagctgttcttgctgatggtacttatgcaacccagagtgctgcctctgaaactgctttctctgctcctaccgttgttcagggatcattggtttccgggaatatcagatctcttctcctcaccggtgactttttccttggggcagttgttgcatgcactttgactaaacttgttctgaggttgcaggaggtacagccatcaaaagttgaagttaacaaagcaaccacacaggcattgctgatctttgtctctatgctgcaattaggacaatcacctgttcttccacacccaattgataatgattctaatgataggatt

SEQ ID NO: 3316 - DNA, 646 bp, Gossypium hirsutum
  unsure (1)..(646): unsure at all n locations; Clone ID: LIB3825-032-Q6-K6-H1
ctcccaaaagnaggtgggtatttggtctcgatttatcactacataatgacatcgatgtgtaccagttcaagttcttttctgaattagtaaagaacaaaggttggagaaaatgacactgtgattgttatgacgcatgaaccgcagtggcttcttgattggtattggaatgaaaattccggacagaatgtctctcaccttatatgtgattacttaaagggaaggtgcaaacttcgaattgctggagacatgcatcattatatgcgccattcatgtgttccatcagaagggccggttcatgttcaccatcttcttgtaaatgggtgtggaggggcctttttacaccccactcatgtgttcagtagttttaataaattttatgggaagacatacgagtgtaaagctgcatatccttcttttcatgattcaaacaggattgcattaggaaatatcttgaagttccggaagaagaactggcagtttgatttctttggaggcgtcatatattttatattggttttctctatgtttccacagtgtaagcttgatcacatattgcgaggtgattcattttctggtcatctagggagcttctttggcacagtatgggataattttgtatatgtgctggaacattcttttgtatcac

SEQ ID NO: 3317 - DNA, 669 bp, Gossypium hirsutum
  Clone ID: LIB3825-032-Q6-K6-H3
tcttctctcttccattaatcttcgttggaaggagaaatcatctttgctttcacccatgaccactgtttatgacccttcacaccatctcacctccaaaaaatgtgtttcaaggaccttgaaatccctccaaggaaaaagcaactccattgttgccacaaagccgccgccatggaacttccccaccgcgaggctaggctccacaaataccttccttccaatgaagacgatgacggcaccgatgatccatacggcaccgaccatttccgtatgtacgagttcaaagtaagaagatgtacaaggagccgtagtcatgactggactgactgtcccttcgctcatcccggagaaaaagcccgccgtcgtgaccctattcggtaccaatactcctccaccatctgttctgaccaccgccgtggcggtggttgccctcgcggcgatgactgtgagttcgctcatggagtgtttgagtgttggctacaccctacacgttacagaaccgaagcttgtaaagatggtaagaattgcaagcgtaaggtttgtttctttgctcactcgtcacgtgagcttcgtctcttgcccggatcaccaccgccattgaagtataaaaaccttgacaacaactataaccattgctgcttgttttgtcggtcggttacatcgtcgtcgtcg

SEQ ID NO: 3318 - DNA, 620 bp, Gossypium hirsutum
  Clone ID: LIB3825-033-Q6-K6-A2
tatccccctcttcatttgcattttttttttctctttattgtaagctctgaatttctctttcacccacatgaggctgaacgacgagaacgacgaagaagaaggaccgaaaacgatgtcgcactgctccatcggacacttacaacaagagaaaagctttgttattgttggatacgctcttacttgtaagaaagttgagagctttttaaagccaaaactcgaaggtttagccagttgaccggaaaagaatggcgccaaattctagaggaatatagacgaacacatcccgaagtcacggttctcgatcctccggatgctatacaacatttacacaatcgtcaatcgatgttacaatgtgttgcagatatgaatttatctgacacttacggtaatttgtgctaaactttttgtcgacattcacatgctgatgtaaattaatattgatgttttaccatgcaggaaaagttggtgttcctcgacagttagtcattaaaagagattcgtcatccattcccgatgctgtaaccaaagctgggttgatactaccccttgttgcgaaaccattggttgccgatggaagtgcaaagtcacatgaactatcacttgcttacgatgaatactct

SEQ ID NO: 3319 - DNA, 637 bp, Gossypium hirsutum
  unsure (1)..(637): unsure at all n locations; Clone ID: LIB3825-033-Q6-K6-A3
ttcaaaatggcattgtgtcaagggctcagnaaaaccaaagcttacttgtaagcggtttcagngttccatacccaaaagaaggagagnagggaaagactgactaccgggncttaggattcgcctaatcaatcaagacaagaataagtacaacactccgaagtaccgattcgttgtccgattgagcaacaaagatgtcaccgcacaaatagtttctgctaatattgctggtgatatggttcttgcttctgcttactcacatgagcttccacgatatgggcttgaagtgggtcttacaaactatgccgcagcttattgcactggtttgctgttggggcgccgtgtgcttaagatgcttgaaatggatgaagagtatcagggcaatgtagaggctactggagaggacttctcagttgagccaactgacacaaggaggcctttccgtgctctccttgatgtagggctgatcaggacaaccactggcaatcgtgtttttggtgctctaaagggagccttggatgctggtttggatattcctcatagcgacaagaggtttgctgggttctccaaggacaacaagcagctcgatgctgaggttcacagcaagtacatatatggtggccatgttgctgcatatatg

SEQ ID NO: 3320 - DNA, 467 bp, Gossypium hirsutum
  Clone ID: LIB3825-033-Q6-K6-B1
cttcggtgtatgctggcaatatctaaaatatttaactggtctccggatgatatggtggaagcttgtgattccaggaatcttgagcttttacagaaggagtttcctctatgaatagaatatgatttcgaatttttaagtaggatgggtatcatgactaactgaaacaggggcaaagggttactgtcaaaaatcaattcaaaaagctgtagatgctgatgtacccctgacagtttgcagctagggccatgctggtagatggtatctggggggaacgaataatgttttgtatattttatttatgtctcaacgccatgaagcatgtaattttgttaaacggggtatgggatggttgatagcgaaagataatgtttgttaggtgagaggaaagcagaaaaagaaattatggactagtgattagctgcaataagctactttttctctcacttaaatgtaattgctgattgttg

SEQ ID NO: 3321 - DNA, 673 bp, Gossypium hirsutum
  unsure (1)..(673): unsure at all n locations; Clone ID: LIB3825-033-Q6-K6-B2
cgnaaaattcctgnnaagttaatagcttgggaaaaaaggnattagcactaacacaaagtgggagatatagnnctcctgcacaaaaaccccggnatcgagttatgtctnntgaaaatcatactggggtaaatggttggtgatgcnnttctgaaagttcatttccgcaactaaaagcaatantctacnntatgaccgacctgatgagtgtcgtgtcgattttgcccttgacggttgtacttcgatccttgccctcatnnacctcatataaacactgnccggtggtgctttgcatggctgccctactgtgtctcagtgagattaagatattccttcggtgaaaaccccaatgtgtcatttcttggaatggaaggaagccatggaggacgcgcatgctggctgcgccttgacgagtgggagaagtgcaaacagagggtggctcgaacggtggaggttagtggttcttcaccggcagatgcaactcaaggaaggttaagaatagtggccgacaatgtacaaagagctctcatttgtgccttcaaggattgagcaatggtgtttcaaagttggataaaaacccaaccaactctttttttataatttcaagttttaagtctaaattgtctctgctgatttgattagggatatcactgtaaatttgattagtgttaatatt

SEQ ID NO: 3322 - DNA, 625 bp, Gossypium hirsutum
  unsure (1)..(625): unsure at all n locations; Clone ID: LIB3825-033-Q6-K6-B3
ctctttgaactggccaccgccgnataagttgcagattcactggagaatttgtctatggattcacaagccaagaccacaaagttcctgagcctgttaagaaggatttttacagtgataatggctcttacatgtaccagcaagcttatggttatatgccatatggggcatattccatgcccgggtcacctcttccacttatgggacatgatggccagctgcatgcactgcaagaatactattatccaagtacttattaccaaccgcctcagcaaactagtaaaacagatgcttctcaagtggaggtttcaactgtcaatgcagatgatcaagcttctttatcaactgaaacaaatacaggaaatttgagcactgtagaaagtggtgcgggtttgagtggtaataatggttctgggtcacaaaaatcaactttcaaggtctcctctctaaatccgaatgcttcctataaaagagaaagctttccaacaggtaatctatccgaaggtcatcagaattcaagatttagctacgaaggggtccagccaacaattccttgcttagatatgtcagtgtcttctaatgggcaatccaagcataccgctaataatggattctcttcatatgcaaa

SEQ ID NO: 3323 - DNA, 639 bp, Gossypium hirsutum
  unsure (1)..(639): unsure at all n locations; Clone ID: LIB3825-033-Q6-K6-C1
gggttttcctccgccgttagtaaaagcttgngaagaagactaacgtggtgcaaaaatgggccccaacgaggtggaaggtggccgtcccagccaagaagaaacaagagaaggttgtcaatccattgtttgagaagcgtccaaagcagtttggtattggaggggctctacctccaaagaaggatttgcatcggtttgtgaagtggccaaaggttgtccgcattcaaaggaaaaagagaatccttaagcagaggttgaaggtcccacctgcattgaaccagtttaccaagactcttgataagaaccttgcaacaagtttgtttaagttgcttctcaagtacaggccagaggacaaggcagccaagaaggaacgtctcctgaaaaaggcccaagctgaggctgaaggaaaagcccccgagtctaagaaaccaattgttgtgaaatatggacttaaccatgttacctaccttattgagcagaacaaggctcaattggtggttattgctcatgatgtggatccgatagagttggtggtgtggctccctgctttgtgcagaaaaatgaagtgccttattgcatcgtcaaggggaaatcacgttttgggatcgattgtccacaagaaaactgcttcagtcctgtgct

SEQ ID NO: 3324 - DNA, 639 bp, Gossypium hirsutum
  unsure (1)..(639): unsure at all n locations; Clone ID: LIB3825-033-Q6-K6-C2
ngattattggggcttgtcgtaagccaaggtttggtgtattgtcacggagtatgctaagggaggctcagttcgacagtttctaacaaggaggcagaaccgtgctgtgccattgaagttggccgtcaagcaggcattggatgttgctagagggatggcctatgtgcatggacttgggtttattcaccgggatttgaagtcagataaccttctgattgctgctgataaatcaataaagattgcagattttggtgtcgcacgtattgaggtgcagactgaaggcatgacaccagagacagggacgtatcgttggatggcgccagagatgatacaacataggccctacacacaaaaagtagacgtgtatagttttggaattgtcctttgggagctcataactggcatgcttcctttccagaacatgactgcagtgcaggcggcatttgctgtggtgaacaagggtgtaagaccggtcattccaaatgattgtctccctgtgctaagtgagatcatgatccgttgcttggacactaacccagaagttcgtcctcccttcactgagattgtaaagatgcttgagaatgcggaaactgagatactgacaactgttcgggaaggctcggnttangtgttgcatgactc

SEQ ID NO: 3325 - DNA, 648 bp, Gossypium hirsutum
  unsure (1)..(648): unsure at all n locations; Clone ID: LIB3825-033-Q6-K6-C3
ctttacactcgctgtactatttgtggtangaaaaatagcagnaaaaacacaaaaacacccacaggtttatatacttctttgtctcttcatacttcatctcatagcttacagatgtattaaaccactcaaacctttgtttgttgcttcgaaagatattccaagtgttgaagagctatataattagtactgcagcaatccgtaccgggtatcaaaaggaacaagcacaaaacttgctgctttaccgagaatgacactgccgaatcttgggttagaatctgaaaacgattccaatgcaagtagccaagtcgcttccaacatatctgcacaagaggcatccactgatccctcgaaggataccacaaccactacttcatgcctctcgaatcctgtaaaggttcaaccagatccagggtctgtttcccttgacctgactctgcacttcagtgccaatgatgctgagatgaagggtgccactggtgagactatggggatcaacactttgtcaacaccgagggttttctcttgtaattactgcaggcgcaagttctatagttcacaagcactgggtggacaccagaatgctcacaagagggagagaacaatggcaaagcgtgcgatgcggatggggttattatctgataggtatac

SEQ ID NO: 3326 - DNA, 53 bp, Gossypium hirsutum
  Clone ID: LIB3825-033-Q6-K6-D1
gcccatcatgtacatttttctagaattcactaagaattcactaagttcctagc

SEQ ID NO: 3327 - DNA, 662 bp, Gossypium hirsutum
  unsure (1)..(662): unsure at all n locations; Clone ID: LIB3825-033-Q6-K6-D2
tngacttgttttagcagtatagtagttgtttatttttatatatacaaaaaccaaaagttctatccatggctgcatctttctcagtgccttcaatgataatggaggaagaagggaggtacgaagctgaagtaacagaggtgcaagcatggtggaactcagagaggttcaagctaacccgacgaccgtattcagctcgagatgtcgtggctttacggggcaacctcaaacagagctatggctcaaatgagatggcaaagaagctatggagaaccctcaaggcacatcaagcaaatggcactgcttcaaggacttttggtgcacttgatccagtccaagtaaccatgatggccaagcatttagattcaatttatgtctctggttggcaatgttcctcaactcacaccaccaccaacgagccaggtccggaccttgccgactatccttacgacaccgtccccaacaaagttgaacaccttttctttgcacaacaataccatgaccgaaaacaaagagaggcaagaatgagcatgagccgcgaggagagggctcgatctccttatgttgattatctgaagccaattatagcagatggtgatactggctttggtggcaccactgcaactgttaagctttgcaagcttttcgttgaacgtggtgctgca

SEQ ID NO: 3328 - DNA, 640 bp, Gossypium hirsutum
  Clone ID: LIB3825-033-Q6-K6-D3
gtatcttgaacagaattcatgaaccagcttgtaacaggttacctaccaagtgtaattctgatgttatttatgtatgctgttccaccaaccatgatgctgttttccacaattgagggaaatgtttcacatagtgaaaggaaaaaagtgctggcattaaagttttgtacttcacaatctggaatgttttcttcgttaatgttctttctggatccataattagacaattgagtgttttctcaagttttagagacatacctacacaacttgccaaagcagtgccaacccaggctaccttctttacaacttatgttttaacatcgggctgggcaagcttgtcatgtgaagtaatacaacttttccctcttctttgcaatgggttcagaagattcatactaagaaggcaggaagagccctgtagtaatcatgctctaaccttccctcaccatactgaaattcctcgacttcttctgtttgggctgcttggcttcacttgttctatcatggcaccattaatattgcccttcttgctggtttacttctttcttgctttccttgtctatcggaaccagattctcaatgtatatgtaccaaaatatgaaagcgggggacagttttggcctgttgttcacaacacaacaat

SEQ ID NO: 3329 - DNA, 553 bp, Gossypium hirsutum
  unsure (1)..(553): unsure at all n locations; Clone ID: LIB3825-033-Q6-K6-E1
gtccaccgtagctgatcgtcngacggatcatcgaaggaccagnaanagaaatgaacgatgttaaccggagaacgagaccgttgccttggcggcgatcttttgggcgacccgggactatgtcgcctcatgttatcgccgaaggaagcttatggcgtgccagtgtgtataaccgacgggtggggctgtgcctatatatcatggtaatggttttcagcagaatgttcctaggattaggaatgattttgagaaagagaaactactgcgaagaatagaaccatggattcaaagggagcttaaggctatcctcggagatccagatccatcaatcattcttcatgttgtgtcctcgcttctcttctctagacatgaagatggctcttccgcctcttcgacacagctcagttttgtcaacgacaactttcttgctcctttggaaccttttttgcaccaccgaaccaacatgttttggcatgaactcagatgctttgtggatagtccatttaccatggaaacttatgattcagtagttgagtatagacaggtgaagtagcgt

SEQ ID NO: 3330 - DNA, 551 bp, Gossypium hirsutum
  unsure (1)..(551): unsure at all n locations; Clone ID: LIB3825-033-Q6-K6-E2
cggncgcgtgggcggccgcgtgggcggacgcgtgggggcgggattacccgctgagtttaagcatatcaataagcagaaaatgaaaagagaaaccagttcaaaaggaacaatgcaaatggaagctgatgaagatgagaagatagatcaagtaagtgattctgattatgattctgatgatgatggggatttcagcattttaagtgattccagttttgagttcccaaatcaacctcttgttaatgggactgaatcttctagcatatcagatgagggtatgtttgagaattaacgtgaatagttatgttaattggactcgggtgtgaaagttgggacacgattatgtttgagaactaagtttcttcatgtatttgaaggatcgttaggtaatcatgtttcggtactgatatccgaatgtataccggatacggatatcaaacacgcttatttctcagtcatagtaacatagaggatcatgctgtaattgatgtatagtttacagtttgagagctggtgagcttaaaattttgatccaatttagaacagttttaccc

SEQ ID NO: 3331 - DNA, 634 bp, Gossypium hirsutum
  unsure (1)..(634): unsure at all n locations; Clone ID: LIB3825-033-Q6-K6-E3
cggccgcgtgggcggncgcgtggggccgccgcctgcgtctctctcttcatctctctgaaccaaaagtctttagcttttcgcttcgagagagaccatgttggtttaccaggatctcatctccggtgacgagcttctttctgactcattcccctacaaggaaatcgagaatgggatgctgtgggaagttgagggaaagtgggttgtgcaaggagctgtcgatgttgacattggtgccaatccttcagccgaaggtgctgatgaggatgaaggtgttgatgaccaagctgtgaaggttgttgacattgttgacactttcaggcttcaggagcaaccccctttcgacaagaagcagtttgtcgtgttcatcaagaagttcatcaagaacttgacaccaaaactggatgcggaaaagcaagagtccttcaagaaaaacattgagggagcaaccaagtttttgctttcaaaattgaaggaccttcaatttttcgtaggagagagcatgcatgatgatggatgcttggtgtttgcttactacaaggatggtgctgttgacccaacatttttgtactttgcatatgcattgaaggaggtcaagtgctgaggtttgaagcaaagaaaaaaaagtggttgctga

SEQ ID NO: 3332 - DNA, 607 bp, Gossypium hirsutum
  unsure (1)..(607): unsure at all n locations; Clone ID: LIB3825-033-Q6-K6-F1
gttcaatgaagccaaggnctgatggatcaagaacttatttccagggccagaggccagatcccnaacctatctttagaaaaacaaaatgctgatctcagatctcgaccccatgatgaaaatatggaagttggctatgagcacaatcttttgccaccaactttggaaggtcttgagaggagggggggtgatgacataatgaagcttgctaaagaacagaacgatgctgaagatgccaaaaatagtagacatagagagaaaataaatgcaatcaatgggcagtatcaggaacagctaacagcacttcgagcacggcatgccaatcgcagagatgagttcctacgtaaggaatctcttgtacgccaacaacaataccagcaggcaatgatggactattatcctcatagcaacatggctccagctgatagcttgccaaccggtaataatcctcatggttacggtagcggtgcgggttccggtgttgttggagatggacatcgaaggtataattttgataactttgacttctacagagagaggtctcgatatctttggggctgctagagatcaagggtttgaacctaaaggttcatacccggggggggcggtg

SEQ ID NO: 3333 - DNA, 437 bp, Gossypium hirsutum
  Clone ID: LIB3825-033-Q6-K6-F2
aatactaaaagaatacacaaagacttacatacaacaaaacatacaaaaaaaaaaaaatatggggtggcgcgctcttaaagttcccaacccttgctccccgttgcttcgccatgttttacttttttttttcctggccccctcccatttattttctgggggggggggggtttccacctttcgcgcactgggaaaaaccctgcgctttacgccaactcattatcgcttgttcccaacacccccttttcccttgttggggatttggacaaggggtcgcgcccgttccttctttcccatcagttgtggtgcctacttgcaaattggcccgccccttgccagggccctttcaccccggcctttgggttttttcccttcctttttacccttacttttcccttttccctggcacccgctcatttggtttctttctttacctttcc

SEQ ID NO: 3334 - DNA, 668 bp, Gossypium hirsutum
  Clone ID: LIB3825-033-Q6-K6-F3
ggcgaacaagcagtttgtcttttgatgagaagcttcttatacaggctctttacaaggtgttgatatatgtatcaaaagccagtcctattgtgctttatcttagggatgtcgacaagctcttgtctagatcacaaaggatttataatttgttccaaaagatgttaaagaaactttccgggaacgtgttgatcctcgggtcacgcgttgttgacctgaataatgatgacagggaatttgacgacaggttatcagccattttcccttacaacattgagatcaggcccccagcagatgaaaaacatcttgtaagctggaaatctcagctagaaaaggacatgaagatgatccaagctcaggataatagaaatcacatcatggaggtgctctcagcaaacgatcttgactgcgatgatctagattcgatctgcattgcagatacaatggcccttagtagatacatagaggaggttgtcgtatccgccatttcttatcatttgatgaataataaggaccctgaatacagaaatgggaaactcgtgatatcatcaaagagtttgtcgcatggattgagtatattccaggaagggaagtccattggtaaagacacattaaaacgggaaccacaatccgaaacattgaaggaaacaggagctggttcagtaggtgtg

SEQ ID NO: 3335 - DNA, 594 bp, Gossypium hirsutum
  unsure (1)..(594): unsure at all n locations; Clone ID: LIB3825-033-Q6-K6-G1
taaaanaacaacagacacagcagcgatcacaacagctaggctcaaagactggagtcgagcctgttgcatctcaagcttttgcaatgtcattttcatctgctaatggtactactgctcctggccttggtatttcttccctagcaccgaatcatgcaattcttcagagccttccagggagtgcagtcggggctatcancatattatggctgctcaacagaagaaggataattatcatgcttatgaagaagggaagcgtggaactcatgatgcatccagtgtgcaagaagaaaagaaggcaggaaaaagttcaggcaccactgggcagtccattgccttctccaggccagatatgcctgattcaagtgattccactcttgcaggcaaaaatgtcatcgatagttctatctgtacgcttggctctgctcctgctcgaacttcagggcctgttatgccagcttcaatcggtagtgttaatgttgctaatgctcagcagcaacttcagcggaatcaacagcagcagcttccaatttggggactgccttctgctcctcgggagtaagacacccaccacaagtaaatggaagtgcttaccct

SEQ ID NO: 3336 - DNA, 647 bp, Gossypium hirsutum
  unsure (1)..(647): unsure at all n locations; Clone ID: LIB3825-033-Q6-K6-G2
tcgcgccaactagctgctaaatttgacttgcctaacaaagnaaaggttcagtgattttgttgcaaggcatattggggagatggaaggaatcatattagaagccgagacaggagatttccttgggaaacatagagggttttggttctacacaattggtcaacgccaaggcctacgtctccctggggggggggggtatgttgttcagaaggatgtaaaaaataatgttgtatttgtgtcaagaaattatttctcgttggacaaaagaaggcgtgtgtttcgtgttggctctttgaagtggtttagtgggtcacctcctaaccatattgatcagctccaatgcaaggtcagacatggtcctggcttttataactgcaattttaaaatggagcatggtgaagatggcaatgacgatattgcggttgcccagttatctgaggatgatcaaggtcttgccgctgggcagtttgcagccttctatgagagacaaacctgcttaggttctggtgtgatattggagtcctgggatgatcggggatttcccgtttgtgccaaggctcttgagattgcaagaatggaagataaatcagaacttgggaaaccagttaaggtcatgacaaaaccaggaactcttgcataaatatctgttg

SEQ ID NO: 3337 - DNA, 625 bp, Gossypium hirsutum
  unsure (1)..(625): unsure at all n locations; Clone ID: LIB3825-033-Q6-K6-H1
gttttctttccactacaatcatgtctatttcttcatcgaaccactgatcaccctcccttgtggacacaaacaaaaaacccccaccccngaaaaatgtcaacatcagcagcagctttcaggctgatctgtctcctccactcggtgatcgccttatcaagcggcgcactcatgatgttctacatgagagagaaatgtacacattcacccacgggatcgagacggccaccaagctcttgggatccactccacacgatcagctcttgatccggacctccgattccttcgcgggtctgctattgttcgccgtggggttcttgcttttcatggtctcatttgttaaagacagagagttccaatcattctttgccaaagggtgcacggttttgcatggttcggtggcggtgtggagattctggttcgagagaagagtagaggatttggcttgggattggctccgacagacggttggtgacatattgttggctttttcttgggtattctttttggtttactcttggagagaaaagttgattagatttgaatttgtttttgtttgctgcttggtatggtgtacattttggtgaagttgatttgaaattcagtgtaagatgattgggtatgaatc

SEQ ID NO: 3338 - DNA, 637 bp, Gossypium hirsutum
  unsure (1)..(637): unsure at all n locations; Clone ID: LIB3825-033-Q6-K6-H3
tanaanactacattgcagcagcagtagcagcaaccaaanaagagcgatctcaggtggtgctcctcaattctatcgagtctttttgcagcaaggctagccctgaggcggcgaaggaggtggcattggttcttaaagtgctgtatgacgatgatattttggaagaagagtttatcatggaggggtgggggaggggtatagctggtagcaataagggttctcagatatggaagaacctcaagcccttcatcgagtggctccagactgccgagtctgaatcggaagacgagtgaatccctaagctctccgtatggtgtctttaccatgttaagcctctacttctagtgcaataaatattagcgtcgtcttctattatatgttggtgtttggctttcctgtgtcgtgtttcctagaataaaagacagtgagctacatcccgtacgtgctctctgctgttctgtggtttattatggtgtgaactggtcattgtttattcccctaatgtgttaactgagtttactgttttatttctcaatagttttctttttcttttttatgttatcttaaaccgtcattaagcctggtttaaattttcatgtttttaattaaatatttctataaaaaaacatgttttgtttgc

SEQ ID NO: 3339 - DNA, 658 bp, Gossypium hirsutum
  unsure (1)..(658): unsure at all n locations; Clone ID: LIB3825-034-Q6-K6-A1
ccggttcgacccagcgttctgaagnaatcaaactccctcgacccatttcattttggtacttgaatcactgtgaatgatggctagacctagacggtgacctttggcagtggtcgaaattttcactggagtcaaaatctggaaagcttttatcttcccggcagagaaagcaaagagaatttgggaagctcatttggattccatcagcattggctgcttactcactctaattttgccccaagtctccaaatttgatgtgctgactggttgaatcggctaacccaaccggaagccgatatgtcctcaactctgctagaggtgactcgggctgctcacgaagatgtggaacggcttgagcggctcatagtgaaggacttgcaaaatgatccacctaccacaaaagacggattgtatcaaagccaccgtgtccgcaataatatcgacaccatcatctccaccacggagaagctagttgaaatatatgacgataaagacaatgctaggaaagacgaaatcgctgctcttggaggtcaaacggctactggagttaatgtctttagtgctttttatgatagattgaaggagattcgtgagtaccacagaaagcacccggctgctcctgttgtccatgcttatgaagagtatgaggatttacttaagg

SEQ ID NO: 3340 - DNA, 341 bp, Gossypium hirsutum
  unsure (1)..(341): unsure at all n locations; Clone ID: LIB3825-034-Q6-K6-A2
cgnatttgttcaaggctgctgttgtccacaatgcctgatgaaattttataaaacagcattctcaggttcaaatcggttgctgcaatgcaattgtgaacctgaatcccacgggngaaattgggttgacgatgaagagcccctggcaagcaaacttgcaaatctacggttcattactgtgtagggaaaatgttgaaataaggttggtaggaatgaatgtaattttatgttgcatatgtggactcttttagttgttgttagacctgatcatggtttccacttcatcttttattctcaggtcatatgatatgataatatttaaaaaaaaaatgttgttttcaaca

SEQ ID NO: 3341 - DNA, 342 bp, Gossypium hirsutum
  Clone ID: LIB3825-034-Q6-K6-A3
tggcgggggggggtataaccaaaaaggccccacccgtccgcctttccaaccagtggcccaccctgatgggcaatgggacccccccttgtaccgggccttaaaccccgggggtggggggggttccccccaggggacccgttccattggcaaggcccttacgccccgttcttttggtttttttcctttcttttttggcaccgttggcgggttttcccggcaaggttttaaatggggggttcctttaagggttccaattaagggtttaccggaccttcacccccaaaaacttggttaagggggagggttaccgtatgggcccttcgccttgaagaacggtttttc

SEQ ID NO: 3342 - DNA, 621 bp, Gossypium hirsutum
  unsure (1)..(621): unsure at all n locations; Clone ID: LIB3825-034-Q6-K6-B2
cgtggngctgcgttntcttacgagaggccaaaacccatcgccgaacaccgnaaaacgtggcgtgacggcccnngacgccattcacctgtctaaaacccatnncccgacgccgttgctttgctttnttcccattggccttatctctgtctgttgcttttctctctctttgttaatctgtccaatggggggggggggggtggtgcctgaactgaagccttttaggaaatttgaaagttgtttgtaatttggttatccctagacccaagcttcaattttacaaatagactaggaaactaaataatgttgagttaagattgattgtgtttcgtccatttattggcgagattattgttgccaaacttaaagaatatgacgctagcggcttgcgctagccacaagactcggctgcttaaaaaagccagagtgaaagccatgcctttcgttaaagctcaaaagaccaaggcttatttcaagagatatcaagttaagttcaagagaaggcgagagggcaagatggattatcaggccaagagtcgtcttattaatcaggacaagaacaaatacaacaccccaaaatattgtttggttgcacgatttgtatcctatttctgactgattttt

SEQ ID NO: 3343 - DNA, 648 bp, Gossypium hirsutum
  Clone ID: LIB3825-034-Q6-K6-B3
cccggtcgcccaccgtcggaaatcgttctaggagataatgcttcaaaggtcacttgaaccttaaagatgaagaggatgagagaaacgggggagaaggtgctgcttttgaggatagagattatgtggaagaagacgagtgtatatccgatgatgagcctggatctaaaaggaagaagctgggaaggggatcagttgatttgtttgtcgaaggaagaaccgaatcaactcccactacacgaaatcgagctcttcagtctgggaaagatctcttatctggtccgggtgcggctcttgttgagttccctgacggtttacctcctgcgccatctaaaagtaaggaattaccccacttgttctttccctttcttgagcatctttgagctttccatgctaactgctttaaattaattgttttaataatgatcggtggtcatagaacaaaaggataaactttccgaagtggagctacagttgaagaaggccgaggctgcacagaggcgtagaatgcagtccgagaaagcagccagggatgccgaggttttaccctcttttttcttttcttcttttgattgggtttacaattgctcaacaatcattcaagaaacagtattcagtagggtctttgaattgttgtaggttgaggcaatc

SEQ ID NO: 3344 - DNA, 535 bp, Gossypium hirsutum
  unsure (1)..(535): unsure at all n locations; Clone ID: LIB3825-034-Q6-K6-C1
cgtgggttcgngaccatnaagcatcctgctgagctcgcacatgctgctaacagcgggcttgatatcgccgtcagacttctcgagccgatcaaggagcagttccctaacctcacctacgctgacttctatcagctcgctggtgtcgtcgccgttgagattactggtggacctgggggggggggcatcccggaagagaggacaagcctcacccaccacctgagggccgtcttcctgatgctaccaagggttctgatcacttgaggcaggtgtttagtgctcaaatgggtctcagtgaccaggacattgttgctctttctggtggccacactctgggaaggtgccacaaggagaggtccgggtttgagggaccatggactaccaaccctctcatctttgacaactcttacttcaaggagcttttgtcgggagagaaggaagggcttcttcatcttccanctgacaaagttcttctgtcagatcctgtttttcgtccattggttgaaaaatttgctgtcgatgagggggccttctttgg

SEQ ID NO: 3345 - DNA, 576 bp, Gossypium hirsutum
  unsure (1)..(576): unsure at all n locations; Clone ID: LIB3825-034-Q6-K6-C2
ggnaataatagttggagtttcacatacaccatgcaaaggaggctgcaagagttgcaaggatatcatttttacttgattcaaagactgggaaagttgtgaagaaagcaccccgctgcattcttgctaagcagagtgcagttgttgaggtgattttgcaggaagcggtttgcgtggaagagttttggaaatgcaaagtccttggaagggtgtttcttaggacattaggaagaacggttgctgtgggcatcgtgacccgaatagtggaggagcagcaatagttgccaaagtgtggtcaaagactcatacacacttaaaacacatacttgggcagcttttaaagcaccaactttgttagagaggaattcctgtagtattcaagatcaatgtgaacaatggagagatttccttttaagcggctaatctaatacctacctattccatgtctgaccaaataatttcatgtgtgatttgattctttacatataagttaggacaaggacttggaagaaacgtgtgaaaaatgtgctgcacgtcttggcttatatctccttgcaagaaatggaaccaattaatttt

SEQ ID NO: 3346 - DNA, 619 bp, Gossypium hirsutum
  unsure (1)..(619): unsure at all n locations; Clone ID: LIB3825-034-Q6-K6-C3
ggngagcttgcagnaagaagaactggttcaaatggttcaagacttcatagaatcagaaccatcttcacccatagttccttcaaaccaccttcaatcttctaaccatcttgctcaactttctactttacaggagattcttaggtgtagaacagatactgagagaaaggttattgagattgtggggaagcatattagaagcaaaagggatgtccaaaagtctagtggtttgaagaagtggcttgccatgaggctcaaaatgaatggatttaatgcttctttacgtcaaacatgttgggttacgtcctcaggatgtcctgctggtgattatgaatatgttgacatagtgatggagaatgaaaacggtgagacggtgaggttgatagtagacatagatttcaagtcccaatttgaacttgcaaggccttcaccaacctacaaggagttgacagatgctctgccatccatctttataggaagtgaagaaaagctgagggagattatatccgtggtttgctcggctgccaaacagtcgtttagagaggcagggttgcatgtaccaccatggaggaccactacctacatgcactccaagtggctctctgccactcctaatgttaac

SEQ ID NO: 3347 - DNA, 473 bp, Gossypium hirsutum
  Clone ID: LIB3825-034-Q6-K6-D1
cccagcgtccgctccccaaactacctccgcacctgatgctgtcgttccatttgacatttgagaatatttatgatctgagtgaagcttagggtaggtttgccattctattttgtacgtatatgagtatttatatcagtgtgtttttattcttaagttaaaaaatggaggattttatagaaaaaaaaaaaaaaaaaaaaaaaaaaaaaaaaaaaaaaaaaaaaaaaaaaaaaaaaaaaaaaaaaaaaaaaaaaaaaaaaaaaaaaaaaaaaaacgcagggtgcctaaaaaaaaaaaaaactattttatagcggcccaaaaaaagaaaataacgtgtcctttaatttgaccccactttatacagagaaaaaccccgggcataccccaatttatccgccggttaaaaacacttcccatttccatcatgtgtttaaaagaagaaaagcccccataagggcgctttctaaaagacgtgc

SEQ ID NO: 3348 - DNA, 262 bp, Gossypium hirsutum
  unsure (1)..(262): unsure at all n locations; Clone ID: LIB3825-034-Q6-K6-D3
tttctagttcgggatgattttagctttctgaatataccttttaaagagagtgaccattcggttaaagcatagttcttatgttgtgaatctatattcctattaagctggtacatcctgcaggtctaatctgaagccttcacattactacttcttggggggggggggggtaccnaatgttctttcccgatccatccttcccaccattgggtgatctctcaagttttaaagacatacccactgaacttgccaaataagcgccaac

SEQ ID NO: 3349 - DNA, 610 bp, Gossypium hirsutum
  unsure (1)..(610): unsure at all n locations; Clone ID: LIB3825-034-Q6-K6-E3
ccgcttcattttcccttaaaagnaaaaaaacacagcaacagcagctgcggaaaaagaggtttcggggtcagggatctgcgccaaagggtggtggtagatgcaaggcatcacatgttgggaaggttagcgtcgatattggctaaggaattgttgaatgggcaaaaagttgtggttgtaagatgcgaagaaatttgcatgtcgggtggattggtgaggcagaaaatgaagtacatgaggttcttgaggaagcgtatgaacactaaaccttctcatggtcctatccattttcgtgctcctgctaagatcctatggcgtaccattcgtggaatgattcctcataagactaagcgcggagcagcagcacttgctcgtttgaaggcttatgaagggattccagctccgtatgataagataaagaggatggttattcccgatgctctcaaggttttgaggcttcagaaaggacacaagtattgtttgttaggcaagctctcgtcagaggtcggatggaaccactatgacactatcaaggagcttgaaaggaagaggaaggaaagagctcaagtggcatacgagagaaggaagcaactcactaagctcagggttaaag

SEQ ID NO: 3350 - DNA, 643 bp, Gossypium hirsutum
  unsure (1)..(643): unsure at all n locations; Clone ID: LIB3825-034-Q6-K6-F2
cggncgcgtggggtgacggccaaagctttcccttcctctttctctgaaattgtttcaaaaaatttccccttttcgattcaatcatgagtaacgaatatgattatctgttcaagcttctgcttatcggcgattcctccgtcggaaaatcctgcttgcttctcagatttgctgatgattgttacggggatagctacatcagtaccatcggtgttgatttcaaaatcagaacggtggagttggatggcaagacaatcaagctgcaaatttgggatactgctggacaggagcgttttcggactattactagcagctactaccgaggagctcatgggataatagtcgtctatgatgttaccgagatggagagcttcaacaatgtcaagcagtggttgaacgagattgacagatatgctaatgacagtgtatgtaagcttctggttgggaacaaatgtgatttagttgagaacaaggttgtcgacacgcagacagcgaaggcatttgcagatgaaattgggattcctttcctggagacaagtgctaaagattcaatcaatgtagagcaggctttcttaaccatggctgccgagattaagaaaaaaagggtaaccagccaactgggaacaagtctgccggaactgttcaa

SEQ ID NO: 3351 - DNA, 634 bp, Gossypium hirsutum
  unsure (1)..(634): unsure at all n locations; Clone ID: LIB3825-034-Q6-K6-G1
ngananattccactaacacgctttggttttgaatatctgcttctggaccgaaagctcttcgcttttatcttttgatctttttcttttctttgtttggcgagagagaaagtggaatgctaagactgagaaaatcggaagaaaatcaacgatggtggtgangaaaagtagggaagtatgagattggaagaactataggagaaggaaccttcgctaaggttaagttcgcccaaaataccgagaccggcgaaagcgttgccatgaaagtcctcgatcgtagcaccattattaaacacaagatggttgatcagatcaaaagggagatatctataatgaagcttgttagacatccttacgttgttcgtttgcacgaggtcatagcaagccgaactaagatttatataatcttggagttcattaccggtggtgaattatttgataaaatagttcacaaaggtcgtcttagtgaatcggaagctagaagattcttccaacagctaattgatggtgtggaatattgccatagtaagggagtctaccacagagatttgaagcctgaaaatcttttacttgactccctgngaaaattaaagatttcagattttggccttagcgcgttgcccgaacaaggagttag

SEQ ID NO: 3352 - DNA, 639 bp, Gossypium hirsutum
  Clone ID: LIB3825-034-Q6-K6-G2
cagcctctggtgacacagctttggtggtttgcgcaaagtacaaacatgaagaatgtgtgagggtgttgactggggctggtgctgactttggcttagttaacatctctggtcagtctgctagctcgattgctggttcaaaccagtggtcccgcggttttcagcaagcagtgctgggcgggagcggggggggaaggattccgaagtcgagcaatgtatcggttttctctcccttgatgattgttgccgaaactggtgatgttgaggctctaaaagctgtgattggaagtggacaatttaatcttgatcatcagaatgagaatggtttctcagcagtcatggttgctgccttaaaaggtcatgttgaagctttccggctgctagtttatgcgggagctgatgttaagctgttaaataaatctggtgagacagcaattacgttgtctgaactgaaccagaaccgtgacctgtttgagaaagtgatgctcgaattggcactcgaaaaagcaaccgcaattctggaggattttatgctttgcattgcgcagcacgctatggagacctggatgctgtgacattgttgacgagaaggggctatgatgtaaacgtccccgatggggatggatacactccactcatgtt

SEQ ID NO: 3353 - DNA, 604 bp, Gossypium hirsutum
  unsure (1)..(604): unsure at all n locations; Clone ID: LIB3825-034-Q6-K6-G3
ttcgtnntgggttcagaaccggnaaagattttccacatacggtgtattttgttgcagggactcaggcagagaaggcttcttggaactctattggagtgtttaaagtaagcaacatttcgggaaaaagcgtgagctggttcctaagaaatcttccgaggatgatcctgatatggatggtgaaagtagtgatagtgatgatagtgaggatgaagaagaaggtggttctggtgcaccggttttgcagttgcgaaaggttgctcatcatggatgtgttaaccgtatacgtgccatgggacaaaatcctcacatatgtgcatcatgggctgatagtggtcatgttcaggtatgggacttcacttctcatctgaatgctttagcggaatcggaaactgaaggcatccagggaagttcggtttttaaccaggctccgttagttaacttccgtggccataaagatgaaggctacgcaatcgattggagtcctgttgttgttggaaggcttgcaaccggngactgcaagaattgtattcatttgtgggagcctacatctgattcaacttggaatgttgatcctactccgtttattggacattctgctagtgtc

SEQ ID NO: 3354 - DNA, 496 bp, Gossypium hirsutum
  Clone ID: LIB3825-034-Q6-K6-H1
tgatcaatctagccatttccttcttgaaggacggtcttcagcatttccaaggtaaagcttttatcacctaaaccattgatctactcgtttccaactttcctttattcctcttcttttccatccagtttcaatctgattctcgcactctatcatattctttctgactttcagctatatccagggcacactggtgagaacaggctattcctatttgggctactttgcggtaagtgagtgcctcagcaacgaaggctgaggccacttcttgatgaatcactgagcacactataagaacattcttttcgctatttctggccacaatccccgaagccgattgacaaagtcgcccatcgtatgctctatcaaaattggtctttactgactgagcagattgcctacagtgcacagcaacttagtctactttgaggaacaagtgttctgatctgaatcccaccgatacaccgtggcattcttccaacactgacagagtgttccc

SEQ ID NO: 3355 - DNA, 640 bp, Gossypium hirsutum
  unsure (1)..(640): unsure at all n locations; Clone ID: LIB3825-034-Q6-K6-H2
gnaanaaatngaggagaggatgaaagctttggtgctgcagctcagggcagaggaagaggcagaggaatcatgtggccccctcacatgccactagcccgtggtgccagacccatgcctggaatgcgaggttttccaccgatgatgatgggtggtgatggcttttcttacggaccagttacacggggtggttttgggatgccagatctttttggtgctcctcgtccttttgcaccgtatggacccaggttttctggagattttacgggtcctgcatctggcatgatgtttccagggcgacctccacagcctgggggaatgtttccatctggtggaatcgggatgatgatgggtccagggcgtgcaccatttatggggggtatggggcccacaggtgctaatcctgctcgaggtggccggcctgttggcatgcctccgatgtttcccctacctccagcacctgcctctcagaactctggccgggctattaaaagagatcagaggacaccaaccaatgacagatctagtgcaggatcagagcagggtagaggtcaggaaatgggtggtccagggggtgggttggaagatgagacacagtatcagcaagaaggacaaaaggctcaccattgaagatcagtttgct

SEQ ID NO: 3356 - DNA, 588 bp, Gossypium hirsutum
  Clone ID: LIB3825-034-Q6-K6-H3
gttagtcataaacccgggcttgattcaggtgcctttgttagactgtggcgggtgtggtgctactgtcaggatattggattttttaactgttcctcgacctgctcgtgttgctcccaacaacattgatatccctgacacaagcaagaaaaggggttgacacgtggatggggggcggggcgtggaattagtggttgggttgctgctgatgatccagagaaagaactgactgaagaccgtgatgaagtaggaacgactgatgagagaaaattggtgccaaaaacagatgttgatttgaatcttacaatggctgggggtctgtctttctataagttgggtagagccacatcatccagaaatatgaatgatgcagacatgggtcgggatctagtgattgggcaaccatcaggtagtgaggttggtgatagagctgcttcttatgaatcacggggccctagtcctcgcaagcgaagcttggaaataggtgccagttcagatgataggccacagttatgcacacaacatgctgatagtgttgaagaaactgtgattgatcgtgatggtgacaaattcaatgattgcagacaatat

SEQ ID NO: 3357 - DNA, 490 bp, Gossypium hirsutum
  unsure (1)..(490): unsure at all n locations; Clone ID: LIB3825-023-Q6-K6-A10
tgtgaagccaaattactgctgtagatggtcagtaccaaattggaatctatgctctacgtgcaatacgatatggcgaggagattacatttgattataattccgttacagagagcaaggaagaatatgaagcatctgtctgtctctgtggtagtcaagtttgccgtggcagctacttgaatttgactggtgaaggtgcatttcagaaggtactgaaggagtggcatggtatacttgaccgacaacagctaatgctagaagcttgtgaactaaattctgtatctgaagaagattaccttgagctagggagggctggcctaggaagctgtttgcttggtggattgcctgattggttggttgcttactcagctcgtgtggtgagattcataaattttgagagaacaaagctccctgtgcaaattttacagcataatttgtaagagaagcatgagttctgtatagacatatctctngatgcagagaggaatgatgc

SEQ ID NO: 3358 - DNA, 604 bp, Gossypium hirsutum
  Clone ID: LIB3825-023-Q6-K6-A11
gtttccaaagaacttcgttgcatttccctgttttgccttttcccccccaaaggctggtttcttatatcggttttcttcccccctcccttcttttgtttaacatgttagagttgagcttgatcataattcataatttttgtctttggcaattgcagttaatgaaatggaatttggcatgattttgatcttatttgtggcttcaatccctacaattttggctgaagatattagttatggaacaattgtagttgatgggactacaagtattgctcaaaccgatgataatttcgtttgtgctacaatcgattggtggcctcatgataagtgtgattataagcagtgtccgtggcactatacatctacaataactttggacttgtctcatcctatccttaccaaagctatccaagctttcaaccgtttgagaatacgaattggagggtctttgcaagatcaagtgttgtataatgttggaaatttgaagtctccttgccatccattcagaaagatgaaacatgggctgtttggattttcaaagggatgtttgcagatgaaaaggtgggatgaactaaaccatttctttaatgctaccagtgtgatgttg

SEQ ID NO: 3359 - DNA, 586 bp, Gossypium hirsutum
  Clone ID: LIB3825-023-Q6-K6-A12
gccttcttccactctttgctgccctcttcgtctagccgaaccctaaagccccgtttcaaacacccaaacctccatcgagaaggcgtttcgtgcttctggcttcggcacatcgttctttggcctcaaaatcctctccttttaacttcgatttcgacgaagcaagggaggattgacggcctagcagcgaggtaaaccccttttcgttctctctttatgtttcttttattattgatttcaaaataaaaagaaaaaaggcgtaaaaataaaaaaagggaaccaccttttgaagaatattcaacttctctgtattcgattgctattgtatgtatattatctctattttcgtgtttttgttgcgtattttcgcataacccattacaagtgattctcttttggctttataaccgagagaagaagagaaaagaaaaaaacgaaaataaaatatacaattttttttgtctgttgttttcttgcacgtattggctgttgtggtttgtccctttcttcgcaggtacaggtgcgctggcgtgtgtacgggagctgagctggcgtacggaggcttggcgtggtcgctggaagcgttgta

SEQ ID NO: 3360 - DNA, 275 bp, Gossypium hirsutum
  Clone ID: LIB3825-023-Q6-K6-A7
tgtttccatacaattagtggcattggcaaagctccgtttctactttaatggtggatcatccaaaatttgcgtccataggccccccaaattctggatgacttataagaagaagcagaaaagaaaatggaaggcggattttgtggagaattggttcaggcaggcagctgcttaaacttttgtatataaataggaagtttatgtgtatgttttcttttttcttttggtttgacaatttattggctggtaagatataatatatttacatatatatcgtt

SEQ ID NO: 3361 - DNA, 610 bp, Gossypium hirsutum
  Clone ID: LIB3825-023-Q6-K6-A8
cagaaggtgagactggagcaaggaattgagatgttgaacatctttaaaagttttgaaactgatacatcaatcctggatgattttgacttctacgaggacaggcagaaagcaatgcaggagcgtaaggctagacaacaagctagtctcatgtctgtaggggttgtaggagaaactgagcatagaaatgccgtctctttatccaacgacttcatgaagcagatgtcaaagagctttgctcaagttgtgtgcttggatgatggcaataaagatggcaccgccattgagagaacaagttctgcttctgatggttcgaaagttgcaagggttaaacttgaagatgctatgacggcagccgtctcttctggtcaggcaagttaagaaataagcattctgggtatttcaggcagccttgctttactgtatgtgacacaaacttctttttttcctttttattttattttgtgagatgttggtgaaattcctttggagtgcattggaagtcgaacaaggtctattatggggctgatgtgcttcatatgtaatatttgcctgtagtcattagtttttgttttttgcttttctttgtttctttaacagtagtcattagttt

SEQ ID NO: 3362 - DNA, 600 bp, Gossypium hirsutum
  unsure (1)..(600): unsure at all n locations; Clone ID: LIB3825-023-Q6-K6-B11
aaactggtanaacgtgaaacaataaacaggatgacttaatcatgaataaaatattagtgtttgtattgcagatttaaaggcaacatgggagcaggcggaaagcagaaaagtgcaagcttttttgcccataaaaaatttgaaataggtctataaggccagttgttgaagaagaagcagatcaatggcgaaggagttggaaggattcaatttcgagcaaaggcatggaaaggcgagggtgagagtgggcagagtttggaggagcaaagatggatgccgccacttcatggtcgaatggaatgttaacatcagcttgctttccaattgcgttgccgcttatgtccgcgatgacaactctgacatcgtcgctactgacaccatgaaaaacactgtttatatcaaagcaaaggaatgttcagaacaactttcagcagaggagtttgctattctacttggcaagcacttcacatcattttatccacaggtttttactgcaatagtaaagatagtggaaaagccatgggaacgcatttctgtcaatggtcaaccacatgaacatggctttaaactgggatctgaaaacatacaacggaagcgattgta

SEQ ID NO: 3363 - DNA, 594 bp, Gossypium hirsutum
  unsure (1)..(594): unsure at all n locations; Clone ID: LIB3825-023-Q6-K6-B12
cggacgcgtgggcggacgcgtgggcggacgcgtgggtttctttgttgcctagttaaccctaaaacacttccctcgacactaacgcgccaccgcgaactgcgatctgcacgttcaaactccaagggagtggttttcggccttgagatcccctttagattccgatttcaacggaatgaaggggaaacgatggccaactcgcgaggtaaccttctctttcgctttcttttttctgtttttatgattgatttcaaaataaaaaagaaaatagaggcgtaaaaataaaaaagggaacaacctctgaagaatattcaacttctctgtatttgattgctattcttttttgtatattacccgtgtgtaaaaaaaggagtttttacaatcagaaaccataggctttatagccgaatcataaagaaaaaaaaacaatttttctttttgttgtttttgttgctgctgtgtggtcgtttgtttgcaggtacggagtacgggcgtgcgctggcccttggcgtgaggcgtacggngctgtgttggcgcgggtacggnggccatgctggagggttgcggctactagggaaaccctaggtttctgtttag

SEQ ID NO: 3364 - DNA, 612 bp, Gossypium hirsutum
  Clone ID: LIB3825-023-Q6-K6-B7
gccaccggctgcaccttcgctgaaacgaaagctcacgctctacagagctttcagtggcttaacacagacgcaccaccaccataacccaaccagcccgtcctcctcacctgatgatattgaaagccaacccatcttggtgaactctgtgagccgagatgggtcgcaaagttatgaaacgacgttcttgatgtcgtcggaggaagggggagagtatgagctggtttactttagaaggcttgatgatgagttcaacaaagtggacaagttttatagggctaaagcgcaagaggtgatgaaagaagctgatgtattgaacaagcaaatggatgccttgattgcttttaggattaaagttgagaaccctccagggattcatttcgacaggtctgtggagatgactcgtcttgcttctgatattgcagcttctgctgctgctctctctgcttctactccatctggggcaaaatcagcaagcaaaagggctgctcacctggaagccattgaagaaagcacccatggccaagctgatgatgacgataatggcgatgagaaagagagaaatactccgactttagaagccaaaccagcaaaacccaaacccaaggtcattgc

SEQ ID NO: 3365 - DNA, 600 bp, Gossypium hirsutum
  Clone ID: LIB3825-023-Q6-K6-B8
cggacgcgtgggtctggttacgtaagtggtggaatgtactcacgcaatgggggtaaaaattggataaaggctatgatccttacagcatctctgttcccatttatgtgctttgggattggttttatcttgaacacaatcgccatattttatggatctctagcagcaattccttttggtacaatggtggttgtttttgtgatttgggctttcatttcattccccttggcccttcttggtacagttgttggaagaaattggagtggtgctccaaataatccatgccgtgtgaagaccattcctcgcccaattccggaaaagaaatggtatcttacaccctctgtggtctctatgatgggagggctcctgccatttggcagcatattcattgaaatgtattttgtcttcacatccttctggaattacaaggtttattatgtctatggctttatgctgttggtcttcttgattctaatcattgtgaccatttgtgtgacaatcgtgggaacatatttcctgctaaatgctgagaactaccattggcagtggacatcattcttctctgctgcctcaactgcaatctatgtctatttgtactccgtc

SEQ ID NO: 3366 - DNA, 615 bp, Gossypium hirsutum
  unsure (1)..(615): unsure at all n locations; Clone ID: LIB3825-023-Q6-K6-C10
ngaaaagacaagcaagcttcaaatcccanatctctctttgttttctctttgaaacccaaattttcccatataagaaaagattctgagaaaatggtgcccaaatcattgatctatgcatttgtatctcgtggaggagttatattagctgagtatactgaatacagtgggaatttcaattccatagctcttcaatgcctccaaaagcttccttcttcaaacaacaagttcacttacaactgtgatggccatacctttaattatcttgttgacaatggatacacttattgcgttgttgcagatgaatcagctggaaggcaagtgccgattgcttttttggagcgtatcaaggatgatttcgtgtcgaaatatgataacgggaaggctgctacagctcctgccaacagcctgaacaaggaatttggaccaaaactgaaagaacatatgcaatactgtatggagcatcctgaagaaataagcaagctggctaaggtcaaagctcaggtttctgaagttaaaggtgttatgatggagaatatcgaaaaggtgttagatagaggggaaaagatagagctgctagtggataagaccgaggatcttnataatcaggcttaagac

SEQ ID NO: 3367 - DNA, 565 bp, Gossypium hirsutum
  unsure (1)..(565): unsure at all n locations; Clone ID: LIB3825-023-Q6-K6-C11
ttttanaccgctcgcttccccatctacagggtgtacagagggattgaggcagctgtaaccaatggctcccaaggttgagaagaagggagatgcaaaggcacaggccttgaaggctgcaaaagcagtgaaatctggagccacttttaagaagaaggccaagaagatccgaacaaaggttacgtgggacaggccaaggaccttgaagaaagataggaacccaaagtatccacgcattagtgccccaccaaggaacaagcttgaccattaccagattctcaagtttcccctcacaactgagtcagccatgaagaagatcgaggacaataacactttagtatttattgttgacatccgtgcagacaagaagaagatcaaagatgctgtgaagaagatgtatgatattcaggccaagaaagtgaacaccttgatcaggcccgatggcacaaagaaggcatatgttaggttgacgccggattacgatgccttggatgttgcaaacaaaatcggaattatctaagcaggtggcgactaccttgttttgaatgctttattttttgtgttttgt

SEQ ID NO: 3368 - DNA, 588 bp, Gossypium hirsutum
  unsure (1)..(588): unsure at all n locations; Clone ID: LIB3825-023-Q6-K6-C12
cggncgcgtggggcaggaccaggggtctagctctattgtcaatgcatcagttgcatcccctgctgcccagaacatgacatttacatatgcagacaacataaactccagtgcttctcttcttgtgaagcgggagaatcctggcggtccagtgtcacccttaactggccttaataaaagagctaggctcaatgctactggatctgacagtattcttcagcaacaaatcagttcacatatggatggcctccatggaccagatatgagctggaagaatatgttactaccccagcaagcgacggcaagaggaattcaatatgcaaatgccagcatgcagaagtatcctctgcaggcttttgaaggggttctgaatcaggaggttggtacaatgccatttgctgctggacagtcagcagtgagatatggtgccaaagaagagccatttgatccagacaagttggatagtgctgaactcaatagggaaactgatacaaaccatttggatccacagcagagacggcttcaaccaagattaccccatggacttgtgaggcctggtttccttgaaacaccttggaacggtattaacca

SEQ ID NO: 3369 - DNA, 608 bp, Gossypium hirsutum
  unsure (1)..(608): unsure at all n locations; Clone ID: LIB3825-023-Q6-K6-C7
gntaataaaaagaaaaaggcaaagtaaagaaaccttgcgctcggtcttcgataaatactatagaaatccaagaaaattttttttaaaaaaccctaattctataaaaagatcgaattaaagtagaatcagaagcaaaaatcgccgaggaaaacaagatgtcggggcagcaagaagaagataagaaacccggcgatcagtccgccgctcacatcaacctcaaagtcaaaggccaggacgggaatgaagttttcttcaggatcaaaagaagcacacaattgaagaagctcatgaatgcatattgcgaccgacaatctgtggatttcaactcgattgccttcttgttcgatggtcgccgcctgcgaggtgagcaaactccggacgagcttgagatggaggatggtgatgagatcgatgctatgcttcaccaaaccggtggtactgtgtgaagcgagtactactttgccgcatttagtatttgatgagttagttatggtctgattatgtaagatgtttccaatgtttttatatacgaccttattgccatgttatgaagacttgtggacctttgtttgaatcatcttgctcttatagaagagcttgagtttcta

SEQ ID NO: 3370 - DNA, 546 bp, Gossypium hirsutum
  Clone ID: LIB3825-023-Q6-K6-C9
ctttctagcttcaggaaagaggtcaaggttcctacattccttgtcccggctacacaaaggtttggttggacttatatactctccctgtacccagatctggtgggaagacatgctcccagatatttgaagaagctggctgtgacacacccgcaagccctagctgtggtgcttgtttgggtggcccaaaagacacatatgcacgtatgaacgaaccaaaggtctgtgtctcaacaacaaatcggaacttccctggtcggatggggcacaaagaaggccagatatatcttgcttctccgtatacagcagctgcatcagctttgaccggttatgtcaccgatccaagagagtttttgcagtaagaaacttgagtaaattttttgtaggtttaaatgtatggctcatatgaataaaccataggttgaaaaaagaaccaaaaaaaagaactttttgttgtatcctatattccaatggattcatgcaaggaatgccaaaaaaacttgaatctctctttcgtaagctttcataaatgaaaattgttgtttggac

SEQ ID NO: 3371 - DNA, 527 bp, Gossypium hirsutum
  Clone ID: LIB3825-023-Q6-K6-D10
ggataaacaggaaggagacggagagggagtatcgacggtgatggagatgcgagacatcgatgaccttccaaagaacgccgccaactacatggctttgacgccgttgtggttcttggaacgagccgccacggttcatcccaccagaaaagcggtgatccatggatctcgaacgtacacgtggctccaaacttaccagcgttgccgtcgcttggcttcagctctttcgaaacgctccatcggcgttggtagctcggtagccataattgcaccaaacgttcctgctttgtatgaagctcattttgggattccgatgtctggtgctgttgtaaacaccatcaatattcgcctaaatgcatcaaccattgctttccttttgggtcattcacaatccaccatcgtcattgtggaccaagagtttttcaatttggcggaggatgctttgagaatatgaaggagaaaagcctaagcaatttcaggcctccgcttgttattgtcattgctgacggaagctgcaacccggaaacact

SEQ ID NO: 3372 - DNA, 595 bp, Gossypium hirsutum
  Clone ID: LIB3825-023-Q6-K6-D7
gttcaattaattcgattttttttaagaggtggaggggaaaaaaatggaagattcatcatcaaagtcgttcttgagaaagcaatgggatgaatacaaagaattatgggccgatcgatttccgttcactaatgtctattcaagatacatcggccgtgaacagtcccttccttcatggtctgaatccgatgttaacgagttcatcgcttctgatccggtgcatggacccatcttgaagactgccagggaagcagccaacatcgccttatacggaagtgcaatcggagctatcacaactgcaggttttgcctggaaatactcgaagagtttacatggtgctggactgtctttcgtaggaggagccgtttttggttggacatttggacaagaaatcgcaaatcacgcatatcaactctacaggttggacacaatggctgcacaagccaaatttatggattggtgggaaaacaagtgccggaggtgatctttaaaaagaactttttgtgatgtcgaaagcagcacctggactcgctttccatttggttaaataatggcggcatgtcgaaaacataacgtttggtccaatgctttggctttt

SEQ ID NO: 3373 - DNA, 519 bp, Gossypium hirsutum
  Clone ID: LIB3825-023-Q6-K6-D8
cccacgcgtccgcgatccttttgctccaacaggagcctgagccaagtcctgaacatgatggatcagctcatggagagcccatttctctccgcttcccgtggcatgggaggtggtctccgccgaagctgggacgctaaggaaacggatgactccatgaaccttacgattgatatgccagggcttggaaaagaggaagtcaaagagtctgcggaacagaacactctggtgatcaaaggcgaggccaaagaatccaaagaggaggaaaacggcgggaggtacaccagcaggatccatttgcctgaaaagttcacaagactgaccagattaaggctgagatgaaaaacggggtgctcaaagtggttgttccaaagatgaaggatgaggagaggaatgatgtgattcacgttcaaatcgactgagttaactgggtgcgtccggatgaggctaagtgggttttcgttggtttggggctgtgggtcttgtacgtatttagtggtgataataagggcttggaatata

SEQ ID NO: 3374 - DNA, 522 bp, Gossypium hirsutum
  Clone ID: LIB3825-023-Q6-K6-D9
gcgaagtcggttgctatggttcagcttagggttttcggtgacagcggcttcaatctctcaattcatatatagagacctttggactgatcgttacgcccttaaatctgatatgaaggagaaattcgatgctttagaagctagggtttcgaatctagaatccctccctacggagaatccaaatccagctcaggttgatggctagatgtttatttggggttcacataacttttgtgctttgaatgtatttgaattttttttgtttcctttttattatatatttgaggttattgaaactaagagttcaaagctctatcaacagacgggatcacccggttgttggcgaatgtatttgatttcgaaacaaaaaggaaaaaagaagatttaagttacttttattatgacattttgaagaatgttgttgtagaatgatcgttgcctttttggaataatgtgatttagatctccaaaccatcaaattttcttaatagaatacaacctactgttattttcagggtattaatc

SEQ ID NO: 3375 - DNA, 603 bp, Gossypium hirsutum
  Clone ID: LIB3825-023-Q6-K6-E10
gaaggacctctcttgtggataatcaagctgaatatgaggatgtagcagctgctaatgatacagaatttctgaatgtagatgatgatgagctatgtgaggatgatgatgatggcatgccatgtgatgaaagccgtcttcttgaaaatagtggatggtcctctcgcacaagggctgttgccaaatatctccagaatttactcgaggatgaagctttacatggacgtaaggtactttacatggacagtcttttggctcgtaaaacacgtaaagaagcatcgaggatgttttttgaaacactggtactgaagacaagagattacatccatgtagaacaggtgaaacccttcgacaacatctgtataaaggctggagcaaaactcgtgaaatcagatttctaaactgatctcccttccaaaggaaagagcaaatacggtgaaaagtgccttgttgtagttgtagttctgatgcgcaggccacaccaggtaattattttgtttcaaaatggtatttgtttttcaaattttattttaaaacagaagatagttgttgtctaggtcatctcatgtaattgggtagccttaacagtgggatggaactgcattg

SEQ ID NO: 3376 - DNA, 602 bp, Gossypium hirsutum
  unsure (1)..(602): unsure at all n locations; Clone ID: LIB3825-023-Q6-K6-E11
attagtccaanagagcttgccttactctgccaaaggtggagaatcacattgtaggagccccatgtggtgttatggaccaaatgacttcagcatgtggtgaggcaaataaactacttgcaatggtttgtcagcctgctgagataattggtcttgtaacaattccaagtcatatccgattgtggggaatcgattcaggaatacgacacagtgttggaggtgcagactatggatctgttcgaataggagcctttatgggtcgaaagattataaaagctacagcatcaactaggttgtctcaatcaatgtctactgctaatggggcatcccctgatgaagtggacaatgatggactagaattacttgaagccgaagcttcattagattatttatgcaacttgtcacctcacagatacgaagctctttatgccaatctacttcctcaatcaatgcttggtgaggtgtttttggagaaatatgttgatcatggtgatacagttacagttatcgattagaaacgaacatatagtgtaacagctgccgctaagcatcctgtttatgaaaattntagggtcaaggcatttaaggcactgctgacatctgcg

SEQ ID NO: 3377 - DNA, 581 bp, Gossypium hirsutum
  Clone ID: LIB3825-023-Q6-K6-E12
atcaaaccctaaatctcccctcttattggcgattcatctcagccaatagtgctctcaagcctgaggaatgactttcagccttgaaatcttcttttggcttcgactttaacgaagcaaagaaaagaaatccatgtcattttgcaaggtaaaacttaccttttcctttttcttttatttttttacatgtaattatgaaagactcaacaaaacaaaaaaagaaaatggaatcgaaaattaaagagactggaaaatggagaatcaccttttggttttgatagcctttttttttatttcaatatgcatagtatgcgtaacctcgaaaatacattgttttttggctttatagccgaaatcccaaaacaaataaaataaaaaaaatacaaattttcttcgttttttcctatttgctgttgtcctgctgccgtttgcttgttttttgtttgcaggcaaggggtacggggccagctgtggtgcacggctcgttgacgtagaggcgtgggcgtggttatggcgcaaggaggccgtacggtgctgctatggagatatggagagggcagtcggcgttggaagctgctagggtt

SEQ ID NO: 3378 - DNA, 598 bp, Gossypium hirsutum
  unsure (1)..(598): unsure at all n locations; Clone ID: LIB3825-023-Q6-K6-E7
atttgatcctttgctgcttttggagagaaattaagggggagaaagagaaatgaagcattggggtctgattttgctcctctttttgttatttcaacaaggaaattttctcctgcgtgtcaaagctgatgacgggtttatcaaaactaaaggactgcagctaatgttgcgtggaagtcctttctatgcaaatgggttcaatgcttattggctcatgtacatggcctctgattcatctcagagaagcaaagtctcatctgcgtttcaacaagctaaagagcacggtctcaccatagccagaacttgggctttcagtgatggtggagacaggcctcttcagtactcgcctggctcctacaatgaacaaatgttccagggattggattttgtagtatctgaggccaagagatatgggattaagctggttttaagcttcgcgaataactatgatcaatttggagggaagaaacagtatgtgaactgggcaagaaatgaaggacaatccattggctctgatgatgatttctttaccaactctgttgntaaagaatactacaagaaccacatcaagactgttcttacaagacgtaacaccctgact

SEQ ID NO: 3379 - DNA, 524 bp, Gossypium hirsutum
  Clone ID: LIB3825-023-Q6-K6-E8
atcaatcagaacccttcgggtgtaggatgatccaggctgtaaacaccctgtagcggtgcgacgttatgagatcaatgctattgctacgttatgttgaattcattagaagcgtaacaacacaatgtgtggactgacataaaccgatcatggccaaatttagcagtgtagcgatacatccccctttgaaatggaggctaataatgccaaatggccgcatccaacactcgtttacagagttgaccttcctgcatgtgaagaagcacgtctcgcttgcattgaacataaacctcggcgcttggaacactcatctcgcatccaacacattactcttggcacatgcttacacccttgctgacattatcatgacatttaatttctactcgggtttcttgcatatctgaccaagactaaacctctgaatccttcatgttgagaggtacttgctgtaccttgcctaatccccaaaaataagatgatggtaggtgaaacgaagcaggccatctctctaccaccaggttcttcaa

SEQ ID NO: 3380 - DNA, 565 bp, Gossypium hirsutum
  unsure (1)..(565): unsure at all n locations; Clone ID: LIB3825-023-Q6-K6-F10
tctatttctgctgttaaaacgtgatgttgcatttaaatcatccattcccttcccttttccagttcggtattttggtgctcgtgacagtaactgcttttgggttttataaatctgtatgggaactcctgattgtgtttcttactgatttctcttaatttcaacattttttcatgttattgtgagaaaatttcaaattgatcgatctattgtataaaatttaattacttagtgcttagggtaattcgatataaacatgatattcttgacatttttctttttctttccgtagtgcttgtatctctgttatatttgaatcttagcagatgcaatttatccgatgatggatgtgagaagctttcaagtaagtttcatatttacccattccatgtttgtagagttaaaaaggttctgagatggcctttggcttatgggtattttcttttgacagagcttggtaatctgaaaagattgaacttgngtttcaatgacatcagtgatgcatgtttgatacacctaaaaagtttgacanatttggagagcttgaacttggattcatgtagaattg

SEQ ID NO: 3381 - DNA, 585 bp, Gossypium hirsutum
  unsure (1)..(585): unsure at all n locations; Clone ID: LIB3825-023-Q6-K6-F11
cggacgcgtgggcgnaanaggacaacaacaggcagctcttcttccttttctgcgtctcatcatcaaaccccaaactcttaactagcctcttcctcctcctctttactttaatttcattttgctttcacaaatctaagaccagagctccaaaagattgaatttttaacccctcaaattaaaatccttcctttttcgcgttttcggttgaaaatttgtataaaaaagagggtgatttagaaacaatggatgctgattcatggagtgctcgtctttcttcagcttctaagagatatcaatcggctcttcaattacgatctgatatgcttatggggtttgaagaaattgatggagaagatgaaataagagaggagtttcgatgccctttttgttcagagtatttcgacatcgttggcttgtgttgtcacattgatgatgagcatccagtggaggctaaaaatggggtttgtccagtctgtgcaatgagggtgggcgttgatatggttgcgcatataaccctacaacatggaaatatatttaagatgcagcgcaagaggaaatcacgtaaaggtggatctcattccacgc

SEQ ID NO: 3382 - DNA, 272 bp, Gossypium hirsutum
  unsure (1)..(272): unsure at all n locations; Clone ID: LIB3825-023-Q6-K6-F7
gattttctgtttgttcagnataaggaagaggcttagacagcagaatgtagcaacaaaaaaaaaaaaaaaaaaaaaaaaaaaaaaaaaaaaaaaaaaaaaaaaaaaaaaaaataaaagaaaaaaaaattaaatatgcaaagacatgcagaaggagtaagctcttttttaggagaccactatttttgttgggggtggggggttttttacaactttagtggttggtgaaatccttggtgtttcccacctttttcttcttggggcccttccctttt

SEQ ID NO: 3383 - DNA, 605 bp, Gossypium hirsutum
  unsure (1)..(605): unsure at all n locations; Clone ID: LIB3825-023-Q6-K6-G11
cgttcggngnnagtcgagaaaagnaaaacagnagagcagggagaaaatgaagaccatactctcatcagagaccatggatatccccgatggggtcaacatcaaagtgaaggctaaaatgatcgaggttgaaggtcccaggggtaagcttacacgtaacttcaagcacctccccctcgatttccacctcaccaaggacgaggagacgggcaagcgtaagctcaggatcgaggcctggttcggtactaggaagaccagcgccgccatccgtaccgccctcagccacatcgagaatctcatcaccggtgtcaccaaaggttaccggtacaagatgaggttcgtctacgctcactttccgatcaacgcctcaatcactggcggcaacaagtccatcgagatccgtaacttccttggcgagaagaaggtgcgtaaggtggatatgttggaaggggtttccattactcgatccgagaaggttaaggatgagatcgttttggatggtaatgatattgaactcgtgtctcgctcagcagctttgataaaccagaaatgtcatgtgaagaacaaggatattagaaagtttcttgacggtatctatgttagcgaaa

SEQ ID NO: 3384 - DNA, 513 bp, Gossypium hirsutum
  Clone ID: LIB3825-023-Q6-K6-G12
gaccatggtggacccacttccgtggggggggttgcttgatcactcctttatcttttccatcatttatagcaacactgagtgaaaaatcccatgctacttatttggaactaccctctattgggatttgggaaatataccaacaaaactctcttaactgtttctgactatgaataaatggtgtggtgagataataatacaaaacccatcaaatcaatatgagattactcttggctaaatttctccagaggttttaatgtttgatcaagtaattcaaagcatcaactttataacagtgggggtacttattactgttttcaagtagacgaattccatgagcctgaatgacttacgcgccttatatgttaatcaagactccaaatcatcctcaatactctggcacttaaactcccacactctgaactatcgtggcagtaatatattctaaagaagaaacagggagctctactctattgcgcctatatgaaattattgattaggctgggcaaacattta

SEQ ID NO: 3385 - DNA, 249 bp, Gossypium hirsutum
  unsure (1)..(249): unsure at all n locations; Clone ID: LIB3825-023-Q6-K6-G7
cggnagcgtgggcggacgcgtgggattttaaattagattatttatttgcctgtnaaaaaaaaaaaaaaaaaaaaaaaaaaaaaaaaaaaaaaaaaaaaaaaaaaaaaaaaaaaaaaaaaaaaaaaaaaaaaaaaaaaaaaaaaaaaaaaaaaaaaaaaaaaaaaaaaaaaaaaaaaaaaaaaatataaagaaaagtaaacaatagtaaaaaaaagataaacatttgataaaaactaaaatatttaaaaa

SEQ ID NO: 3386 - DNA, 590 bp, Gossypium hirsutum
  unsure (1)..(590): unsure at all n locations; Clone ID: LIB3825-023-Q6-K6-G8
anaaaagaagataggtacgtcgagaaggggaaaaaaagactcatagtagtttttggacaaaaatggctacttcggattctccaaacacttcagctgagtctgatattgaaacaaaccctaatcctaattcttcaaaagccataatcccaacaccatccaattccaattcccctgccgtatgcctcttccaattcgcaggagactccgccgccggtgccttcatgggctcaatctttggctacgggtcaggattgattaaaaagaaaggctttaaaggatcctttgtggaggcaggatcttatgccaagacatttgcagttttgtccggcgttcacagtttggttgtttgctttttgaagaggcttcggggaaaagatgatgttattaatgccggtgtagctggatgctgcactggacttgctctaagtttcccaggtgcacctcaggcacttctacagagctgtctcacctttggggcattctcatttatcatcgaagggcttaacaagcagcagccagcattggcacattcattttctgcgagaaacgagagtgcacaccacaaaggacctcgtcctttagcactaccc

SEQ ID NO: 3387 - DNA, 574 bp, Gossypium hirsutum
  Clone ID: LIB3825-023-Q6-K6-H10
gcgttcgggagaataatgtaattacgaagaaaagccgaggttgctgatgtgtttgatagtgacttcaatgaagatgttcgtacctgtgccagatgaggaagtagaaaagatgcataagaaaggtttcgcacaaagaagcgtctgtatatttcctggaaagccttctatgaagaaaaagaaagttctttcaaatttatatggagattccaaggatgaaaattttactcaaaatacttcctctacacagcatcatgatgcccctgatgatgcacaaagtgaaagaattataaggaaatctacaagaacttcattcattgctaggcaagcttagcgagatgcgatacctgctgctctgcaggctacaatgaagattgttctgtctggttttgcggcatcagatgaacacttaaggctcacgactatggtgtttaagaacatctttgcggatattgatatcaatactgataaactttcttcttgccacaggattgtgttgcttaactacattaaagacacgaatcttattgattgtcgacattattctatcagactacaccctgttggtgtctctcgt

SEQ ID NO: 3388 - DNA, 611 bp, Gossypium hirsutum
  unsure (1)..(611): unsure at all n locations; Clone ID: LIB3825-023-Q6-K6-H7
tctaaaaaacaacaaacagnanagaagtatagagataaggggngaaaacgttttttttatttggtgtttacgagctctgatttttcatctgttgcttctgctgcaattgatgtaaggtggaagagaagaagatagagaggttgtggtgtgtttgtttgcagaaggggaagtgaaaacgacttttgatagattaaaaaaagtggattttgattgactggatgcgtgaatcgagaagattgttgataaaactgtgagaagtataggtttggtgttctaatttcgttaggttttctctgaagtctcagagagatagttgattttctgtggaaaaagggaagctttggttattgatgtttgaaccgctggtagatttgagtgggattttagattagggcttttttagtatagatttgaggagtttgagagtgtagcagatgtgagatctgagctaaaagatttttttttgaagaaatgactacgtcggagatatcgataaaaggaaattgtgtcaacggaagaggagatagtttttcttccggttataccgagccacgagatactaggaacgccatggaagggcagaacggtcattccgctcgtacaactgacat

SEQ ID NO: 3389 - DNA, 583 bp, Gossypium hirsutum
  Clone ID: LIB3825-023-Q6-K6-H8
atattaaagacccaagagattttttgacctgtggaatgccgtgtttgatgagctctctggcattagacctgatgtggttgctaaaaataaaaatgtaatgtctggtctaaatcttatagttgcattaattgaacaaaataacttgttcctatttaattgtttgattgttgtattccattaatcatgttaaccactccctcttccttaatgttttgagttgtagcaactgtgaccgtgattgtagctgggaagtggttgctgtgccaattctgttgtatgatacacatggcttgtgagataaccactgagtacaaattaataacctgtaccagactgttgctgccttgttggatcatgttgaaaatggttttagctgttgcctagctttccaccttgtttgcttgtagcgggctgttgctgcacttcctgcaggatcgtgtcagttttaatacctcggtgtttaaatggatatgatatgctgcccccttatcacatgtttggtcaaattttattatctttccctgtttgaagttactttgctattatagtgatttccttcttatctagaacagatcactattcc

SEQ ID NO: 3390 - DNA, 424 bp, Gossypium hirsutum
  unsure (1)..(424): unsure at all n locations; Clone ID: LIB3825-023-Q6-K6-H9
cctgtatcagtaaagtccatcataaagtcagataatgaatggttcttcttttgtgctcgaggaaggaagtacccaaatggttcacaaagtagacgggcaaccgaacagggttattggaaagccacagggaaagaacgtaatgtgaaggccggttcgaatgtgatcggcacgaagaggactctcgtctttcacacaggtcgtgctccgaaaggggaaaggaccgaatggatcatgcatgaatattgcatgaaaggaaaatcccaggattccctagtggtatgccgtcttaggaagaacagcgagtttcgtctgaataacaattcanatcgggttgctcggaatcacagggagttgtcaatcgtgcatgacagtaaccatgctacctcagatggtggaactgatctaaactgcatctctgaagggg

SEQ ID NO: 3391 - DNA, 609 bp, Gossypium hirsutum
  unsure (1)..(609): unsure at all n locations; Clone ID: LIB3825-024-Q6-K6-A11
tttgtggnatcatggactttgacaaattggggcgtgcggggtatgatggttaaggttgcaggccttggaaagattctaggaccacgagggctcatgccaaatcctaaagctggtaccgtcacacccaatatacctcaggctattgaagaattcaaaaggggtaaagttgaatacagagggtggggagactgggattgttcacatacctttcgggaaagtagacttcttggaagatgaccttcttgtgaacttacttgctgcagtaaaatcaatcgaaacaaacaagccgaaaggtgcaaaaggagtgtactggaaaagtgcacatatatgcacatcaatgggtccttcgatcaagttaaacataagggagatgcttgattacaagcctccatcaaacgtttgaagaataatgaccactaacagttgaaaattatcttggacccttcaatcagctatgtggccattctatgtcagaacatgcagtgctcaaatggaattggccattgggatcgaatccaagtgaaactctgcatatacattgccttgccagattatcattctgtatacagatttggacttgtatcatcatgactaatagcatcaatttat

SEQ ID NO: 3392 - DNA, 605 bp, Gossypium hirsutum
  Clone ID: LIB3825-024-Q6-K6-A8
ctttgttgctgtactgatgattcttctgacgatgaacaagcagctgctgttaatgaagttgattttaaagtttctagtctcatttcagcttttgcaaactgcagctttatacaaaatttgtgctggttacttaaattttataggagcaattcaagtaatacaaatcaatacattataggcttgttgcggaaggtaactgatgaccttgagcttgctccaatgctttatcagttgtcactccttgtaacattctatgacatactagaagagcagaagttgtctccaagtgaggaccatgcagatattgttgtctttattactagtttagtcagaaaaatgctaaagaaaatgaagcaccagccccttctttttattgaaattctcttttggaagacacggagagaatgccattacatcaatgctgaatatttattacacgagcttggccatttgaagaaaggaaacagaaatcaggatagtgttccaggaaatacggaagttgagtcctcagaggcggccaatgaatgggttcgcagaagcatagcagatgcactgggtgacgacgaagctgatgttgtaatcgctcatgacatcagacatcagaa

SEQ ID NO: 3393 - DNA, 581 bp, Gossypium hirsutum
  unsure (1)..(581): unsure at all n locations; Clone ID: LIB3825-024-Q6-K6-A9
gngnaagcctcaccgccgctgccgcagccaccatgggtcgtatgcacagtcgcggtaagggtatttcagcctcagctctgccttacaagaggaccccgccaagctggctcaagatctcgtctcaagatgttgaggaaaacatttgcaagtttgcaaagaagggcttgaccccatctcagattggtgtcattctccgtgattctcatggtattgctcaagttaggagcgttactggcagcaagatcttgcgtatcctcaaggctcacggtctggcccctgaaattccggaggatttgtatcaccttatcaagaaggcggttgccatccgaaagcatttggagagaaacaggaaggataaggattccaagttcaggttgatccttgttgagagccggattcacaggcttgctcgctactacaagaaaacaaagaagcttccccctgtctggaaatacgaatctacaacagccagcactctcgttgcttaagctaggcatgtggggtggtgcaattttgggggaatccgggttcgatgtggatgctacgatggaagctagattgtgttttgttgttctagtgag

SEQ ID NO: 3394 - DNA, 605 bp, Gossypium hirsutum
  Clone ID: LIB3825-024-Q6-K6-B10
gggaaaggaaacatggcgactctttggccaagaaaacgaggccactgccgtgtttttcccacccaaagactaatcaaaccttactcttttcttttccccgcatctaattccttaatttgatcttctatcaatcatatgttgaagaaaaaacgatggcaaactgtcccgccgttcatggtggctacccctccgattatgttgctgtttccatagccatcttcgccgtgattttacttattgtgaggtcaagtttcccgtttttgatacacaaagttccaagtgcaagaggcagtgccttttggattccagtcattcaagttgttgccagcttcaacttcctgttatcgcttgtgatggctgggaatttcctcaagtacaaaaagagccactggtggttgtcttgctatgtttgggcagtatgggttgaaggtccacttggatttggtttgttgatgagctgccgcatagcacaggcctttcaactatactatgcatttgtcaagaggcgtttaccaccggtcagatctcatatttttcttccactaattgtcttgccatggatcgccggtgctgcaattattcatgtgaagaagcctctcaattgc

SEQ ID NO: 3395 - DNA, 603 bp, Gossypium hirsutum
  Clone ID: LIB3825-024-Q6-K6-B12
gcgttcgggaggttccaaccggcgcatggcgttgtgctgagattatctcgggcaacggccatacgtatagtgtgaagtacggttggtttccgatcactggcgaggcggcagcggtggaaagagtctctaggaaagcgattaggccttgccctcctcctatgaacgggaaaaataattgtgcttgtggtgatatcgtagaggtgttcgatgacttatcctggaaaccggcggtgattgttaaggttcttggtggaaacaacttttccgttaggattcttgggtcgagtagcgaactcaaagcgcatcaatctcgattgcgtattcggcagtcttgggaagatggcaattggttcctcgttggaaagggttcatcaaattccactgggccgcagaaaaggaaaagatcttcgcttggcttctcatatattggtgcgcaaaagaagagggtgttggaggaaggtagtaatggtgttcaaagaataataattcggcttccttcgcctgcctctgaaaaggtagatggatttgattccccaaataatatgctgggtgaaagatgtatgccttcttcctttaatagaattgatgataccctgagttgtg

SEQ ID NO: 3396 - DNA, 550 bp, Gossypium hirsutum
  unsure (1)..(550): unsure at all n locations; Clone ID: LIB3825-024-Q6-K6-B7
cgaaggacttcgtggtggataaggtggccaacataaagaagccggaggctagtgtctcggacgttgatctgaaacatgtgagccgtgagtgcgtcgagtatggcgctaaggtctctgtctccaacccctacagccattccatccccatttgtgagatctcttacaatttcagaagtgctggaagagggatagcatcagggacaataccagacccggggtcattgaaagccagcgacacaacgatgctggacgtgccagtgaaggtaccgtataacatcttagtaagcttggtaaaggatattggtgcagattgggacattgactatgaattggaattgggtctcaccattgatcttcctatcgtggggaacttcactatccctctctctcagaaaggagagatcaagcttcctactctcagtgacatcttttagatttatcattagtatgtcgctctcatactcataaaacttgtgtgttttcccttttactcatgctgtaacatgaagaatatatcgaactatactaggttgtttttcttttaannaaa

SEQ ID NO: 3397 - DNA, 583 bp, Gossypium hirsutum
  Clone ID: LIB3825-024-Q6-K6-B8
ccccgcgtccgccccgcgtccgccccgcgtccgcagaggttctgatagcttatgctgctacggaagttgaaaaaagtaaatcaaacgccatttacacgaaaagtctccactgttcttgagagtgcaagatggatgatctgatatcagtaaaatattaacaaattctttagcaattcagtattcaaaaaggtagtctgattaaagctttgatttaaatggctgaatcggtagcaaatcccacagttgtgggagcaagtacggtggaggaaacatcgcccgatttgttgaagaatacaccatctaacattgcaagattggaggatgtgatagagcattgtaagggccgtcggaagtatcttgcacagacaaggagtccttcagatgggggtgacgtccgctggtacttttacaaggttcctttagctgaaaatgagctagctgcctctattcctcgaactgagatagtggggaagagtgactattttcgttttgggatgagggattctcttgctatagaggcatctttcttgcagagagaagaagagctactatctagttggtggaaagaatatgctgaatgctg

SEQ ID NO: 3398 - DNA, 296 bp, Gossypium hirsutum
  Clone ID: LIB3825-024-Q6-K6-B9
gaaagtttaaaattttcaatacaaacaatttgtgggtaaacctgaatgctatcaagaggcttgtggaagctgatgcactcaagatggagatcattccaaacccgaaggaggtcaatggaatcaaggttcttcaactggaaattgcagctggtgcagcaattagggtataaaattgtaccaattatggttataatgtattaaaatgtaaaaagatcagtctaaccatgtgttttccttacgtgattaagttctttgatcatgctattggtatcaacgtacctcgatcgcgattcttt

SEQ ID NO: 3399 - DNA, 601 bp, Gossypium hirsutum
  Clone ID: LIB3825-024-Q6-K6-C10
gtttcttatgccattcttgtcgggaatggtggttcttctcatggctccccttgcgattcccgtgaagatgactttttgtccttcgaggatcaaccgacctgagatacgtaaccaacaagttgcatcttcagatgaaacacttcaaggtgaaggtaatgcagacaaaactgaaccactgttgaagtcatctgaatcgtctacatacctggaaagtttccgtgaaggtgatgaagcatcagaggtggccatgcttcttgccgtgggtgagggggcagttaagaagaagaggagacctaaaaggggggaggatttcaaatttactgaagccataatcaaagccgatttctggcttcttttcttggtttacttcaccggtgtcggttccggtgtgactgttctcaacaatctggctcagatagggattgcacaaggcatacacagcacgacaatactgttgtctcttttcagtttttgcaactttattggccgtctcggtgggggtgtggtatccgaacatttcgtcaggtcaaaaacgatttcccgtaccctttggatgacatgcactcaaatcatcatggtcatcacataccttctctttgca

SEQ ID NO: 3400 - DNA, 621 bp, Gossypium hirsutum
  unsure (1)..(621): unsure at all n locations; Clone ID: LIB3825-024-Q6-K6-C7
ccgggttctgacccacgcgttcgtcctgcttcttagnnagcctcatggttcaaagcctttgaatgggtggaggaatgtgaggtgtanncgatgatttggaagaattattaccattattatccttacccttgtngaagatgatgatgatgagggaagaagatgaagtttactacagaagttcgcctagtctccgcatcggcaatcggagatggggtgacaatggatatgtaagatcggggcgccgagaagccaggcctgttcaacgatcatccagcagttcccagaactctgatgcttcatcttcaagtgagcccaagaagaaagaagtttcgaaaagtataatggggcgacgggcaaagagggcactgaagcgtgaggctgctgataaggcagctgctgcagaacatcaagagcatttgatgaggctggggcggaagtgatttctttgacgcaatgtcttttttatggaacattgtagcagaggaattagggtggtttgataacccagattcgctgtatcatatcctggctttgtacagtatttccctttctttccttgtctgtggaacaaaacaatagtgagaactttaactagggatgaaaattggaatattttgatat

SEQ ID NO: 3401 - DNA, 137 bp, Gossypium hirsutum
  Clone ID: LIB3825-024-Q6-K6-C8
tcgttttttttaaaagtaaaaaagatggttaatttttgaacgagaggttataaacaaaatcatctcagataatggatcatagttttcctcagtttgcaaacacggattactgtcgtaaaactatttacatcggattt

SEQ ID NO: 3402 - DNA, 420 bp, Gossypium hirsutum
  unsure (1)..(420): unsure at all n locations; Clone ID: LIB3825-024-Q6-K6-C9
ggnaggatagaagcaaccaagcagagagattgtattctcaatatccttctgacgttttagtagatcataaccggatgcagcgtcatcaagatgttaaccctgcatctgcttctacatcagtttcatcccggtattcttttggtggtgcatctttgccctatcgctgagagctaaaagtcccttcatatcgctaacctggaacatgtttcaaaattagttgacttctttttctatactgtttgcgtgcatgttgctgaacttcaataagctactctgttaaatggttttatcatatttaattaggataaagcaattgcaaatcagtactttctgaagctatctggatatggttgcatgggaacctggttgaatattttgtttgacccttctttgccaacctacctattcagctctttgctt

SEQ ID NO: 3403 - DNA, 59 bp, Gossypium hirsutum
  Clone ID: LIB3825-024-Q6-K6-D10
taaaaaaaaaaaaaaaaaaaaaaaaaagagggaaaaaaaaaaaaaaaaaaaaaggggcg

SEQ ID NO: 3404 - DNA, 577 bp, Gossypium hirsutum
  Clone ID: LIB3825-024-Q6-K6-D11
tcgcaaggttaactcaacacgggggttggactacactatgcccccgatgaacgaaggtttgttttaaatgaaaaagtaaaatcgacccttattcttttgcttatcgaggtaagatgcttgaaacctttgaaacacttttgtactcctcggatagtgataaagatcgtgttgatgaacagtgagatcgaaacatgcttgactgtcctattttatttattgatgatctatctgttttgatggttgataaaaagattcttgtttttgataatgcatgtgtgagtgaatctatagaccgtcgattaatgcatggtatgattatgcaactctgtgaaccatgtaaatcttttcaaatacctacttgtgacgattatgtttaccatttgatttattactcgcaatttattcatggtttgtgggaacaatgtgagacgactgaatgccttaaaacatgtccatctttgtttcaaatatttgacgaggcagtggtgagtaaattagattgtttgcatggtaatctgaatctgtccattcacatgcgttatacctgttctgttatgcttatgattggactacaaac

SEQ ID NO: 3405 - DNA, 595 bp, Gossypium hirsutum
  unsure (1)..(595): unsure at all n locations; Clone ID: LIB3825-024-Q6-K6-D7
acgccgtccgcttctttanagttctggtctgctaagcactctcgcaactaaagactcagatccgttcggaattatttttccaggcttagaatggagacctttctattcacatctgagtcagtaaacgagggtcaccctgacaagctctgtgaccagatctctgatgcagtgcttgacgcctgcctcgctcaggaccctgacagcaaggttgcctgtgaaacatgcaccaagactaacatggtcatggtgtttggagagattaccaccaaggccaatgtagactacgagaagattgtccgtgacacatgccgctccattggatttgtttctgatgatgtgggtcttgatgctgacaactgcaaggtccttgttaatattgagcagcagagtcctgatattgcccagggtgtccatggccactttacaaagcgtcccgaagagattggagccggtgaccagggccacatgtttggttatgctactgatgaaacccctgaacttatgcccctaagccatgtcctcgcaactaagcttggggctcgtcttactgaggttaggaagaatgggacttgcccttggctaaggcctgatggta

SEQ ID NO: 3406 - DNA, 573 bp, Gossypium hirsutum
  unsure (1)..(573): unsure at all n locations; Clone ID: LIB3825-024-Q6-K6-D8
gnacgacgtgctcttgcctaaaactnggatctccacccaaattgggaatcctgaacgccaaaaacttattgatgagatacatgaatatatgttaagcaagacaccccctgtccctcaactcagcccttcacaggccttggaagagcaccctactaacagtgacggagaagctcaggctaatcagaaggattctgttaccatggttgctgggaatgggctaccgaacccagtagtaggtgacagggctgtcgaagaagagcctctggttctggccaatgctaatccaggtactgctgtaatgggagtgagggctgcaagagagattcctgccgaggaatcaagtaatcagccactgcaaaggccagagatgagggttcaaagatctgccgatgaccgcttgtttacatgggctgccgttggacttacgatagcaattttggttcttttgttcaagaagttcatgaaatccagcggacatggtgctgtttttatggatggttcgtagttctcgcctcaaggatctcggttgacctgtactcgctttgccgtattagttcaacaagaagtaagaaa

SEQ ID NO: 3407 - DNA, 590 bp, Gossypium hirsutum
  Clone ID: LIB3825-024-Q6-K6-D9
gtcaaattcttggattccacacccttctctctgcatccactgacaacaccctgaagtcatgggatctcaagaaaacttgctcggatggatcgaccaccaatacttgctgcttaacctttagtggccataaaaatgagaagaactttgtgggtttaactgtcttggatggatatatagcatgtggttcagaaacgaatgaggtctattgttattatagatctctgccaatgcccatcacttcgtataagttcgggtctgttgatcctatttctgggcatcaaaccggtgatgaaaatgggcagttcgtttcaagtgtctgttggagacaaaagtcaaacatgcttgttgctgccaactcaactggaagtatagaattactgaaactagtgtgatgaaaacctttccccaaaatcagttctgctcgataacctgtaattagcttggtcgtcctaaagatagattacatttactttgagaaacccatgatttggttcaattgcagaggctgaagggtaaaaatgagagcaaaaacttgtgcaccaactttgagtctgccttcaattgagtgtgcccatgcacgcagtcatatt

SEQ ID NO: 3408 - DNA, 606 bp, Gossypium hirsutum
  unsure (1)..(606): unsure at all n locations; Clone ID: LIB3825-024-Q6-K6-E11
gcgnaaacagactgaatatgctttgacatacagagaagtgattgctattcttatgcaaaggcatgttatggtagatgggaaggttaggactgataagacctaccctgcaggttttatggatgttgtgtcaattcccaagacaaatgaggacttccgtctcctttatgacactaaaggtcgtttccgccttcatgccatcactggtgatgagactaagaagggtattccatacctgaatacctacgatggacgcacaatccgttacccagaccctttgatcaaagccaacgacaccatcaagcttgacttagagagcaacaaaattgttgatttcatcaagtttgatgttgggaatgttgtcatggtcactggtggaaggaacaggggacgtgttggagtgattaagaacagggagaagcataagggtagcttcgagacaatccatgtacaagatgctgctggacacgagtttgcaactcgtctaggcaatgtcttcacaatcggtaaaggaacaaagccatggatttcgcttcccaagggcaagggtatcaagttgtcgatcattgaggaagcgaggaagaggcttgctgctcangctgctgctta

SEQ ID NO: 3409 - DNA, 589 bp, Gossypium hirsutum
  Clone ID: LIB3825-024-Q6-K6-E12
cttttgtccccgtagattcagggggaaacacacacaaaaaaaaaactagggttttaaagagaaagggagcaaaagtgagagagaagagagaagaggcggaaatttttaggattagggttctattatattgttctctagggtttagaaaatggtggccgacaaaggaaagaagatgaaagtagcagagaaagtagaggaagagaaccatgatcaaatagatggagacctcgtcatttccatcgagaagcttcaagagatccaagacgagcttgagaagatcaatgaagaggcaagtgagaaagtcttggaagtggagcagaaatacaatgaagttcgcaaaccggtctatgataagcggaatgaaatcatcaattcaattcctgatttctggttaacagctttcttgagccatcctgctcttggtgatcttttgactgaagaggatcagaagatattcaaatatattaactcacttgaagtggaggattttaaagatctgaaatctggatacactatcacatttaatttcaattccaatccgtactttgaaaatacaaggcttacgaagacctttaccttccttgatgat

SEQ ID NO: 3410 - DNA, 278 bp, Gossypium hirsutum
  unsure (1)..(278): unsure at all n locations; Clone ID: LIB3825-024-Q6-K6-E7
ttattttaaagatgcctcacgacactgttcggcaacatcatcaaaaatattatgacacatatcttcctttcatattggaggcttgcaatgatgagaatccagatgtgcgacaggcagcagtatatgggcttggtgtttgtgcagaatttggtggacctgtatttaagccacttgttggagaggctttatcaaggttaaatgctgtaattcaacatcctnaatgcttcgcaacctgaaatgttatggcatatgaataatgctgttctgctttgggaaaa

SEQ ID NO: 3411 - DNA, 601 bp, Gossypium hirsutum
  Clone ID: LIB3825-024-Q6-K6-E8
cctagccaacctttccgcagctcgctaatgggggcttacaagtacgtgtcggagctatggaggaagaagcaatcggatgtgatgaggtttttacagagggtgaggtgctgggaataccgtcagcatccagccattgttagggtcaaccaccctactcgtcctgataaggctcggcgcttgggttacaaggctaagcagggttatgtagtttatcgtgttcgagttagaaggggtggtcgaaagaggcctgttcccaaaggtattgtctatggtaagcccacaaaccagggtgttacccaattgaagttccagcgcagcaagcggtctgttgcagaggagcgagctggtcgaaaattaggaggtctcagagttgttaactcatactggatcaacgaggattctacttacaagtactttgaggttatccttgttgatgttgcacacaatgcgatccgcaacgacccgagaattaactggatctgcaatcccgttcacaagcacagggaacttcgaggactcacatctgcaggtaagaaaaacaggggtctgcatggaaagggtcacttgcaccacaagaatcggccgtctcgaagggctacct

SEQ ID NO: 3412 - DNA, 587 bp, Gossypium hirsutum
  unsure (1)..(587): unsure at all n locations; Clone ID: LIB3825-024-Q6-K6-F10
gcgaattcgcgttttgttagttcgtgagtgaacaggtaataaaaggaaaaaaacgatgggtgttttcacatttgtttgcaggagcaaaggcggtgagtggtctgccaagcagttggagggagagattgagagctctgctgcttccacttacgagctccagcggaaacttgtccaggccgccaccgcctgcgactcctctggtggtgtcacctcctctttctctgtcgttacccctaattctgccgttttccaggtggttattggaggtgctgtaggcggagccttcatcgggggtggaggagctgctgccgctccggctggaggcgctgccgctgccgctgaagctcctgcagctgaggagaaaaaggaagagaaagaggagagtgatgacgatatgggattctctctctttgattaagctcctttactgccttactgcctgtttagatcttagcaagntgttacattttcatttttcatttatgcgtgaattagactatcttgggtgacattgggctcttttcctagttaggagaagccatttttcangataaaattgacaatattatgagtatgttttttgacat

SEQ ID NO: 3413 - DNA, 590 bp, Gossypium hirsutum
  unsure (1)..(590): unsure at all n locations; Clone ID: LIB3825-024-Q6-K6-F11
tggnaaaagccctaatttgacagctctctcagtctctcattttgcctgaaaaccatgtcgaggagaaggttagggagcccaaggaggagaatactacccttgggccggctgtacgagacggcgaacatgttttcggggtggctcacatttttgcttcatttaatgacacatttattcatgtaacagatttgtctggaagggaaacaatggttcgcattacgggtggtatgaaggtgaaagctgatagggatgagtcttccccttatgccgccatgcttgcagcacaagatgtttctcaacgctgcaaggagttgggtattacagcccttcatataaagcttcgagctactggagggaacaaaaccaagacacctggtcctggtgcccagtcagcacttagagccctcgctcgttctggcatgaaaattggacgcatagaggatgtcacccccattcccaccgatagtactcgtagaaagggtggcagacgcggaagaaggctgtgattctttgcttcatatctgctactcaaccgctgctgctggcgggttgacattaagaattctctttgcttttgaaacaattttctg

SEQ ID NO: 3414 - DNA, 598 bp, Gossypium hirsutum
  unsure (1)..(598): unsure at all n locations; Clone ID: LIB3825-024-Q6-K6-F9
caataaagtgtcaaaaccagcagtaagtggattaccaacattagccaagttgacaaaagcaagtgcctccggaggaccctcaaaacaggggcagattgagaagaaagaaactcctcaagagcggctaaaaaggattatgaacagacagttaaacaagcaaattaagaaagacactgctgcggaaatggctaagaagcaagagcaggagcgccaaagactggaaaaacttgcagaaacaagccgtttaagtcgtcaaaggcatcgcagccgcagtaggagttacagtcgctctcctccaagaagatatcggcggagtagaagtccaagtaggagtaggagttctagaagatattattctcggtcacgatcacgatctaggtcccactcttactctcgttcacgttcacgctcaaattcccgttcacccagggtaagaagccgttcaaggtactgagaaggtgattgccataaatgttgcaggcaaagctatttgatatataatgtaaggcgatgctagtgtcaatatatatgcgaaatgttgtangggtgttttntgagnttgcggtatcnttcttaatcaatctattggactnttgca

SEQ ID NO: 3415 - DNA, 609 bp, Gossypium hirsutum
  Clone ID: LIB3825-024-Q6-K6-G10
cctcatgaagcgtgttatgcagacctggcttcctgcaagcagtgctctcctggaaatgatgatctttcacctaccctctcctagcgtggctcagaatatcgtgttgagaacttgtatgagggtcctcttgatgatgtctatgccaatgctattaggaactgtgatcctgagggtcctcttatgctttatgtttcaaagatgattcccgcttctgataagggtaggttctttgctttcggtcgtgtcttttctggcagagttgcaactggtttgaaggtcagaatcatgggtccaaactatgtacctggggagaagaaagacttgtatgtaaagagtgtacagagaactgtgatttggatgggaaagaagcaggagacagttgaggacgttccttgtggtaatacagttgccatggttggtttggatcagttcatcaccaagaatgctacattgaccaatgagaaggaagttgatgcccacccaattcgtgccatgaagttttctgtctcccctgttgtccgtgttgctgttcagtgcaaggttgcatcagatcttcccaaacttgttgaagggttgaagcgtttggccaagtctgatcctatggttgtc

SEQ ID NO: 3416 - DNA, 581 bp, Gossypium hirsutum
  Clone ID: LIB3825-024-Q6-K6-G11
gatccttctcagttgtctgatattcattcacatggggaatcctgcaagttccaatccaattcttataggagaagagcattctaatgagaaagagtgtgggcagaaaaagggagaaacaggggccggggtaaaggacgtgggcggactcaataccataataaccatcatagtagtcacggggaatcatgtaggcactcccccttcagcttcaagtaattgggtcagcaatgagcaagctactggagcaaagcagccccctggtcctcgtatgccagatggcacaagaggatttgctatgggtcgagggaagccagttgctgttaatactgcatgaatgaaatttatgctacataatcgtgcgactttgtgcaatgttataggagggtagggagatgtgtgttataagtggtgttggatggccgacaggttttccttctgtggctattagccattagtcgtagttggaaaaaaattatatgattggtgagtgggtcgagtgacccattttcctatgattttgtatgtgggtatggaagatgcaaaaacatatgcatgtcttatgttttttttagctttgattg

SEQ ID NO: 3417 - DNA, 578 bp, Gossypium hirsutum
  Clone ID: LIB3825-024-Q6-K6-G12
tcggcaactccactagcaagacttgcttgccccatttcaaacaactcctccgcaagctaaacgattctgcgtccacatccaaagttccccctgtttcttgcattgtttcggatggtgtcatgagcttcactcttgatgcagctaaagaactaggcgtccctgaagttctgttttggaccagaggcgcttgtggcttccttggttacgttcactatcaccaattaatggaaaagggttatacgcctctcaaagatgaaagctatttaaccaatgggtacttggataccgtcataaattggataccgacaatggaaggtatccgattgagggatctaccttcttttcttagaacaactgattcgaattttgttatgcttgattttattttctctgaaaccaaaagagctcagaaggcgtcagcaattatattgaacacgtttgatgatttggagcacgaatcattggacgcactcaactcaatgctacccccagtttactcagtgggtcctttgcatcttgttttgaatcacaatgtggataatagtgaattgaaacaaataggatcgaatctttggaaa

SEQ ID NO: 3418 - DNA, 585 bp, Gossypium hirsutum
  unsure (1)..(585): unsure at all n locations; Clone ID: LIB3825-024-Q6-K6-G8
cggccgcgtgggcggacgcgtggggngaaatgatatagtgcaaggaataaaaaactcatagtcgcttttctatggcaattaatgaggttcaatatgcttcaacttctaaagagtttgagatctcgctcccgaggaaaggagataactgatgcagatatcatgaattgggcaaaccggaaagtcaaaagtacaggaagaagtactcaagtagaaagctacaaggataaaagcctttccactggactgttcttcctcgaacttttaagtgctgtggagcctagagtggtcaactggaaccttgtaaccaagggtgaaagtgatgaggagaagaggttgaacgcaacatatatcataagtgtggcacgaaagcttgggtgttccattttcttgttgcctgaagacatcatggaggtgaaccagaaaatgatccttacattaacagccagcataatgtactggtgccttcaacacgcagcggaagagggtgaggtggctttatcccctgctaatggcaatggaagcacttacacatcagatacatctccggcaccatccattagcggtgaagacgaaaggtcctcgctg

SEQ ID NO: 3419 - DNA, 584 bp, Gossypium hirsutum
  Clone ID: LIB3825-024-Q6-K6-G9
gtcaatgtcgatctggatcgcttttcggcacgcgagtgcctcagccgcaaaagctgatacaactcgttgatggatctctaagcatgataaaagaacattgccctcactatctctggccacgatccccactgccagttagcaaagtctcccatcgtatgctgcatcaaaattaatcttcacaacctgatcaggtggctgtctcccatttactaacagctagagaaatttgtgggtttcttttatcaatctcatttagctctgatatgtagctattaatgaaactcactatttttttttttttccaaatttgctaacctccttatgcactctagcattcctatctccccaaattgcccataatgcacagtaaaaaatcctacactgggatggcaagttctgcgaaaatacccaggacattcacggaagagatggtccatattctctgttcctattccacaccggggacatattgtagtgttcgttacctctctttgtagcatgttaactcgtatatgtagataattccacgatattttccagattgtaatttttacttttgaaggtagattcagtagccatagttt

SEQ ID NO: 3420 - DNA, 605 bp, Gossypium hirsutum
  unsure (1)..(605): unsure at all n locations; Clone ID: LIB3825-024-Q6-K6-H10
cattaaccttgttngagatctcatggatgtgaaccagtggtcaactctgttttcgggaatagtttcgaaggcttcaactttggatgttctctcaacaggagtagcagggaattataatggagcccttcaagtgatgacagctgaatttcaagttctttcacctcttgttcccactcgtgagagttattatgtaagatactgcaaacagcatgccgagggaacttgggctgtggttgatgtttccttggatactatacgccccagtcccactgtgagatgcagaagaagaccatctggttgcctaattcaagaaatgcccaatggctactcaaaggttacatgggttgagcatgtagaagtggacgatggaggtgttcacaatctgtacaagcaactggtaagctccggccatgctttcggagcaagacgatgggtttctactttagatcgacagtgtgagaggcttgcaagtttaatggcttctaacattcccaccggcgatgttggggtgataacaaatcaagatgggagaaagagtatgctgaagctagctgagcgaatggtaatcagtttctgtggaggagttagtgcctctacagcacaca

SEQ ID NO: 3421 - DNA, 410 bp, Gossypium hirsutum
  unsure (1)..(410): unsure at all n locations; Clone ID: LIB3825-024-Q6-K6-H11
ggggggaagacaacccctgcaggggccgtatctttaacatctatcatcgatccttgcgagactttcacgggaagagctaaagatggccttggaaaactgncttcattttagctttttttgcaccactagancttttgttttggttgtcggggggcatcaancnncatccgctgagaatattcatttgccgacatttccagggttcaacaaacccaatctgtcattctcttcggcttttgctcattcattcaatggcagatgccaaaaatccaggctcatctgcaaagctagtgaagctgttgatcaagttgaagcggtgacagaagctatctggggagagcttgtgctggggagtgagaccccagtcttggtggagttctgggcaccatggtgcggaccttgccgcctga

SEQ ID NO: 3422 - DNA, 607 bp, Gossypium hirsutum
  unsure (1)..(607): unsure at all n locations; Clone ID: LIB3825-024-Q6-K6-H7
cgccaaacanaaatcttagatcatttctagacgcagcgaacgatggagaaagcgatcaaccgacagcaagttttgcttcaacaccttaatccttcagcttcttctttttcgtcgcaccaaaacaactctgccctctctgcatcggcttgtttagctggagatagcgctgcttatctaagaactaatgtatttggagatgatgtggtgatagtagcagcatataggaccgcgctttgcaaatccaagcgagggggtttcaaggatacttatcctgatgatttacttgcacctgttttaacggcagtgatagagaaaacaaatttgaatcctagtgaagttggggatattgttgtgggaacggtattggcaccaggatctcaacgagctagcgaatgtcggatggctgcattctatgctggcttccctgaaactgtgcctgttagaactgtgaacaggcaatgctcatccgggcttcaggcagttgctgatgtagccgcagcgataaaagcagggttttatgaaattggcattggagctgggttggaatctatgactactaatccaatggcatgggaaggttcagttaacccaagggtgaagcaaatgg

SEQ ID NO: 3423 - DNA, 597 bp, Gossypium hirsutum
  Clone ID: LIB3825-024-Q6-K6-H8
tcgcagcaagcaaatatacccctgaaaaccctttcactaaatattgaagatgcagtcaatgaaggatgctgctgcctctgctaaggccggcatggagaaggccaaggcctccatgcaggaaaaggtggaccaaatgaagacaagagaccctaatgagaaagagatggcgagggaaaggaaagaagagagacaagaagatgcagagctgaggaaacaagaggcccgccatcataacgccacagctggccatgctggtggtggtggtattggtggcactggctacaccacagctgggtacaacataggcgacactggtggctatggcggtaccggtggacatgacaaccgtgggtaccccaccgcaggtagtgggtatgatacaggcaggcaagatgacctcagcagtatggggtttggcggagatacagagggtgcttacggtacaacggggaaccaagacttcccaaatgcggcgtctaacaatgctgggactagaaggaacacccgcggaggtacccaggatgatccttattatcgatcctattaaatgaaaggagcgagtttttgtgctctgctactgccttgagtctgtgtttg

SEQ ID NO: 3424 - DNA, 63 bp, Gossypium hirsutum
  unsure (1)..(63): unsure at all n locations; Clone ID: LIB3825-025-Q6-K6-A10
ctggcccgggnatatcctgttcttttctcggccctcaaatccagtttactgtgtggggggggg

SEQ ID NO: 3425 - DNA, 598 bp, Gossypium hirsutum
  Clone ID: LIB3825-025-Q6-K6-A11
cggccgcgtgggaaaaaacccatttttcctcttcatcatcgtcgagtctccgaaccctagacccccttctttttccggcaagaaaaaaaaaatgcagcagcaagggctaaatccccaacagcaagctatgatgcaacaagctttataccatcatcccagtctcttcgctggtcctcagatagagcctatcttgagtggaaatcttcctcctaactttgattcagctacttgccgcagtgtgtacgtcggaaatattcatccacaggtatcggaaccgcttctacaagaagttttcttgagtactggtcctattgaaggttgcaaacttattaaaaaggataagtcatcctatggtttcgtgcactactttgatcgcggatcagctgcacttgctattgtgactcttaacggaaggcatctatttgggcaacctattaaagttaattgggcatatgctagcagtcagagggaggacacgtcgactcatcacaacatttttgtcggtgatctcagccccgaagttacagatgctacattatttgcatgcttttctgtgtattccagttgttcggatgcaagggtcatgtgggatcaaaaa

SEQ ID NO: 3426 - DNA, 594 bp, Gossypium hirsutum
  unsure (1)..(594): unsure at all n locations; Clone ID: LIB3825-025-Q6-K6-A12
ggnaaaaccgaagccattttcaatgtgtgaagaagccattacatgaacctctccctgttttaaatcctcatctcgaagtttccgccatgaaagctgcttccttcaacactcccaattttccatccattattacaaaaagaatatcagcacaaccatgtccaacttgattcgcaagaaccttttttcttaaactccctcagagcttccaaaacaatccctttttagattgtcggctaattcatttgcttttttctttttcctccgtttcttcttcttccaacgcattcatcgagtcaactgccaacgacacgtatttgggttggaacaaagctctggagattgagattgatggtggtggacaagctaaggctctggagttcagagaaaacgggcgatggtcgcgaaaggtgctttattttccatacttttagcagcactggctggctcgtccgatctgtggatttgcctcttgtgatgtactacgattcaagaaacctgctgggcataaggatttgttctatattgatgacaaagatgtggagtttaaagaagttcttgagtcacttttgccaaaagcaccactgatacatctgt

SEQ ID NO: 3427 - DNA, 526 bp, Gossypium hirsutum
  unsure (1)..(526): unsure at all n locations; Clone ID: LIB3825-025-Q6-K6-A7
ttttcatcgacggggnagcctgcaactggttgtctagtggattttggcctttatttttaccacaattatgccactttccgcaacactcaaggtcaaggctttggacccttcttttatcttcctaagatggagaattcaagggaagcaaagatatggaatagtgtgtttgagaaggcagaaaagatggcaggcatagagaaaggaagcataagagcaacagttttaatcgaaacactaccagcagtcttccaaatggatgaaatcctttatgagctcagggatcactctgttggtctcaactgtggccgatgggattatattttcagttacgttaagaccttccaaggtcacccggaccggttgttgccggatcggggtcaagtcggtatgacccaacacttcatgaggagttactccgatctcctcatccgaacctgccatcgacgtggcgtccatgccatgggcgggatggcagcccaaattcccattagggatgatccatcggcaaatgaagcagcctttgaac

SEQ ID NO: 3428 - DNA, 601 bp, Gossypium hirsutum
  Clone ID: LIB3825-025-Q6-K6-A8
acagaacatcaaggctctaatcttacacccatcagcacacctaaagacacccctcagcctgctgctttgagacgtaacttctctagatcagactcaacagcaagtgaaggtgcacaaaaggaacgagttgttcccccttctcaaaatgctcctaccacgtccctcagaattgatcattttctgcgcccttttaccttgaaagctgtacaagaacttctagggaaaactgggactgtaactagcttctggatggaccacattaagacccattgctatgttacatattcatctgtagaagaagcaatagagacacgaaatgctgtttacaaccttcaatggccacctaatggtggccgtctattggtggccgactttgttgatccccaggaagttaaaactcggcttgatgctccaccacagactccaactactcctgggacttctggttctactgctcctcaagctcaacctacttctcatccccagccatctttgcgtcagcaggtttctaggcagcagtttccaccaccttctgcacttcctccaccaccacctttgcctaaccctccaccagttagagaacgtctccctcttccgccgc

SEQ ID NO: 3429 - DNA, 583 bp, Gossypium hirsutum
  Clone ID: LIB3825-025-Q6-K6-A9
gggaaacatgaaagcagagccgaatgactgtatgctagctaagctactgtgggaggtattgttcttcagaacagcttctgcagaagctaataataacgttatatattatataaattttatacatcctttgtaccctacgactccatatataagcaagctaaaataaatatggctcgctctgtgccttcctttaagttccttggggctgatgtttttgatgctctgtatgtctccatatcaaggagaggttactcaggtgcaccgccggcggcagtgacggctagctttggtaggcctggagcgatggggaaagtggaacgaacatatgcgatgaaagagtcgttgtcgcctgagacaaggccttattcttcagcttgggcgcctgaccctgttacggggtattaccggccggagaactgtggggctgagatcgatgcggcggatctccgggagatgatgttgaatcacagggctagatcacagtagaaacttgccaccgcatgtgatcaccgtatcagagcagagccagaatgttttgcagatgtttgggtgcctttgtattttgttttggttttgagttcaa

SEQ ID NO: 3430 - DNA, 609 bp, Gossypium hirsutum
  Clone ID: LIB3825-025-Q6-K6-B10
atgccccatattttcccctcatttggccgatgctcatccccccaaacaacaagctacacgttcaagcctggggaatgacttttcagctcttgaaatctcctcttggcttcgattttaacaaagtaaaaaggaaatctatggcgtattcgccaggtaagaacctctttcctttctttttatttgctttcaaatataaaaatgataaacccaaaagaacgaaaaccaggaaaaaaaatagagtatccagatatttaaatcgaaaatcacctttgaattttggtggccttttggtgtatttcagtatgcgtaaatatttgcaggtacactcggcggcttttatagccggaaaaataaaaatttaaaaatctattttttctttttgctatttttccattatattttgctgcttctcgtgtattccttttgctgtgtttgtttttccttctcgtagtttctgttgacgtggaggcgtacggagaagaaatcactcgtggggaggccgttcgtgagaggagcaatctggtgacctggtgtttccagaggcttcccctgcacgggccattcggaccaattctgggattgcgcttagcggagtgctattttatttgg

SEQ ID NO: 3431 - DNA, 597 bp, Gossypium hirsutum
  Clone ID: LIB3825-025-Q6-K6-B12
aattgaagtgttttcttccaagttcttacctttattttcattcaagtgataatttctcttcaatttagattatacccattttgtcttcagcttactggagcagtatttattcctttgattcttcaggtctaccaagagactttctttctttatttgaatgtttgatataagtgtacttatttccttatacagagtgatataaatttttatgattactaaatgcttgcttgacaagatcttgtttattataatttttttcaattttgaaatgtgtattgtaattaaacaatatgcttttccagttagttgacaaagaaaaggagcttctaagatgtaacttcattttcaaaatttggcatgctcttgatgatgtcaaagttgggcctttcttttggctgatttacagttgtgctctcgggtttgtgttgacgtgcccaagttgccaactaaagagggagtggaaagattttctgaataggaaagctttctccctcactaacagtgttcaaatcaaagcttggtttaataggcagtggcacaggcaactagaacaaaatcataaaaattctgacccaataattagactctcgatttatt

SEQ ID NO: 3432 - DNA, 603 bp, Gossypium hirsutum
  Clone ID: LIB3825-025-Q6-K6-B7
gaaagggacctctcactcccaatcaccatttcaaacccttctttcatcaatctggttctcatggccattccatctctagtcaccgttgaacatatctagaaacacaactcaccagctttgagacaggcgaaggcttctgcatcaaaggccgagccaaccatcacgtgcagacgagacttggagaccaaaacttcccctttcacatttcgtaccacaatccccgaagcctacttaaaaccctggcagtcaaacggggcatcaaaattgattttaaggagctgccctaaggtgttttccaattctcattctcaccaacaaaggtttttattcctgtttaaccaaaacgatcacaagccacaaccagaaaaaggtctttggcgctttgtgtatcttccaaatacccaagcacttcgtaccgagaacacactcgagggctcaccgcgtcatattaccatgtcaatatgctcatccatcacaagtggaatctacaggattctatctgcatcatccgtctcgaaggttgcttccgaggattttgccactactgctgctctcaaaatagatacagaagacaaattgaagttaggaggatcggagctcaaa

SEQ ID NO: 3433 - DNA, 583 bp, Gossypium hirsutum
  unsure (1)..(583): unsure at all n locations; Clone ID: LIB3825-025-Q6-K6-B8
agnaccttacttttagcgccatctttggtgccaaaatctcgtgtctttgtgctagggtttgaagttaacaattcttcagaaagaaaaattaaagcagcaatgaatccggttcacttccaacccgcgccgcctccaccttggttcccaatgttaccgccggaacctccgaattcgagtacattttgggagaccagaaatgtgcgtgatcgccttagagaattgcaagataccctcaatcttgccaacgccgtgcaaaaggagttggaaatactgacgatgataaaagatgggtcgatggacccttctgtttctgagttcttgaagtatctagaagataggaggattgatttggaaactcaagagctactgtctttggaagcggcgaatgcattgatgtcaaagctaagagctcagttagagccctttagatatgttgcagatgaagggatcccgtgggaggagaaatcagcagtagctagactgaccaataaaattaagaagtctaaaaggaataacctttggaggaaaagaaagcggaaacgaattgcagaattgcttgcaaaggagcatgaacaatttgatc

SEQ ID NO: 3434 - DNA, 563 bp, Gossypium hirsutum
  Clone ID: LIB3825-025-Q6-K6-B9
agtttcaaaatttctggaacaaagcagaaatggttaccttaataactcatctgggcataggagtgcaaatgagcagctcccaggaaatgtgagctttgtgaagctggcggacatgaatgaggaggaatggaatcttttcctagagaagttccaggagttgctctacccgggatttgaaaaacgaaaatcggttactttaggtcagaagcagatacagaggctcggtacttcgtgccagttttgatatcgagatatctgtatatcgataccagatagtcgaaatgagttttaggattgtttgcacttggttctgaaggactgttaggagagatttgagtaatatgggtttggccccgggaattgttgtagtttgggagcagcattacgaggaatagatgtaaatattctttggcttcatttcagctaagtagaattggttttatttcttcttttaaggtctttgattttgttttttgttttttgtttcctttttctttcacttgaatcaccttcttatggaccttgtttgataaataatatataaaaagggagagcatttatgt

SEQ ID NO: 3435 - DNA, 376 bp, Gossypium hirsutum
  unsure (1)..(376): unsure at all n locations; Clone ID: LIB3825-025-Q6-K6-C10
ggcgaaagagaagctaaacagggtgacgatgcggccaaaagcaaagctgaagagaccatagaatctgcaaaggataccatagcttcgggctacgagtcggcgaagcagaaatcacaagaactgaaagataactatgtgaacggtgggggacaagggcgaggacgtgagcgagatgaggagctgtgagttgctgcaatgctgagtggtggtgatgagattaagatttgagagtagatgagtttttatatgctttgtttcggtggttgtataaatatgtttggttttgaaacttcggtagacaataatggatggttanctttccgtnnnaaaaaaaaaaaaaaaaaaaaaaaaaaaaaaaggaagaaaaaaataaaag

SEQ ID NO: 3436 - DNA, 593 bp, Gossypium hirsutum
  Clone ID: LIB3825-025-Q6-K6-C12
cgcaaggttatcacggtggatacttagcttttgcaagctcgagataaaattatttccatcgagaggatttatcagtacagccaaattccaagtgaagctcctcctgttattgaaaattcccgcccgccgtcctcatggcccgaatgtggaacaattgagttgcttgatttaaaggttcgctatggggaaaatcttcctgtagtgcttcacggagtaacatgtgcatttcctggtggcaaaaagatcggaattgttgggcgtactggaagtggtaaatctacgttgatccaagcattattccgattgattgagccagctggtgggagaatcattatagacaacattgatatttcaacaattgggctccatgacctacgtagccgccttagtatcataccccaagatcctacattatttgaaggaactattagaggcaatcttgatcctctcgaagagcattcggatcatgaaatttgggaggctctcgataagtctcagcttggagatattgttcgtgagaaagagcaaaggcttgatacaccagttttggaaaacggagataactggagcgtggggcagcggcaacttgtttc

SEQ ID NO: 3437 - DNA, 84 bp, Gossypium hirsutum
  Clone ID: LIB3825-025-Q6-K6-C7
actctacgttctgtgaggaggttttgtaggaataccggcatccagataacgggggttacaagcaaccgggtgcccgctgtttgc

SEQ ID NO: 3438 - DNA, 430 bp, Gossypium hirsutum
  Clone ID: LIB3825-025-Q6-K6-C8
ctgactaccagttgatcgacatttctgaggatggatttgtgagtttgctgactgacagtggagacactaaggatgatctgaggctcccaactgatgagaacctgttgaaacagatcaaggatggttttgctgaggggaaagacctggttgtgtctgttatgtctgcaatgggggaagagcagatctgtgctctcaaagacattggtcctaagtagtttcaaatttaagtagtttcaaattcatttattgcaaatcttagatggaaccataaaagactttggtagttctaaatgcggttttgatgttttatttgggtttggatagaaaaaagagaataacaatataactagtttcttgttgtgctatggattactgttttgcttttccttttcaataatttttattatctcgtctttatttttgtgttggt

SEQ ID NO: 3439 - DNA, 589 bp, Gossypium hirsutum
  Clone ID: LIB3825-025-Q6-K6-C9
cggccgcgtgggcttttgtcttgacttgagtaaagccggctgtcgtatcgtggctgccgcgcgccgcgtcgatcgccttaaatccctctgtgatgaaatcaatcacctcacctttcctttttccggaccccagcctagtggccctcgagctttcgctgtcgagctcgacgtatgtgctgacggatccaccatacagagctctgtgaaagcggcctgggatgcctttgggaggatcgatgctttaataaataacgctggcgttagaggtaatgtgaaggatcctttggaattgactgaggaggaatggaatcaaaacatcagaaccaatctaacagggtcttggttggtgtcaaaatatgtttgcatgctcatgcgtgatgcaaaacaaggaggatctgtaatcaatatatcttccattgctggtcttaatcgtgggcaactacctggaggtttggcttatgcttcctcaaaagcaggcctaaacaccatgacaaagaccatggccatggaactggggatgcataaaatccgagtgaactcaatatcacctgggcttttcaaatctgagatcacagaaggccttctgaag

SEQ ID NO: 3440 - DNA, 580 bp, Gossypium hirsutum
  unsure (1)..(580): unsure at all n locations; Clone ID: LIB3825-025-Q6-K6-D10
gttttaatagatgcttttctgtagataccttatttgtgtgtgcccaaaaccaggaccctcgagattattttgattctcaacaagctaatgcacttagaagttctggagatgcacttggtgaaattgaacaaataaaatgcggtttgagcacccaggaggtgtatggttctttaagggagtccatctcatcgattaaagctatggggttgaaggagcctattgtcaaacctgaagttgctcatcaagtttttgatgctttgaccaatagtatctccaacaccaaatatcatattgggnaaaaatcctcaagagagtgttctggacagacttccgaggaaaactaaggaggagctattgcatcattggacatcaatccttgaactactcaaacatttttgggcatcatatcctatcaccaccacttacctctatgtgaaggtaaacagattaaaggatgccatgtcaaatatctatccacagctagaggctctagatgctgctattcaacattatgaagcaagcatgcagaagagatccgcacaaagtggagagagaccaaacggatatgtgtagggaaaca

SEQ ID NO: 3441 - DNA, 598 bp, Gossypium hirsutum
  Clone ID: LIB3825-025-Q6-K6-D12
aatctcttcttctttttgcatccactgattttgcgttctttgttttgtggaatcaaagcttcgccgttgaccatgattctccggtcagtattggtcttggttctgttggtgggggttttattccgtgcatcgcaatctttgcgtttcgatctgcaatcgggacaaactaaatgcatcgccgaagacatcaagagcaattcaatgactgtcggaaagtaccacgttgttaaacctaacgaagatcatcctttgcccgattctcacaagctcaccgtcagggtaacgtcttcgtatgggaataattttcactcggcagaaaaggtggagaatgggcagtttgcattcacggcgacggagcaaggtgattacatggcttgcttttgggcgccggagcattcgccgccgatcacggtcaccgttgatttcgattggaggactggagtccacaccaaggactggactaacgttgccaagaaaggccaagtcgatgcgatggaacttgagctgaagaatctgtatgataccattcaatccattcatgaggaaatgttttatttgcgtgagagagaagaagaaatgcaggaactgaacaaagcta

SEQ ID NO: 3442 - DNA, 570 bp, Gossypium hirsutum
  unsure (1)..(570): unsure at all n locations; Clone ID: LIB3825-025-Q6-K6-D7
gngagacagctcgacattgctgagacaaatggtttgagtgagactgcctattttgacatagttttgggtcgtcctcttccaccagcactcattccatatctacgactggtggcacttgggggaacagatgctttcctcttggaatctatttttagaaacacaatttggggccaccttgatttacctgtaagtcgtgccaatgaagagctcatatgccgggttgtccgtgatgcctgcaaatctgctctctctggctatcataccaccattgaagaggatgaaaagctgatggaagacgaaaatcttgattcgaggctgaaaattgctgtaggaatcagggcaggagaaaagaaggtgctccagcaaattgatgagatatttaaaggacgggaatcagaattggatgagttggaatattaccaggaaagaaggctcaaagatcttggtctagttggagagcaaggtgaaatcatcttctgggagaccaactaggtcatgtcaaagacttgcaatatatatcaaggtccatgtgttaaagatcgaaggaaattcccatcacgactgtccaaa

SEQ ID NO: 3443 - DNA, 221 bp, Gossypium hirsutum
  unsure (1)..(221): unsure at all n locations; Clone ID: LIB3825-025-Q6-K6-D8
ctaaatagttaatctttngaggtnntatttgtatctgaacaaaactgtatgagcagttaaagttagagactacacatatctataatcatttcaggtaggtctaggtgtttaccaatcattattagggtattgagtgtttccgaactaaaaattgggcttgccccaatttctctggatatgctatttttatgtttttttaaatgatgatgatagtatttagt

SEQ ID NO: 3444 - DNA, 599 bp, Gossypium hirsutum
  unsure (1)..(599): unsure at all n locations; Clone ID: LIB3825-025-Q6-K6-D9
gtttttgttaaatttgttaaaagatttgatgatttttaggatttgaattaaattgtgaaggggataaaagaacaatgggggtggattattataatgtattgaaggtggagaagaatgcaacagatgatgatctaaagaaacatacaggaaattggcaatgaaatggcatcctgacaagaaccctaatgataaaaaagaagcagaaaccaaattcaagcagatctctgaagcctatgaggtcttgagtgaccctcaaaagcgagcagtttatgatcagtatggtgaagaaggattgaaagacatgccaccaccaggcagcagcaggccgcctttcggaaagggcaccggtgggccaaatgggtttaatcctaggaatgcagaggacatcttcgcagagttctttggaagtagtcctttcgggttggggtcatcaggacctactaggtctgctagattccactctgatggagcaaagtttggaggatttaattcgactgacaacattttntcgaagtcacaatgaagcaactgcacccaggaaacctcccccagttgagagtaaattgccttgcagccttgaggagctgtacactggatca

SEQ ID NO: 3445 - DNA, 524 bp, Gossypium hirsutum
  Clone ID: LIB3825-025-Q6-K6-E10
gaagctttttgctggagaactaaccataatgctgaaaagagcggcgatctgaattctataaccaaccatggattgaagatgctgtaatccgttacctgaatcgcaagtctatgggaggggattctcttggaagcacttgagcagggctcttttgaattgttgactttttcataccaatctcgaggcttctaatttctaactcctgtcctgcatattattgcttattggttcggggaacatcaaatgccacaagcaaagaactgtcccattgagcactttggatcgaatgaaaatttccaccaagttatctgaattcaccacggtgttcaccacccctatcagcaaacaccagtttgattcactaatccctctagaatatttactttgctattccgctttcgagcgtttgagatcgatgcttataaaaggactatgcagttgtaatgtgagctgatttgtttgcttttaggtgtaggtcaaacaggagtattgtatccttttagttcactaatcattagttcatt

SEQ ID NO: 3446 - DNA, 600 bp, Gossypium hirsutum
  Clone ID: LIB3825-025-Q6-K6-E11
cggttggctaatacaatgtgtaactcactcaagggaggcctattcagggtcgagtgtttgaaggtaaagagccaccccagttcattgcactattccaacccatggttgtccttaagggtggtttaagcactggctacaagaagagtatagcagacaaaggcttgacagatgaaacctataccgcagagagtgttgctctaattcagatttcaggaacagctgtacacaataataaaacattgcaagttgatgcggtggcaacatcattgaactcaactgagtgcttcctcttgcaatctggatcctcaatttttacttggcatggaaatcaaagcacttatgaacagcagcaattagctgcaaaagttgctgagtttttgaagcctggagttgttcttaaatatgctaaagaaggaacagagagcaatgcgttctggtctgcacttggaggaaaacaaagttataccagcaaaaaagcatctacagagactgtcagggatccccacttgttcactttctcttttaataaaggaaagtttgaggttgaggaagtttacaatttctctcaggacgatctcttgacagaagatattttgatac

SEQ ID NO: 3447 - DNA, 595 bp, Gossypium hirsutum
  Clone ID: LIB3825-025-Q6-K6-E12
cggccgcgtgggttccttttcccctcgctctcttttccttgccaccaaaaaacatctttctgttcaattcaatcctcctttttctattcaaccataatgtcttgcttcattagcaaatacgccgatgagttggctaaaaacgctgcttacattggcacccctggaaagggtatccttgctgctgatgaatccaccggcaccatcggcaagcgtctttcaagcattaatgtagtaaatattgaagaaaacaggcgtgctctccgtgagctcctcttcactgctccaggagctcttcagtacctcagtggtgttattctcttcgaggaaaccctttatcaaaaaaccgcttcgggcaagcccttcgttgatgttttgaaggaaggtggtgtcctccctggcatcaaggtcgacaagggtaccgttgagcttaacggaaccaaccgcgagactttcacccagggtctggatggccttgcacagcgatgccagaagtactatgaagctggtgctcgctttgctaaatggcgtgctgtccttaagatcagtgctaatgagccaaccgagcttgcaatccaagaaaatgccaacgggctag

SEQ ID NO: 3448 - DNA, 590 bp, Gossypium hirsutum
  Clone ID: LIB3825-025-Q6-K6-E8
attctttttccgcaaacggtctccgaatcctcccaaaagctccaccgcacctcctccgccgcatccaccatcactacctctcccaatgccgttacttcctccttcaatgatccctacaccgctgacgtcttactccgcctcttcgttgatctttccccattcgattccgacgccccatccgactcttcccgccaatcagacatccagatctatctccactccgccgtcatccgccgcgccaaatatttcgcggcgattttatccgactgttggcaacaccgaacgaacgctgacgccaagagcaacaatggcgccgaaggttccaggagcaatgataacaataataacctagttcatttaaaccttgccgttgtcgatgatccgaactctatatccatccatttaaccgtcctccaactgctttacacgagcgatttcgcgaccgtcatcgactcagcttccaccgcactcgagatcctccccgtggctctcgaattactcttcgaggattgcgtgaaatcatgcttgagattcctggaagccgtgccgtggagcgaggaggaggagaagagagtgctgagtttgatccc

SEQ ID NO: 3449 - DNA, 579 bp, Gossypium hirsutum
  Clone ID: LIB3825-025-Q6-K6-F10
tattcagatcaggtacgtattaaccgcttctttatgattttctcccaaaacaattgtttttattttgatataatttagggcttatgctcgaattctttttaggaccaaatcacgtgtgccccctccttagatcagatcagtataacgagtttcccttttgctaaaattccgatatgagttcgtggcttatgcttgtaactgctgaaatctatgtatggttttatggtgctttctcatctttttttttttaccaagaatactaaatttgtgtttttgatgaaatttatttgctatgttacccccagggtgaccggttagtgtttgcagaaaatgattttgcttgaaaggtaggaagttccgaactgaattgatctagtatacgaaatatctgatcaagatttgacctttccgtcagctaagtttcatgtctgatcttgacatccaaattcctactgcctttgatccgtttgctgatgcaaatgctgaggactctggtgctggtaccaaggagtacgtgtacattcgtatccaacaacggaatggtaggaaaagcttgactactgtccaagggttgaagaa

SEQ ID NO: 3450 - DNA, 598 bp, Gossypium hirsutum
  Clone ID: LIB3825-025-Q6-K6-F12
cggaaaaacaaacactacgctggtgagataaccttctctttgtacacccaaacttccaccaaccgccaccataataacctctacaatttcttcagttgcacttctcaagctaggccgttttctgtgatgggtactcctttgcctcgtgaatggctcggccttcaacaattccccgctgctacacaaacgaaattgttcgagttgttgggaaaattgaagcaagagaatgtcaacactttgactatcgttgttatgggcaaaggcggtgtagggaagtcttccactatcaattctctcattggagagcaagttgttcgagttactgctttccagtccgaggggctgagacccgtgatggtttcacgctcatgggctgggtttacattgaatgtaattgatacgcctggactcgtggaggctggatatgtcaatcaccaagctcttgagttgatcaaagggtttcttttgaataagaccatagatgttctactttatgttgaccgcctagatgtatatagagtggacaacttggataagcagatcattagggctatcaccaacagttttggaaaagaaatttggcggaaaagtttgcttg

SEQ ID NO: 3451 - DNA, 578 bp, Gossypium hirsutum
  Clone ID: LIB3825-025-Q6-K6-F7
cttttcccttatcatcatcataatcatgccgatcaacgatcaaaacagacccatggctcaaaagctctacgactcagctccgtcgtctcgccaggtggctaagttcttgaccgcctccacgttgggcgcaacgctgcttttcttgtctgggttaaccttgaccggtacggtcattgccttgataatagctacgccgttgatggttatcttcagcccggttctagtcccggccgggataaccatattcttggtgacgatggggttcttgttttcgggcgggtgtggggtggcggcgttaacagcgttgtcgtggatatacaattacgtgcaagggaaacacccaccaggagctgatcagctcgattacgcaagaaacaagctggcaagtacggctagggatatgacagagaaggctaaggaatatggacagtatgtgcagcataaagcgcaagaggtgactcaagggcaagcatcttgaatttagggttttaagaatgagggcgggtgtgtttgggtggtttgagatgttttatgctttgtttggttggtgtttctctttacatgcattcacagatcat

SEQ ID NO: 3452 - DNA, 139 bp, Gossypium hirsutum
  unsure (1)..(139): unsure at all n locations; Clone ID: LIB3825-025-Q6-K6-F8
gcgtgactagnacatgctaaagctgaaagcagtagcagcggaggtttgctaatctgatatcatttttcttttttatctttttctcttttgccttggaagatgaagtttgtgatgaatacaagtcgtttttcttgcgctt

SEQ ID NO: 3453 - DNA, 594 bp, Gossypium hirsutum
  Clone ID: LIB3825-025-Q6-K6-F9
gtaattttcttcctttctgccaagctgccgcttgggagacaggatgaagaccattctttcttccgagacgatggacatccccgatgggattagcatcaaaataaaagccaaggttatcgaagttgagggtcccaggggtaagctcatccgcgacttcaagcacctcaacctcgacttccatctcattaaggacgaggagaccggcaagcgtaagctcaggcttgaggcttggttcggctccaggaagactagcgccgccatccgcaccgctctcagccacgtcgagaacctcatcaccggcgtcaccaagggataccgttacaaaatgaggttcgtctatgctcactttcccatcaacgcctccatcactaatgccaacaagtccatcgagatccgtaatttccttggcgagaagaaggtgcgtaaggtggatatgttggaaggggtttccatagttcgatctgagaaggtgaaggatgagattgttttggatggtaatgatattgaacttgtgtcacgatcagcagctttaataaatcagaaatgccatgtgaagaacaaggatattagaaagttccttgatggtatctatgt

SEQ ID NO: 3454 - DNA, 562 bp, Gossypium hirsutum
  unsure (1)..(562): unsure at all n locations; Clone ID: LIB3825-025-Q6-K6-G10
gcgttcggcccaatgnactcanaccgaacacatatttgagaccagagtgaaaggaacagttggttaccttgatcctgagtacatngaaaacctatcaactcacaaccaagagtgatgtgtactctttcgggattttacttattgaaattctcactggccgccgtcccgtggagctaaggaggccgggtgaagagcgtgtgacacctagatgggccttcaacaagtataatgaaggacatgtggtggaattggtggatccaaggatggaagtggtagatgcagagatactaacgaagatgtttgcattggcatttcaatgtgcagcacctgttagaagtgaccgtccggagatgaaatctgtgggagaacagttatgggcaattagggctgactatgttaaaacctcaagccgagggtaactctacattatctaaaactagttctcacctcacctctacccttggctcaaatcttggttttctttttctttcttttactgctactgtttgctgttgttctttcttttggagcataccgtataatatccaaatttggtgttaac

SEQ ID NO: 3455 - DNA, 598 bp, Gossypium hirsutum
  Clone ID: LIB3825-025-Q6-K6-G12
tttttcaaaacagacatccatctttgtgctgtggtgggctttgaaaattagttcaagctggcgattgaaaataaagaaaccactgttcgtgaaatcaagcccaagaacagaagaataatgggagctggtgggcctgatgaagaagataatatgtggccgccatggttgaaacctttggggggggagcagttctttgttcagtgtaaacatcatgttgattttcacaagagtgaatgcaatatgttctgcttagattgcgttaatggcgctctctgttctttctgcttagcgtatcacaaggatcatcgttatatccagataaggaggtcttcataccacgatgtgataagagtatctgagatacaaaaatacctagacatatctggagtccaaacttatataatcaacagtgctaagatcgtttttcttaatgaaaggccacaacccaggcctggaaaaggtgttaccaacacttgtgaggtctgtgatcgcagccttgtcgattccttccgtttctgctctcttggctgcaagattgttggaacatcaaagaatttccacaagaagaaaaggcagctaggtatgaacatgggagcat

SEQ ID NO: 3456 - DNA, 589 bp, Gossypium hirsutum
  Clone ID: LIB3825-025-Q6-K6-G7
cggccgcgtgggcggacgcgtgggcggacgcgtgggaaacacttctccagtgaccaaaaaagcttcattgtctcttctatcgaaacccctggctgctcttaagctagtttgtgctctagtgttgtgcatgttggtggttgagcccattgccacaaccaccataacatgcggcgatgtgacaagcaaagtggccggttgcttatcatacttgcagaacggagggaacgtgccgaaggcttgctgcgacgggatccggtccctgaacaacatggctcgaaccacccctgaccgccaaaccgtgtgtgggtgcttgcaagctgccgctaaggctgtcaaaattaaaggcaacttggctgagaccctcccagccaaatgtagtgtcaacatcccttacaagatcagcacttccactaactgcaaaaatgtgaagtgagatggatgaagagagggttttgcagcagcttgcaggagataaaatatatgattaaaaagaagaagaagaagaagaatgaataaggattttgggatggaattttcaaaatccaaaattagtctccactttagtgtagtgaggctttgtttattttgc

SEQ ID NO: 3457 - DNA, 585 bp, Gossypium hirsutum
  unsure (1)..(585): unsure at all n locations; Clone ID: LIB3825-025-Q6-K6-G8
agnagatccagatgctggtggcatggacgacgagttattagctgttttgggttacaaagttcggtcatcagatatggcggatgtagctcaaaaattggaaatgttggagaaagttatgggtactgctcaagaagatgggatttcacagcttggtgatactgttcattttaatccttcagatctatccggttgggttcaaaatttgttgatcgagttcaacggtccaacaacaaccccagatcccaatttcaacgatgattctgagtacgatcttagagcaataccaggggtcgccgcttacccaccggtgaaatcggatccgggtctagaaaatacccggaaacgagctaaaactgagtcctcctcatcatcatcttcaacaactactcgtcctgttgtgttgattgactcacaagaagctggggttcgactcgttcatacattaatggcttgtgctgaagctgttcaacaagataatcttaaactagctgatgcattagtgaaacatattgggttacttgcttcatcacaaactggtgctatgagaaaagttgctacttattttgctgaagctntagctcgaag

SEQ ID NO: 3458 - DNA, 618 bp, Gossypium hirsutum
  Clone ID: LIB3825-025-Q6-K6-H10
ggaagtttcccgcattcgcgttggacttatcagtcacaatagcgttaaaggaatattcagtttcgtagcctaaagataaagaaatttgtgaaattatcaaattatttccgatttccgatttctgatttgggaatttcttgtttttgatttctgattgtgaatcagagatgggtttaggcttatcagtcttaatagctatgaaggcaacggcatggatgttattatatctcttcttcagtagatttgggttcacagtgttggcaataccattattgtatgcatcattgatttcatggcttgtttcaattgcttctcacccttcaatcgatcttcccatgcttttgggcaaaaacccagatgggactttcccaattttgtccactatcatgttctccccatatctgtattttgctagagctttttcaatggcgagaaggttccttgctggtgaagaaccttactctcaaatatgtgagggtttatatgttggtggttggcctgcttcacctcgtttattgccgcctggtaaccctgccattattgattgcacatctgaattcccaagaataaaggagttcaagggtcattcatatttatgtgttcctacttgggacacaa

SEQ ID NO: 3459 - DNA, 604 bp, Gossypium hirsutum
  Clone ID: LIB3825-025-Q6-K6-H11
tcggcatcgttgttttagaaccccggtggacgggctgctggccggtatgcgttgcagtggcatggtacatataggtgttttgccaaccttgttcaaatggaaatattaagttggtgtatcactattaaaaggaaatgctttcgtatgaagacattttgtagatatgtgatacttttatcaaatgcaaaccttgttgaactcaatggtgtgctgagctttaagctcaaagttttttcaaacaatacttccattatttcaaggagaaggaagctataattttgactgttcttcagattttaatgggagggggtggatcattttcagctggtggccctgggaaaggaatgtattcaagactatatgtccgtgtgttgaatgagtatccacaagtttattcattttcagcattcaacagcatttacaatcatactggcatatttggaatacaagctaccactggttctgattttgcaccaactgccattgatgtagctgtcaaggagcttattgctgttgcaacacctggacaagttgaccaaatacaactagaccgtgctaaaaagtcaaccaagtctgcaattttgatgaatttggaatctagaat

SEQ ID NO: 3460 - DNA, 586 bp, Gossypium hirsutum
  Clone ID: LIB3825-025-Q6-K6-H9
ggtatccaagtacagatgcaattctgcctggttgagtgacttagaggacattgatggatgtcttgtgatctcatgaatttctcattgactaggttaggtgaagatagatatatcaggtaatagcatcagagagaatttacactcattattccttgttttcacattgatatgaaactggggtcatcactcacccagactgtatttctattaagaggcacaaccttttatttttccgccacaaaaagctacaacttaaatcctatggaaagcccaaaagatcatttttcatagaagaacattttggtttgacttatatacatgttttttcctgtggttaattcagcgtatgttcataatgcttttctaagtcctgagtattttattatcattgagctctttaagtccatgcaaagtttcttttcttgagttgggctgtgggctgtatttcataccacttttacttttaaatatcctaatatcttctatattgaaaattaaaaagatgtagtaatgtgtctcatagcatcctttattgaaatttagtctttgtatttgcttaatataggatcataaattataccaagca

SEQ ID NO: 3461 - DNA, 356 bp, Gossypium hirsutum
  unsure (1)..(356): unsure at all n locations; Clone ID: LIB3825-026-Q6-K6-A11
ctcatcccttgttttccttctaagccagaacgagagatgtagtcattttntgaaaaatggcaccaaaagctgaaaaaagccagccgagaagaagcctgcggaggagaagaaagccgtagctgagaaagccccggcagagaagaagcctaaggctgggaaaaagcttcccaaggaaggcggggggggggcgggagacaagaagaagaagagagttaagaagagcgtcgagacctacaagatctacatcttcaaggtcctgaagcaagttcaccctgacatcgggatctctagcaaagctgtggggatcatgaacagtttcatcaatggtttcttcgtgaagcttgctgatgaagcct

SEQ ID NO: 3462 - DNA, 586 bp, Gossypium hirsutum
  unsure (1)..(586): unsure at all n locations; Clone ID: LIB3825-026-Q6-K6-A12
cgattattcccgnaaactgtcggtagcattatcagcttctcatcaaactttcatagccaatgctttctcatttaatcgaaaacccaaaacaaagcttcccaattctcctgctttcattacttgcaggttccactcagacgaccacgacgattcctcctggagaaatgagaaacagttagcaaagctagcaatggtgacactggcagccggggtattgactctgggttcggtgggtgatgcatcagccgccaaaaccggtggtagagttggcggccaagcattccggtcggcggctcctcgctcagcaccaagagccaacaacaattccaggaccaacatttacattaatccacgggttgccccacctctagtcggaggctacggatacggttacggcgtgccgttctacggtggttggggctggtcaccgttctcattctttgctcccggccctagcgttgcggtcggcgtcggaggcggattcgatacactcctcttgtttatgtttttgggtgcagttgcagctgttgtaaggagattctttggatcaagaaatgaagatgaagatgaatattagtgaaataaa

SEQ ID NO: 3463 - DNA, 591 bp, Gossypium hirsutum
  Clone ID: LIB3825-026-Q6-K6-A7
tttacttgcatagggaatttccacttcaaggaagttactagcaggttcattctgaagagacaccaattgcatcaccattaacccctgttttggcaatagatagtggaaagactgaagagaagaaagttgttcccaatcggacaaaagttcaagcagtgttaaagaaaataaaacagagtcctaagaaggtcaacttggttgctgcattagttcgtggcatgcgtgttgaggatgcattattacagttgcaagtgacagtaaagcgtgctgctaaaactgtctatcaggttattcattcagctcgagcaaatgctacccataatcatggattggacccagaccgtctgctagttgctgaggcatttgttgggaagggattatttttgaaaagagtttcatatcatggtaaagggcgatctggaattaaagagagacccgagtgccgactaactgttgtagtgagggaaatgacccctgaagaggaggctgagttagcccgactgagggtaagcaaatttcgcaagcttactaagcgcgaaaaacgacttgtgcctcataaacctatttgaaacctcttctatttggaaaccg

SEQ ID NO: 3464 - DNA, 615 bp, Gossypium hirsutum
  Clone ID: LIB3825-026-Q6-K6-A8
atattcctctacttcatatgctaccagcaactgatattttgtagtaaatgcttttatgatttctggttgtctttatatggttatgtttactgcacaggaatttcttaggaatccagacagatatatacggcttggtgctcgtcctcctcgaggagttctcctggtgagtagatcgtaagaaaactatacttcatgatgatgttgacgcttttattctgtagaaatcatgccttatttgcaaaacattattaatcttcagaaattaggttgtacttcccggttctgtctcttattctttagaataccttctctgcagaaaactttggttctcttaatgcttcctactagtgtgtcttgttatgataagctcaataagtttatacttggaattcaacatgttcaatgtctccacacagtgcttagatgctacgagcatgtgatggtttctttgcatcagtaccttcttatataaaaatggaaataactttggtttttatggttttatttgtgttataggtaggtcttcctgggacaggtaagactcttctagcaaaagctgtggccggtgaagcagaagttcccttcataagttgttctgccagtgagtttgtagag

SEQ ID NO: 3465 - DNA, 313 bp, Gossypium hirsutum
  unsure (1)..(313): unsure at all n locations; Clone ID: LIB3825-026-Q6-K6-B10
gngatttttggcagtgcacttggattatttggagtgattgtaggtataatcatgtcagctcaagcaacatggcctgcaaagtcagtgtaattttccgctcttagttacaacttagctctgtgagactgcaatctgttgaatgtattagttactgaaaatggcgcctacatatgtaaccatgtatttagaaacatgcttggacatgctgtcttttgttccggtaatgatttgttgaattaggaataaaatttcttattaaaaaaaaaaaaaaaaaaaaaaaaaaaaaaaaaaaaaaaaaaaaaaaaaaaataaa

SEQ ID NO: 3466 - DNA, 580 bp, Gossypium hirsutum
  Clone ID: LIB3825-026-Q6-K6-B11
aaagacaaccctcttggctgtcggcaaattgcttcttctggggccttagagaccttgtcttcattgattgcaagccacttcccttcattctgctcatatttacctcgcatcaatgaaatggacgaaacttcaagtgacatacctcttactgattcagagttggatttcctcgtagcagtacttggtctgcttgtaaacctagtggagaaagatgaatacaacagatcacagcttgcagcagcttctgtttgtttaccaaattcaaaagggtcaacagaggagagtcgcatctctgtgattccattgctatgtgccatctttcttgcaaaccttggagaagaggatgcagctggcgaagttctgtcttggaataatgaagcggcattgctacaagaagagaaagaagctgagaagatgattttagaagcctacgcagctttactacttgcatttctttctaccgaaagtaagcgcacacgaaatgctattgctgattgtctcccaaatcgcagtctatcaattttggttccagtgttggagagatttgtggcgtttcattttacattaaacatgatttctc

SEQ ID NO: 3467 - DNA, 558 bp, Gossypium hirsutum
  Clone ID: LIB3825-026-Q6-K6-B7
catcaatttgctttgaagacatgttggctatttttcacaaggcatttgctaatccaccagaggagctgaatagtccagcttctcataaatctactaagaagcctaaacagcctgaagaaaccctaaatgatttcctatctcatcaccctcacaacactttctccatgagctttggcaacgctgctgttttggcttatgtccgccatgaacgtgctgcttcagttcatcagaggttgttttgtgggtttgatgacatatactgccttttcttagggagcttgaacaatctatttatgctgaatagacagtatggtctttccaaagggagcaatgaggcgatgtttgtgattgaagcatataggacactaagggataggggtccataccctgctgatcaggttgttaaggatcttgaaggaagctttgcctttgtgatctatgacagcaagactggaaccgtgtttgctgcactggggtctgatggtggagtgaagctgttttgggggattgcagctgatggctctgtggtcatatcttgtgatttagatgtcattaaag

SEQ ID NO: 3468 - DNA, 614 bp, Gossypium hirsutum
  Clone ID: LIB3825-026-Q6-K6-B8
ggagggccttattaaggcttggagctttaggcttactgcttgaaacagcaaggcgagctttcgctgtggatgccatggagccagctgaaggcattcttttgattgtagagagtcttacattggaagcaaatgagagtgacaatattagtatctcacaaagtgttctcactgtcactagtgaggaaactggcactggagaccaagccaagaaaatagttcttatgttcctggagaggctgtgtcatccttcagggcaaaagaaatcaaacaaacaacagaggaacaccgagatggtcgcaagaatcttaccctacttaacttatggtgaacctgctgctatggaagcacttattcagcattttaacccatacttgcaagactggggagaattcgatcgattgcagaaacagcatcaagacaatcctaaagatgaaagcattgctaagcaagcagccaagcagaggttcacggttgaaaattttgttctggtttcagaatctctaaaaactagttcctgtggggagagattgaaggatattatcctcgagaagggcattacaggtgtagctgtcagacatttgggtgagagttttgcaattgcagggcaggctgga

SEQ ID NO: 3469 - DNA, 591 bp, Gossypium hirsutum
  Clone ID: LIB3825-026-Q6-K6-B9
ggcgatggtcggtactttaaccggaacttacagatattatcaaaattgctgctggaaatggagttggaaaaatcttggttggcagggaaggtattctgtctacaccagctgtttctgctgtcattcgaaagaggaaggccaatggtggatttattatgagtgcaagccataatccaggaggccccgaatacgactggggtatcaagtttaattacaacagtggccaacctgcacctgaatccatcactgacaagatatatgggaatactctttctatttccaagattaaaatggctgagattcctgatgttgacctttctcgccttggagttaccaagtacggaaacttcactgtcgaggttatagacccggtttccgactatttggaattaatggagagtgtgttcgatttccagatgatcaaaaatcttctctcaagatcagacttcagttttgcatttgatgccatgcatgctgttactggtgcttatgcaaaacccatcttcgtggacaagcttggggctcgcccggattctatatcgaatggagtgcctcttgaggattttggacatggtcatcctgatcctaatc

SEQ ID NO: 3470 - DNA, 530 bp, Gossypium hirsutum
  unsure (1)..(530): unsure at all n locations; Clone ID: LIB3825-026-Q6-K6-C10
attccaccgaagcaggaaaaaaggaaaaaaaaaactctaagaaacctctttaacatttcccctccggtcattttatcgccgccgctgctgttgtcgctgctgccaccacaatcaccgtcacctctatttttataaggaaatagccttaacctcttattttccacattttaccctctcttatttctccaaatttacccaagaaatgcaatttctagggttagggttttggggaactcaatgaaaaaaagaaagaaaagcaacatgngaagatttcaaggattcggaatcgaaatcggtgagtgagacggtgaacgggtcacaccaattcacgatcaagggttactcgttggcgaaagggatgggtgccgggaaatgtatacaaagcgatatttttacggttggaggctacgattgggcgatttatttttaccccgaccgtaaaaatccggaggatagtgcgatgtatgtttcggttttcattgccttggctagcgaaggtacggatgttcgagcgcttttcgagctaccct

SEQ ID NO: 3471 - DNA, 338 bp, Gossypium hirsutum
  Clone ID: LIB3825-026-Q6-K6-C11
ggggtggggatatccgatgcatattactgtaaggagtgtactcagcaagagaaagatcgcgatggttgtcccaaaattgttaatcttgggagtgctaaaacggacttattctatgaacgtaaaaaatatggttttaagaaaagatgattgatgtttacctgttgtgattaggtcttgctggtggttatgttgcagggatgtcggattttagaatatgttggtatcacagagagacattaggtctttagaattatgttattttaagaactatagttgattgtaccaggggcctaatttatttcaacagaatctggtatggaaatatctggttgcattct

SEQ ID NO: 3472 - DNA, 481 bp, Gossypium hirsutum
  Clone ID: LIB3825-026-Q6-K6-C12
gtatggaccgacatccggctagtgggattgggattggtcggccgccgcccaaatcgggacgtggagggaagtacacgtgggaaggacctgatgacatgatggagaacgagctgtcgccggtgcctgcagccattgatgagaaggatcctaactacgtggatgaggaagaagaagggaggattttgaggggtgaaaagagcgacgtgagtgggtttgtggtgggggaagtggaagtggctaaaacagctcaggaccgtgatggggtagctcgagttgaggttgacgctcacttgatgcctgattaaactactatttctatcaagctttcattcatttgaccttgcttttctgtttgtttgatcaaaatatagaggatactctgtattctacgggcttaaattgtaaatgtatcttcctatcttaattaacctacctttcagtttcaatcttaaaaaaaaaaaacaaaaaaaaaaaaggacaa

SEQ ID NO: 3473 - DNA, 589 bp, Gossypium hirsutum
  Clone ID: LIB3825-026-Q6-K6-C7
tgaaacagagagaggccgccgttgtcgttcagcagcagaacagcaaaagaagcaaagcaatggcaaggatcaaggttcatgagttgcgacagaaatcaaaaaccgagcttttagctcagttgaaagatctcaaagctgaacttgctcttcttcgcgttgctaaagttaccggtggtgcacctaacaagctttctaagataaaggtggtgaggctgtccattgctcaagttctgactgtaatctcacagaagcagaagtctgcattgagggaggcatacaagaataagaaattcttgcctcttgatctccgtcccaagaagacccgagccatccgcagaaggcttaccaatcaccaggcatctttgaagaccgaaagggagaagaagaaggaaatgtacttcccaatgaggaagtatgccattaaggtgtagggcaggatctcacattctatttaaaccgagttgtgattttgtttcgattttcatgtttggaaactcttttttgccccctgttaaaaaccaagattctggtctttttggttgaatggttatttatggatattttgctttttttgatgaggagtgattga

SEQ ID NO: 3474 - DNA, 600 bp, Gossypium hirsutum
  Clone ID: LIB3825-026-Q6-K6-C8
cggacgcgtgggtttgccttttcgctatcgtctttgcctatcaactccacggcgcagatccgaggagtctctatttttcaatccaaacaacccctctaaacactctcttcttttattgctcctactcttccagtcatggcaggcttggcaccagaaggatcccaatttgatgctcgtcaatatgaccagaaaatgactgagctgctccagactgatggagatgactttttcacaagttatgatgaagtttatgacagttttgatgcaatgggacttcaagagaaccttctgaggggtatctatgcatatggttttgagaagccttctgccattcagcaaagaggaattgtaccattttgcaagggtcttgatgtgattcaacaggcacaatccggaactgggaaaacagcgactttctgctctggaattctacagcaacttgactatgctgtagtccaatgccaggctctggttttggcacccacaagggagttggcacaacagattgagaaagtcatgcgagcacttggtgattaccttggtgttaaggtccatgcttgtgttggtgggacaagtgttcgtgaggatcagcgcattctt

SEQ ID NO: 3475 - DNA, 574 bp, Gossypium hirsutum
  unsure (1)..(574): unsure at all n locations; Clone ID: LIB3825-026-Q6-K6-D12
ccctgntgggccggcttagtcgcacacatcaatactggaaaccaanaagagaaacatggagggacagtctccaactcagtcattggtgtaacttgcttggttgcttctcctgctgaacgagagcgtgggggctcatccaaactggtagaagcaatggaaagagaggtacgagtggtgagtgaagcttggttacttgacagcattgagaagcaagaagcacagccattagaagcttatgacatagttacagatcttgctgttgatggcaaaggaattccatgggataaacaagttcctgaagaacatgcaatcgaatcactttcagctgaactcaagttgtatggaaaaagaggagtctacaaggataccagattgcaagagcaaggtggccaaatatttgaggaagatgggatattatacaactgtgtcttttcgctttgcgaccaaggaggagccattaatgagtattgcattatgcaactggtcaaagtaccagatagtaacctccacttgtactacaagaaagggagagtaggggatgatcctaatgcccaggagcggctcgaggaatgga

SEQ ID NO: 3476 - DNA, 581 bp, Gossypium hirsutum
  unsure (1)..(581): unsure at all n locations; Clone ID: LIB3825-026-Q6-K6-D7
cggccgcgtggngaaaaattgtctttttggtgctttgaagttgcaaagtagaaaaagggaattccatcagaaataagggatgtttggatacagagaaaaagaaattccttcataattccttcccctgctgaagacgagaagaatttgagagccaagcaattctctcaagaaggaattcgtgccggtgtcaaggcggctgcggtcgccgccgttgtcagcgccgtacctaccttgattgcagtacgtaagattccttgggcaaaggcaaacctcaaccatactgctcaagctcttatcatcagtggagcatcaattgcggcctacttcattaccgtagataaaactgttttggaaagtgctaggagaaattctcgagcacagttcgacaaaactgtttgaatgctagaattgaaggtattcagtggcgaaggttctcaggacaagtatgatacatgtcaataagtttaaagctgttgtatgccatgcatccactttttttttctttttttttttctgtggaattttatcatcaattaagcagtttaaatgtatttaggtgatgttttatgtttcagtttata

SEQ ID NO: 3477 - DNA, 595 bp, Gossypium hirsutum
  Clone ID: LIB3825-026-Q6-K6-E11
accctctcctcgtctctcccgcctgaccatcccttatcctttcaatttcatcttcttcttaaaccctctccttcagtttcctccagcttccctttcttcaatcaatgaaaatgtcttctataaccaaatccatatccatggcggactcatgttgcctcgtttgtatcccttcagtcttcaccacttgttccaaatccccatccctcctctcctttcccccaaaaccaatcaatcttttcctctcatcatcccattcttcaacctctttgaccctcaaaaccagaacccatttctcttctctagtttcctttgttgcccaaacatcagattgggctcaacaaggggaagaaaatgacaccaccatcaccatcgatgaggatgaaagtgaaactgaagaaggggaatcgaaatgggaaaacgatgaaagtgatggagctgaagcaatttggggaactgaaggtgaggatgctggctttgaagaacaaagtggtgattcagaagaagagggttctgaaccttctgaggaagctaaattgtttggtgggaaattgcctttcgatgttgatagtcaaagtctagctatgctttttgagaa

SEQ ID NO: 3478 - DNA, 595 bp, Gossypium hirsutum
  Clone ID: LIB3825-026-Q6-K6-E12
cagtctggaaaaccacctagtgtttctagtagaactattcctcagaaggacagcttatcaagcattgtgggttctcaacctgatgatgctctgactgcagatgtatcaaaattcaaggattctgctagcggtgctgagaatatatcaggagagcataacttggagttgagatcttcaagttctgatggagctgcagagggccaggttttattttcttgtgctgctctctcatcagatgcaccccctgagaaagcttccacatcaaatgctaaatccgaatctatcagtaaagggaaacttgctccagtttctgggaagttggctaaagttgaggaggaaatgaaaattgtatctgaagttgttgaacctcgtagatctaatcggaagattcagccaacatctagactcttggaaggtatacaaagctcattgatcatctcaaaagttccagtttcacatgacaaaggtcagaaaggtcaaagcaggagtactagaggaagtaaccaaggttgagaagcgaaaaaggagctgttttagaacctgggaacccagtcctttgagaaattcaagatttattggatgaacaacaggcaac

SEQ ID NO: 3479 - DNA, 611 bp, Gossypium hirsutum
  Clone ID: LIB3825-026-Q6-K6-E7
gtagccgccgcctgcgtctctctcttcatctctctgaaccaaaagtctttagcttttcgcttcgagagagaccatgttggtttaccaggatctcatctccggtgacgagcttctttctgactcattcccctacaaggaaatcgagaatgggatgctgtgggaagttgagggaaagtgggttgtgcaaggagctgtcgatgttgacattggtgccaatccttcagccgaaggtgctgatgaggatgaaggtgttgatgaccaagctgtgaaggttgttgacattgttgacactttcaggcttcaggagcaaccccctttcgacaagaagcagtttgtcgtgttcatcaagaagttcatcaagaacttgacaccaaaactggatgcggaaaagcaagagtccttcaagaaaaacattgagggagcaaccaagtttttgctttcaaaattgaaggaccttcaatttttcgtaggagagagcatgcatgatgatggatgcttggtgtttgcttactacaaggatggtgctgttgacccacatttttgtactttgcatatgcattgaaggaggtcaagtgctgaggtttgaagcaaagaaaaaaaagggttgctga

SEQ ID NO: 3480 - DNA, 590 bp, Gossypium hirsutum
  unsure (1)..(590): unsure at all n locations; Clone ID: LIB3825-026-Q6-K6-E9
cttgaagacagtgtggaatctctcgttgagcttanacatgctgaagaaccttactggatcagctatggctggagctctgggtggatttaacgctcacgccagtaacatcgttgctgcaatctacatagctaccggccaagatccggctcaaaacgtcgagagctcgcattgcatcacgatgatggaagctgttaatgatggcaaggatctccacatctctgtcacaatgccttccatcgaggttgggactgttggtggtggaactcagcttgcatctcaatcagcctgtttgaacttacttggagtgaagggtgcaagcaaagagacaccgggagcaaactctaggacgctggcaaccattgtagcgtctgctgttcttgccggggagctgtcgcttatgtctgcaatttcagcaggacaactagttaggagccatatgaagtacaataggtcaagtaaggatgtctccaaggcaacgtaatgataacctgatatttgggataaaagtggcgatctcccatggtagaaacatactaaggagacaaatccctttgtaataagttaaagcactatgtaagtttctttattta

SEQ ID NO: 3481 - DNA, 504 bp, Gossypium hirsutum
  Clone ID: LIB3825-026-Q6-K6-F10
tctctctctaaaattcattcaaaacaagtcttttttttttaaactaagttcaagctggcgatcgaaaatcaagaatccactgtccgtgaaatcaagcctaagaacagaagaatcatggtggtggacctgatgaagaagacaacaataacgagaagtggccgccatggttgaaacctttattgaaagaacaattctttgttcaatgcaagcttcatattgagtctcataagagtgaatgcaatatgtattgcttggattgtatgaatggttctctttgttctttttgccttgcttatcacagggatcataattacattcagataaggagatcttcgtaccatgatgtaataagggtatctgagatacaaaaatatttggacatatctggtgttcaaacttatgtaataaacagtgctaaggtggtcttcctttatgaaaggcctcctccaaggcctggtcaaagtgttctcaattcttgtgaagtctgtgatctgtaccttgttg

SEQ ID NO: 3482 - DNA, 602 bp, Gossypium hirsutum
  Clone ID: LIB3825-026-Q6-K6-F11
cccttagtaacggcgagcgaaccgggaaagcccagcttgagaatcggtcgccatcggcgtccgaattgtagtctggagaagcgtcctcagcgacggaccgggcccaagtcccctggaaggggcgccggagagggtgagagccccgtcgtgcccggaccctgtcgcaccaagaggcgctgtctacgagtcgggttgtttgggaatgcagccctaatcgggcggtaaattccgtccaaggctaaatacgggcgagagaccgatagcgaacaagtaccgcgagggaaagatgaaaaggactttgaaaagagagtcaaagagtgcttgaaattgtcgggagggaagcggatgggggccggcgatgcgccccggtcggatgtggaacggcgagagccggtccgccgatcggctcggggcgtggaccgacgcgggtcgtggcggcggcccaagcccgggcctttgatacgcccgtggagacgtcgtcgcctcgatcgtgggattcagcacgcgccgcctcggcgtgcttcggcacctgcgtgctccgggcgtcggcctgcgggctccccattcggcccgtcttgaaacacggaccaaggagtctgaca

SEQ ID NO: 3483 - DNA, 600 bp, Gossypium hirsutum
  unsure (1)..(600): unsure at all n locations; Clone ID: LIB3825-026-Q6-K6-F12
tcgcagnactttagctattgtntttgttgtagaaaaactgtgagttattgttgttctgtaacttgaaatggaatagtagtttcggagtaggaaatctgatttgtggttgatcggattgtcaacgggatttgttttaatgtttatcaactctatttctaatgatgcgttggaaattcagactccaggccaatgttaagaaatggggaaactggagattggattggtacatttgaagggcataaaggtgcaatatggagctcctgcctggataccaaagcattacgtgcagcatctgcctcggctgacttttctgcgtatgtaattttattcagctatgaaatcacttttttgggggaatgattttttctgtgcgttcttatacattcccaattactcctctgcatccgtttttgttctccatttggatttattttctatcaagcactcccctggaaaaaatggaccgcatccttgtgggctactggctctttgttcctcattagctcgttctgagaagaagtattgttgatgagactccaaaactattctctagtgggcaagctttaggatggtgtatggtcatgaatcttagcttgggaa

SEQ ID NO: 3484 - DNA, 605 bp, Gossypium hirsutum
  Clone ID: LIB3825-026-Q6-K6-F7
atgatttccactggattagcatcatcttcagctgcctctgaatttggtgacggtgaacaactgtctaagggctctcagactgttctatctgtcaaagataaagaagcagaaattgacagataaagaagcagaaattgacaatcttgttggacttgctgaagacctggaaaagaagcttgaagatctagagcagctgatctccgacccaacgttgattattgcagaaatccagggaatggcatctggcaaggcaaggggcggtgagaataatgcatctcctgctgcagtgaactcttcacatatgtctcctgctaacagcaatgtagatcattttgactctccaactgtttccactgctcacacaaatggggccgcggctgtcacacatcttggcatcgtaggaagaggagtgaagtgtgttttgatgagtgcaggtgccgtagaattgagctcaataaagaaacctgcaatccacccatgtttctggaactgatagatcaccagcatcaccctaataataaataaatttagtggtttacaccctttgtcttgttactagtgttattacctgatattgtttaccatatcgaagagctgttgtagca

SEQ ID NO: 3485 - DNA, 597 bp, Gossypium hirsutum
  Clone ID: LIB3825-026-Q6-K6-F8
agagataaggaagggaaaaaatggtgggtaaggttggggatgatgatgatttagtggagctgagcattataatcgttcatgaaggtccttcttcatctcgattcctcgatgcttatcccataaggtaacctttaaagatcccttcatttctcttctagaaaatttgaaatttctctctctttttttaattttgctttgtcaaagttgggtcttctttttttttttttaattcttaacatgtaattttttttatgtaaagcaaaaataagaattgggttttttgtttttttatggaatttatgcttttgattcagtttctgtagattttagggttctttctttagcagctttttagggaaatttattgtgttagaatttagggtaaaattatttatgttttacaatttgtttgttatattgttaataagttgggttttattgaatttgatttaaaaaaaaataagttgttgatttctgtgggtttttctggggattgttgttttatgttttcttttataaaattctagggttttgattgagggaaaaatcatgtggtgattgataatttattgaattttttggggggttttttgggga

SEQ ID NO: 3486 - DNA, 594 bp, Gossypium hirsutum
  Clone ID: LIB3825-026-Q6-K6-G11
gcaactctcagtatgatttcttttttctatgtttgttttggattaaatttatatatttcttaatgatgttgtaaatcttccatttttatcatgataagagaatgttgaatagatagtgcattgctttaaaattgtgataagaggcatatcagtgactccatggcaatagaggggttaacactaaattgcaatcatgaaaacaacaaaaacatgagaaacaaaagatgttgttggttgctaacttttcttttctcttgtttctggttattgttgttgatgatgcattttaactccttttcctgacttgttaggctatggtcaattcttggggcaagcctttctatgacgcctttagtgagtctaagagcgtgcagctatatgaggttctatatttttgctatttaacttttcattcctttttggcatgtgtggtgaatcaactattctcagtttctgttgctagaaagaacttatagttacatgcatctgtagtcaataataataacaaacaaataaaatagcgaacaagaaaagaagataaccatgctactatgataaatcatattacttgggacacaaatatgtctgaaccat

SEQ ID NO: 3487 - DNA, 251 bp, Gossypium hirsutum
  Clone ID: LIB3825-026-Q6-K6-G12
ggcgccgtcaccgttgccagacgctggagctggattctcagtcggagtttctaccgccgccgttggcttctctttgatcgtttcccttcttgctttcttcaagcattaaattgaagggcttgtttggctctcctctctgtgtggctttcttttatatatatgtatgtgtgtatgtatggatgataccattctttcttcgttaaatttattgtaatgaagttgattcttttgaataaaatgcttccgttatg

SEQ ID NO: 3488 - DNA, 589 bp, Gossypium hirsutum
  Clone ID: LIB3825-026-Q6-K6-G7
taaggtttgagcacttgccttctcttcagtcgttcaaagtcaaatacaagcagttcttggaaaattgtggacccgaaatgaatgttaatgcaccggacccaagaaaacggattgatgagcgtgctttggagaaagaagaggaagactattttaatgaggagagtgatgaagaggatacaacatctggatctcatcctgagaaagtgcaatctcagcctgttttatccaatggagttgctgtcagctgcccatcgtcatgccctagatctggtgggcttgttgactatgatgatgacgatgaagactacagaccacctccaaggaaacagactgaaaactcggaggatgatgaaggaagcatggagtcccttggcttgaagcgtaagttgactcctaaggaaaaggaacctgggctagctaagaagcagcgtttgggtaaaagctctaaaccaagagatagtgtatttgcggctttgtgttcaaccctaagccaggcagtgctgcctagtaagaaaaccgcaaatgccatgcatttatctactcaatcaggtgaggagaatcatattgaaaaggaatctggcagtcccag

SEQ ID NO: 3489 - DNA, 585 bp, Gossypium hirsutum
  Clone ID: LIB3825-026-Q6-K6-G9
cggacacatgagtgcttggcgcagtggctgtagacatgctaaaaatctgtgatagggtatagtatgtgaagacgtcttaatcccatgatgacaagttcattcaagttaatatccagcttatacgcccattgaaagtacctgtttcttgacaatcaagactcagaggaacaccacttgctatgtgcttgcctttgcttctgaattgactgaagtgtttgattgcttgtatacttacgattcagattataggctatccccatcactggaagactggaagtcggctgagactttatgcacctgcttgaaacctgtatgcgatgcaaacatgttccttacaactacaactctccctaccgaaattacattcttttatgaagtgtgcgaaaatacattgtggacttgggtcactccatcacttgctaggatgctttcatcagaaaccttgcatctatcaatgcatgatgaagatagaccagtactggatagactgtaaactggttatggcattggatgaggtcatggatcctcattcaaaatggaaacttgacgagttcaggcccacaaaattatgtggcgaatatgctc

SEQ ID NO: 3490 - DNA, 590 bp, Gossypium hirsutum
  unsure (1)..(590): unsure at all n locations; Clone ID: LIB3825-026-Q6-K6-H11
tcgcggncgcgtgggatcaatcaatagttgatgcagagatggaatatcatttatgacaagttggataaatgtgtgaagagtggtgcaaaagttgttctttcacggttggctattggtgatttggcgacacagtattttgcagatagagatattttctgtgctggtcgtgtagctgaggaagatcttaatcgggttgctgctgcaactggtggaaccatacaaacatctgttaacaatataattgatgaggttctaggaacatgtgaggtttttgaggaaaagcaggttggaaatgaaagatttaatatattcagcggttgcccgtcaggacggacagctactatagttctacgcggtggagcagatcagttcattgaagaagctgagaggagcttacatgatgcaattatgattgttagaagagctttgaagaactctactgtagttgctggaggtggtgctatagatatggagataagtcgatacttgaggcagcatgcacgcacaatagctgggaaatctcaactttttattaactcttatgcaaaagcacttgaggttattccacggcagctttgtgacaatgctgg

SEQ ID NO: 3491 - DNA, 600 bp, Gossypium hirsutum
  unsure (1)..(600): unsure at all n locations; Clone ID: LIB3825-026-Q6-K6-H12
tcgggcagctttgttaagagctttcggtgaagggtggaaactaggcactagatcatttagtactcaaggagcaacaactgctggtgctccacaggcacctcctcctcctccnactgcctgaaaaaacccattttggtggtctaaaagatgaagaccgtattttcaccaacttatatgggttgcgtgacccttttctcaaaggtgccatgaaacgtggtgactggtatagaaccaaggatttagtactcaagggtgctgattggattgtgaatgaaatgaagaaatctggacttcgaggacgtggtggtgctggatttccatcgggcctcaaatggtcttttatgccaaaagtatctgatggtcgtccttcttatcttgttgtcaatgctgatgaaagtgaacctggaacctgtaaggacagggaaattatgcggcacgatccacacaaactattggagggctgcttgattgcgggggttggaatgagagctacagctgcttatatctacatcaggggtgaatatgtgaatgaacgtaaaaaccttgaaagagctagaaaagaagcttatgaagctggactattgggcaaaatgcatgtgg

SEQ ID NO: 3492 - DNA, 580 bp, Gossypium hirsutum
  Clone ID: LIB3825-026-Q6-K6-H8
ccaaaacctctctcgccctctcaggctacctctaaccttattagggtttcttctccttcttactccacttcctcccctaaccacgctccttttaagcgcgtcggcactcacaatggaagcttccactgcgacgaggccctcggctgcttcatgattcgtctcactgacaagttctccaactccgagattatccgtacccgagatcccaaggtattggagggtcttgatgctgtgcttgatgttggaggcgtctatgatcctaatcatgaccggtatgatcatcaccagaagggatttgaggaggtttttggacatggatttaatacaaagcttagcagtgctggacttgtttataagcattttggcaaggagataatagctaaagagcttcagcttggagaagaccacccggatgtgcatagattatttctggccatttacaaaagcttcatggaggcaattgatgcgattgacaatggaatcaaccagtttgatactgacaagccaccaaaatatgtgaacaatacacacatatcttctagagttggaagattaaatctagactggacagatcctgatc

SEQ ID NO: 3493 - DNA, 596 bp, Gossypium hirsutum
  unsure (1)..(596): unsure at all n locations; Clone ID: LIB3825-026-Q6-K6-H9
aaaaggaactaatgagagggaaagaagagagaaaganggcgacgaaaagaccgaattgacctcggctttcttttgaaattaccctttcttcttcttcttcctcgtcggcgtcgtcgccggcgttgttctcgtcgtcttcggcatcaactccgatctctctctctcgctcgccgtagattccttttcatttcttaaacatgaacgagaaggccagcgttaccaaggagctcaacgccagacaccgaaagattattgaaagtcttcttaaattgccggagaatagggaatgcgccgactgcaaagccaaaggtccgagatgggcaagtgtgaatttaggtatctttatatgcatgcaatgttctgggatccacagaagtcttggggtacacatatcgaaggttcgatctgctacactagacacatggcttcctgagcaggttgcttttattcaatcaatggggaatgaaaaggcaaacagttactgggaagctgagttaccccctaattatgatagagttggaattgagaacttcatccgtgcaaagtatgaggaaaaaagatgggttcctagagatggaaaatccaaatcaccatct

SEQ ID NO: 3494 - DNA, 583 bp, Gossypium hirsutum
  unsure (1)..(583): unsure at all n locations; Clone ID: LIB3825-027-Q6-K6-A11
ttttggtaggatttctggntggttctgtttctgctcccctcgtttgttcaaactccagcggtgaacttgttgtgaatccatctgcctcggtcttctctcagcaagatcatctacttacctcttggcttctttccacgatcggttcctcttttctgtcttccttcacagatgtgcgaacggcttgtgacgtgtggtcgacggcaaacagcctatttgcgaccgacacaggtgccaaacagtcccggatccgtcatgagctgcattctctcaagaaaggtagtctctccatcacggggtatgttgcgaagagtaagggttggtgtgcacttctagctgtgtctggttctcacatctcagaggccgaggaaacggagattatgggcttaccatctctaagctctctataaatactatattctaagtgtacaaaggcaagtttaaggtccaaatacagaagtgaatttcttctacacattagtttagcttctctcaactctgtatagcagattctttaatcaagattaccagagtctcttcacaccagtttaagggggaagtcgtccttcagttcatgtttacaaaa

SEQ ID NO: 3495 - DNA, 587 bp, Gossypium hirsutum
  unsure (1)..(587): unsure at all n locations; Clone ID: LIB3825-027-Q6-K6-A12
ctttatgtctttgcaacaccttataggattacttgggattactacttttctgctcgagagcacacattgaaatttgattcttgggaagaagctgctgaattggaatatgtaaaggagcatggaatctcagtatttctaatgccatctggaatgcttggcacattgctttctttagttgatgtattgcctctgttttcaaatactgtctggggtcagaaagccaatctcgcttttttngaaaacacacatgggtgcttcatttgaaaagcgtcctaagccatggcgcacagtggtaaatccagaagatgtgcattctggtgactttttggctgtgtcaaagatccgtggtaggtggggaggatttgagacattagaaaaatgggtgactggagcatttgctggtcatactgcggtttgcttgaaggatgacatgggtaatctatgggttgctgaatcagggcatgaaaatgaaaagggtgaagaaattatagtggttattccatgggatgaatggtgggagctgtcactgaaggacaattctaatccacagatagccttgctttctttacatccagatatacgtgcaa

SEQ ID NO: 3496 - DNA, 460 bp, Gossypium hirsutum
  Clone ID: LIB3825-027-Q6-K6-A2
gccactgcctgcaaagactataggcaagagggttgtcatatgtacgcaagcgtgcatgtagagctgaaagaccacagctcagctttaatggcatgctaccatcctttcttgtcataagatgcgggccatatggactagcaaataaaatctactactcctacagcctgacaaaagtggcacgattactggcggccggtatatacaatgcaatcacacaaacacgctcaagctacttaataaatatgctatagcgaaagctaacccaaaatgactggtaggtggtccacatcatgcccacacttaaaaccatgcacctacctaaaataatttctttaaagaacaccgcgctttcggcaaaaggccttatagcgaataggtcctttcctggcactcaagccaacatgtgtccaaccggaatggcgaactgtacgctccctgatccatttcattaaatactgaa

SEQ ID NO: 3497 - DNA, 575 bp, Gossypium hirsutum
  Clone ID: LIB3825-027-Q6-K6-A3
cctgctcgagttgaaaagctaaaaacacggtggattgctccctcatgcagatacttcatttgttgagcctaatggagttgaagctcaggctggtagtaatcaagctcctgggtcaggtagggcaaagagagatgctgctgctcgtgccatgcggagctggcattctcaacgtgttctcgataacggtgaggtctgtcatccaatcatcaaggacaagacctctagtccgacgctcaaaagtgacagacaacttaaaaattttggtttattgaagcgtaaaaagccatccactttggactctggtgtccgagtttctcaacttaaagcaactaaatcacagcgttcttttggtaggttggataccgcggttgttgatgttggagccccagctgattgggtgaagattaacgtgcaaaaaaccgttgactgctatgaggtctatgctttggttcccgggcttcttcgtgaggaggttgtcagcttgccatctagaatcgatccgcaccacacttcagctgtggttactctgcatggtcaattgtttgtccgagtcccgttcgaggcagccgatgtat

SEQ ID NO: 3498 - DNA, 569 bp, Gossypium hirsutum
  Clone ID: LIB3825-027-Q6-K6-A4
ctgggaaatgttttcccggaaagtacgagccaaattgtatatcggacccaatcagaaaaagaatcagaagctttcttttgaatggggcaacaacaatcaaaagacgagttgctatacaatcaagtcaattatggtaacgcagaagggatcaaatctcttttccgtgaaggcgcaggcctcgagtggatggatagagaagggaaaacgccgttgatattagcgtgtttgaatccacagctttttgatgtggccaagactttgatcgaacttggttctaacgttaacgcttatcgtccaggtcgtcatggggggacacccttgcaccatgcggcaaaaagaggccttctaaatacagtcaaattacttctttctcatggagctaatccgttggtgatgaatgatgattgtcaaacacctctagatattgctagggtgaaaggaaatgtcaatgttgtaagggcaattgaggatcatatatgtttattctctggttggatgcgggagttttacgggccaggatttattgaaatgtttgttcctcagttgctttcaagaaaagtttgggtggt

SEQ ID NO: 3499 - DNA, 446 bp, Gossypium hirsutum
  Clone ID: LIB3825-027-Q6-K6-A5
gtggttgcgcttattacaggacgtttgcaaataccattatcatatggttctttgtctagactgcttctaatagatgttggaggggtctactgccgtttaagctcctcaatcatggtaaggtttttgtaaaacaccagaaaaaggccaattttcagcatgccgaccttctatatattcagtacttgccatactctaccggattatcattactctggtttgatatgaaagatttctatgttagagtcatcacataacaaggtgatgattcaacccccgagattctgactcttaatgatatcctcctataccctaacacccttctggaaaataatggcattataatccccatatactctgatggggcctatctactccttataagggatcgtgttgataacagatcacaagaaaccacctttgttagcacagatcatggtaggcttaca

SEQ ID NO: 3500 - DNA, 263 bp, Gossypium hirsutum
  Clone ID: LIB3825-027-Q6-K6-A6
gcaaaatctgatgatcgccgcatggatcatctcaaggttttgcttggagtgaaggaactatatgtgctaacaaattcggctcattgttgattacggagttgattgttcaaatttaatcgaatttcgatgcttgtaaagtgaaggtatttcttgttcaaaaacaaaaactgaattgcaaatgcaaatgcagatacagcttatatatatgtttgttgaggatgttgcgtatagtttagatgtatcaaattactcatggtttttgg

SEQ ID NO: 3501 - DNA, 593 bp, Gossypium hirsutum
  Clone ID: LIB3825-027-Q6-K6-A7
tgccattttcgcaagcagcaaattagatccccatttgctagggtttcgacacagttcagcagccctaaaggctccattttccttcgctcttcaaacaccatttcaccatcataactggagaatgatacgaaggccctcctaatctccatcaaagtagagatttaaggttcattttcacccgacaatccccgtctcaaacttcgatttcgacggaggagacgaggacccggacgatgcatccacgaaggtacggaggccagttggcacggtggtacgtggcgcttggcgtggaggtgtacggcgtacagcgtatggaggtgctggaggctgctagaggctagttgcggcgcaggcgttaggctagggttcttagttggctgaagtttgtttaagttttgggccatttgggccaggggtatttgggttaggttattttgtaaatgggcttgtaactgggctattgggttgtattaggtttgggttttaaatttgggttatgtaatttggacttatggacatttaaatttagtttttgtttttgtttttgcttttgtctgatttgggcttattgggcccggtcaaatttgggcatt

SEQ ID NO: 3502 - DNA, 580 bp, Gossypium hirsutum
  unsure (1)..(580): unsure at all n locations; Clone ID: LIB3825-027-Q6-K6-A8
ctccggtcctggaactaagttatggcttctccctcgttcttttttgctacctttctgttgcttctctctcggttcacccaagcccccaagttgcaatttggacttagttgattgctgtggagcaactttcagacgtcaagcttaactctcggatccttcaggattcaattgtaaaacaagtaaatcaaaaccccaaggctggatgggaagctgcactgaatcctagattttctaattacaccattggtgagtttaagcaccttcttggagtaaaaccaacacctaagaaagaacttctgggcgttcctattttaagtcatgacaaatccttgaaattgccaacttcttttgatgctagagcagcttggccacaatgtacctcaattggaagaattctcggtgagttatgtgctggtttattaaattttgccaactttaaacaaattggactgatgatttccttctttttatgatgaaatcaattcttgggtcaatttcaatattaaagatcaggtaactcattttcatttctctcaatttttatatctggntcttgtataattaaattctgagtatgctt

SEQ ID NO: 3503 - DNA, 518 bp, Gossypium hirsutum
  Clone ID: LIB3825-027-Q6-K6-A9
ccggattcggtcgcccagctcgttttttttggtgttgaatgggttttgtttggtatgattgtgttgtgcgattgtttttttttttagaggaaaatagagtggaaatggagaaaaagagagcagccagaaaatggagcatcgaggtggagtgatgaaaactaaagccaaaaaaaagattgaaaagattgggaaattaaattgggcactcgaaaagggtgaaatcactatgcgtagagaaccaaattggagatttggctaaaccaacaggcaacagccaacgcgttacggaccaacttaaacaagtactcgccgcgtgcaacacctgaggaagcggaagcggggggagacagtgcacgatgcacaatttgttgcgggagcaactggaagcaacacggaaaaacctgccgtggtggagacggatgtagaatgcggaagaaaacgtgtgtctgtgtgccgtgtagcatttggcttgtgtcgatttgtggtctcattcactttgcccgtttgtaatccataaa

SEQ ID NO: 3504 - DNA, 589 bp, Gossypium hirsutum
  Clone ID: LIB3825-027-Q6-K6-B1
ccatcccttcattcattcatatctgcttttctttacgtttgttcattcgattttttctttgggttttctttctttttgatccttttgctattttgggtggtgaaagattgaagaattttgatcatgtcgatcgcgttggaacggatagaatcggcggggttcgggcgggtaatgaattgcgcttgcgatagttctaaattcgaatcgccgccgccggttaaggaaacgaagcagttgttattggcggagacggcggcggttgaagaggaggaggatgattggagggtttcgtcgtctactacgacgtcgtcttcgatcgggaagaacagtgatgaggtatccggaatatcatcggacggtggtgattgcgaggaaaatgaagttcaaagctcttataatggtcctttagatatgatgaattcccttgagcaggtcttgcctatgaggagaagcatctcgagtttctacaatggaaaatcaaagtcttacacgagtttggtcgatgcatcatcagcttcctccattaaagacatagcaaaacctgaaaatgcttatactagaagaaggagaaatttattagcaatcaatc

SEQ ID NO: 3505 - DNA, 586 bp, Gossypium hirsutum
  unsure (1)..(586): unsure at all n locations; Clone ID: LIB3825-027-Q6-K6-B10
cggncgcgtgggcggncgcgtgggctgcatggccttgccttaaaattttgtgggatcagaaactcgagtccagaatgcgctaatcactatgtatggaagatgtggtcacactaagagcgcgagatcagtgtttgatttctgttcaagtcgcaacttatgctcatggaactgtatgatctctgctttttcccagaataaggaaggaagacgagcactagaattatttcactttcttgaatttgaacccaacgaaatcaccatagtagcccttctctcagcttgccatcagcttggacttctaagacagggaaaacaaatccatggtcacgtattgcggattggaatctttgagaattcattcatatctgcagcccttgtggatatgtatagcaactgtggacagctggacctaggctggcaaatatttacaaggtcaaaggataagtctatcgcagtttggaattctatgatttcggcttatggataccatggtgatggccaaatggcaattcaactgttccacaaaatgtgtgattctggcgttagaccatcaaaaagcagtttcgtaagccttttatcagcttgc

SEQ ID NO: 3506 - DNA, 524 bp, Gossypium hirsutum
  Clone ID: LIB3825-027-Q6-K6-B2
gccataggctgtggtttgaacatgaaccgaggggaggctaacgttgtgaaaataccgacccaagccaggtagagccaccaaagagctgagggaagaaaataagtgagtatgtgacatcctcagctacactacctggcggtatattataaccagaacactgatgggtgacaagtagcgactgatggtggtgagtaataggacaagccataaaagcataaaggagggctgaaggagatgctaaatgaggtgcatgaaataggaggtaaactagaaaaatatgactaggtgtgtacaacagatacttatgacgatgataccaatagagtataagtagataaaaccagggcagagggaagcaccgcaatataatcgaccggataacatataacaaggctcagatgatgaattatatcctaataatggcccaactgactaatatagtgtaaacaatggctcttcattcatacatgcatcgaaatgaaaataaggagtggctaagaggtgtgctttcaaccaatatatgc

SEQ ID NO: 3507 - DNA, 573 bp, Gossypium hirsutum
  Clone ID: LIB3825-027-Q6-K6-B3
gcaaattaccctaaaaaccctttcactaaaaattgaagatgcagtcaatgaaggatgctgctgcctctgctaaggccggcatggagaaggccaaggcctccatgcaggaaaggtggaccaaatgaagacaagggaccctaatgagaaagagatggcgagggaaaggaaagaagagagacaagaagatgcagagctgaggaaacaagaggcccgccatcataacgccacggctggccatgctggtggtggtggtattggtggtactggctacaccacagctgggtacaacagaggggatactggtggctatggcggtaccggtggacatgacaaccgtgggtaccccaccgcaggtagtgggtatgatacaggcaggcaagatgacctcagcagtatggggtttggcggagatacagggggtgcttacggtacaacgggaaaccaagacttcccaagtgcggcgcctaacaatgctgggactagaaggagcacccgcggaggtacccaggatgatccttattatcgatcctattaaatgaaaggagcgaccttttgtgctctgctactgccttg

SEQ ID NO: 3508 - DNA, 585 bp, Gossypium hirsutum
  Clone ID: LIB3825-027-Q6-K6-B4
cggctaccttggccgaaattctccatgcttgacgaacacattctggaattcctcccaccaattgctatctcggagtgaaaaaccgtctttgatgcaaggatctcccccacttcatttcgtacaagcaggcctgtagttgatctggaagattgatggtcaaaggctgcgtcaaaaagactgtgacccttgttctttgataatcctgttgaatatttccattagactgaaggattaaccagagtccacagcagaataatcggatctgttcattagtctccttacagaagccccagggcactattcgaaaaatatggctactgtcttcctcattttgacgacattgagggcactgatcttccaccacgactcttttatgtctgaggttaacaagggacaaaataaagttccaagagattctacatactgtaattataatttttgaggggatgtataatttccatagtttcctatagaaatttttagttcggcgtgtaaactataactactaggatccaagttagtctcctgtaatagattataggtgctcctgacttacaaatccctggacagttcccttctccatac

SEQ ID NO: 3509 - DNA, 517 bp, Gossypium hirsutum
  Clone ID: LIB3825-027-Q6-K6-B5
aaccatgctgttacgagcttaatatcatcaagagaaaaatagacttactcaagtgcccaaaaaccaacacaagagcaggcaggaaaaaagaatgagcactcacagctaagttcattaagccaccatgcaacgttatggaacggagctcttagggtaatatcataaaccaacaagagcatccgaagcacccgtgtaataagcctgtgttacaggccggaaactgtcttggcccataaagtgccaaatctgagctttaaattcttttccatagatttaaactctctgggtttgaaactcaacttcaatgggtgcttttgagtgagcgtttaactcgtttcgtgcgaatccagaaaggaggttggatttaccgacggcctgaatgtcctattatcaatattttgaataagcactcttccactgaaacatcgtttgacattttttttggcttggtttctggctatgggtggttcctttttttctcttgggattggtagggcggtgggaaaatgaatgaaat

SEQ ID NO: 3510 - DNA, 571 bp, Gossypium hirsutum
  unsure (1)..(571): unsure at all n locations; Clone ID: LIB3825-027-Q6-K6-B6
atcgactcctacacacaattaggcctgcctgacttcaacttggggttattcctgggtttggaggtacacagcgacttccacgactcgttggtctcacgaagtcccttgaatgatgttgacatctaagcctgttaaaggtgaagaagcacttggattgggtctagtcaatgctgtcgtttcatctcatgagttgatagagactgcacgttggtgggcactagatattttggcacgaagaaaaccatgggttgctactctctacaaaactgaaaagctagagccccttggggaagcccgggaaatatttaactttgctagagcacaggctcggaagcgagctccaaatctcaaacaccccttggtttgtattgatgttattgaagagggtatagttgctggtcctagggcagggctgtggaaggaggctgaagctttccaagtacttcttaaatctgacacatgcaaaagcttggtccacatcttctttgctatgcgcggaacatctaaggttcccgggattaccgacagggggctaatgccaanacaggtgaggnaaagttgctgtacttgg

SEQ ID NO: 3511 - DNA, 594 bp, Gossypium hirsutum
  unsure (1)..(594): unsure at all n locations; Clone ID: LIB3825-027-Q6-K6-B7
aagtctcaagtttcaggcttttcagttcagttcttccgcaaacaaagagagagagagtcctttaactttatgatttcatatatgtgaagtgaacaattgacaacatggcttccacattgtttagaactattcaaatccacccattttttctctacccaactgcattatttagcagaaggaatggtgttctttactgcacaatgaagagtagtcaaactcaaacagctacacaagaaaagcagcagcctcccaaagtcaaagttccacaacatgccctngaaaaaaacagttgataagatcacaagagactatgaggcaatcattggaatagagacacatgtccagctttcaactctcaccaaggccttttgtagctgtccttacaattatggatcccaaccaaataccaatatctgtcccatttgcatgggattgcctggtgccttgccagttttaaactcgaaagtgattgaattcgctgttaaattgggtcttgcacttaattgtaagctatctctaaactcgaagtttgataggaagcagtacttctatccagaccttccaaagggttaccaaatatctcagtttgatatc

SEQ ID NO: 3512 - DNA, 582 bp, Gossypium hirsutum
  unsure (1)..(582): unsure at all n locations; Clone ID: LIB3825-027-Q6-K6-B8
ttttggnagttaccttcattcgnaanataaagtgcatgaagtgtcttggtaaatctgagcggtatgagaggatgatggatctaactgttgagattgatggggacactcggaagtctggaggaggcacttgcacagtttacagctagagaaatcttggatggagaaaacaaatatcattgcattaggtgcaaatcttatgtaaaagcaagaaagaagttgacggtattagagtcacctaatattcttaccattgttttaaagaggttccagtctggtaattttgggaagttaaataagtcagttcaatttcctgaggtccttgatttggccccatatatgagcggatcaagttcgaaggcggtcatatacaatctctatgctgtggttgttcacttggatgttatggatactgccttttcaggccattacgtatgttacgtgaagagtttccgaggggaatggttcaggattgatgacagcacgcgcgatttgtaggtaataccagtgtcattggagagggtcttgctcgaaagggcgtacatgctcctctatgcgaggcgctccccaatggcaccagctttg

SEQ ID NO: 3513 - DNA, 294 bp, Gossypium hirsutum
  unsure (1)..(294): unsure at all n locations; Clone ID: LIB3825-027-Q6-K6-B9
cggccgcgtgggggttngaagttcagacaccattgacaatcttaaggcaaagattcaagacaaggaagggatcccaccagaccagcaaaggctcatatttgctggcaagcaacttgaagatggcaggacattggctgattataatatccaaaaggagtctactctgcatcttgtccttcgccttcgcggtggtttctaggtaaggattgtttgccgttgttggtggcctttttttggttttaaataatgtgtctggaagcttatctgggattattattagctatgtggttttcg

SEQ ID NO: 3514 - DNA, 568 bp, Gossypium hirsutum
  Clone ID: LIB3825-027-Q6-K6-C1
gtcgtacaccgagccctagttcccaaggccctggcagcgtcaagatgataccagtggattcagaggatctctggtttgcttacaatttgatagctactggggattgggttatggctcgaactgtcaggaaagttctaagggagacagccggtggaagagatgcagagcgtgttgccctgaagttggaaataaaagtcgaggccatagattatgacaaagaaggatctgtcttgcgtataaggggaaagaacaccttggagaatgagcatgttaagataggacaattccatactctcgaacttgagcttcagcgaccttttgttttaagaaagaaaatatgggactcattggcattacatgttctccggcaggcctctgatcctggtgcgagtgcagatctggctgtggtactaatgcaagaagggctagcaaatattttgcttgttggtaaaagtatgacaagtacccgttcacggattgaaacttcaattcctcgtaagcatggacctgccattgctggttatgaatcggctttgaagaagttctttgagaatgttctacaggcttt

SEQ ID NO: 3515 - DNA, 566 bp, Gossypium hirsutum
  Clone ID: LIB3825-027-Q6-K6-C11
ccacttgagcctggttgtgctatcttgatgcacaataaggttctttctgtagttggactcctgcaagatgaagtggatccaatggtatcggtaatgaaggttgaaaaggctccattggagtcttatgctgatataggaggattggatgctcagatacaagagattaaagaggcagttgagctgcctcttacgcatcctgaattatatgaggatattggtattaagcctccaaaaggagttattttgtatggagagcctgggactggcaagaccttgctggcaaaggcagtggcaaattctacatcagcaactttcttacgtgttgttggcagtgaattaattcagaagtacttgggagatggtcccaagttagtaagggaactctttagagtggctgatgatctctccccttcaattgtctttattgatgaaatagatgcagttggcaccaagaggtatgatgcccattctggtggtgaacgtgaaattcagaggaccatgttggagttgctgaaccaactagatggatttgattcaagaagagatgtcaaagtgattcttgcaac

SEQ ID NO: 3516 - DNA, 596 bp, Gossypium hirsutum
  unsure (1)..(596): unsure at all n locations; Clone ID: LIB3825-027-Q6-K6-C3
gtcatattgctgcagttaggaagcttttttcctctgagaattaggctgtattgcctataacctcggaaccggcagtggtacatctgtgcttgaaaggttgccgcttttgagaaagcttctgngaaagaaaatccccattaaactatgccccagaaggccaggagatgctacagctgtttatgcttccnactgaaaaagctcagaaagaacttggttggaaagcaaaatatggtatagcagagatgtgcaaagatcaatggaagtgggcaagcaacaatccatggggataccagtcaaagccttaggcttcaactaaatactaattttcttccccggtcttttaaaaatgtctcatagggagaattaagtgtacaaatacttgtttaatttaaacaaaactgatccttgatgatcaaaagttaggatttatcaaatgttcaaagatcttataaaattcctttgtgttacatttataagtctttgtaagagtgatgtttttatcatttctggagtttaaaaaacgaatggttttaaatttaccgtaaggagttgacctaaacaagatccctttcagctttgatcttcaatcttatcta

SEQ ID NO: 3517 - DNA, 573 bp, Gossypium hirsutum
  unsure (1)..(573): unsure at all n locations; Clone ID: LIB3825-027-Q6-K6-C4
gcaaattaccctaaaacctttcctaaaaatgaagagcagtcaatgaaggatgctgctgcctctgctaaggccggcatggagaaggccaaggcctccatgcagngaaaaggnntggaccaaatgnaagacaagggnnaccctaatgagnaaagagatggcgagggaaaggaaagaagagagacaagaagatgcagagctgaggaaacaagaggcccgccatcataacgccacggctggccatgctggtggtggtggtattggtggtactggctacaccacagctgggtacaacagaggggatactggtggctatggcggtaccggtggacatgacaaccgtgggtaccccaccgcaggtagtgggtatgatacaggcaggcaagatgacctcagcagtatggggtttggcggagatacagggggtgcttacggtacaacgggaaaccaagacttcccaagtgcggcgcctaacaatgctgggactagaaggagcacccgcggaggtacccaggatgatccttattatcgatcctattaaatgaaaggagcgactttttgtgctctgctactgcc

SEQ ID NO: 3518 - DNA, 555 bp, Gossypium hirsutum
  unsure (1)..(555): unsure at all n locations; Clone ID: LIB3825-027-Q6-K6-C5
cggncgcgtgggcggncgcgtggggtanaaaaccctcaccggnaaaaccatcactttggaggtggagagttctgataccattgataatgttaaggcgaagattcaggacaaggagggtatcccaccagatcagcagaggttgatttttgccggaaagcagctcgaggatgggaggacgcttgcggattataacatccaaaaggagtcaaccctgcacttggtgctgcgactgcgtggtggaatgcagatttttgtgaaaactttngactggaaaaactattacattggaggtggagagctcagacacaattgataacgtgaagaccaagatccaagacaaggagggtatcccacctgaccagcagaggttgatttttgctggaaagcaactcgaggatgggaggactcttgcggattataacatccaaaaggagtcaaccctgcacttggttctgcgccttcgaggagggatgcagatattcgttaagaccctgactggtaaaaccgtaacactggaggtcgagagctcggacaccattgacaatgttaaagcga

SEQ ID NO: 3519 - DNA, 268 bp, Gossypium hirsutum
  unsure (1)..(268): unsure at all n locations; Clone ID: LIB3825-027-Q6-K6-C6
cggccgcgtgggttcatcagctttgcttttagtggcantaaaaaaaaaaaaaaaaaaaaaaaaaaaaaaagaagaacaaaaaaaaaaaaaaaaaaaaaacacacgcaagcaaacaacaaaggacatcttctatggaggcacctattttgaattcacgggcccccgccatacaacgccctgtgtggggccaaccctgggggcaccccaagtccattccttggggcacctcctccttttgcccgcggggggaataccaagggaggggccc

SEQ ID NO: 3520 - DNA, 565 bp, Gossypium hirsutum
  Clone ID: LIB3825-027-Q6-K6-C7
aaatatctgctttttcttagttttcctttttgtcccttgtttatttgatatttccccctcatggccgccgctgatgtcgagttccggtgcttcgtcggagggctcgcatgggccaccgacgaccgggccctcgaagaagccttcagtgcgtttggtgaaatcgtcgaatcgaagatcattaatgatcgtgagactggaagatcccgaggctttggattcgttactttccgtgacgagaaagctatgagggacgcgatcgaaggaatgaacggtcaaaatcttgatggaaggaacatcaccgtcaacgaagcccaatcgcgcagaagtggaggcggtggcggaggatttggaggaggaaacggtggttacagccgcggtggaggcggcggcggatatggtggtcgccaaggaggatatggtggcggacgccgtgaaggtggatacggaaatggtggagggtatggtggtggtgggtacggaggtggacgccgtgaaggaggatatggtgacggcggatctcgttactcaaaaggcggcggtgcatctgaaggcagctggaggtctt

SEQ ID NO: 3521 - DNA, 573 bp, Gossypium hirsutum
  unsure (1)..(573): unsure at all n locations; Clone ID: LIB3825-027-Q6-K6-C8
naaaataccctgnaaaaccctttcactaaatattgaagaagcagtcaatgaaggatgctgctgcctctgctaagccggcatggagaagccaagcctccatgcagaaaggtgngaccaaatgaagacaagnanacnncctaatgagaaagagatggcgagggaaaggaaagaagagagacaagaagatgcagagctgaggaaacaagaggcccgccatcataacgccacagctggccatgctggtggtggtggtattggtggcactggctacaccacagctgggtacaacataggcgacactggtggctatggcggtaccggtggacatgacaaccgtgggtaccccaccgcaggtagtgggtatgatacaggcaggcaagatgacctcagcagtatggggtttggcggagatacagagggtgcttacggtacaacggggaaccaagacttcccaaatgcggcgtctaacaatgctgggactagaaggaacacccgcggaggtacccaggatgatccttattatcgatcctattaaatgaaaggagcgagtttttgtgctctgctactgccttg

SEQ ID NO: 3522 - DNA, 600 bp, Gossypium hirsutum
  unsure (1)..(600): unsure at all n locations; Clone ID: LIB3825-027-Q6-K6-C9
tccgccaggcctccatgcagaaaggtggaccaaatgaagacaanagaccctaatgagnaaagagatggcgagggaaaggaaagaagagagacaagaagatgcagagctgaggaaacaagaggcccgccatcataacgccacagctggccatgctggtggtggtggtattggtggcactggctacaccacagctgggtacaacataggcgacactggtggctatggcggtaccggtggacatgacaaccgtgggtaccccaccgcaggtagtgggtatgatacaggcaggcaagatgacctcagcagtatggggtttggcggagatacagagggtgcttacggtacaacggggaaccaagacttcccaaatgcggcgtctaacaatgctgggactagaaggaacacccgcggaggtacccaggatgatccttattatcgatcctattaaatgaaaggagcgagtttttgtgctctgctactgccttgagtctgtgtttgttgtttgtttgcttctacttttttctttttcaagatcgtactgttgtaccatataaaaagaagtttggtcctgttgtaatgttatagggttagccagggcag

SEQ ID NO: 3523 - DNA, 588 bp, Gossypium hirsutum
  Clone ID: LIB3825-027-Q6-K6-D1
ggctttaatagctgattataggtctttcatttaaagtttagcatatcctaagtagtaatttacttaggtcatgctaaattttgaatgaaagtcctattgtttagttattattagtcttatgccatattttaaatcactaattattactttaagcacttagatatttatgtcactttaaactttgaatggaagttctattctttagttactattgttcttatgccatgtcataaatgagtaactattattagtattatgtcatgctctcaatgatttgagcttgtagctctctaaacatgatggctacatcattatttggaagggtcacaatgctttaaaaccatttggggcaagaaaataacaaattgactaatcatgagcattacttttatattttgaattggggaaatttattaaaataagttaaaatgatgatgtggtagtaagaatatacgacactttctaaacacctataagaatttttttatttaggttccacaaccatatgagatttctcttggaacggtttggagggtgtcgcctgttttctttcgcatcggtaatggtctttgcactctttctttaaaa

SEQ ID NO: 3524 - DNA, 288 bp, Gossypium hirsutum
  Clone ID: LIB3825-027-Q6-K6-D10
ttcttttaaagcatttgttgcctctaactgagcctctgactgtgggactccaaatggtgctgcagacatcacaacaggcttaacatcctgttgcacatgctatggaaccatggctgcaatctttggctcagactttggccgatggttcaccttatggcccttcttgtgcatctggtagtgcatcagactatgtgggtcactatgtcgtggacatgggaaagctcataactattctaggaactcttcttggggctcttaatcagcctgaacatacactgcaacaaacgc

SEQ ID NO: 3525 - DNA, 522 bp, Gossypium hirsutum
  Clone ID: LIB3825-027-Q6-K6-D11
gcagcttcatcctggttccttgccttttggtgctcctcctcttcctccgggaccacatccatctcttctagccaatcagcagcatggatatcaacaaaaccctcaacaaattcagcaacagcagcaacagggaatgcaacagcaaatgcctcctatgccaatgggacctccaaatatgcagctacaacctccatctcacatgcccctgcttccacatcctcatttacaacgccctcctccccaaatgcctcctcatggtatggcttcacaaatgccaggatctttgaatccaccttcatcaatgccgacatcacatccaatgccaatgcctggtccaatgggcatgcaaggtacaatgaatcagatgcctccttcaatgccacaaggtcattttatgggcatgaatccaatgcactcaggatcattacccaccagtggtggcccttcagttggaggttttccaaatggtatgcaaaatatgcagggccctggaaatatgggcggtggccaaatgtatctgca

SEQ ID NO: 3526 - DNA, 585 bp, Gossypium hirsutum
  unsure (1)..(585): unsure at all n locations; Clone ID: LIB3825-027-Q6-K6-D12
cccggggtcgnacccacgcgtttcgtaaaaaaaaaaaaaaaaaaaaaaaaaaaaaaaaaaaaaaaaaaaaaaaaaaaaaaaaaaaaaaaaaaaaaaaaaaaaaaaaaaaaaaaaaaaaaaaaaaaaaaaagggagaaaaatatttaaggaaaaaaattttaagaaacaaatgatataaaaaaaaatagatttttttttagagaaaaattagggggggtttttttgggggggttttttttttttgtcggtggggggggaaacccttggggtttttttttttggggtccccttgatttaccttcccgtttcggggttttggcctcttggggggggggggccccccggggtgggccccttcctttttgttgcttagcccatgtttggttttttgggcgcccgcttttttacgggtttttttccccccccgtgtcttttttttttaccccgggggggtgccctttttttttggggggccccccccgcggggtctttttattttgtgggttttttttttggcccctttggggggctttccccgtttggctttacttggggggccccttttggggttctgtttcgtgtttt

SEQ ID NO: 3527 - DNA, 349 bp, Gossypium hirsutum
  unsure (1)..(349): unsure at all n locations; Clone ID: LIB3825-027-Q6-K6-D2
gnaacggctaccacatccaaagaggcaaanccaccaanaagatgtgctaaggctgcaatgccaaggttgcaagcacgtttcacaacatccgatcaagaggtgcaagcactttgagattggtggagacaagaaggggaaaggaacatctctgttttaaacgtgttattcatggtatcttgttatgtttgctttactttatatggagtagtttgaacttacaagactgtaatggaattttgttaaatttgcttagtttcttctgatgaagttttgcagttttctaactgttagcaaatgtttcactggcaattttgagttcaatttgttttaataactcttgttaataatc

SEQ ID NO: 3528 - DNA, 592 bp, Gossypium hirsutum
  unsure (1)..(592): unsure at all n locations; Clone ID: LIB3825-027-Q6-K6-D5
cttctctccagcagtttgtggccatgactcgcataagaattgaaggtcttcttgctgcttttcctaagttggtggtgaacaggnaaagcaacacacatatgttgagactgagaatgtgcgatatgtttatcaaccaatagaagctctttatttgcttcttgtaacaaacaaacagagcaacattcttgaagatttggagactttaagactgctctccaagctggtaactgagtattcttactctctagatgaggagggtattggcaagactgcttttgaactgatctttgcttttgatgaagtcatttgtcttgggcacaaggaaaatgtgactgtcacacaggttaagcaatactgtgaaatggagagtcatgaagagaagttgcacaagctggtattgcagagcaagattaatgaaactaaggatgtcatgaagcgtaaagctagtgagattgacaagagcaagattgataagaatagatctgacaaaggagggttcatgtcaatgggttctggaagaatagaaactagctttagtgaaatgagtatttctagcagtggaagcggctttggaagtggttctgggtttggt

SEQ ID NO: 3529 - DNA, 576 bp, Gossypium hirsutum
  Clone ID: LIB3825-027-Q6-K6-D6
cttatgggatgttgggaatctgctgtggacaccatggatttcgtggatgttttgaggtgactcaattcgaccatagtcttcttcaagttgatggtggtttcaaccagaacctgaattcaaagaccttgtcagctcccaatctgagtacaatggactttcctgcacttactgtgtcagatggtcagagtggtcctccaaaatatacaggagatgatcttcaacatagtgccagtacctatcgatcttctgacaaggacaatctgcttatgttcaaaaccagttcttcccttccatctagaggtgccatagattttgcatcagctgtcaggaaaatggcatctcaagattccggaatgtggaagtatgatagaaatggttctgctgattcaactgtggggtcaagtagaagttctaacgggtcagctaattcctacagtgctgcacctggaagaggggtttatgctaataggttgcagactcgtggttcagctcgctcagctcctgtttggcttgaaactggagatgcagttggaaatttatactctgaactacgggaagaagctcgagaccatgcgc

SEQ ID NO: 3530 - DNA, 590 bp, Gossypium hirsutum
  Clone ID: LIB3825-027-Q6-K6-D8
aaagagcagaaaacagaaagcagagccgcatcactttttgctagctaagctactgtgggagttattgttcttcagaacagcttctgcagtagctaataataacgttatatattatataaattttatacatcctttttaccctacgactccatatataagcaagtaaaaataaatatggctcgctctgtttcttcctttaagttccttggtgcttctgtttttgatgctctttatgtctccatatcaaggagaggttactcaggtgcaccgccggcggcagtgacggctagctttggtaggcctggagcgatggggaaagtggaacgaagatatgcgatgaaagagtcgtcgtcgtcggagacaagggcttattcttcagcttgggcgcctgaccctgttacggggtattaccggccggagaactgtggggctgagatcgatgcggcggatctccgggagatgatgttgaatcacagggttagatcacagtagaaacttgccaccgcatgtgatcaccgtagcagagcagagccagaatgttttgcagatgtttgggtgcctttgtattttgttttggttttgagttcaaa

SEQ ID NO: 3531 - DNA, 577 bp, Gossypium hirsutum
  unsure (1)..(577): unsure at all n locations; Clone ID: LIB3825-027-Q6-K6-D9
tccgcggncgcgtgggcgcggnttaagacccgcaaacggatattgctgcgcctctggaccctgcagcatttgctgatgcagttgtccagatctatttggataatgctggtgatctggaacttgttgccaagaaccttgaatcttctgatcttaacttctcaagatacggtgacactttctttgaggttgttttcaccgggggccgcacacaaccaggcacaatcaaacctgatgagggggagcgccacccttactctgtaatagagtgtgaggctaaacgtgaagccattttgccatctgtgatctacatacagaaaatcttgcgtcgaaggccttttctgataaagaatcttgaaaatgttatgcaaagattgttgcagtccttggagctgtttgaggacaatgaaaggaagaagcttgcaattttcacagcacttgctttttcccagaagctatcagggctgccacctgagactgtgttccagccactgctcaaggacaatcttgtggtcaaagggctagttctttcattcataacagacttcttcaaggagtatctggtggataatagccttga

SEQ ID NO: 3532 - DNA, 601 bp, Gossypium hirsutum
  Clone ID: LIB3825-027-Q6-K6-E1
taatgaaaaaaattataaaaaaaactctggtgctctgctagggtttaaaccctagcatcctcgcgtcgccgccgcaacgcgccttcgcttcaagcctcagccctccaccggatctccgatttgaacgcggcaaacgtgggcttcatcggcgaagcttagaaggtaaacccctcaccctttttgtattatttttaaaaaaaaacaaaataaaaagaatgaagcatataaagaaccgattcaccttaaaaaaaactttgaactctcagttttacttttcgatttctttgtctctttctctgtttatccccttttacagatttaaaagggccttttataggccgaaaagaaaataaatcgagggaaaaaaaaacaatattgcttgctgtttttttctctttggactccttgagtccgtttttcaggtgttcgtggagagtttggcgcgcgtggaggctccgagacgtgcgcatggaggctgaaacctgcggcggttgggggctgtgggagcggcgcacatgcaaggctgcttagggttttaggttttctttagttgctggactagggaccattatttttggcctgtacttaggtttattatttt

SEQ ID NO: 3533 - DNA, 599 bp, Gossypium hirsutum
  Clone ID: LIB3825-027-Q6-K6-E10
tccgatctgatgttgcagcaagtgctctcgttggggcatcaatgtctttggctcagctattgcatcctctctgatggacagacaagggagaaaagtcttctgatgacaagtttttctggaatggctgcttcaatgttgctactttctttgtcattcacttggaaggtcttggctccctattctggcacactagccgttgtcggaactgttctctacgttttatccttttcacttggtgctgggcctgtgcctgctcttcttctgccagagatatttgcttccagaattagagctaaagcagtggctttatcacttggcacgcattggatctctaactttgtcattggcctgtatttcttgagtgttgtgaacaagtttgggatcagctcggtgtacttgggattcgctggtgtgtgcgctcttgctgtcttgtacatagctggtaacgttgtggaaacaaagggcgatcattggaagaaatagagcttgctctgaatccgacgacttaatttgtacaatatccaaaggtatgcagaaataatctctgaagctggttaatgctcatctcatgagcattccattattttgcatcttttggt

SEQ ID NO: 3534 - DNA, 459 bp, Gossypium hirsutum
  unsure (1)..(459): unsure at all n locations; Clone ID: LIB3825-027-Q6-K6-E12
gcgttcgggactcatccctgctgcttacataactgtcagggctggaatagctctcagtgagttacaatcgctaggggatctttacgacttcaactcaattgctactcttttcctcataggggttgtctccgtcacacctacgctcatgagcaagacgaaacaatagcgttcgattggctgaacttggttgtaaatggatttcaatttcgtgatagccattcgggtcgctacaaccttctgtaaaggcaagcatcaaataaatgaacgtgctgctactgtttctatggttaatggaatgcaggactgctcctgctgatattgaagatgatgatctgggatggtgttaagtcttgaagttgtttgccatgctttaacaaatctcaggttaagtcttcatcgacaagaatagccttcagactctgtattatattcgnttttattagttcattttcttatctc

SEQ ID NO: 3535 - DNA, 565 bp, Gossypium hirsutum
  unsure (1)..(565): unsure at all n locations; Clone ID: LIB3825-027-Q6-K6-E2
ccgggtcgcccacctccgcacacagcgcacgcacagagcaggggtttagagacgaaatggcagcngaaaaggaagactcccgtcaagaccagaaacccagatctgatccgtggtgtggngaaagtattccaggtctaagatgtaccacaagcgtggcctttgggcaatcaaggccaaaaatggcggtgctttcccccgccatgatcccaaacctaaggcccccgctgccgctgagaaacctcccaagttttacccggctgaggatgtcaagaagccgcttcttaacaagcgcaaacctaaacccaccaaactcagagcaagcattacaccagggactgtgttgattttgttggctggaaggtttatggggaagagagttgttttcttgaagcaacttacttctgggctccttttggtcaccggaccattcaagatcaacggtgttcctttaaggcgtgttaaccaatcctatgtcattgctacttccaccaaggttgacatctcaggggttaacgtagacaagtttgatgacaagtactttgccaaggaagtagagaagaggaag

SEQ ID NO: 3536 - DNA, 602 bp, Gossypium hirsutum
  Clone ID: LIB3825-027-Q6-K6-E4
agcctagtcactgaaaggaaacaccctagtcagaatctcagtataaatgtgaaagagcctagggttttttcatttcctcaaccccgcttcgtgcacgattctgaaattttgcctgccgctccatctctacatcacaggaatggcgacagatgttgcagcccccgccaccgccgcacccaaagacccaacccaacctcaccttgaagtaaaactcttcaaccgctggagcttcgaggaagttcaggttgctgatatctccttgagtgattacattggtgtccaagcttcgaagcatgctacctatgtgccacacactgctgggaggtactcagttaagcgtttcaggaaggctcagtgcccaattgttgaaaggcttacaaactcacttatgatgcatggccgaaacaatgggaagaagcttatggcagtcaggattgtgaagcatgccatggatattatttatctcttgactgatcagaacccaattcaagtcattgttgatgctattatcaacagtgggccacgtgaagatgctactcgaattggttctgctggtgttgtcaggcgtcaggctgttgatatttctcctcttcgtcgcgtgc

SEQ ID NO: 3537 - DNA, 602 bp, Gossypium hirsutum
  unsure (1)..(602): unsure at all n locations; Clone ID: LIB3825-027-Q6-K6-E6
caaacctccaccgnaaaccctcgcttataaataccattcgtccgatctttttaaacccctctctcgctctctctcgccgccgcctgcgtctctctcttcatctctctgaacctaaaagtctttagcttttcgcttcgagagagaccatgttggtttaccaggatctcatctccggtgacgagcttctttctgactcattcccctacaaggaaatcgagaatgggatgctgtgggaagttgagggaaagtgggttgtgcaaggagctattgatgttgacattggtgccaatccttcagccgaagatgctgatgaggatgaaggtgttgatgaccaatctgtgaaggttgttgacattgttgacactttcaggcttcaggagcaaccccctttcgacaagaagcagtttgtcgtgttcatgaagaagttcatcaagaacttgacaccgaaactggatgcggaaaagcaagagtccttcaagaaaaacattgagggagcaaccaagtttttgctttcaaaattgaaggaccttcaatttttcatcggagagagcatgcacgatgatnggatgtttggtatttgcttactacaagnatgggtgctg

SEQ ID NO: 3538 - DNA, 169 bp, Gossypium hirsutum
  Clone ID: LIB3825-027-Q6-K6-E7
gctaaataagcaaataatcataatcgtcattttcactgtgggtttttaagggaaatggttcaataaggtattgtagatgatgttttatttcagtgttggtttttaatgtattattcgaaagttttcattcaagtcactaggtttataaaattgttgtcgtttggctttt

SEQ ID NO: 3539 - DNA, 568 bp, Gossypium hirsutum
  unsure (1)..(568): unsure at all n locations; Clone ID: LIB3825-027-Q6-K6-E8
cggncgcgtgggctgcaggnatgcacttgctgttctgaaggagaaagaacagctgaagctaaggagaactgtgaggggagaatgggaaaaagaagaagaatggcaaccagacatttaccaggcaaacattgaatgatatctgcctgcgtcgaaactggcctatgcccttctatcggtgtgtgaatgaagggggccctgcccatgcaaagagatttacttttgctgtcaaggttaacaccactgacagggggtggaccgatgaatgcataggtgagccaatgcctagtgttaagaaggccaaggactcggccgctgtgcttctcttggaacttttaaacaaatggtattcatgatagacaatattgaggacaatgattattttggtacttagtttcccaatactattttttcaatagcccccttattggtcgtggggtgcatcacaattcttatatttttttgtcattaattaaggcttagccgatcttattactatagaatcagcttgaacaataaaaacttgacccgattttaggcgtggtccgcttttggctatacatacattttc

SEQ ID NO: 3540 - DNA, 600 bp, Gossypium hirsutum
  unsure (1)..(600): unsure at all n locations; Clone ID: LIB3825-027-Q6-K6-E9
gcatataggacactaagggataggggtccataccctgctgatcaggttgttaaggatcttgaaggaagctttgcctttgtgatctatgacagcaagactggaaccgtgtttgctgcactggggtctgatggtggagtgaagctgtattgggggattgcagctgatggctctgtggtcatatctgatgatttagatgtcattaaagaagggtgtgccaaatcctttgctcctttcccaactggattcatgttccacagtgaaggggggctgatgagctttgagcatccaatgaacaaaatcagggcaatgccgagggtagacagtgaaggagtgatttgtggtgctaatttcaaggttgatgtttacagtagagttaatagcattccacgagtgggcagtgcaaccaattggactgatcactgggattcccattaattagtatttaaaaagaggagagagaagcaaaattaaacataagagagatgccatgaatatgctctagacaaacaccggggtttcttctgtttttcatcctagttgttggtttttcttttggtacttttctatgttatatgttggntgtgttggtttaatttcttt

SEQ ID NO: 3541 - DNA, 561 bp, Gossypium hirsutum
  Clone ID: LIB3825-027-Q6-K6-F1
cttttctcttaccatcatcataatcatgccgatcaacgatacaaaacagcacccatggcgtcaaaagctctacgactcagctccgtcgtctcgccaggtggctaagttcttgaccgcctcgacgttgggcgcaacgctgcttttcttgtctgggttaaccttgaccgggacggtcattgccttgataatagctacgccgttgatggttatcttcagtccggttctagtcccggccgggataaccatattcttggtgacgacggggttcttgttttctggcgggtgtggggtggcggcattaacggcgttgtcgtggatatacaattacgtgcaagggaaacacccaccaggagctgatcagctcgattacgcaagaaacaagctggcaagtacggctagggatatgacagagaaggctaaggaatacggacagtatgtgcagcataaagcgcaagaggtgactcaagggcaagcatcttgaatttagggttttaagaatggggggggggtttgggttgtttgagaaggtttatgctttgttaggttggtggtttctctttg

SEQ ID NO: 3542 - DNA, 570 bp, Gossypium hirsutum
  Clone ID: LIB3825-027-Q6-K6-F11
gcttatttgctcgcttttctgtttgctttatacttcagctctctgaagccacgtctcagttacccgtttcgcttcgggtaaattttggtgtataaatttggaaaaagaaaagttagaacaaatttggggattaatggaagttgatcttgaacccaagtgttagacacttcatctatgacggagaagggatatgaagaatttgggtgttcacactatagaagaagatgcaagatcagggcaccttgttgtgatgagatatttgattgcagacagtgccataatgatgccaagaactcaattgaaattgatccttttgatcgtcatgaggttcctcgccatgatataaaaagggttatttgttccttgtgtgacagagaacaagatgttcaacagcattgcattaactgtggggtctgcatgggaaagtatttctgttcaaaatgcaattttttcgatgatgatgttagtggtttgcttcatattactattcaaaatcatgcaattcaacaaaattggcttccttataatgggaaaacattttcttttcttgaattgcaaggtctcgaaaaa

SEQ ID NO: 3543 - DNA, 549 bp, Gossypium hirsutum
  unsure (1)..(549): unsure at all n locations; Clone ID: LIB3825-027-Q6-K6-F12
tgcggncgcgtgggcggacgcgtgggcgggcgcgtgggcaaagcttcatattatcttttttagttccgcaaagaaaacgaaaaaatagaagaaatacaatcgttttctttttgaagtcgggttttagtttttggggagaaaaaatgttgggagtatttagcagtgcgatagtgtctgcgccggacgagctggtggcggccggttgccgaactccatcacctaagataacggcggatgctctggtgaaacggttccttgagacgaactcctccggcgtgtccatgcagatcggagaccatgtccaattcgcttattctcaccataaagagtctcctttacggcccagatcatttgctgtgaaagatgaaatcttctgcttgtttgagggagcccttgataacttggggagtttaaagcagcaatatggtctggcaaagtcggcaaatgaagtgattttggtcattgaagcttacaaggccctttctgaccgagcaccttattcttcaaaccatgtgggttgggcctttaaatgggagctttggtttcatt

SEQ ID NO: 3544 - DNA, 591 bp, Gossypium hirsutum
  unsure (1)..(591): unsure at all n locations; Clone ID: LIB3825-027-Q6-K6-F2
gcgttcgggnaagagaagggcttttccgccatggnatacaatgcaaaaaagtgcttctggtggttgtgtactttgcaagaaatgtggtatctactacaacttcatgctcgagcatgcaaagaatctgaatgccatgtaccacgttgcagagatctaaaggaacatttgaggaggcttcaacagcagtctgattctcggcgaagggctgctgtgatggagatgatgagacaaagagcagcagaggttgctggtaactctgcgtaactaaaaccaaattgtaaatataaatttggattttgatgaaaatgctccctcctagaaaggcaggtagaaaatagttttcgtgctgctccattggttcacttcttgcaactaggcgctgatggggaaagccggtggatctctagaagctcagaagggtatataggcatagaaaactacaaacagattgattagtgatggcttcttagcgcacaattctttcattcataaaacacgtgaccagattccctaaaaccaagttgatgaagtttttatagatctgatcagcctgcaacagttgcttactatgccgncttgccttgcctcgcc

SEQ ID NO: 3545 - DNA, 600 bp, Gossypium hirsutum
  unsure (1)..(600): unsure at all n locations; Clone ID: LIB3825-027-Q6-K6-F3
tgtcgnaaagttcggnatacccattgnacaatgtgaaagccaanattcaggacaaagaaggaatcccaccagaccaacaaagattgatttttgctgngaaaacaacttgaagatggaagaactcttgccgattataatatccagaaggagtctactctccatttggttctccgccttcggggtggtatgcagatctttgtaaagactcttaccggaaagaccatcactttggaggttgaaagttccgataccattgacaatgtgaaggcaaagatccaagacaaggagggtatccccccagaccagcaaaggctcatctttgctggcaagcagctcgaagatggtaggacattggccgactacaatatccaaaaggagtctacccttcatttggtgttgcggctgcgtggtgggatgcagatctttgttaagactcttactggaaagactatcactctagaggttgaaagttcagacaccattgacaatcttaaggcaaagattcaagacaaggaagggatcccaccagaccagcaaaggctcatatttgctggcaagcaacttgaagatggcaggacattggctgattataatatccaa

SEQ ID NO: 3546 - DNA, 598 bp, Gossypium hirsutum
  unsure (1)..(598): unsure at all n locations; Clone ID: LIB3825-027-Q6-K6-F4
ggntatctcctctttgttttcgcattttcttgctgtctgcagcacaacatggtccccatcaaaattatgttatagagaaaatggtatgtcccatgaaggtagatccaactctggatatacctgggggttttattttcaaggggtcaaactatcactgtcgagtttaagagcagctatgaggatcttctctggcatcttcaaagaggtcatggccccaaaacttctcacccttcttgatttgtatgaattttatgcaaattttgcatctgcttggcttcagaaaaattcagaaggtttagttttgatgatgcaacccctcatagttacatatactagtgggcatatgccttatgaagttgatatgatggctttgaaggaaacgttaaaccaggttccggatacagtgactgatgttttaatagatggccttgaggttgataaatgtgctgaggaaaaacaagttggagagctattgaatttgattccagaggatgagagatggcatattataggggcttttgtgtggcaacacatgtccagattcatgaaacataagttgaattcattagccatttctgatgacagttttctttctggc

SEQ ID NO: 3547 - DNA, 203 bp, Gossypium hirsutum
  Clone ID: LIB3825-027-Q6-K6-F5
gcgttcgtctatgtctacctctgccttcttctttgtactttgtgttctatgttattcgggtttaagataaatattaaatacgggtatgtgtatgacatgtataagctcaattgtttttttttctttaatttccatatttgaatatttggaaggttgtcaaagaatcatatttttataccatatttgaatatatgtggatatcg

SEQ ID NO: 3548 - DNA, 590 bp, Gossypium hirsutum
  unsure (1)..(590): unsure at all n locations; Clone ID: LIB3825-027-Q6-K6-F6
caagtttgatctcctactttttcttctctgggatatctgttttcatagtgatatcaactttgggatttcatttcttgcataaatcttcacgcttttcagcttcaaatcgaaggttcttctctgcttagcttacagaataaactttccgattagagaatcaactcttttaccacaagattctttcttggtggttggatgctactgcttaaggttgagtctgagaactgctttcttctagctgtaggaaagtaaagcgattctgtattgggaacttttgggcaactaaattcgtatcgatcataaagaggcagagagttggttttgtaggattatggattccgagagatagaccaaaagcaagagattcggattggcttctgatgatggagaaaagttcataatatgtgggtctgaaattcccgaggttgtcaaagcaacatacttttagttgagaattgttgataactcattgagattcagcttttgaccatggaaaaacagcagagttttaaacaagaacctcctcaagnactcctggagaagcaacaaagttttaaacaatctgaaaaacagcagagttttcgcggtgt

SEQ ID NO: 3549 - DNA, 580 bp, Gossypium hirsutum
  Clone ID: LIB3825-027-Q6-K6-F7
gttgctttctctttctttcttccataaaacacgcctttcttttcctttctttttgcaccactgttatcttttcaagggaagtgataaaagaagatggagaatgaaggaacggcgattgatctcagagggaccccaacctacgatggcagatatgtacgttacaacatcttaggtaacatcttcgaagtctcttccaaatatgttcctcctattcagcctgttggtcgtggcgcttacggcatcgtctgctgtgccacaaattccgagacaaaggaagaggttgcaataaaaaagattgcgaatgcattcgacaacaggattgatgctaaaagaacactccgtgagatcaagctcctctgtcacatggatcatgataatattatcaaaatcaaggacataataatcccgccagagaaggaaaagttcaatgatgtttacattgcatatgagctaatggacactgatctgcatcagataatacggtctagccaggctctcactgatgatcactgtcagtatttcttatatcaactgttgcggggtcttaagtacatacactcggcaaatgttctgcatcgcg

SEQ ID NO: 3550 - DNA, 568 bp, Gossypium hirsutum
  Clone ID: LIB3825-027-Q6-K6-F8
aatatcaacctaattaaaaatttattaatactatatatatcttttaaatcatagacatctatggattcaatattttgtaaaaaaaagttaatttaagatattaaaaatatctttgatctcccaagagtgcttggcttagaaatcctagagatagcaatgactgctgcggcttgggatggaagcaagtggtggcgtagaccgagagagaagggataagatctctcttcttgctgaagaactaattcaattatcagtcaaaggctcgatggtggtaccaagttccaaacctacactgatatgtacggtttggacagggaaagtttatagcccagatggctttagggctcatatgaaaagtatatggaagactaggaagaagtttgagatacaggtggcgggacaaaattaatttctaataatttttgagttggaagaagatctggaatcgattttagaggggaggccttggctttttcggaaaaatttaattctgtttgacagattaaataaagagatggagagagataagatccagcttactttatcccctttttgggtaaaaaatgaa

SEQ ID NO: 3551 - DNA, 533 bp, Gossypium hirsutum
  unsure (1)..(533): unsure at all n locations; Clone ID: LIB3825-027-Q6-K6-G1
tttaattttctctcttcatcggggttcctttctccagaattctcgctcctctctctacgatatgtcaaaggtggnncgcaaacggaaagtctacccaaaaacggtaccgttttcgacagttccctggtcttcgctttgcaaactatggttgtcgagaccgccattgttgccacaaagtctttcgcttggtcgctcatgatgatgggaactctgcctaatggaattgatgtcttcatcaaagagcctgaggcatatgcagggtttccacttgctcaacttatcgcgatgactaaacctggtcctgagaacaaggatgccagcgacactgatgatgatgacgacgatgaagatgaagcagtggatgatgaagatggaggtgaggaggaagatggatctggcgaagaagatgaagaggaaggtgatccagaagatgaacccgaggccaatggagatggtggcactggagacgaggatgacgttgatgacgacgatgacgacgatgatgagggtgaggaagaggaagaggaggaaga

SEQ ID NO: 3552 - DNA, 598 bp, Gossypium hirsutum
  unsure (1)..(598): unsure at all n locations; Clone ID: LIB3825-027-Q6-K6-G10
cggccgcgtgggcggccgcgtgggggaggaaccgaagcttttcctgatttgggtaaacattgtcaattttcaggttgtcatcaattagattttcttcctttcaaatgccaagcttgtcataaggtgttttgtgtggaacatagatcgtgtaagtctcatgaatgtccggaaccggaacataacagtaggaaggtgattatttgtgaaatctgttctacgtcgatcgaaataacgggcaaagaagatcaagagaagatgatattggagaaacatgagaagtctgggatttgtgatccaaggaagaagaagaaaccaacttgccccgttaaaagatgtaaagaaacgttgacattctctaatagaaccatttgcaagacatgtcgattggaggtttgtttgaaacaccggtttccagctgatcatgcttgcaaacaggcttcttcctccaccactccagcggcagccgctggaggaagctggaacgagaagttcttggtggcttttggtttaaggaatgggaaagattgtggcaagagtgggcgaccttcatcatcgactactccatttttaaaggcctattangacttttatggtttat

SEQ ID NO: 3553 - DNA, 547 bp, Gossypium hirsutum
  Clone ID: LIB3825-027-Q6-K6-G11
cggccgcgtgggggcttttgctcaagttccagacttgaatatatggtatggacccgattcctactgggtgcgaatattaaagattgttccagcagagactttgtgtccgtgaggaaatgctgaaatcacccaaaacataacagagactctattaaatcattgctacctcgcctgcactattatgagaatggaacatgtattgtgcatcatctttttgggcatgaagttgtagagaggataaatgaaatgtactgtgatgcatttctcacagcacattttgaggttcccggagaaatgttctcattggcaatggaagccaagagaagaggaatgggtgttgtaggctcgactcagaacattttggatttcataaaacaaagggttcaggaagcactagacagaaatgtcgatgaccacctccaatttgtcttgggtacagaatcgggaatggtgacttcaattgttgctgcagttcgcagtttgttagattcttcaaactctacttctagcacaaaaatcaacgttgaaattgtctttccggtctcat

SEQ ID NO: 3554 - DNA, 514 bp, Gossypium hirsutum
  Clone ID: LIB3825-027-Q6-K6-G12
aataacagaaggctctttcagcagccactcttctcactgcccttgcagtactctgctctttcttctacgttctattttacatctcatcaagcaaaaatggaaaaggaaaagggaaagccattcccggtccgcgacccttgccaattattggaaacctccacatgttaggcatgcttccacaccaatccctttatcacttggccaaaaaatatggtcctatgatgtccataaggctaggcgttgtgccaactgttgtcgtttcgtcccctcaagtcgccgagatatttctcaagacacatgatgctgttttcgcgagcaggccaagacttcaagtcctagaattaatttacaatggcaaaaggggcatagcattcacagaacttggatcatattggcgtagtgtgaggaagatttgtaatatgacaatttttactgcatcgaaaattgaatcgtttgcatcaacgaggaaggaggtgctagcgcatttcattgaatctttgaaagaagctgcatc

SEQ ID NO: 3555 - DNA, 564 bp, Gossypium hirsutum
  unsure (1)..(564): unsure at all n locations; Clone ID: LIB3825-027-Q6-K6-G2
tccganagcttggtaagggacttaaagctcttggagttcctagaatgaattatagtttcgacaaatgtgggagatatcgtgaaggttttgatttcagtgctgagagagtaactaaaagcattgatgaaagcttggagaggttgcaacttgattatgttgatatatttcaatgccatgacattgaattcggctctcttgatcaggttgtgaatgagacgattccggcacttcaaaaactgaaggaagcagggaagattcgtttcattggtatcaccgggttgcccttggaaatttttacttatgtgcttgatagggttccaccaggcactgttgatgtaatattatcatattgccattatagcattaatgattcaacattggaggatttattgccttacttgaaaaccaaagtgttggcgtaatcagtgcatctccacttgctatgggacttcttactgagtttggtccaccggagtggcatccggcatctcccgaactcaagtctgcctgccaagctgctgctgtatattgtaaagagaaaggaaagaatatttcgaagttagc

SEQ ID NO: 3556 - DNA, 600 bp, Gossypium hirsutum
  unsure (1)..(600): unsure at all n locations; Clone ID: LIB3825-027-Q6-K6-G3
gntggccgcacgctagccgactacaacattcagnaagnaatccacccttcacttggttcttcgacttcgtggcggcatgcaaatctttgtcaagacctctcactggaaagacaattaccttggaggttgaaagctctgacacaatagataatgtaaaggcaaagatccaagacaaggaagggatcccaccagatcagcagaggcttatctttgctggaaagcagcttgaagatggtcgcaccttagctgattacaatatccaaaaagagtccaccctccacctagtacttcgtcttcgaggtggcatgcaaatctttgtcaaaactctcactggaaagacaattaccttggaggtggagagttcggataccattgataatgtgaaagccaagattcaggacaaagaaggaatcccaccagaccaacaaagattgatttttgctggaaaacaacttgaagatggaaggactcttgccgattataatatccagaaggagtctactctccatttggttctccgccttcgtggtggtatgcagatctttgtaaagactcttaccggaaagaccatcactttggaggttgaaagttccgatacca

SEQ ID NO: 3557 - DNA, 603 bp, Gossypium hirsutum
  unsure (1)..(603): unsure at all n locations; Clone ID: LIB3825-027-Q6-K6-G4
tgcttattgaactttggtgacagtatcacaacagnacacatttctcctgcaggaagcatccataaagacagtcctgctgcaaaattcctacttgaccgtggggtggagcgcaaggacttcaactcttatggaagtcgtcgcggtaacgatgaagtgatggcacgtggaacttttgctaacattcgccttgtgaacaagctgttgaatggggaagttggcccaaaaacggtacatgtccctacaggagagaaactctatgtatttgatgcagcaatgaggtacaaggatgcaggatatgacaccattgttttggctggagctgaatatggaagtggtagctcccgagattgggctgcgaaaggtccaatgctattgggagtaaaagcagtaattgccaaaagttttgagagaatccatcgaagtaatttggtaggaatgggcatcattccactttgttttaagtctggggaggacgccgacacactaggtttaaccggtcatgagcgttataccatagatctcccaagcaaaataaccgatataagacccggtcaagatgtgactgtcacgacggataatggggaagtctttcacctgcactgt

SEQ ID NO: 3558 - DNA, 564 bp, Gossypium hirsutum
  unsure (1)..(564): unsure at all n locations; Clone ID: LIB3825-027-Q6-K6-G5
tccgaaagnaacttgttttcttgagctgaaagtatggttcctttatacacagaaccaaaaaggcatttccagttctaactaatatattacccacatgtaaatacataacaatccatccaaatatttggatggtatggatggtatgcccccagaaacacccccaaacacacttacccgttgattgccaatcaacgtctccgaactcgcctgccatttggattcatcggttctgctgctggaccttctgctgcaagatccatcccgtatacactgctgacactcctcttccgacttgaaagcagactcgagctctcctcgctggatgcaaaggccttcaacatctccgataacaaagatggacaacattcctccaagtgcttgaacccttctgattgcatcaccgctcccaagtttgacggagttgcagcaaattttaaacatatggccttaagctgtgcacaatggtgctgctcagcaagtgcaagggttgttgccaccgtatcagcattaagttcttcacacaattttgcctcacacaacactttgagtctatctaaattgtac

SEQ ID NO: 3559 - DNA, 598 bp, Gossypium hirsutum
  unsure (1)..(598): unsure at all n locations; Clone ID: LIB3825-027-Q6-K6-G6
ctgaaagcgaactgaacgnagaaagcgtaggagcaacctttcagtgaaagaggaggcgattctgcctaaaacaatggaacaaagtgaaccacttccagcttcttctttgaccacttcatccgagccagtagaactgaactacgagtgcttcaacagcagcaacaatagagtggctgacgccatccttttcccagaactgaaagatgggtcatcagatagtgactcaagtgctatcttgaatgaagacgaccacaccaacaccaacaatggtgttgtttcgtcatctggggtcctacaaagccaacatcttttgatgtcaccaacgacaacctcttcattcaatttcgactcatcttcttcgtcttcaccatcctccatgaattgtttccagttctcaaaaacaacctatcttgtgaagatggaagagcacaatttctttactgcagatgaagcttgcaatttcttctctgatgagcaagctccaagtcttcaatggtgttacccggagcaatggaactaaaagcagaagccaaaatgaacatgtatgtaacaaaatgctaagaaataagccaaaaaagcaaagttgggtatctaaaat

SEQ ID NO: 3560 - DNA, 559 bp, Gossypium hirsutum
  unsure (1)..(559): unsure at all n locations; Clone ID: LIB3825-027-Q6-K6-G8
ntgaggaacaanagaacttttcaaggttaatgctgatgacatgatcctgaggataagagaatggagagcagcaggtgggatgcagcctggaatgctcagtacaagtcagcctattcatgatcctgntacctagtccttcagtatcaggaatcacgcaagnaaacagnaaaacatcacaatctgtagcttcattatctatggttgcaccatctcctgcactgcatccatctatgcaaccatcttcatcagccctgagacgaggtcctccctcaggtgcaaagagcaagaagtcaaaatcatcgacgcagtacacttccacaggtcttcctggcagaccccaggcttctaaccgcatgtcttctggggcctttgcaacaaatgaacctgctgaagcagcaccatatgatccattaatcggaaggaaagtttggacaaggtggcctgaagacaaccatttctatgaggctgttattacagactataaccgacttgaggggcggcatgctttggtttatgacattaatacagcagatgaaacttgggaatgggtcaatctcaa

SEQ ID NO: 3561 - DNA, 599 bp, Gossypium hirsutum
  Clone ID: LIB3825-027-Q6-K6-G9
aagggttcgtttctctttgcgcctttcttctctcggcccgaggtaagtcatggttaagcataacaatgtcgtgccaaatgggcacttcaagaacactggcagaactatgtgaagacttggttcagtcagccagcacgaaaggctagaagaagaatttcaaggcaaaagaaggctgtgaggatctttccaaggccaactgctggaccccttcgccctattgtccatggccagactttgaagtataacatgaagttgagagctggaaagggtttcacccttgaagagcttaaggctgctggtatttcaaagaaacttgcaccgaccattggtatcgctgttgatcaccgccgtaagaacaaatcacttgaaggtcttcaagccaatgttcagaggcttaagacctacaaggccaaacttgttgtcttcccaaggcgtgctcgcaagttcaaggctggtgattcaactgccgaagagctcgcaactgcaacccaagtccaaggaccatacatgcctatttctcgtgagaagccttccgttgagctcgtgaaggtcaccgaggacatgaaatcattcaaggcatacaacaagctccgtgttga

SEQ ID NO: 3562 - DNA, 607 bp, Gossypium hirsutum
  unsure (1)..(607): unsure at all n locations; Clone ID: LIB3825-027-Q6-K6-H1
tccgtgnagagtgccgttcgtggttgggcttagacagtgatagctccccttatagaaatacatctattgtagaatttgtcttggaaaactcaaaggatgacgatgacagagatcttcccgggctttgcaaactgctggaggcatggctaatggaggtggtttttcctagatttagagacaccaaagatatacaattcaagcttggagattattatgatgatcctactgtcctgagatatttagaaaggcttgagggagcaggtggttcacccttggctgcagccgcagctatagtgaggataggtgctgaggctactgcagttcttgatcatgtaaaggctagtgcaattcaggcattgcagaaggtgtttcctcttcgtcgctcagaagagactgcgagacatcaattagatggtgagatgaacaactttcttcctgttgaaagtgaggagactcttggaaaacctgatcaagaggattctgccatcctagctgaggttcctggaataagcagtttggaaggaatgtatgaagaagaaacaataagtgacaaaattaaagatgccagtgtcaagatcatgtctgctggtgtggtaattggagtgat

SEQ ID NO: 3563 - DNA, 355 bp, Gossypium hirsutum
  unsure (1)..(355): unsure at all n locations; Clone ID: LIB3825-027-Q6-K6-H10
tccgttgtttctaaattaatacgtgagtaggcttgactttctatgggaccatgtgaggaggttggagatgaaaatccagactttgtgcatgatcatgatgaagagctggagtaccatcccatgatggactatgggttagagagcgaccaccctagagtttacactgagccgccctccatggatcctatttcgatgtactctatgaggtgcatagcttaagctttaagcccgtgctgaaaggttgaaactttagatttgtagttgatacgttatgggttttgctttttgatagaggagttttggtgttcatattgtataaaatgggagtttgtaaatggaaccttaagacgtcnaa

SEQ ID NO: 3564 - DNA, 557 bp, Gossypium hirsutum
  unsure (1)..(557): unsure at all n locations; Clone ID: LIB3825-027-Q6-K6-H11
gcgttcggccgcctgcgtctctctcttcatctctctgaaccaaaagtctttagcttttcgcttcgagaganccatgttggtttaccaggatctcatctccggtgacgagcttctttctgactcattcccctacaaggaaatcgagaatgggatgctgtgggaagttgagggaaagtgggttgtgcaaggagctgtcgatgttgacattggtgccaatccttcagccgaaggtgctgatgaggatgaaggtgttgatgaccaagctgtgaaggttgttgacattgttgacactttcaggcttcaggagcaaccccctttcgacaagaagcagtttgtcgtgttcatcaagaagttcatcaagaacttgacaccaaaactggatgcggaaaagcaagagtccttcaagaaaaacaaggnaggagcaaccaagtttttgctttcaaaattgaaggaccttcaattttttcgtagagagagcatgcatgatgatggatgcttggtgtttgcttactacaaggatggtgctgttgacccaacatttttgtactttgcatatg

SEQ ID NO: 3565 - DNA, 591 bp, Gossypium hirsutum
  Clone ID: LIB3825-027-Q6-K6-H2
caaaatacaaaaaatgtgctaatttttgcttcttaggagacggagaatagcgaaactctggattccacctcttcccgtcctcggcgacggtgcttatgccacttggttttaagattgcaccgggcttggatttaaaaggatttagtttccttttcaagacatggaacaagtgtgcttctggtcaaattgctaccttttccggatgttttcattccaagaagtacttgactggcggtttatcatccatggagattttctcttggtttcatttgtcaattgcacttagtgcccagtctctttttaatacccaaagcaggaagcgtaatgcaagttttttcagggatacgtgttagatcgcacttctgcaagtaaggtattttgtctttctccatttgactgaaaatagatagtaaggttctaaaacaattttcttggcagtgctttgctgatacaacatttggtcaaagattttgcgaaaacaccttccaggtatacacaatatatgcttacatgattatctttccccatatctattaagtattaacttttgtccattttgtgacctttactttatttttctattttcttgtc

SEQ ID NO: 3566 - DNA, 596 bp, Gossypium hirsutum
  unsure (1)..(596): unsure at all n locations; Clone ID: LIB3825-027-Q6-K6-H4
tccggcanagttaatgccganagaaacaccgtaagctcgaactctgtcgccatgggtcgtatgcatagccgaggtaagggtatttccgcatctgctcttccgtacaaaagaactccacctagttggctcaagatctcctctcaagatgtggaggagaacatttgcaagtttgtgaagaagggtttgaccccatctcaaattggtgtcattctccgtgattcacatgggattgctcaggtgaagagtgttacgggcagcaagattttgcggatactgaaagcccatggtctcgctcctgaaattcccgaagatttgtaccacctgattaagaaagctgttgccatcagaaagcatcttgagaggaaccgcaaagacaaggattccaagttccggttgatcctggttgagagcagaatccatcgccttgcccgctattataagaagacaaagaagcttccacccgtctggaaatacgagtcgactactgccagcacacttgtggcctaagggaagacactgttggaaccagcttcttgcgctttgattgatggacccctggatatgggttggagtagtaaagttttaattacatgcta

SEQ ID NO: 3567 - DNA, 570 bp, Gossypium hirsutum
  Clone ID: LIB3825-027-Q6-K6-H5
ctttggttttgagagaaaagatagatcttggcttctctccttcgttcgattccgcttaattatagcccgcgtttctctcaccgtgaaaaaggggctgtctttcacaaagctatttagccggcttttcgccaagaaggagatgcgtatactcatggttgggcttgatgctgcgggtaaaactaccattctttacaagcttaagttgggagagattgtcactaccattcccaccatcggtttcaatgttgagaccgttgaatacaagaacatcagctttactgtttgggatgttggtggccaggacaagatccgaccattgtggagacactacttccaaaacacccaaggacttatttttgtggttgatagcaacgatcgtgatcgtgtggttgaagctagagatgagttgcacaggatgttgaatgaggatgagctgagggatgctgtgctgctagtattcgcaaacaagcaagatcttccaaatgctatgaatgctgctgagattactgacaagcttggccttcattcactccgccagcgccattggtatatccagagcacatgtgctac

SEQ ID NO: 3568 - DNA, 585 bp, Gossypium hirsutum
  unsure (1)..(585): unsure at all n locations; Clone ID: LIB3825-027-Q6-K6-H6
gtctcacttcgggaggtcagggccgcccgncattagcgatacttactctcttctcatcctcaacatcacctttcgcaccagtgctgatgatttgtttccgctcttcgacaagtacggcaaggtggtcgacatcttcattcccaaagatcgaaggaccggtgattctcgaggttttgcatcttgttcgctacaagtatgcggatgaggcacaaaaagctgtggataggctcgatgggagagttgttgatggtcgggaaataacagttcagtttgcaaaatatgggcctaatgcagagaggattcacaaaggaaggatagttgaatcagcaccaagatcggggcacaggtcaagaagccgcagtcctcgcagaaggcaccgtgatgaccattacagagatagggattatagaagaagtcgtagtagaagtcacgacaggtatgaacgtgatcgctatcgtgggaaagacagagattctcggcgccgtagcaggagtcgtagtgctagtcctgactattctaaaggccgaggaagaggccgctatgatgatgataggcggagtgttagtcgatcgataagtgcttctc

SEQ ID NO: 3569 - DNA, 603 bp, Gossypium hirsutum
  Clone ID: LIB3825-027-Q6-K6-H7
taaaaaaaaaaaaaaaaaaaaaaaaaaaaaaaaaaaaaaaaaaaaaaaaaaaaaaaaaaaaaaaaaaaaaaaaaaaaaaaaaaaaaaaaagggggggacctttttaggggttccaagttttacgtccccgggggggggccgttttggtttttcttttttgccccctaattcctttcccgtgcccgtttttttttggggtccgctttgggaaaacccttggggccccccttttttttcgcttggcggggcatccctttttccccccccggtttattcgcttgggggcccgccccttttcccctttcccgccttttgcccaaccgggtgggccagtgggccgccccctgggggggcgctttaagcggggggggggggggggttccccccagggccccctctccctttgccggggccttggccccccccccttaccctttttccttttcttttctcgccccgcccgccgtttttctttttaaggtttttttttggggcgctcctttgggggttcccttttagggttttccggggccgcccccccaaaaattttgttttgggtgttggttccccttgggccccccccccttgatgccgggttttttc

SEQ ID NO: 3570 - DNA, 545 bp, Gossypium hirsutum
  Clone ID: LIB3825-027-Q6-N6-A11
ccatggaataactagcatttagacatacataacaccaaacatgtccttgattagccattccaacagctaatcattatcaagcatttacataccatttatcaaccatatcataagatcatacacacaaaatggctagatgctatacatgccatactcaaaatgaaacgactagctataccaaaaaaatcctcgtgatagtgtgcccggacctctgacgtactttatgatctccgagttagcttgacaaaactcgaaacaaaatatgatcatctatatcgatttagtccactatctttttccttccttggtttaactccggattttgttcttcttgatctcgaatttgtggtcacgaaaccactattccgattaggccctatttcgggatgttacaaagtccttggcaatgctactctgaatattttcagattacatgtcatcttgcaagggtaatgcagctgaaccctaagattccaagcttttgatccatccacgtagcaaataatttaccacctcaggaacttcatcatgagggcaatgccctg

SEQ ID NO: 3571 - DNA, 520 bp, Gossypium hirsutum
  Clone ID: LIB3825-027-Q6-N6-A12
acagaaattgactggccgcatatataatatatagtgcaggtacagtgaggatttttccagaaggcgtctttgcatttaatacaagcatgagtgggagagcgataaacgacaaatagattgctatcagacttttaacatctcgtaggcctatcataaatgggaggtaaggatgggcaattttcattcatattggcatatggttctaagctgttataaaatggcaactccatccaatactcgcccagaatctgacagaatggaagccggccatccccattgttacaccaactaggcaggttcgtttggttgttctcaaatatcttaagcatgtacgcatcacggatagtgaattcggttacttgaatcgagtttgaaaggggaccgaagaccccagcctctttatacatctcaaggataaaggcaacacatgttgttgatttcccatcactgtagacccattcatcttgttccgggatagtgagtaattgatcaaaggttatcccgcgcctttcagtctcct

SEQ ID NO: 3572 - DNA, 193 bp, Gossypium hirsutum
  Clone ID: LIB3825-027-Q6-N6-A2
actaaaaaagtataatttctgttataaactagcaaaaaataaggacctattacagacctatataggcaacatacagggcccttgaaaccatagacccaaatccttcaaccacacatgctcgctatcggcgtaatacaccccctcctgagacataaacctttaacgccaagctccggccacgtgcttcaaccca

SEQ ID NO: 3573 - DNA, 505 bp, Gossypium hirsutum
  Clone ID: LIB3825-027-Q6-N6-A3
gatagccaacatttggcttgccattgtttactatcaaacaggtcaagcaacggaacacaatccaaatctttgggagtcatattcacataaagctaaacatgggcattcctgaattagatgtcaggttgatttcaaactaaagaaatctctaactgggaagatgctaaaaaacagaatcctacaaatccatcttatacatcggctgcctcgaacgggactcggacaaacaattgaccatgcagagtaaccacagctgaagtggggggcggatcgattctagatggcaagctgacaacctcctcacgaaaaagcccgggaaccaaagcatagacctcatagcagtcaacggttttttgcacgttaatcttcacccaatcagctggggctccaacatcaacaaccggggtatccaacctaccaaaaaaacgctgggatttagttgctttaagttgaaaaactcggacaccagagtccaaaggggatggctttttacgcttcaataaac

SEQ ID NO: 3574 - DNA, 473 bp, Gossypium hirsutum
  Clone ID: LIB3825-027-Q6-N6-A4
agggaaaatacaaactcttttattgcaactatatattaaatgtgattttcttttaaaagatatatggttaaatatttttacccaaaaactcaacaggcgcccacatggccttcaaatataaggaggaaatataactctccaccgcgccagaaatcactggaaaatcatttacagcttacacaaatttcagatgcaaaattcaatcaaacacgatatagctttataacctgctcgatcttggcacgacaaacagggcagccccattttttcgctttgatctcggtcaaacatgacatacatccggcaacatggccacaggggacacaagctgcctctgatggagcatccaaacatatcgtgcatgaagaagggcccccatcttcctttgtttgaccagcattagcagctaagttttcagcaccccgggaaggcatattgataggagttgaatcgattgatggatattggattgg

SEQ ID NO: 3575 - DNA, 403 bp, Gossypium hirsutum
  Clone ID: LIB3825-027-Q6-N6-A5
cttaacggccccttttttttttttttgatttttatttaatgatatttattaaaatattcggaattttttacatgagaagttaacatccctcaaatggacaacaccaaccttgtcaaaactaatgaccttctttttttttccggcaaacaaaccactattgccggaaaacaggtttatcgggaaaacagtcttcggcttgacatgtactacctaaacacagtcttgcaagacccgttgaaccgtctaacaaactattgaaagaggcggggaactctacaaaacggtctggtgggcctcttgttacaagaggcggaagcttgggatctacgagcccctgactccgataagagcaagggctaaataaccccttccgaagcttgagggttctcggaagtacaaacca

SEQ ID NO: 3576 - DNA, 265 bp, Gossypium hirsutum; identical to SEQ ID NO: 2039
  Clone ID: LIB3825-027-Q6-N6-A6

SEQ ID NO: 3577 - DNA, 550 bp, Gossypium hirsutum
  unsure (1)..(550): unsure at all n locations; Clone ID: LIB3825-027-Q6-N6-A8
atccatactacgaagcagaaaatatgaattatatacagngccgaagttcttgcaaggcgaagcataacatttngaaacttgaaatggaacaaacgacaacagttcattgataaactatgatattagataagcctgtctagatgatcttctcttagaatgaagcatcttcgacaattccagtatctgtaacctctcgaacaaggtttttggtggaaggcaatccagctacgacatcggattcgataccgcattcatctacaccccttttgatcttgaagtaaccatcatcaccccagcctctattccattggtttgcaagaagccagtaatcctctccatcatatgaagttccccacccgatcagcttaactgcatggcctcccataacatcgccagtcaaatgtctgtaaactcccgacttgtagtgagcaaaatcctcataaacggtgaaggagacctcaaccggtccattcttataaacctcagccatgatatcagcaggatttgatttgatcctatacgcaccgacgctatagtgttttgactgctt

SEQ ID NO: 3578 - DNA, 543 bp, Gossypium hirsutum
  Clone ID: LIB3825-027-Q6-N6-A9
cttcttgaaaatattttttgggtatttttttttctttgaggggtttatcacaagttaacatgaacactagcatttttagtggatttacaaacggggcaaacgtgaagtgtagacccacaaatcgtacacaagcacaaatgcctacacggcaacagcagcacacacgcttcttccttcccgcaattcctacactcccgtcctccaccaccggcgacggttttctccgctgttgcttcccagttgctcccgcaacaagattgtgcatcgtgcacctcgtctgccgccgccgcttccgcttcctcacggttgttggcagcggcggcgagtacttgttctaagttggtccgtaacgcgttggctgttgcctcgttggtttgagccaaatctcgccatatttggttctctacgcatagtgatttcaccctttcttcgagtgcccaatttaatttcccaatcttttcaatctcttcttctttggcttttagtttcttcatcactccaccttcgattgcttccattatcttcctggcttgtctcttcctt

SEQ ID NO: 3579 - DNA, 573 bp, Gossypium hirsutum
  Clone ID: LIB3825-027-Q6-N6-B1
ggaaaatgaaatcaacacttcattagcatcatatgatctcaaaaatgaaaactacagactgacaaaaaaatccttgtggaggccaacaatttcttctctctctcttttttttccatcaaataaagattaacaaggaggagccaatcataaaaagtatatcaaactccatgtaaaactataacagtcagttatattcacgtacatcagccaatgaaaaagaccgccagttagagaaattccggccaccactcgacggtgatgaagaaggggtaatactaatactgttattatacaaagaaaccattttcgtttgtgggtgtaatggaggtagtaataacctaggactggaagttgaagaagaatcctcaccagcgcttgaaaaactatcagtctctgaaccactcattgcaacagcaagtgctaatgtgcttttacttgaacttattggtctaatgaactttttgctcctgtttttatcccatatatgattgattgctaataaatttctccttcttctagtataagcattttcaggttttgctatgtctttaatggaggaagctgatgatgcat

SEQ ID NO: 3580 - DNA, 492 bp, Gossypium hirsutum
  Clone ID: LIB3825-027-Q6-N6-B10
agcggaagattgcctttatgtttttatttgctcaattttaaatatcacaagacttaattactttgtttataagaactaaattgctggactaaattactctatttattttgaaaagaactaaattacttcttttcccaatattacaaaaaccttctagtacttttttttttttaaaaagggggatttcttttgtcatttccatgctgaagccgaagaagaagcagcatcaatattaatactgtaagcaggcagcttcttcaaatttttgtgctgaattttttgcctgaattccatggcatctttccatcctcctacactaacatacaggttggccagggaaatatagtagccgacaacattttcaggctccaatccaaaaagatgctctgcaacttctcttcccatctccatatttccatgataattacaagcacttaacaaggctccccaaacgccaactccagcctctcctggtatctgctttaaaaactc

SEQ ID NO: 3581 - DNA, 509 bp, Gossypium hirsutum
  Clone ID: LIB3825-027-Q6-N6-B2
aacatgacaaaacctgctttactgccattaataacacaaacgcgcaacaaccaaagaaaagacattcaacatacgaaattattaatatatttcaaacaccaaaatagagatcctaaaacggtaatcagcgcgacttctcaatttttacagacccctacttccatgcaaaatactatactccccatataaaaaactctttatacttctcaaacaccttctattggtagagcttccatcggtgattcaaacgttaatgctccagacaccgatgtttccttgcttcaaaaacaccattccatcgaacctgttgctggatccactcgtgacccttaccgcctatcctaaccctaaacccactttgtaaaccttaaacctcgatgagcttacgaccggttcacagttgacaccggaatctttgaactggaaaatctacggcgctgtttgccatgcatagcttcgttcatggatagctaaagcaaattgggatcttatagctgaccatttactga

SEQ ID NO: 3582 - DNA, 530 bp, Gossypium hirsutum
  Clone ID: LIB3825-027-Q6-N6-B3
ctctaattattcccaacttttattgatttatagaactgccctggctaacactgaacattacaacaggaccaaacttttctttatatggtacaacagtacgaacttgaaaaagaaaaaagtagaagcaaacaaacaacaaacacagactcaaggcagtagcagagcacaaaaggtcgctcctttcatttaataggatcgataataaggatcatcctgggtacctccgcgggtgctccttctagtcccagcattgttaggcgccgcacttgggaagtcttggtttcccgttgtaccgtaagcaccccctgtatctccgccaaaccccatactgctgaggtcatcttgcctgcctgtatcatacccactacctgcggtggggtacccacggttgtcatgtccaccggtaccgccatagccaccagtatcccctctgttgtacccagctgtggtgtagccagtaccaccaataccaccaccaccagcatggccagccgtggcgttatgatggcgggcctcttgtttcctcagct

SEQ ID NO: 3583 - DNA, 557 bp, Gossypium hirsutum
  Clone ID: LIB3825-027-Q6-N6-B4
cgccataagaatttccatcaactatatttaatacaaatcaatattagccaatatcaatggcctatacaaaatgaatatcacatccatttaagccaacacttgaggctaaactaaatgcacactaaccaaaaagaataagtccctttcacttgccacactcaaaacatttaacctaactgtaccaaaaccttcaggtgataatgtgactaatgcctctgacgtcccttgattcccgatgctagcttgggggcacttcgcttacttgaaagagcgtctggacaccaagagggcttctggagaaaggtttatgctttctattggatgtaacaaaaaaaatcttgcaatattccactggcggagacagcacatgaaaattttcaagtatggaaaagggaactgtccacggatttctaagtcaggagcacctataaactattacaggagactaacttggatcctagtagttatagtttacacgccgaactaaaaatttctataggaaactatggaaattatacatcccctcaaaaattataattacagtatgtagaatctct

SEQ ID NO: 3584 - DNA, 107 bp, Gossypium hirsutum
  Clone ID: LIB3825-027-Q6-N6-B5
atctatatcctttctctttttttttcccagtgagtatgcgaaaacgggcctgtatgcaaaaccggtcttttcctctaaagtagaaaaataaccattcgagggcgtgg

SEQ ID NO: 3585 - DNA, 528 bp, Gossypium hirsutum
  Clone ID: LIB3825-027-Q6-N6-B6
atcccaaactaaactaaggcttcatataacaactgagatcctgtcagcttttacataaagagtgctgcaaacatgtgtttataccccaaataaacccatccaatcaaagtaataaaattattttaaggggaaaaaaaagagatccattgaatatattaacaatgtaaacatgcttattgaactcatatctgtgtagccatggcaaaggagagagcttgagaaatgggcagtgccgcaatcgaaaactttcttataatctagatttggcctgctccaccggcgcgctcaatggagcacccttggctgccatttcagccaagaaggcacaaggcttgaagaattctccatacatttttgtccactcctccagtctacaataaatgtagttagatccgagagagtcggcccaaaacatgattcctccccggtaaggtggaaatcccattcccataacagaagcaatgtcaaggtcagcccctttcactgcaataccttcggctaaaacccggcaagtctcattcacaactg

SEQ ID NO: 3586 - DNA, 500 bp, Gossypium hirsutum
  Clone ID: LIB3825-027-Q6-N6-B7
aaccttaaaaatattacttaactgctaaaaataaatcagtcaaaaagacaagagggcatttatcaatctctaaaagccatttgttcctttcaattgatgcataattcttatttaaaagaaagggtgatttgatctacaaaatggggcaaagtattatatgaactcaatatttgaaaactcagcaaaggattcagacttcaatatgttccttcaccttgcagtttgctgtagctgtatcaacaagcaggacagatttggctaaaatacaatcagctttggccatttaatttctccaaaaggattttgttcaacaggccagggtttgctttgccttttgatagtttcattacttggccggcaaaaaagccctgcagcttagttttcccactacgatattgttctagctgttttggattctcaaaaatcactttatctatcattttcccgatctcaacaggatcagctatctgaatgagatccttctcttctatgagtccctt

SEQ ID NO: 3587 - DNA, 556 bp, Gossypium hirsutum
  Clone ID: LIB3825-027-Q6-N6-B8
atggggcaaagccaaagaatgatgattactcattttactcaatcataatcataaagttaataactgaaagatggatcttattttatatattatatgtcaactcaaacctcaataaaacgtttgagtcgatccgtcgacgcttgctcttctatatgaaatacccgatgatcttacatcatatgggttagaccagcctccttgctcaaagtccgaggctctaccattactattccaatgctgtctaattgagtcagtgtacaaaaatgtcagtgaccgcgcatggccatccatctccgcccccgaatctgtgtcaaaaccatgataggaggacgaggcagctgtttctgatgaaattccattttggttgtaccattcaggtcccgtttcaccaaataaataatctgagaagtcttcactcctggaagagtccttagtgcttgtagtgctgcacgagcttgcatcggagccgctgaaaatggaagaactctcactcgatgaatcagctgaaggaattctttgcattggaggatgatacttatgtttacgttgtgatatt

SEQ ID NO: 3588 - DNA, 292 bp, Gossypium hirsutum
  Clone ID: LIB3825-027-Q6-N6-B9
cgaaaccacatagctaataataatcccagataagcttccagacacattatttaaaaccaaaaaaggccaccaacaacggcaaacaatccttacctagaaaccaccgcgaaggcgaaggacaagatgcagagtagactccttttggatattataatcagccaatgtcctgccatcttcaagttgcttgccagcaaatatgagcctttgctggtctggtgggatcccttccttgtcttgaatctttgccttaagattgtcaatggtgtctgaactttcaacccccacgcgtccg

SEQ ID NO: 3589 - DNA, 560 bp, Gossypium hirsutum
  unsure (1)..(560): unsure at all n locations; Clone ID: LIB3825-027-Q6-N6-C1
gaattaaatattttatttccataacacactngaatgaaataatgttacacttctagagttgattaaatactcgctagtatctggatatgatacagttcaaatactgattaacacattatatatatatgaccgaaaagggggagaaatatgagtacagtataaaatctcgatgccggaaactccgaacatatgcagaaaacggtaccctacatttcgatgtcttccagatccggaagagggaaacgaaggattgccgcaatgccggtcagctgtgccagttgttcccctgatacgtgcatagacgaaaaaatgtgagcagtgccccccgaattcttaacagagttcaccaaaccgacatacttttgcctcgtaattacatccgaattcctgaagagatcgtcggtaataagaagtgtttgaactgccattcgctcatgggcaacctccacatgttttggtccgtagcatgcacgtgccggatcatttgaaagcatgttgaagaaatccttgagagctcggacctcttgcgctgctttggtgtcttttatcatgctcataac

SEQ ID NO: 3590 - DNA, 563 bp, Gossypium hirsutum
  Clone ID: LIB3825-027-Q6-N6-C11
acaagaaacgtatataccataccacattgttcgtaagacaaaaaaaaatgcttagagcaaactggattcagaaatacataacatgaatatcgctggaatatatataaatataacaagtttttctacatataaagaccctccggaaccccttctttcttcttgaacatcaccttctccttggccttttgaaaatctgcatgtgtcaccttcatgcggcgctcccttaaagcaagtagaccagcttcagtacatattgcctttatatcagctccagagaactcatctttggtcataacaaattcttccaagttgacatcatcagccaatgtcatccttgaggtatgtatctggaaaatgcgcctcctggttttgatgtcagggagaggaaattcaatcttcctatcaattcgaccagggcgaagtaaagctggatcaagactttcaattcgatttgttgcaagaatcactttgacatctcctcttgaatcaaatccatctagttggttcagcaactccaacatggtcctctgaatttcacgttcaccaccagaatgggcatcata

SEQ ID NO: 3591 - DNA, 454 bp, Gossypium hirsutum
  Clone ID: LIB3825-027-Q6-N6-C2
gagataagttggaagcggggtgataaaactgtgcaagtaacaagaacgggtcttcacgcaagttcttaagttcgcggtttgtgaaagttatccaactatacaagttacaacaaagggaattcatacccctgattatgggggggaggggcttccttgttcattgaaaaacttggattgggggtgcgtggaattatcatgtacgattttcaaagcatgaatgctggaccttttcttgcctttttcatggacggaggtgcgacgaagaaaggacttttgtgcatggctcgctacttgaggtggcggtcttgaaacgacggggtttgttgatatgctactccaatctcctttcccatactgttgaagtccaatcaaaaataatctgtgggcttcttcggtccaagggacgcctttccttctaacggtttcccttggctttcctttggatccaacccaa

SEQ ID NO: 3592 - DNA, 537 bp, Gossypium hirsutum
  Clone ID: LIB3825-027-Q6-N6-C3
aatataagtccccatgttttatatatgaagaccaattttgtaggataataatatatacatacaaacgagattatgcagtttatttatttaaacactgaaacaattacttgcagaaggaagcaaccacacagcaaattcaccagccaattctcttacaaagcttgtagccagacaagattgcacaaattgccataactagaaatgttgcaaaggccatgctggttgatacgatggttcccttcctaagtgctgtgcctcgctcaacctgtccaatggttggcactgctaccgaagcagatgagacgagaaggtaaaccaacaactggtcaaggacaaagcttaggtagtctgaggttaaatccgagatcagaatgcctctatgagcaatgtcactaatgcctttaaacaattggaaagctgtgtataccaaagctataatggctacaatgaagcagtatatcaattctgagtaatcggtgaagcttggagatggatggtgtttgttgtttgtggatggggtaaccagtgtgagagctg

SEQ ID NO: 3593 - DNA, 567 bp, Gossypium hirsutum
  Clone ID: LIB3825-027-Q6-N6-C5
aagtataagacagtaatattatttgaacatcaaactttaatcaatacagtaactaaagatgtggttcactgaccatttcagcaccacaaaacactgtgttcattcaacaccacaagctactaatggctttcgccacttaaaacacccacagttccatagaaatgaaaattatgaaaacaagcacaagacacccaattagaaaccaccacggaggcgaaggacaagatgcagagtggattccttctgaatattgtagtctgctaaagttcgaccatcctccaactgctttccagcaaagatcaacctctgctggtccggaggaatcccctccttgtcctgaatcttagatttcacattgtcaatcgtgtccgagctctccacctccagggtgatggttttcccagtcaaggtcttcacaaatatctgcattcctcctctaaggcgcaaaaccaaatgcagggtggattccttttggatgttatagtccgcaagcgtcctcccatcctcaagctgctttccggcaaaaatcaacctctgctggtctggaggaattccctccttgtcctg

SEQ ID NO: 3594 - DNA, 488 bp, Gossypium hirsutum
  Clone ID: LIB3825-027-Q6-N6-C6
attaacacctcttcctcgctcgcgtggggctccccccgttttaccgggccctgcacgcgcgcgggccaccaccccccagaggggggcccgagagagcggggggggggcacgggggcggaaccggcgggcgggaaaagggggcccgcggacacgggcgcaaaaaagaccagacgcaaaaacaaaaaagaaagaggggggggccgaatgagggagcacacacacaacaagaggggcgagcggacagccccccgggcagaaaagaggccgcccgcgccgcctgaaagaaaaaagcaccccccccgcggagagaggcggaatgccgatcgcgcacccggggggggtttttgcccaccagacgggggacagccaactgggaatcccccacccccgggggcccagagaggggcagcgggccgcgcacgcggggggggccccccgggagaaaaccctgctggagggcggcgaacggcggcaaaaaaaacgagccc

SEQ ID NO: 3595 - DNA, 345 bp, Gossypium hirsutum
  Clone ID: LIB3825-027-Q6-N6-C7
gaaaagaagatacttcattccatttttatgattttaagagaacagtaacaacatcgatcaaaaaagagagaacccaaaccaaacagtaatagagaaacttaaaattactaactactaaacccaaaccaaacccataacaatataggcccaagcccactttgaaacctaaacttaagacctccagctgccttcagatgcaccgccgccttttgagtaacgagatccgccgtcaccatatcctccttcacggggtccacctccgtacccaccaccaccataccctccaccatttccgtatccaccttcacggcgtccgccaccatatcctccttggcgaccaccata

SEQ ID NO: 3596 - DNA, 553 bp, Gossypium hirsutum
  Clone ID: LIB3825-027-Q6-N6-C8
attcccaacttttattgatttatagaactgccctggctaaccctataacattacaacaggaccaaacttctttttatatggtacaacagtacgatcttgaaaaagaaaaagtagaagcaaacaaacaacaaacacagactcaaggcagtagcagagcacaaaaactcgctcctttcatttaataggatcgataataaggatcatcctgggtacctccgcgggtgttccttctagtcccagcattgttagacgccgcatttgggaagtcttggttccccgttgtaccgtaagcaccctctgtatctccgccaaaccccatactgctgaggtcatcttgcctgcctgtatcatacccactacctgcggtggggtacccacggttgtcatgtccaccggtaccgccatagccaccagtgtcgcctatgttgtacccagctgtggtgtagccagtgccaccaataccaccaccaccagcatggccagctgtggcgttatgatggcgggcctcttgtttcctcagctctgcatcttcttggctctcttctttcctttc

SEQ ID NO: 3597 - DNA, 552 bp, Gossypium hirsutum
  Clone ID: LIB3825-027-Q6-N6-C9
aactgatgatcacatttctttatttttctctaattattcccaacttttattgatttatagaactgccctggctaaccctataacattacaacaggaccaaacttctttttatatggtacaacagtacgatcttgaaaaagaaaaagtagaagcaaacaaacaacaaacacagactcaaggcagtagcagagcacaaaaactcgctcctttcatttaataggatcgataataaggatcatcctgggtacctccgcgggtgttccttctagtcccagcattgttagacgccgcatttgggaagtcttggttccccgttgtaccgtaagcaccctctgtatctccgccaaaccccatactgctgaggtcatcttgcctgcctgtatcatacccactacctgcggtggggtacccacggttgtcatgtccaccggtaccgccatagccaccagtgtcgcctatgttgtacccagctgtggtgtagccagtgccaccaataccaccaccaccagcatggccagctgtggcgttatgatggcgggcctcttgtttcct

SEQ ID NO: 3598 - DNA, 583 bp, Gossypium hirsutum
  Clone ID: LIB3825-027-Q6-N6-D1
attaaattaaaataatatctattaaaatgggcttgaactaatacattttagactagatacaattttgcattttatagttgaaacaaaaaagaaaccttgggctcatctagtgataacacaaaacatccacataagaatatactgaaccagcatatcaaaatcttaattacatgtatgcattcttcaaaacattgtacaccatatagcaaggtgagagatctttctcaaaaagacaatataataaagaaatctatcatgtacaaactacaaaaacttgttcagattccctccacaaattatgtgctcactcctatgcataccttttgttcatcctaaataagaaaatagacaaaatgtatcatcttctctcctgcaccttaggtgtacaatggatatgcaaaacaagtgtgcaaatcataaaaatcttattagcaaacaaggttaagatttatataagtttttaaagaaagagtgcaaagaccattaccgatgtcggaagaaaacaggcgacaccctccaaaccgttccaagagaaatctcatatggttgtggaacctaaataaaaaaattcttataggtgttt

SEQ ID NO: 3599 - DNA, 456 bp, Gossypium hirsutum
  Clone ID: LIB3825-027-Q6-N6-D10
ggccaacaatggaagggtttaaccttttttcaagcaaaagcaaaagactgtaagatcaaacccccaaaaaggaacttttttcatcctgctttttgatctacaaattgaaatctgtatcctatgtttacatatttatatcatttccctatcttccttttttaattctaaaatcaaagccatcaaattatggggctaaagttttacaacagaagcaatcagcatttcagcatgcccgcatttgttctgtccatacaaagaaaatttacccacaatagaagcgacctcacctgtatcctgaatgaatgtcccactcgaaagtggaaaaacaacagcagcattttaccctacaatcattgcatttgcattgctccaaggacaataatataatttgattaaatgacagtcaattggcttgaaaaggaccaaatttttcactcccggggccgagccagccaa

SEQ ID NO: 3600 - DNA, 557 bp, Gossypium hirsutum
  Clone ID: LIB3825-027-Q6-N6-D11
agccaaggcaaaatgaggattgggctttcaagcattccaattttcatacgataacgtacagcaaaaacaaacaaaaaccaattgcttggtgatatcccaactgttccatccacgtcaaacaaaaaacagttgtcccaacgaagccaaaataaatacttgtaaacattctagaaccataggtcttactgcggagtttggccatgtggtgtgggacctgttggcggtggaggcttaccagactgaccaccagactggtatggattgtacccaggcatcattggcatctgaccaccttgtgcacgattgaatccactaccctgcagatacatttggccaccgcccatatttccagggccctgcatattttgcataccatttggaaaacctccaactgaagggccaccactggtgggtaatgatcctgagtgcattggattcatgcccataaaatgaccttgtggcattgaaggaggcatctgattcattgtaccttgcatgcccattggaccaggcattggcattggatgtgatgtcggcattgatgaaggtggattcaa

SEQ ID NO: 3601 - DNA, 394 bp, Gossypium hirsutum
  Clone ID: LIB3825-027-Q6-N6-D12
ggggggcggggccgggggggggggcgggggcgcggggggggggggggcctcggggggggggggggggggggccgaggagggggcgggggggaaggggggggggccccaaatttccaaaaaaaaagcgggccaaaaaaaaaaagggaaaagcggggggggccaaagggggggaaaaaaaaaaaggggggggggggcaaaaaaaaaaaagaggggaggaaaaaaaagggaagggcgggggggcaaaaaaaagggcccaaccccaaaaaagaggggggggaaaaaggggccggcggggggggaaaacctggggcccgggggggggaaaaaaagggacccccccccccggggggggccgaaaaaatttgcccccacgggggcacttttttttcccccc

SEQ ID NO: 3602 - DNA, 352 bp, Gossypium hirsutum
  Clone ID: LIB3825-027-Q6-N6-D2
gattattaacaagagttattaaaacaaattgaactcaaaattgccagtgaaacatttgctaacagttagaaaactgcaaaacttcatcagaagaaactaagcaaatttaacaaaattccattacagtcttgtaagttcaaactactccatataaagtaaagcaaacataacaagataccatgaataacacgtttaaaacagagatgttcctttccccttcttgtctccaccaatctcaaagtgcttgcacctcttgatcggatgttgtgaaacgtgcttgcaaccttggcattgcagccttagcacaatcttcttggtggtctttgccttctttggatgtggtagccgtttc

SEQ ID NO: 3603 - DNA, 534 bp, Gossypium hirsutum
  Clone ID: LIB3825-027-Q6-N6-D5
gacaataaaaatatattcataaatcaaaccgaacctaaaattgaagtacaacatcaatgatctatgaactttcagaaaaacaatagccgttgtttgaatacttgaacttgctctcaaagttcaccaaaaagggtctcaacctattattagtacacttggaatattgatattaacattcacacaacttggtaattctctgtactcaaatttggcctctgcgagaacttgggagtcgctccacctttcaggggaataatgttcacaaccttcaggtcactgtataaactaggggctgaaaatctaacagatattgggaagaacactgatgagtccgctggaggcaccacaaactccatagatccactgcggttagagttatcaatcagaagtatggaccattctaagatggaatttctggagtcacacctccattcaccatcaatctgcctgacatttggtgcctcccgaaaagctggaagaggtacagagatcacaacgtttcgcagatcaaacatggctgaagcttcatactca

SEQ ID NO: 3604 - DNA, 528 bp, Gossypium hirsutum
  Clone ID: LIB3825-027-Q6-N6-D6
cttcccctaactttctgttttttgatttccttttccagacttcaactacatccccctttccatttcctcccatgtacagatacaagaatgactatggtgactatgacttgatggtttcttttttctgtagtgtcaaaaactcctatacctcaacgctgtcaagtccatggcttcaatatatgacaactcgaagtagccctggctgtggttctgtatagtcaaggccctcttcttcaagcagataccgttgcacagcaactggaagtctcgctggagtacgagaacccctagtatggtggccagttccaacacatatgtatacctgcagacgctgatctgctgcccgtgctgtgctccgcagcactgatagttcatgtttcagcatatgaagggcctcacttacatgcaatccatgcaggtctatcatccgctcctgccctctgaaattctctagaggaactgggttcctctggtgatatatagattcctgagcttttccatgagctgccttcatatgcatattgtgca

SEQ ID NO: 3605 - DNA, 519 bp, Gossypium hirsutum
  Clone ID: LIB3825-027-Q6-N6-D8
agcttaaagttaagcacactacactctttataagaaatactaccgattattaagataaaagattttgaactcaaaaccaaaacaaaatacaaaggcccccaaacatctgcaaaacattctggctctgctctgctacggggatcacatgcgggggcaagtttctactgggatctaaccctgggattcaacatcatctcccggagatccgccgcatcgatctcagccccacagttctccggccggtaataccccgtaacagggtcaggcgcccaagctgaagaataagcccttgtctccgacgacgacgactttttcatcgcatatcttcgttccactttccccatcgctccaggcctaccaaagctagccgtcactgccgccggcggtgcacctgagtaacctctccttgatatggagacataaagagcatcaaaaacagaagcaccaaggaacttaaaggaagaaacagagcgagccatatttatttttacttgcttatatatggagtcgtagggtaaa

SEQ ID NO: 3606 - DNA, 497 bp, Gossypium hirsutum
  Clone ID: LIB3825-027-Q6-N6-D9
accacagagatgggacaaagagcaccatatttttttatttaagctaataatccattaagctgagcatacgagcgcagcaaatattttaacaggcccacaccaaatggcaaaagagttcggcaaacatatagctcaataaagacaaggaaaagataacaagggtaattatcataacttcttgattggggataacactattattatccacgcgcttattcctttttttcgggttcctccagccaattcacgaagggctccagggctttcacgaagggttgcctgccctttgggtttaatcctttggggaaccagtaaaaaatcgggttttccgcaaggacatcctggtcataaagagacttcacaatctccgggaatagcttcatcaattttgcatcctcatagcattgcatttgaaccttatacataagctccagttcaagttttccactggtgcaaaacgaatttaacagctttgcccatgttttgacctgtcgaaa

SEQ ID NO: 3607 - DNA, 586 bp, Gossypium hirsutum
  Clone ID: LIB3825-027-Q6-N6-E1
aacgaaaataataatttattacattctaaattataataataaatttaaacactattaaaaataaatattacaaataatgcttaattttataatatatatgtaatagggcccaattggcctgggtccaaacacaaaaaaagacatagtgcaaacccacttaaaacaggcccaattaacaacccaatacagtggcccaaaaaaataataaacctaagtacaggccaaaaataatggtccctagtccagcaactaaagaaaacctaaaaccctaagcagccttgcatgtgcgccgctcccacagcccccaaccgccgcaggtttcagcctccatgcgcacgtctcggagcctccacgcgcgccaaactctccacgaacacctgaaaaacggactcaaggagtccaaagagaaaaaaacagcaagcaatattgtttttttttccctcgatttattttcttttcggcctataaaaggcccttttaaatctgtaaaaggggataaacagagaaagagacaaagaaatcgaaaagtaaaactgagagttcaaagttttttttaaggtgaatcggttctttatatgcttcattc

SEQ ID NO: 3608 - DNA, 534 bp, Gossypium hirsutum
  Clone ID: LIB3825-027-Q6-N6-E10
acctcaaatttccccttctcctgatcatctcattatcttctttctttttttaataaaattatttcacgcttaaagcgtgtacatgggactaattttcttacgcaacatcttgcatttcataaaccaacagagttcaaactaccaaaaatctcttctttccatatttcaagcaacataggtatacgtacacgtcactagaactagttgcctctctctggccttaaccaaaagatgcaaaataatggaatgctcatgagatgagcattaaccagcttcagagattatttctgcatacctttggatattgtacaaattaagtcgtcggattcagagcaagctctatttcttccaatgatcgcccctttgtttccacaacgttaccagctatgtacaagacagcaagagcgcacacaccagcgaatcccaagtacaccgagctgatcccaaacttgttcacaacactcaagaaatacaggccaatgacaaagttagagatccaatgcgtgccaagtgataaagccactgctttagctc

SEQ ID NO: 3609 - DNA, 452 bp, Gossypium hirsutum
  Clone ID: LIB3825-027-Q6-N6-E12
gagataagaaaatgaactaataaaaacgaatataatacagagtctgaaggctattcttgtcgatgaagacttaacctgagatttgttaaagcatggcaaacaacttcaagacttaacaccatcccagatcatcatcttcaatatcagcaggagcagtcctgcattccattaaccatagaaacagtagcagcacgttcatttatttgatgcttgcctttacagaaggttgtagcgacccgaatggctatcacgaaattgaaatccatttacaaccaagttcagccaatcgaacgctattgtttcgtcttgctcatgagcgtaggtgtgacggagacaacccctatgaggaaaagagtagcaattgagttgaagtcgtaaagatcccctagcgattgtaactcactgagagctattccagccctgacagttatgtaagcagcagggatgagtcc

SEQ ID NO: 3610 - DNA, 547 bp, Gossypium hirsutum
  Clone ID: LIB3825-027-Q6-N6-E2
gaaggaaactttaagttcttgcataacagaagatactatccaaaatttaggttctggacatatagcaatagcaccccataataaaaccatagataatctaaaccaaaagaattcaaaagtaaaagccctttaacataagggaatgcaaaatatcctctagaagacaagctcatgcggtttcatgccagacttgagagaaaaccttgcggcgaggtaggccttcaagtctgggactccctcaatggactttatcaaagaggcgtcgactgctttctggtcttctttcttgtcttcaggcagttttttcttatcctctttttcagcctcgaaaaactctccctcagtcttcttcttcctcttctctacttccttggcaaagtacttgtcatcaaacttgtctacgttaacccctgagatgtcaaccttggtggaagtagcaatgacataggattggttaacacgccttaaaggaacaccgttgatcttgaatggtccggtgaccaaaaggagcccagaagtaagttgcttcaagaaaacaactctcttc

SEQ ID NO: 3611 - DNA, 582 bp, Gossypium hirsutum
  Clone ID: LIB3825-027-Q6-N6-E4
cttgaaaaaatctactgaaaactcccttttaaccaaaaataacttgtcaattactcaaataaaaaacgagacattcatagcatgtccagaatacaaaaacggcttataaagtactgactaaaacaacaaaattctccactcccatggtgtttaatcttcttccaattcctcaacgattagccttagcaactctctcaatttcatccttcttcttgatggcatagctgttagatgatcccttagcagcattaataagctcatcagccaaacactctgcaattgttttaatgttcctgaatgcagactcacgtgcaccagtggtcaaaagatagatggcctgattcacgcgacgaagaggagaaatatcaacagcctgacgcctgacaacaccagcagaaccaattcgagtagcatcttcacgtggcccactgttgataatagcatcaacaatgacttgaattgggttctgatcagtcaagagataaataatatccatggcatgcttcacaatcctgactgccataagcttcttcccattgtttcggccatgcatcataagtgagtttgtaagcctttcaacaa

SEQ ID NO: 3612 - DNA, 538 bp, Gossypium hirsutum
  Clone ID: LIB3825-027-Q6-N6-E6
aagagttaaattcttgtttagtcaacccataaaaatagaaaccattccatgataaaacaacaaacaattaaatcaaaaacatcaaaaaccataaataatttatgtctttagcagagtactgaaaataagagacaaaagcaataataaaaaggactaaattcttcagcaaccactttttttttctttgcttcaaacctcagcacttgacctccttcaatgcatacgcaaagtacaaaaatgtcgggtcaacagcaccatccttgtagtaagcaaataccaaacatccatcatcgtgcatgctctctccgatgaaaaattgaaggtccttcaattttgaaagcaaaaacttggttgctccctcaatgtttttcttgaaggactcttgcttttccgcatccagtttcggtgtcaagttcttgatgaacttcttcatgaacacgacaaactgcttcttgtcgaaagggggttgctcctgaagcctgaaagtgtcaacaatgtcaacaaccttcacagattggtcatcaacaccttcatcctc

SEQ ID NO: 3613 - DNA, 171 bp, Gossypium hirsutum
  unsure (1)..(171): unsure at all n locations; Clone ID: LIB3825-027-Q6-N6-E7
aaaagccaaacgacaacaattttataaacctagtgacttgaatgaaaactttcgaataatacattanaaaaccaacactggaaataaaacatcatctacaataccttattgaaccatttcccttaaaaacccacagtgaaaatgacgattatgattatttgcttatttagc

SEQ ID NO: 3614 - DNA, 554 bp, Gossypium hirsutum
  Clone ID: LIB3825-027-Q6-N6-E8
gtgaaaagtatgtatagccaaaagcggaccacgcctaaaatcgggtcaagtttttattgttcaagctgattctatagtaataagatcggctaagccttaattaatgacaaaaaaattaagaattgtgatgcaccccacgaccaataagggggctattgaaaaaatagtattgggaaactaagtaccaaaataatcattgtcctcaatattgtctatcatgaataccatttgtttaaaagttccaagagaagcacagcggccgagtccttggccttcttaacactaggcattggctcacctatgcattcatcggtccaccccctgtcagtggtgttaaccttgacagcaaaagtaaatctctttgcatgggcagggcccccttcattcacacaccgatagaagggcataggccagtttcgacgcaggcagatatcattcaatgtttgcctggtaaatgtctggttgccattcttcttctttttcccattctcctcacagttctccttagcttcagctgtttctttctccttcagaacagcaagtgcattccttgc

SEQ ID NO: 3615 - DNA, 547 bp, Gossypium hirsutum
  unsure (1)..(547): unsure at all n locations; Clone ID: LIB3825-027-Q6-N6-E9
aaattggaattaagattgaaactataatatcccaaanaaattaaaccaacacaaccaacatataacatagaaaagtaccaaaagaaaaaccaacaactaggatgaaaaacagaagaaaccccggtgtttgtctagagcatattcatggcatctctcttatgtttaattttgcttctctctcctctttttaaatactaattaatgggaatcccagtgatcagtccaattggttgcactgcccactcgtggaatgctattaactctactgtaaacatcaaccttgaaattagcaccacaaatcactccttcactgtctaccctcggcattgccctgattttgttcattggatgctcaaagctcatcagccccccttcactgtggaacatgaatccagttgggaaaggagcaaaggatttggcacacccttctttaatgacatctaaatcatcagatatgaccacagagccatcagctgcaatcccccaatacagcttcactccaccatcagaccccagtgcagcaaacacggttccagtcttgctgtca

SEQ ID NO: 3616 - DNA, 554 bp, Gossypium hirsutum
  Clone ID: LIB3825-027-Q6-N6-F1
acaatcttcttgcatttttattgacaaagaaaccagaatcttctatgctaataaccatcccttacaaattacaaagcttaaaacatatgatactgcgaatgcatgcaaagagaaacaccaacctaacaaagcataaaacatctcaaacaacccaaacccccccccattcttaaaaccctaaattcaagatgcttgcccttgagtcacctcttgcgctttatgctgcacatactgtccgtattccttagccttctctgtcatatccctagccgtacttgccagcttgtttcttgcgtaatcgagctgatcagctcctggtgggtgtttcccttgcacgtaattgtatatccacgacaacgccgttaatgccgccaccccacacccgcccgaaaacaagaaccccgtcgtcaccaagaatatggttatcccggccgggactagaaccggactgaagataaccatcaacggcgtagctattatcaaggcaatgaccgtcccggtcaaggttaacccagacaagaaaagcagcgttgcgcccaacgtcgaggcggtca

SEQ ID NO: 3617 - DNA, 538 bp, Gossypium hirsutum
  Clone ID: LIB3825-027-Q6-N6-F11
ggaatatatttagcaccagcaatgatccaagtacatagcatctgcattcttacaagtttcacttgttctactaatacaatccacggctccagaccgagctggcatgttgcagcggattagcttacagagatcagtaacaaagaataaagaaatctgttattccagctaccctctgctgcccccaagtgaaatttacccattccataagagttaacgattgaactaaaacaggaaactgagaagtgcgaaataaacatcgagaaagccatcatcaaactgttttcataatctctgatgaacctgtagcaatgcgtccacgtgtcagcttggtattgtatgagctgcatattgggcacttgtgtgccacaaaatggaaattaacctcggaattttccccacagtcattgcagagaatccaaaccctcctattctggtaaatttgaggcatccctgttgaagcaacatctcggtcaagtcgttcccacactcgggtcatatcacagaacgattttgagcaaacaggacatgaatactggga

SEQ ID NO: 3618 - DNA, 539 bp, Gossypium hirsutum
  Clone ID: LIB3825-027-Q6-N6-F12
cccattctacaagtactgggactcagttattcacatgggagactgatccatatgctatgcatttgcagctcctatattcccatggatccatagatttagaaggagaaagcaaaggactactctgtggcagcaacaactgttggcccttccaccttgaatttagcaccccatatctcctcttcttcagcaggcactgcagtgatcttgttcttaggattctcatagcttcttaatcctcctactgctggggagtagaaacagccttgaggaaaagaagcaagagatttgccacaggcacctttcagcaattcagcattatcagcaaaggccacatatccgtcggcggtgattccccaatagagaggaaccttaccaaattgatcagaagccacaaacaaagtggaggtggatttgtcaaagacaatgaaagcaaagctcccaattagatggccaaccacatggtttggaggataaggtgctcggtcacgaagggccttgtaagcttcaatgaccaaaatcacttcatttgccgactttgc

SEQ ID NO: 3619 - DNA, 504 bp, Gossypium hirsutum
  Clone ID: LIB3825-027-Q6-N6-F2
atggaaactaagctccttcaatccaacattcctttggaagaagcaatttcgacaggtttagaacaattataacacattcgcccccaaagggggggcaatgaatcccaaaaataaaaaactaaaaataataacccggtcacgggattgacccacatttataattggggccccaaggggaggcgaggcaaggcaagggggcataataagcaactggggcaggctgatcagatctataaaaacttcatcaacttggttttagggaatctgggcacgggttttatgaaagaaaaaattgggcgctaaaaagccctcactaatcaatcgggtgggaggtttctatgcctatatacccttctgagcttttaaagatccaccgggtttccccatcagcgcctagttgcaagaagggaaccaatggggcagcccgaaaactattttctacccgcctttctaggggggggcattttcatcaaaatccaaatttatatttacaattgggtttta

SEQ ID NO: 3620 - DNA, 533 bp, Gossypium hirsutum
  Clone ID: LIB3825-027-Q6-N6-F3
gaacatcgaagttgacgattcataatagcgtccaaagacaaacttaaaatattaaaacaaagatctaatagcagtaacccatgaaagttcgaaaaccacatagctaataataatcccagataagcttccagacacattatttaaaaccaaaaaaggccaccaacaacggcaaacaatccttacctagaaaccaccgcgaaggcgaaggacaagatgcagagtagactccttttggatattataatcagccaatgtcctgccatcttcaagttgcttgccagcaaatatgagcctttgctggtctggggggatcccttccttgtcttgaatctttgccttaagattgtcaatggtgtctgaactttcaacctctagagtgatagtctttccagtaagagtcttaacaaagatctgcatcccaccacgcagccgcaacaccaaatgaagggtagactccttttggatattgtagtcggccaatgtcctaccatcttcgagctgcttgccagcaaagatgagcctttgctggtctg

SEQ ID NO: 3621 - DNA, 559 bp, Gossypium hirsutum
  Clone ID: LIB3825-027-Q6-N6-F4
acaagaattaagactcgctactcttctttctcatatatatactgcaaaatcacaccaaaatctatccagggtaccaaataaaaccgaacccgagaaaacccagatcggaaccacgtagagaaaacagagtggaccatctacaacactccgccagccagaaaacttaaaaaagatgtatagaaacaaaaattgaactgtgaacccacaattggagcctcacattcagcatttgtctcaccaagggatttttttttcgttcagagagtaaagctcaatggaagagagattgaatgactttagcaggcagtttttctctttccctgatgattttggttttcattgccggcgattaacaactcagcaggaaatatgttggtgatgccaagttagtgcaagagatatcaaaggcactgagctcataatatcaaccaagatcatgaaacgcagcttttcttttcactgttctgaaagaacaaaagaccagcttttgttcaccttaactgcttttggactcggataagtttcatcttgatgccacgtcacagatcgttaatcattg

SEQ ID NO: 3622 - DNA, 195 bp, Gossypium hirsutum
  Clone ID: LIB3825-027-Q6-N6-F5
cgatatccacatatattcaaatatggtataaaaatatgattctttgacaaccttccaaatattcaaatatggaaattaaagaaaaaaaaacattgagcttatacatgtcatacacatacccgtatttaatatttatcttaaacccgaataacatagaacacaaagtacaaagaagaaggcataggtagacatagt

SEQ ID NO: 3623 - DNA, 553 bp, Gossypium hirsutum
  Clone ID: LIB3825-027-Q6-N6-F6
ggagaaatggggatattatattacgaacttgaaaccaaagctcaggaataattctctgactcagtttacaattcttgagcttcatccaaatctgctcaagttctaaaaggtaaattcagatctagatccaagctcatatctaggcttgtgctaaaaatatgaaaattagtaagccactgcgaagctgccactggatggaaagcaggaggcttcatgccaaaggacattttcagccaccagcagcaacaagatggcggttcaaacttcaaatacaaccatcttgctttgattaatgaatccactatcttgtttcatctctccatcccacaagaaccgaggatacttactccagctcaagtacataatttatgtaattacattaactaatagagctgaagcagcagatgttcccttcaaattttagataatccacgcttgcttgcatctcttcttcaatagctttaaagcgcatacatccttttatattcattattcaggatctcagaatccgaagccacagacatagagaaagaccgggaacgactctcagctt

SEQ ID NO: 3624 - DNA, 565 bp, Gossypium hirsutum
  Clone ID: LIB3825-027-Q6-N6-F7
aagttcaaaaactttaagatgtattatataaatacataatatatccttaaggtattcttaatcatctctcttttatcgtcatttctacagtataaagtataaacaaaatgtatagaaacaatatacaaatagatcaaataccatataaagaaaaaaggctaaaacactactgcctttgacccaaacccaaaacaaataaatctcgaagttacttgaactcgaaaattactcaaactttaaaacttcaaatgattctacccaaaataacccgacccgtctaattgactggtctaatcacaatacagatcaccctcttttcatggttggtaggattccaaatactgtatataatgactccaacactctcccaatgaacctcgaaacagaaagtcaaaaacatttcccaccatcttaaatctcaacacctccagggagaacctatctccctatatatattttgtatttttgggttagtacccgaatagtcttgcgtttatgcaaaagctaagcttcttcatgaaactcaacctttgaaccaggacttcaatggagcaaaaccatatga

SEQ ID NO: 3625 - DNA, 588 bp, Gossypium hirsutum
  unsure (1)..(588): unsure at all n locations; Clone ID: LIB3825-027-Q6-N6-F8
tcgcgggggggatcaaagagatagcaatgactgctgcggcttgggatggaagcaagtggtggcgtagaccgagagagaagggataagatctctcttcttgctgaagaactaattcaattatcagtcaaaggctcgatggtggtaccaagttccaaacctacactgatatgtacggtttggacagggaaagtttatagcccagatggctttagggctcatatgaaaagtatatggaagactaggaagaagttttctgtagaaatccttagtcaagttgtaaagcataagctctaggatcatatgcagtattttgtaatagtttataggagctacgtactgtgaactcccccgacgcttcagcactccaaacttgaaagtcttcgtgtggtctctcagccaacgggatgctgagaatcatatctgctacatccatcgggaaggtggtatctgagtgcaactgctcaacccatgccccattcttcaacatctccacaaacttcagatctaaggaccccaccaatagcaggcagtaaatctttcttatcaaattctagggaacacgattcaattnttaaccaaaaaggggat

SEQ ID NO: 3626 - DNA, 570 bp, Gossypium hirsutum
  Clone ID: LIB3825-027-Q6-N6-G1
aataatcactaaacattaattttatttatattttaatacatctaagtggaaatttttctttgtaatccttgaatgagaagaatggaggcagaaatgtggaaataagtctgttctgctgaaatgtcacaatcccctctactctaatttagacagacagacagacataacttcccactacacaacacagtgaggcaaaataaaaggacaataaaaaagacccgaactcatttccgctttttggctggtggctgaagttcttcttcctcctcctcatcttcttcctcttcttcctcctcttcctcttcctcaccctcatcatcgtcgtcatcgtcgtcatcaacgtcatcctcgtctccagtgccaccatctccattggcctcgggttcatcttctggatcaccttcctcttcatcttcttcgccagatccatcttcctcctcacctccatcttcatcatccactgcttcatcttcatcgtcgtcatcatcatcagtgtcgctggcatccttgttctcaggaccaggtttagtcatcgcgataagttgagcaagtggaaaccctgcatatgcc

SEQ ID NO: 3627 - DNA, 509 bp, Gossypium hirsutum
  Clone ID: LIB3825-027-Q6-N6-G10
agagaagataaaatataatccaactcttcgtaaatattgaattcttatagaggattcaaagagttagcatttacaatagtgtctcataaaccataaaagtcctaataggcctttaaaaatggagtagtcgatgatgaaggtcgcccactcttgccacaatctttcccattccttaaaccaaaagccaccaagaacttctcgttccagcttcctccagcggctgccgctggagtggtggaggaagaagcctgtttgcaagcatgatcagctggaaaccggtgtttcaaacaaacctccaatcgacatgtcttgcaaatggttctattagagaatgtcaacgtttctttacatcttttaacggggcaagttggtttcttcttcttccttggatcacaaatcccaaacttctcatgtttctccaatatcatcttctcttgatcttctttgcccgttatttcgatcgacgtaaaacagatttcacaaataatcaccttcctactgttatgttc

SEQ ID NO: 3628 - DNA, 534 bp, Gossypium hirsutum
  Clone ID: LIB3825-027-Q6-N6-G12
gaaatgccctttattatacgtatacatcttgttattttaaaacataaaaaaatcataaaatttgtatttttacattcgataagtgggcttgacacacagattaatcttccttggcaacgaggcaccaaagttctcagtcatgtccagttcattcagcgacattccgctaggtagctcccaattgaaacaatgcaccaattgagctagaataagtttaactgtgattaaccctaatttcttccctgggcataatctacggcctgcaccaaatgggatgagttcaaaatcatgtccatgaaggtctatattgctatcaatgaacctttctggaaaaaactcttcagcgttgttggaccaagtgttagggtctctccccatggcccaaatgttcactaagacccttgattgttttggtatgtaacagccatcaataattatgtcttccactgactcacgaggaactagcaaaggtgcaacaggatgaagcctaaaaatttctttcacaaccatgtctaggtactccaattttggtaa

SEQ ID NO: 3629 - DNA, 563 bp, Gossypium hirsutum
  Clone ID: LIB3825-027-Q6-N6-G2
caatgagacagactgcttattatttcaatcatactcgttaatcggacagtagcaagtttacttggacagggacggaaatttttgtcatctaaatactagtatcataacaacagaatggttgcccccattccatgtgggagaatatatgcatacaataataaaaatacgggtcgatattgttgctcagcttcgttgaattccgctcggccatgtctgattcttcactggcttcagtattgcttccacctcagctagagtttcatgatctttcccgaatagtgcaagttctgttgcagcggcaacattctcttcaacctgtttaaccgagttcatgccaaccagcactgtcgaaatatctttgtttgacaagctgtattgcatagctaacttcgaaatattctttcctttctctttacaatatacagcagcagcttggcaggcagacttgagttcgggagatgccggatgccactccggtggaccaaactcagtaagaagtcccatagcaagtggagatgcactgattacgccaacacctttggttttcaagtaaggcaataaat

SEQ ID NO: 3630 - DNA, 520 bp, Gossypium hirsutum
  Clone ID: LIB3825-027-Q6-N6-G3
ccaaaatgacatccaaatatcagaggttcaacgtaccaaacagaagttgaaggcatttgaacatcgaagttgacgattcataatagcgtccaaagacaaacttaaaatattaaaacaaagatctaatagcagtaacccatgaaagttcgaaaaccacatagctaataataatcccaaataagcttccacacacattatttaaagccaaaaaaaggccaccaacaacggcaaacaatccttacttagaaaccaccgcgaaggcgaaggacaagatgcagagtaaactccttttggatattataatcagccaatgtcctgccatcttcaagttgcttgccagcaaatatgagcctttgctggtctggggggatcccttccttgtcttgaatctttgccttaacattgtcaatggtgtctgaactttcaacctctagagtgatagtctttccagtaagagtcttaacaaagatctgcatcccaccacgcagccgcaacaccaagtgaagggtagactcctttt

SEQ ID NO: 3631 - DNA, 466 bp, Gossypium hirsutum
  Clone ID: LIB3825-027-Q6-N6-G4
gcaataaaccccaccaaggccgattaaaataatttactaaatttctcgaaaagggtgttcgtccatcaacggacaatgcctggcagtaaaaaaactaatacaaagccccattaatgggggggtttcgatcagggattgatagcatttatttgcgtcacacattttacaattggcgggaatctaaaaatgggtggaggctccgggccaatgcatttattgcttaatcaagtttctaaaaacatatggaaatatgcccccattgttgaagtaggccaattcaacctcagtgtcaaagcggacagggcaggtgaaaaacttcccattatccggcgggacagtcacattttgaccgggttttatatcggttattttgcttgggaaaactatggtataacgctcatgaccggttaaacctagggggtcggggtcctccccaaacttaaaacaaagtggaatgatgcccatt

SEQ ID NO: 3632 - DNA, 590 bp, Gossypium hirsutum
  Clone ID: LIB3825-027-Q6-N6-G5
tcgcgatctagaacctgatctgtacaatttagatagactcaaagtgttgtgtgaggcaaaattgtgtgaagaacttaatgctgatacggtggcaacaacccttgcacttgctgagcagcaccattgtgcacagcttaaggccatatgtttaaaatttgctgcaactccgtcaaacttgggagcggtgatgcaatcagaagggttcaagcacttggaggaatgttgtccatctttgttatcggagatgttgaaggcctttgcatccagcgaggagagctcgagtctgctttcaagtcggaagaggagtgtcagcagtgtatacgggatggatcttgcagcagaaggtccagcagcagaaccgatgaatccaaatggcaggcgagttcggagacgttgattggcaatcaacgggtaagtgtgtttgggggtgtttctgggggcataccatccataccatccaaatatttggagtggattgttatgtatttacatgtgggtaatatattagttagaactggaaatgccttttttggttctgtgtataaaggaaccatacatttcagcatcaagaaaacatagttcctttcgga

SEQ ID NO: 3633 - DNA, 473 bp, Gossypium hirsutum
  Clone ID: LIB3825-027-Q6-N6-G6
aaaaaaaaagaggatgggggattttgtttacttttcccccaagggggggggggagattttttccatttaccgcagaagagcgaaaaaagaaagtcctatcaattacgacctaatcattcccgcacgcctggcctggggtcgccatatgctttaagccctttttggggggccatatcaacccatctttgggcctttttttcagctccaaatccccatttttctttttctttcacgggattaggagttaaacttggtacggaattcgcattttacaacactcttggagcttcattttaaatacccaactttgctttttgggcttatttcttaacattttggtacaaacatggtcatttgggcttctgcttttagttccattgctccgggtaacaccattgaaaacttggagcttgctcatcaaaaaaaaaattgcaagcttcatctgcagaaaaaaaattgggctcttccatttt

SEQ ID NO: 3634 - DNA, 565 bp, Gossypium hirsutum
  Clone ID: LIB3825-027-Q6-N6-G8
acaaggtcagaatattatcattcactagcatttaaaaaaatttatacaaagcatttttcaagctaaaagtcaagttacaaatgagactaaatccgatgaaccttctgcctaaaaagatatgtaccaaaagaaaaaggcattttagcctagctgatataagagtatcataaaacaaggtacaaaaaaagcttctgctgctgaatgcataaaatatgctatggctaaaatggcatatatcattatcgtcaaactgcagttttctccatggccttggtcgatccattgattgtccttgagagatacggatgctccccatctgcttttaagcactttcaccatcggaagcatcttcgagtctagcaattgcatcaactagggcttgctcatgttcattcaacactttctttgctttctcaatctccacaggatcgggatggtttgcactgaaaactttttcaacctccttaattagagtatctgtatgaagtatctcaatatcacccaaaacctttttcccaacaccattttgtgtcaaagggaaatcctttttgccctgaccctttaa

SEQ ID NO: 3635 - DNA, 540 bp, Gossypium hirsutum
  Clone ID: LIB3825-027-Q6-N6-G9
gcaggaaacttctcaatttaataaaatgctcaacaaaaaggattactgtcataataccaaagttttctaaagctgtctcagttcacttgacaaaatgaaaacaaaatttaaggtctttttagcaagccaaataacaaaacactgtccccaaaagggtaaccttacttcttgtcttccttctcggcctcggcagctttcttcaacctagcaccaatatgacgttcgttcgcacgttcaacacggagcttgttgtatgccttgaatgatttcatgtcctcggtgaccttcacgagctcaacggaaggcttctcacgagaaataggcatgtatggtccttggacttgggttgcagttgcgagctcttcggcagttgaatcaccagccttgaacttgcgagcacgccttgggaagacaacaagtttggccttgtaggtcttaagcctctgaacattggcttgaagaccttcaagtgatttgttcttacggcggtgatcaacagcgataccaatggtcggtgcaagtttctttgaaataccagca

SEQ ID NO: 3636 - DNA, 552 bp, Gossypium hirsutum
  Clone ID: LIB3825-027-Q6-N6-H1
agctcgcatcttttaatttgaactgcttgcatgacgggaaaacgctaactcttgttttctcaaacaatataacaaatatagctacgtaaaaaggcaaagctggtaacgatattggagctttcaggttttttatgctttatacatcatagctaagatttgtagacagatccttcagtgattttccagcctgagttggaacaagacatctcatatctcgtggtgtaggagtttacattagaggcattgttctccggatgatgaacatcagtcaagcaggtggattcttccagagtagcttcgactacagctcgctggccatctagtgaaagggtaacactgtcaatggccatgttcagtagactatattcatatacccaaccaagctgagcgatttcggctgcacgatctgtccatgtcttcaacatttgaccatccagaacctctggcaatttatcaaggcggtgatcaggtccaaacgcctcagatttaatattctgccacttgcgaacaatgccttctgcaattcttgcatccattctaggtaattcttgc

SEQ ID NO: 3637 - DNA, 353 bp, Gossypium hirsutum
  Clone ID: LIB3825-027-Q6-N6-H10
gacgtcttaaggttccatttacaaactcccattttatacaatatgaacaccaaaactcctttttcaaaaagcaaaacccataacgtttcaactacaaatctaaagtttcaacctttcagcacgggcttaaagcttaagctatgcacctcatagagtacatcgaaataggatccatggagggcggctcagtgtaaactctagggtggtcgctctctaacccatagtccatcatgggatggtactccagctcttcatcatgatcatgcacaaagtctggtattttcatctccaacctcctcacatggtcccatagaaagtcaagcctactcacgtatttaagtttaaaatacaac

SEQ ID NO: 3638 - DNA, 571 bp, Gossypium hirsutum
  unsure (1)..(571): unsure at all n locations; Clone ID: LIB3825-027-Q6-N6-H11
aaattattgtttagccaacccataaaaatagaaaccattccatgataaaacaacaaacaattaaaacaaaaacatcaaaaaccacaaataatttatgtctttnagcagagtactgaaaacaagagacaaaagcaataataaaaaggactaaattcttcagcaaccactttttttttctttgcttcaaacctcagcacttgacctccttcaatgcatatgcaaagtacaaaaatgttgggtcaacagcaccatccttgtagtaagcaaacaccaagcatccatcatcatgcatgctctctcctacgaaaaattgaaggtccttcaattttgaaagcaaaaacttggttgctccctcaatgtttttcttgaaggactcttgcttttccgcatccagttttggtgtcaagttcttgatgaacttcttgatgaacacgacaaactgcttcttgtcgaaagggggttgctcctgaagcctgaaagtgtcaacaatgtcaacaaccttcacagcttggtcatcaacaccttcatcctcatcagcaccttcggctgaaggattggcaccaatgtcaac

SEQ ID NO: 3639 - DNA, 560 bp, Gossypium hirsutum
  Clone ID: LIB3825-027-Q6-N6-H2
accacgaaagcactcaaacagcgttcatttccataaaagaaaatatttggactccgattacacatacataacaataaaccaagatgctgggccaccacccatctcaccccactacttttctggtaaaacttcttccagactgcatctgttgggttggtctaataaacatgtcattcttagattgcgcagtccactgtaccccagctttcattgcggctggcctttgcctgcgatttacaatggtcacatttgccaacttctccactacatccgaagctccaacagtagttctatgcttgccgatggacattggactctttcttccaggtggtcgataccttgtttgtttcacagtgttcttcaaggatttatgatcactctgattaaccatctccagcttgcgttgcacacctgtgattgtgcccatagatgcatttgacttcagagaaagattgccagtgagccctgcattcggtagaaccccagaaaacctcctagctgattgctgctccaatttttgtctcaccccaacaggtggaggagttctagaaacagctgct

SEQ ID NO: 3640 - DNA, 563 bp, Gossypium hirsutum
  Clone ID: LIB3825-027-Q6-N6-H4
gaagataagatccaaaacgtcaacacattttaaatggactagaaaaagattctgatcactaaacataatattatccctcctaagtatatcaatttcaaaccataatgtgaactggttctttaaaagcataaatatagcatgtaattaaaactttactactccaacccatatccaggggtccatcaatcaaagcgcaagaagctggttccaacagtgtcttcccttaggccacaagtgtgctggcagtagtcgactcgtatttccagacgggtggaagcttctttgtcttcttataatagcgggcaaggcgatggattctgctctcaaccaggatcaaccggaacttggaatccttgtctttgcggttcctctcaagatgctttctgatggcaacagctttcttaatcaggtggtacaaatcttcgggaatttcaggagcgagaccatgggctttcagtatccgcaaaatcttgctgcccgtaacactcttcacctgagcaatcccatgtgaatcacggagaatgacaccaatttgagatggggtcaaacccttcttcacaaac

SEQ ID NO: 3641 - DNA, 561 bp, Gossypium hirsutum
  Clone ID: LIB3825-027-Q6-N6-H5
gaaggaaaaaattatatgtatatattatgtatattttacattaaaagggtaattaaactggctaaccatcaattcccgctaggaaataacggtcccaaactttgtcaattattcttaaactataagtaacaaatggcagtgtttgcaacaaacgtgaaaaaccataaaaaataacacataaaacgggggcagacattcataaaatccaaaagggttgtaagactgccaactcagtcatgtcacacctatgccttgtttgcaatgttgtttgagagccagtccagcccctcgtacagtccttcaccggaagtagcacatgtgctctggatataccaatggcgctggcggagtgaatgaaggccaagcttgtcagtaatctcagcagcattcatagcatttggaagatcttgcttgtttgcgaatactagcagcacagcatccctcagctcatcctcattcaacatcctgtgcaactcatctctagcttcaaccacacgatcacgatcgttgctatcaaccacaaaaataagtccttgggtgttttggaagtagtgtctccac

SEQ ID NO: 3642 - DNA, 547 bp, Gossypium hirsutum
  Clone ID: LIB3825-027-Q6-N6-H6
cataattagaaagcaaaatataaagcaaaatcagagccaaatatgagatctgaagagaggatggcaacaaattacaataacaaacttacatcacaaaacctttgatgagtaatgaaacatcaagctaaaaactacataagttcagataccataacaaagctgaagtcaattaaaacaccgacaccccagtcctaccaatactagaaaatgcatgatacttggatgtcctcaacactagcaacatatcaacaagaaacatgctactcaaagtctccataattccgatgccataagcaagatcattcatcaacatctgagttttgaggagatggactccgagaatcagctagacgccctcgtggtgaaacacttcgacgacttggagaccgtccatcacggctacatctatcaggactttcacccctagggggagacttacgaggggaagggctcttccgaggactagggctgcggcgagcaggagaagcacttatcgatcgactaacactccgcctatcatcatcatagcggcctcttcctcggcctt

SEQ ID NO: 3643 - DNA, 516 bp, Gossypium hirsutum
  unsure (1)..(516): unsure at all n locations; Clone ID: LIB3825-027-Q6-N6-H7
ttttnttttttttttttttttntttttttttttttttttttttttttttttttttttttttttttttttttttttttttttttttgggtcggggggtcccccggggatcccgggcccggccccggggggccccccggcccccccgggggggggggggcggggggcgggggggaaccagggccaaaggagcgccggggggaaaagggggggggggaaaaaggcccaaaaaacaaacgggggggaaaaaaaaagggaaaacccgggggccccaaaggagggggccaaccaaaaaaaaaaaaggggggggggcggcccggggccaaggggaaaaacggaaagggcggggggaaaaaggcaagggccaaacccgaaaagaaagggggcgggggtagggggccaaaggggacaccccccggggaagggggagggggaaaaaggcggaggggggtaacccccccgccccggaaaaaggggaacaaggggggccccccggggtggccccccggggcaaaaccc

SEQ ID NO: 3644 - DNA, 585 bp, Gossypium hirsutum
  unsure (1)..(585): unsure at all n locations; Clone ID: LIB3825-028-Q6-K6-A1
cagnacttaggttaagaagtcggcttttttttttcgcaaatcttgatgaaggttttgcgataaagctaagacccctgtggagtttgcttttgtaagcagcgaaaaagactgcccttgtcgagggttgtttttaggggattaagaaatggatgagaatatgaagcaactccagcaaagcttgattgagcttgaaactgaagctgaacatttactattagccaggcaccagctggttgaaaatgataaagtgagaaatgggaacagggaagcacttactgcactgaggaagagggctcggacaacaaaaactagtgtcccatctccctttgagtcgatgatgaagaatattgggaaccctgtatcaagacctttggtaaaagaggtttgtgctacttgtggcaatcatgactcaaatgagcagacatggatgatgttcccaggaactgatgtttttgccaagataccatttcatgctgctcacagtattttggagacagatcaagcacggctggaccatgaagctcagaaacttcaaagctatgttaaggagaaatccttttttatatcagaaaaaggtgtcctcgc

SEQ ID NO: 3645 - DNA, 230 bp, Gossypium hirsutum
  Clone ID: LIB3825-028-Q6-K6-A10
ttttggttccattgaaaagattcatcgctcaaaatggtcaaaacagaactttttctctcggttttccatatgcaaaggaaactttggctgcatgctgtgggaggaatcttgctgttgccccgagctgcattgcctttttagttgctcctgcattgtgaaacctgggagactactagtgaggtagatttctttaagttctttctcttatgaattcgttttttgctgttctg

SEQ ID NO: 3646 - DNA, 597 bp, Gossypium hirsutum
  unsure (1)..(597): unsure at all n locations; Clone ID: LIB3825-028-Q6-K6-A11
gcgttttctctttcaactaaccaaacgaggccgccggnttttggtttcagcttgtatttagaaggatggtgagggtcagcattttgaatgatgcacntgaagagcatgtacaatgcagaaaagagggcaaacggcaggtcatgatcaggccatcctcaaaagtgatcatcaagttccttttggtcatgcagaagcacggttacattggagagtttgagtacgttgatgatcacagatctggtaaaattgtagttgaactgaacagaaggctgaacaagtgcggggtgatcagtcctcgcttcgacgtaggagtgaaggagatcgagggttggactgccaggctgcttccatcaagacagtttgggtacatagtgctgacaacatcagctggaataatggaccatgaagaagccagaagaaagaatgtaggtggaaaagtacttgggttcttctattgaggggatttctttagaattaaaactttacgaattatgtttttttcctttaaacctctcagttagcaatgcctattttctaaattttggcactcatcctatatgtattttgcttatgatgtttggagattttgaattgctg

SEQ ID NO: 3647 - DNA, 582 bp, Gossypium hirsutum
  unsure (1)..(582): unsure at all n locations; Clone ID: LIB3825-028-Q6-K6-A12
ccttcttcaaaacccatggccgtcactttctcaaatctccacaccgagtctggtcttaaagctcttaatgacttcctctctggnaaaatcttacatctctgggaataagctgaccaaggatgacataaaagtttatgccgctgttctgaagaaccctggtgattctttccccaatgttagccagtggtataattctgtttcttctcaacttgccgccagcttccctggtaaagctgttggcgttgggtttggtggcaaagctgctccagctgagtctgctaaagctgaggctgctgatgatgaggacgacttggatctatttggtgatgagacggaggaggataagaaggctgcagaggagagggaagctgcaaagaagtcagctaagaagaaagaaagtggaaagtcctctgttcttatggatgttaaaccatgggatgatgagactgatatgaagaagttggaagaagctgttcgatccgttgagatgcctggacttttgtggggagcatcaaagctggttgctgttggttatggcatcaagaagctacagatcatgcttaccatagtggatgatcttgt

SEQ ID NO: 3648 - DNA, 163 bp, Gossypium hirsutum
  Clone ID: LIB3825-028-Q6-K6-A2
gccctgcctgaaagacttgtccaggggggttgtattatgttgttagcgtgcatgtgtggttgaatgatgtgggttttgcttcaattccatgtatgtttcctttttatgtcttaatcatgcttgttttttttactctaaataaaatatactctacttttttagg

SEQ ID NO: 3649 - DNA, 584 bp, Gossypium hirsutum
  Clone ID: LIB3825-028-Q6-K6-A3
tgcttgtccaggcctttgcttttgtacctttgatgtatatgtgcatgtgcacatattattccttgttcaaggtaggaatgttgatgttttactcattaacaccacgacagactagctcagtcagcttgctcatgatatgctcgatggttgctcgatatgctcccccaatttcgtacaactttctcaatctcattagccttggtggtaaaaagaccatatttgaaaagcgtatgggaaacattgatgatgctgtacctttctttggagaaggattcaacaacatctatccacttatcatggttgtttacaccttgttagttgctagcaatttctttgatcgtgtagttggtttctttgggaactggaagagacttagatttcaaactgaggctgatgatatggatgggtttgatccctcaggactaattatcctgcaaaaggagcgatcttggcttgaacaaggacgccgagttggtgaacaagtaattccattggcgagaaatttcaatggcgctgatattgagtatggccacaatattacagatcgtactgttgttgaaatgaaggcagcgaccacttcagcc

SEQ ID NO: 3650 - DNA, 572 bp, Gossypium hirsutum
  unsure (1)..(572): unsure at all n locations; Clone ID: LIB3825-028-Q6-K6-A4
cggncgcgtggggtgtaaatttgactcgtanatggttgagtaaaacgaaaatggagggattggattggaaggagatgggtcaaacggggaagctcttgggaagtgcttgagtgggttggtggacgatggtagcaccgagagtcatcgatactacctgtcccggagaactgtgctggagatgcttagggacagaggctatgccgtacccaacactgaaatcgacctctctctccatgaatttcgtgccattcacggccaaagccctgattttgatcgtctcaaactctctgttactcataaaactgactcttccaagcggacgctggtagttttctatgggcctggtgtagttaaagtcagtgggattcggctcattgctggtctaattactagcaaagaaactttgacggggttgatattaatcgtgcaaaaccacataacaaaccaagctttgaaagctttagaccttttctcttttaaggtggagatattccagattactgacctacttgttaatatcacaaagcatgtgctgaagccccagcaccgggtactaacagaacatgagaaac

SEQ ID NO: 3651 - DNA, 581 bp, Gossypium hirsutum
  Clone ID: LIB3825-028-Q6-K6-A5
gttttatgaatggtaaattgagtgtatgtgtgcactatttgaatggcggctgaaactgatcaaagcttcagcactagaaaaccttggatcgacatataataaaacctttcaccttattgcaatacaagggtcttctctccttcaaattttgcggcaaaatcccctcttagcagggtaagtctttatagaattattattattattatttattcagtaaagccaaaaccggaatccccatagattatatcggtgttgatgtgcttactcaacaaggtggcgcatcaaagggggtcaggtgagtacgtcaggtttcctccggctggagatggcggtactgaagaacaacaagatggctactcccatcaaatacaatcccaacagaaccaaccgatgatgatgcagcagcatggaaaccgagcacaagcaacccagttgtctggcctgacgcatggtgtttctggacaaagggcttctgcttacggtgctaacttagctggcatggccccatctagttttggctacagtggctcggcctcagctgcttcaccttcaccttctgcttccccttctggttctggttc

SEQ ID NO: 3652 - DNA, 589 bp, Gossypium hirsutum
  unsure (1)..(589): unsure at all n locations; Clone ID: LIB3825-028-Q6-K6-A6
gncccgactcctacattctgctaagatgggacaaggccaagaacacaanaccagagatgtcccccaacttgagattcaggaaagaggggaaatattcttcttctataggcctaaagtaaacaaggaggaagttcatagtgttgatgatgtgcagcgcttgtacattgtattgcgtccagagtccggtgagagaggtgttgaagagaagcaagatccccactctggcaaggaaggtgccaaatcaagatcaggtgatcaacctcaaactggctcctccatgaataaaactgaaggtggacaggggagccaggaagtaaatatcgaggaggagccattgttaaggttcatagttatgggcagaaagagacttccagatccaggcaagaagtcccaaactttctggggttttgttgaattagtgaccacaaaggtagaagatgtaaaagatgctttaaaaggagaggaatatgatacatcatcaagaggtcaccgatatcaacctcctgcaaaagcagtgggagaaggtgtttaccgtattgtgaggcacaattcaagtaagaacaagatgcacactcatttgatatataaa

SEQ ID NO: 3653 - DNA, 583 bp, Gossypium hirsutum
  unsure (1)..(583): unsure at all n locations; Clone ID: LIB3825-028-Q6-K6-A7
caagctcatttagtctaanaaacatttccttagagcatagataaaaaaaaataagaacatgggtgtcaatgctaaaattgaggtcccagtcattgagttctgttcatcggatttagagcgaggaactgatgggtggcgccatttgtgcaagagggttcgagaggcttgtgaaacttatggttgttttgaggtggtgtaccaaagggtatcaaaaaaagtccgagaggagatgttcgggttggtgaaagaattggtccaggtcccattggagaggaaacaaaagaacgctagtccgttgccttaccatggctgggttggaccatgcagtcaagtttctttgttgtatgaaggctttggacttggagatgcctctaattatgactctgttaaaagatttgctcaacttatgtggcctgatggtcacccacgcttttgtgacactgtacacacattggcgacacaaatggaagagttgaacaagttaatttggttaatgatatttgaaagttacggattaggagagaaatttgagtcactaatgataaactataaaacattggtgcggatgatgaaatacatggca

SEQ ID NO: 3654 - DNA, 584 bp, Gossypium hirsutum
  unsure (1)..(584): unsure at all n locations; Clone ID: LIB3825-028-Q6-K6-A9
tgccaacctgactaanaggaatttcccttgaagtcccatgaattatcaactatttttttttttaaggatctccatattcacaaaagtccaacttaaagaaacagtcgaatttcagtttaattggaacaagcagaggcttgagaggaagaagttcgaactaaagaatggagcaggtagatgaaccagtgaaagatgaaagagaacaacatgtcttggctattggttttaggatcatgcctggtgtttcccctgtggcatctatttctcagtctcagcaccagccatttccgaccccttcaccgttctctttctcggtggcttcgacaaggtggagctcaagacctttgatacatcgtcactcgaatctcttccttcggttctcggtgcttctcttctcctttatctcagctctcacactggttaccccatccacaaacaacaaacaccatccatctccaagcttcaccgattactcagaattgatgtaagcacaactgtaatttcgcatttactagttgccttaatctgagagaaaacctcagagatttgtattgtcttggtgtagatactgcttcattgtagcc

SEQ ID NO: 3655 - DNA, 559 bp, Gossypium hirsutum
  unsure (1)..(559): unsure at all n locations; Clone ID: LIB3825-028-Q6-K6-B1
cactcaccatcgctactccttttctctcgatctgttagggtttcttttaacgtacagtttccttttaatttctggtgatttctatggcgacggaaaccctantggcaagaaaccggaggaagaggaggtgaaagagaagactgaaacttcccattgaataagaaatcagtagaaggaaaaagaaatcagatccttctgaataagaagaagaaaaatcagtactttttttccattgaagaacaagaagtgaaagaggatatcnaagggaaaatgtcaagagaaaaactaagaagagccgcacttcctcctgttcaataggtgttcttttttatttctattgctttcagtatattttttttgagattattttcagtgaaagaaaaaaaattggaaataacccatcattttttttcgtggaaaactagaaaaaaaaacaaattaaatgataagcctatagctgtatgccattcagacaatccaaaacgaactgctgaaatctcttctgcaaattatcctgctcgagagtatggttggtttttatctaagctatatttctaca

SEQ ID NO: 3656 - DNA, 563 bp, Gossypium hirsutum
  unsure (1)..(563): unsure at all n locations; Clone ID: LIB3825-028-Q6-K6-B10
gttttacatctcanaaaaagagacttgtttgttgctgaaaagtccctttacggtttngaaacagtcaccaagacagtggtataaaatgtttgattcctttatgacttctcatgattttaaaagaagtagttttgacagttgcgtttactttaagaaaaacagtgatggttcttttgtgtatctactcctttatgttgatgacatgttgatagcagcgaaagataaatgagagataataaaggtcaaagcccaactaaatgaagaatttgagatgaaagacttgggaccagcaaagaagatactaggtatggagattcccagagatagaaaagcaagtaaattgtacctaagtcagaaatggtacattgaaaaagttctttgcagattcaatatgcagaatgctaagcatgttagtactccttttgcagccaatttcagactttcattggctttgtctccacaatcagatgatgagattgagtacatgtcacatgttccatactctaatgtagtaggatctctcatgtatgccatggtttgttcacgtccagatttatcatatg

SEQ ID NO: 3657 - DNA, 588 bp, Gossypium hirsutum
  Clone ID: LIB3825-028-Q6-K6-B11
ttttggtgctttctagtttgttccattaaaatagtagcaagtttaggaatttggtggtcgaacatgggtttagtaagttgaaagaaattgagcatcactatgtgaactgaggtgttggagattgcggcttaaaatctgtccattgtggttggtggtaagtggtaaaagagggaatccaacatagggaacttgcttctataatgcatgtcataccaaatggacaaacttgaggctgattttagattaaattaaatattagtttgtttaaatgatatccaaataatttaatataagtttttaagtattttagatataaaaaatcaaatctttcatcttcgaatcagcttgtgtccttgtaagcgattctataattttaatgttttactcagttttttccttaaaaacattactatttcttttataggattctacttactattttttcttttgagttccttcatgccaagttccacttattattattttttgaataataatcgactagaaatttattaataaaaaaagtaggaaaacatagctggatccaaagactgggtccaggcttgttaaaagattaacacactttcg

SEQ ID NO: 3658 - DNA, 410 bp, Gossypium hirsutum
  unsure (1)..(410): unsure at all n locations; Clone ID: LIB3825-028-Q6-K6-B12
ggnatcaatagtttgctgagccctgaactaagggattctgggtctttgtttgggaagctcttcaggatatgactcttatgatccttggggcatgtgctattgtgtcgttggtcgttgggatagcaatggaaggttggccagccggagctcatgatggacttgggattgttgcaagtatcttattagtcgtgttcgtcacggcaaccagcgattatcgccaatctttgcagtttaaggatttggacaaggagaaaaagaaaatcaccattcaggtaacaagaaatgattgtaggcagaaattatccatatatgatttgcttcctggtgatattgtacaccttaatattnggtgaccaaagtcctgctgatgggcctttttgtgtcgggattttcccgtgctaatcgatgaa

SEQ ID NO: 3659 - DNA, 590 bp, Gossypium hirsutum
  Clone ID: LIB3825-028-Q6-K6-B2
gcctatttctctgttttgttcattaaccaaggggtttatcatctgtttcatcatcgtcacccagtttgggagatttaccagagagctgtgtggcatcaattattgggtatttggatcctccggagatatgtaaattgggaaagttgaacagagcatttagaggtgcttcttgggctgattttgtttgggaatcgaagttgccatctaattatcaagtttttgttgataaaattctaacttttgtgcctgaaaatttgggtaaacgagaaatatattcattgctctgtacaacaaatactcttgatggtggtaccaagaaagtatggctagataagagcagtggtggtttatgcatgtcaatatcttcaaagggattacatataacagggattgatgatcgaagatattggaatcatattccaactgatgaatctagtgtaatccatggatctccatttctagatgcatggtgatgattatgatgattgtctaaatggttccattcgatcgcatatctgcagcaaacctggtggtttgaagtcgacggagaggtggaatttccctttccagcaggaagctatagcgttttc

SEQ ID NO: 3660 - DNA, 393 bp, Gossypium hirsutum
  Clone ID: LIB3825-028-Q6-K6-B3
gccaaatatgaaaataagtgaagttggcactcggtagttaaatagtaatggttgattattgcttatccggtcacatggtcgatcgagtcagcaggttaaccccccaaagcgcctgtgggaataacgtagtaaaaagagtagcagttgaaatgataaaattctaccctcatttctttttttgcctattttggcttatttcattatgcctatggcgttatcatgatgtcctcgtattgtacgtacagaagagtgtcaaagttgatcaaagtaacttctttatgatgtggtcgccatcgagtacgtattccttgtaaatggaaaaaaaagtaaatggcttttgatatatatatatgcaaagaaaaaaccccgactgctttttgattggaatattgt

SEQ ID NO: 3661 - DNA, 587 bp, Gossypium hirsutum
  unsure (1)..(587): unsure at all n locations; Clone ID: LIB3825-028-Q6-K6-B5
naaaaaaactgaacctatcctctccctttcaggttcccagcagccaaacatggcccacgccggcgagcggcggttccaaaggccaaagctccttcacgagcggtggtcggagcgagaaaggagggctttttaaccccgttctcgacctccaccttaaggcccggtcctccagaccaaacaagccgaaacaaggagagacctttcgtctccttctcggtccgattccaacaccgaagatggtctccggcgacgggctttcgagaccggtactggtgaagtcaacgggtattggaagaataaacctagcctttttggtgcaaaactggtcgtgcttcgggcgttgagtgcgctgcaaatgcacgaggagacgtacggcgcactgaggctgctggttgtgagctgaattgggctagggttttgccatcttgggcctctgttgtgtttttatttgggctacggattttgttttaattttgtttattattgtgtgttttgtgtttaaggtcagggtagaattgggcccgtacaataaaaactccgcaatgtattttaagtttaaagaattgggaaagtatccaaatctgttt

SEQ ID NO: 3662 - DNA, 592 bp, Gossypium hirsutum
  unsure (1)..(592): unsure at all n locations; Clone ID: LIB3825-028-Q6-K6-B6
catagnagacatgnatgaagagttccgcgccaaagattgtctggctcggagtctgatgttgatgaatatgatttctcgaataataaaatatctgatacttctgctgctgaagctagaagaggaaaagactccagggaataccttgggatcggctaagcatcactagggcaaaagtacaggcaaactaggctagagcagtacaagaactatgagaatatcccccgctctggagaagtctccgggaaggattgcaagattaccaagaagggtgcctcgtactatgacttcaggctaaattcaagatctgtgaaatcaacaatacttcactttcagttgaggaacttgatatgggctacatcaaaacatgatgtttatcttatgtcacgtttttctgtcatgcattggtcttcgttgacacacaagaagcgtgaaattcttaatgtttctgggcatgtggcaccatccgagaaacatcctggaagtctgatggaaggttttacgcaaactcaagtcagtactcttgcagtaaaggataagctgctagttgctggaggattccagggtgaactaatatgcaagcatttagatcgac

SEQ ID NO: 3663 - DNA, 560 bp, Gossypium hirsutum
  Clone ID: LIB3825-028-Q6-K6-B7
tccgttcttgcgcacaggtccaaagcggctctctcaacacccgacggatccccttgattattcgactctctatgataacgatagtagcacttctgagctgcatgaccaaacgactgcagatctggcattgaatgcgagatcggaaggtcctgccacggccacgaacagacgtacggccgccacgatttcctccttcaaccgacggcgcatcctcaaccagatttgcattcaaacttacctcctgcaacacctgagcttgacggctctcacaatcaactagagcatcgaccacacgttgtaacgacagaacacccgtcgacagcctagcggaggagataaccgcctcaaactctgacggtaatcccgcgagcatcacctcaatcttctcttcatcagagagacgagaaccagaggcatctaacatagcacacagatctttaattttagcaacataagctttaatggaaaggttacctttcttcaaagaatgaagctcatgccgaatgcgtgactgctttgcaccagtgtcagccacaaacaaatttatcgccatgttccac

SEQ ID NO: 3664 - DNA, 591 bp, Gossypium hirsutum
  unsure (1)..(591): unsure at all n locations; Clone ID: LIB3825-028-Q6-K6-B8
ttttgcttctctctctctctctctctctctctctattcacccattttttctttttttgntagaaaatcaattcgagcctttgatcatgatcaggatgaagtgaagtgaagtgaatgcttctgtatttggcaattgaatggatagtgtcatgctgcagtttttatgagatatattgatcactaggtatttcttcaatgggggctgcttgttctaggaaaagagaccaactggacaatgtagatggtttcgacagaggggtttcgggaagatattgcaaaagtgggagttcgaagtggttagcaacaactctttctagacctattctagaaattcaaagggagaaaaagaaatgtccatcacttttggaattatgcacccataaaattcgggaggatatagataattatgtttcattttctactcttccaagagatctaagtcagcagatcttcaatgaactagtgaagtcacaacgtctgactgatgtttctcttgaagcttttcgagactgtgctcttcaggacctttacctgggagactaccccggggttaatgagaattggatggatgtcatctcttcacaaggctcat

SEQ ID NO: 3665 - DNA, 594 bp, Gossypium hirsutum
  unsure (1)..(594): unsure at all n locations; Clone ID: LIB3825-028-Q6-K6-B9
cttggcaaanacattttggtgactggtggtgctggttttattggaagccacactgtgctagagctactactgggaggctacaatgcagtggtggtggacaatctcaacaattcctctgacgttgccatcacgagagtcaaagaactcgccggccagtacggcaacaacctttattttcaccaggttgaccttcgagacaaacctgcgctgcaaaatgtatttacggaaagaaaaatcgatgctgtcatacacttcgctggattgaaagccgtaggtgaaagcatgaagaaaccattgatgtattacagcaacaatatcgttggtgcaatcacgttgttggaagtaatggaagcctatggatgcaaaaatctagtattttcatcatcagctgccgtctacggttggccaaaggaggttccatgtagagaagagttccctgtgtctgctatcaatccttatggaagaaccaagcctataattgaagagatttgtagggacatacaacatgcagacccagagtggaagttcatattgctgagatactttaaccctgttggtgcacatcaaagtggctatatcggagaacatccccgt

SEQ ID NO: 3666 - DNA, 584 bp, Gossypium hirsutum
  unsure (1)..(584): unsure at all n locations; Clone ID: LIB3825-028-Q6-K6-C1
ctccacctcgntttttngtcatagatgatggttggcagcagattgaaagtaagcccaaggagagtgattgtgttgtacaagaaggggcgcagtttgcgagtaggttgactgggattaaagagaatgcaaagttcaaaaagaatgaccaaaacaacgaacagatctctggcctaaaacatgttgtagacgaggccaagcagcatcataatgtgaagaatgtgtatgtgtggcatgctttggctggctattggggtggagtcaaacctgcagctgctggtatggaacattatgatacagcattggcatatcctgttcagtccccaggtgtgatgggcaaccagccggatatagttatggacagccttgctgttcatggccttggtttggtgcatccgaagaaggttttcaacttctacaatgagcttcatgcctacctggcttcatgtggagttgatggtgtgaaggtcgatgtgcaaaacatcatcgagacacttggtgctggacacggtggtagagtatctcttacccgcagttacgttcaggcccttgaagcgtcaatttcccgaaacttcccggacaatgga

SEQ ID NO: 3667 - DNA, 451 bp, Gossypium hirsutum
  unsure (1)..(451): unsure at all n locations; Clone ID: LIB3825-028-Q6-K6-C10
cccgagcanattgaaatttgttggctaaaagccgcataaaattaatgcgaaccacatgattctcttgngtagtcaacattccaaagnaggaaaagtgtttgataacccaaagtgcatagcagaataatcgacattgtttgttcgaaccatcttcaaacacccaggacattctcgagatacatgcacagaggtttccactcccaaaccataccttgggcatactgtacttgatctgagttatctgcactatagattggttagggtaggcagaaagtcccaagagactttccaagttgtaatcttttgctttgctgtgagattaaggctccataattttttgtaaaaaggtttcatttaatcctgtatctcattagcactagaaacagtagggatgttgaacaatagtttgtatgcactcctaactgtaaattcgctcgaagtttctcctttc

SEQ ID NO: 3668 - DNA, 587 bp, Gossypium hirsutum
  unsure (1)..(587): unsure at all n locations; Clone ID: LIB3825-028-Q6-K6-C12
ttcgaaaaaaaggcnaggaaaatgagcaatgtagcatcaaagacatgggcggaaacggcatcgtttcacgctccgctgcctcctctctccgtctccgttccggcatgggtctccctgttggcaaacatattgtgcccgacaagcctcttcctgtaaatgacgagctaatttgggacaatggaactgccttcccagaaccttgcatagatcgaatcgctgatactgtcggaaagtatgaggcattggcttggatgtgtggtggtttgagcttctttgcatcgttgggattcttagcttggtggaatgataaagcctctaagattccatttgcacctaaagtatatccatatgacaacctgcgagtggagcttggtggagaaccataggtagatctgtatgagcaattgtacggttcttgttgtcacttgtctccccatgtgtttcattttacttctggaactctgaacagttgaataatggattgtgggtttgttgctgaagcaaacattttgaacaaatatgcatttcctcctcgtcattttaggattggtgctaaatcatgagagaatcanaatgtggtgtgtgtg

SEQ ID NO: 3669 - DNA, 450 bp, Gossypium hirsutum
  unsure (1)..(450): unsure at all n locations; Clone ID: LIB3825-028-Q6-K6-C2
gtttctggnacacgcaaaccctacgaagaattgaaactgagcttgaataatgtcatgcctactggaggagacaattcggtaaagagtttatccgatgagctattagctatggacaatcaagtgaactactttcagacaccatttattgacgagaactggaatgtttcgatggatgacttccttaatggagatgcaactcaggatggcggaaacgaaatgggtttttggagctttgatgactttccttccatagatgggggtattttctgaacaaactctccttacttattatccgtttccgtacataaggcatcgtgttagcgagtttcgaccctctggcaactgcttgactattgtttctattttgatatctctaacaccgaaaaattcaaatttaaatttcgagtgactgttagaacttacaacattgattatgtgtgatttatgatg

SEQ ID NO: 3670 - DNA, 574 bp, Gossypium hirsutum
  Clone ID: LIB3825-028-Q6-K6-C3
caaaccaaactattactgctcactatagcctaatatggattgttgaaagaaaacaaaatggaggtagctttccctgttattgacttgtccaaaatcaatggtgaggagagaggagccaccatggacatgatcaaagatgcttgtgagaattggggtttctttgagctgacgaaccatggaatatctcatgaactgatggacactgtggagaaactgacaaaggagcattacaaaaagtgcatggaggataggttcaaagaaatggtgacaagtaaaggtcttgaagttgttcaatctgagatcactgacatggattgggaaagcactttcttcttgcgccacttgcctgaatcaaacctttatgaaattcctgatcttgaatatgattacaggaaggtgatgaagcaatttgcagtggagttggagaagctggctgagaaacttttggacatactgtgtgagaatcttgggttggaacagggttccctgaagaaagtgttttatggttccaaagggccaacttttggtaccaaagtcagcaactaccctccatgccctaaacccgacctaatca

SEQ ID NO: 3671 - DNA, 590 bp, Gossypium hirsutum
  unsure (1)..(590): unsure at all n locations; Clone ID: LIB3825-028-Q6-K6-C4
caatgcaaactaacaaaagnaaaaaaagnacacatttgcctatgattgatttttaggagtcataaactaacaaatgttttaatttcaggtcaacatcaattgataaataataaaagggtaaactacacttgtagtcacccaactattcatttttttttcttggtcatcggttgttaaatggctgatggaaagatgacgtggcagcttttaaaattagcataatagcaaatttaaccctcaacatttatatattatgtcaatttagtcttgattctaaaaaatttaatccttaatgtttacctattgtgtaatttgtctttttcttaaatttgcttttctttggaaccctttcacctaaaaagctaaaataaaaaataaaaaaaaatctatcaactaaatttggtcgaaaatatacaaaaattggaaagagttgaaaatccaagataataattttcatcttttctcattcttttaaaattaaccctcaatatcacaaataaaagtaaaattgaaaaaaaaacaaattacacaatatgtaaatgttaagggttaatttttttaaaatcaagactaaattgacacaatgtata

SEQ ID NO: 3672 - DNA, 590 bp, Gossypium hirsutum
  unsure (1)..(590): unsure at all n locations; Clone ID: LIB3825-028-Q6-K6-C5
agctttccaatcttttaagggataaaggcctgacatggacgatatggttacacttttaggtggccatacagttggtgtggcacattgcttttttttctcgggtcggcttactaatttccaagggacagggaaacccgacccaagtatggatgcgggtttggtaactacgctgaaagggatttgtggtaatggatcgaaccctaaggcgtttctggaccagggcacgtcttttagttttgataatgagttttataggcagattcgggcgaagaaaggggtgatgaagatagatcaagagttggctgatgatagattatcgagtggaatcgtatcgagatttgcttcaaatgcgaatttgtttagaacaaggtttgctcaagcaatggtgaagatggggaatattcaagttcttgttggaaatgctggagaaattaggaaaaattgtagagttattaactctaaatgagtttcaccttcaaataaatcgaaatatgtactcatcttgaactaaatgaaggagttaaaatttttgagttgtcaaannaaaaaaaaaaaaaanaaaaanaaaaaaaaaaaaaaagggggcggcc

SEQ ID NO: 3673 - DNA, 592 bp, Gossypium hirsutum
  Clone ID: LIB3825-028-Q6-K6-C6
ccgggtcgcccagcgtcggacatatgctgtggtatgaggtgtagtgggaaaccaaggctttgggtttatcaacttcgagaatgcagatgatgctgctagagccgttgagtcccttcaatggaaagaaatttgatggtaaggagtggtttgtcgggaaagctcaaaaaaatctgaagggaggctgaactgaaacatcgatttgagcagacaatgaaagaggcagcggataaatttcaaggagcgaacttgtatgtcaagaatttggatgatagcataagtgacgaaaagcttaaagagctattctctcaatatggtaccataacatcatgcaaggttatgcgggaccctagtggaataagtaaaggatcagggtttgttgcgttttcaaccccagaagaagcttctagagctcttgcagagatgaatggcaaaatggttgtcaacaaacctctctatgttgcacaggctcaaaggaaggaagacaggagggccaggttgcaggctcagttttctcaaatgcgaccacttacaatggcaccttctgttgcaccacgaatgccaatgtacccccctggtggtccaggtcttggac

SEQ ID NO: 3674 - DNA, 569 bp, Gossypium hirsutum
  Clone ID: LIB3825-028-Q6-K6-C7
ccttttgatttttttttttttttttttttgtataagattcaaagtttcttttactgaaggaattaaatcatgtttatcttcgattggttctatgggatccttgcttcccttgggttatggcaaaaagaggccaagatcttgtttttagggcttgataatgccggcaaaaccacgctgcttcatatgctcaaagatgagagattagttcagcatcagccaacacagcatcccacatcggaggaattgagtattgggaaaatcaagttcaaggcatttgatttgggaggccatcagattgctcgaagagtttggaaagattactacgccaaggtggatgctgtcgtgtacctagtggatgcttacgacaaggagaggtttgccgagtcaaaaagggagctggatgctcttctctcagatgaagctttggctaatgtcccattcctcatcttgggcaacaagattgatataccatatgctgcttcagaagatgagttgcgttatcaccttgggctcaccaatttcaccacaggcaagggtaaggtcaatttgggagactcaaacgttcgtcc

SEQ ID NO: 3675 - DNA, 568 bp, Gossypium hirsutum
  Clone ID: LIB3825-028-Q6-K6-C8
cggtcgcgtgggcggtcgcgtgggcggtcgcgtgggtttttccttcaccttgataatgtgacggttaaactctcccatttctttcttcaacatactttcgaaactcggttaactcactgaactcaactcaccatggcttcgattctcaaccccccgccgccgccttactttcaccttacctctttgcctacctccgtttcttcctcaccggtgatcttatcttatcctttcctcaaaacgacgtcacttcaagttcggtttaaagcgttgaggacctggtccgacggcgggaaaatcgggagccaggaagcttacggcgccgatttcttgaggaagccgagtacagtgccgaagaaggacagtgatggaattttggaagaagaggaaggtagtgagggaaaaagaaacagaggtgaatggactgattgggaagataggattttagaggacaccgtgcctcttgtcggctttgttagaatgattattcactctggaaaatatggagctggagatagattgagtccagagcatgaaaggacgattttggaaaggttgcttccttaccatc

SEQ ID NO: 3676 - DNA, 587 bp, Gossypium hirsutum
  unsure (1)..(587): unsure at all n locations; Clone ID: LIB3825-028-Q6-K6-C9
gccatccctgtgttngaagagcgatgcaccatgactgtcccatatgctttgagttcttgttcgaatcaagacaggatgtaactattctgccatgcggacatacaattcacacaaattgtttgaaggaaatgagggaccatttccaatatgcctgccctctgtgctccaaatcggtttgtgacatgtcaaaggtctggngaaaaatttgatgaggagatcgcagctgcgccaatgccggaagagtaccataacaaaattgtttcgatcctttgcaacgattgtgggacaaaatctctagttcggtttcatgtcctggctcagaaatgtccgaattgcaagtcatacaatactaggcaaacacgaggctgaagtggcttagagtgggatgtagaaaccgacttggatggcatattttccaaatcgatgcatcaagcattgagttctggttaagcttctgcaacgcgtaatggtaccggttgtggcgcatggttccttcgggggttcggtttagtgcttgttattttcaattcttttgtagatgattcaatcaatagccaacaaataaacatttgcttgtatggtcctct

SEQ ID NO: 3677 - DNA, 570 bp, Gossypium hirsutum
  unsure (1)..(570): unsure at all n locations; Clone ID: LIB3825-028-Q6-K6-D1
ttttgcgccagngcgagatcaaagccgccgtcgccatggtgaagtttctaaagcccaacaaagctgtcattgtcctccaaggccgatacgccggacgcaaagctgtgatcgtaaaatccttcgacgacggcacacgtgaccgtccctatggccactgtttggtcgcggggataaaaaagtcccgagcaaggtcatcctcaaggactccgccaagaaaaccgccaagaaatcgcgcgtcaagtgcttcgtcaagctcgtgaactaccagcacctggtgcccacacgatacaccctcgacgtcgacttgaaagacaccgtcacagtcgacgcgcttcagaccaaggacaagaaagtagccacttgtaagactatcaaacaaaggctggaagagaggttcaaaacaggaaaaaacaggtggttctttaccaagcttaggttttaagtcttcctttccttttaacattttccgtagaacctcttatatcatttgcacttctcttggtgctgtacttattcagccttagatcgatacggaaaaaaagcttgagaattcgagtccttcgttgtttg

SEQ ID NO: 3678 - DNA, 557 bp, Gossypium hirsutum
  unsure (1)..(557): unsure at all n locations; Clone ID: LIB3825-028-Q6-K6-D10
gtcttttaaaaattttcagttttagagtatgatgtgtatgattttggttgcagtttgggatgaattggagaaagaaaacaaanagttctttgaggcatacctaaagggcagagatcagagagcaactgaaatagagaaaaggcaaaggattcagaagaagcttaatactttctcgagtactcaatagaaaatttttaaactagatttttgagttttgaatctagattatcatcatttgaataacccaaagacatgaaacggcgccgtgtgaattggtacagtagttgggaaacgtgacggtatgtggcattgtgagagcaatatatggacaagggggttgcatgagttgatggcacgttgcataaacgtggcaccgccctctttgtttcttttgtaattgggtcgcttatttacacgtttaacgacaatctaagctatgagtgcatgttttgctagctttaacaattgaaagttaaatagggatctggggaccatgttcaaaggagacgacgttgcgtcaattctcaagagtcccatgtttttagtgtttttatagc

SEQ ID NO: 3679 - DNA, 520 bp, Gossypium hirsutum
  unsure (1)..(520): unsure at all n locations; Clone ID: LIB3825-028-Q6-K6-D11
gcgttctgggnattagcatctttngaggttgaggatgctgttgtacaggcattaggcaggcataagagacttggtttgcttcatcaatccgtctcagattcaaagtcaccaggtgatcccaagttgattgatgcatttgaactaagtgaagaggagagagaagatgttcttttcaaagaggcttggttaacgtatttctggagaagagccaaagtgtatggcgtggaagatgatattgcagaagagcgacttgagttttggattagccatattggacagacccctacttcccatgatgctgtggatgttgatcgaggtttatatgagctgcagaagttaggaatagaacaacagctttgggaagcatctcgtaaaggaattgaccatccagctcttgcttctttgtctaatcacaaagatctcgacaacacttagtgatatttatttattgctttttgttttgagaagttatatttattgttcaaaatttttcttattaattttttactttagcctgctt

SEQ ID NO: 3680 - DNA, 578 bp, Gossypium hirsutum
  unsure (1)..(578): unsure at all n locations; Clone ID: LIB3825-028-Q6-K6-D12
tggnggctctaacacaaacctaccttctctnctccaaacaaaacccttggtgggaataagggacaagcatttgaaagcaaatggtcacctacccctggtcagtcatcaggttctcttccggtagctaatccattccgaggaggtgccgtagggctgcaaccccctactgttgtttcagagagtgggagcccagctgctcccgtagtgcattcacatacgatggtgtcaagtgaatcactcaggagacaggtcaatgttcaggcctcagttaatttaggtgctgatttgaaaaatgcaggtgtatctatccagaatttggttcaatctttgagttctaataatcctcctgctgaaactcatggaccgggttctgtctcagtttcaaggcaagaagcagttgctgtaccctctatgcctgccactggaactcaaaggtggacaaacgcttcaactcagaagcttgagccaaatccctcccttgccatgcctgctcaacctgctgcttatagtcactggaatgacgcatcacaggccggtcaattccctggggttttccaaactcctggtcaaccaaatat

SEQ ID NO: 3681 - DNA, 613 bp, Gossypium hirsutum
  unsure (1)..(613): unsure at all n locations; Clone ID: LIB3825-028-Q6-K6-D2
cccgggtncgnaccccacgccgnntccgtccatttttcaaaattaagggtttttagtaaccaaattgattggccttgggagttacggttacactgcaccatcttccaaaaaaaacaacgcctacgatgttcctcaaggcgtcgatattcgtggtcgattcgatgaagaattcgctaagattttaacaaaggatgccttacaattcgtcgctgatttgcagagagagttcaggaaccatattaagtacgcgatggaatgtcgcaaagaggcgaaaagacgacacaatgaaggggcgttgcctggtttcgatcctgcaacgaggtatattagagaagggaaatggacttgtgcgccggttccgcctgcggtggctgatcggagggtcgaaattacagggccggtggagaggaagatgatcatcaacgctcttaactcgggagctaaagtgtttatggctgattttgaggatgcactgtcaccaagttgggaaaatcttatgagaggtcaaataaacttaaaggacgcagtggaaggaacaataacgttcaacgacaaagcaaggaacagggtttacaagctgaataatgaaatagcaaggctatttgttcggcca

SEQ ID NO: 3682 - DNA, 573 bp, Gossypium hirsutum
  unsure (1)..(573): unsure at all n locations; Clone ID: LIB3825-028-Q6-K6-D3
gcgtgaaagatgcggacactgacgggctatgagtaatattgaatcctctcccgagggttttaacatgcttaggcgtatgtatgaaaatgttcaggaaccatttatgaatgctacaactatgnggctggaaataatggaaatagtccgagctcaaacccatttgctgctctattgagcaatctaggtgattctcaagctaggagcttacctaacaacacttctacaaatggttctgaaaccactcatggacaaacttccccaaacacaaatcctcttcctaatccttggggaaacactgttggtggcgggggcgcccagaccaatgctactgcaaggtcaaatcctgctggagatgctagggcaccaggtcttggtggtctgggaggccttggacttccggatgtaccacccatgatgaatggaatgccagatgcttctcagttgactcaattgttgcaaaatcctgctctatcacagatgatgcagagcatagtgtctaatccccaatatatgaatcagattatgaatctcaacccgcaactacgcggaatgtttgatttgaatcctcaattg

SEQ ID NO: 3683 - DNA, 205 bp, Gossypium hirsutum
  unsure (1)..(205): unsure at all n locations; Clone ID: LIB3825-028-Q6-K6-D6
cccagcgtccgactggtgtccgcttggaaacagnaaaccaattcccattctcctgtgggaatactacatgccgtgcagcgcgacggagccgtgtcagtgggatttttaggattagagactctctgggtaggcaaggcttatcagcttcaaatggctgaaccttactatgtcgggcagtttgtgcggctcaaaccaaatgtggtta

SEQ ID NO: 3684 - DNA, 582 bp, Gossypium hirsutum
  unsure (1)..(582): unsure at all n locations; Clone ID: LIB3825-028-Q6-K6-D7
gntagaacatacccactggnaaagccgttcctttggctgcaggttttgtggggcaagcagaggcaagggaagcagctggtcttgtggtggatatgataaggcaaaaaaagaggctggccgtgcacttttgctggctgggcctcccggtactgggaaaacagctttggccttaggaatttcccaagagcttgggagcaaggttccattctgtccaatggttggatctgaagtatactcttcagaagtaaagaaaactgaagttttgatggaaaatttccgacgggctattggtctacgcatcaaggaaaataaagaggtctatgaaggagaggttactgaactctctcctgaagaaacagagagcgtaacaggtggttatggtaagagcattagccacgtaattattggattgaaaactgtcaaaggaacaaagcaactgaagttggaccctacaatttatgatgccttgattaaagaaaaggtagctgttggagatgttatatatattgaagcaaatagtggagccgttaaaagggtgggcagaagtgatgcttttgccacagaatttgaccttgaagctga

SEQ ID NO: 3685 - DNA, 570 bp, Gossypium hirsutum
  unsure (1)..(570): unsure at all n locations; Clone ID: LIB3825-028-Q6-K6-E1
ggnattcagtcagtttcaagggccgatttttcttgagccctggtttggcgccaacattccagatttatatggcatccatgtttgagaatcaatacaagttacttgctcngatccggnaaacaaagtacaagaggtgattgttgaaacgacattggataaggaagagattaaatccacaatacaatcatgcacaaatagagtggtgtagggttctttttcatcttatcaggacattcttgaccgaatttggaactcctttgatcccgaaagtcgctttcaaagggtgataagagagcgaagtgaaagtctgaaaccatggggagacttagtgttggggggattggattctcttctcttgtgcaccccacttacaatggcaactattataatcatgttgcatcacaaaatatataagctgtgtatcttcctttcaaaagaattttatatgtttcatacaccaactttcataaacattggattaatgatcgaatttatcactgtaaactgccacttctaatgtttatatagtttttcttaaagactttgcaagttannnaaaaaaaaannaaa

SEQ ID NO: 3686 - DNA, 570 bp, Gossypium hirsutum
  unsure (1)..(570): unsure at all n locations; Clone ID: LIB3825-028-Q6-K6-E10
taaaaactctcgattcaacagagaagaagactgtanaacgaagagaaagaaggaaaaagaagtgaaaggaaaagacgaaaagagatgtccggaggttataccagcattgataaccagaagtttctggatccgtacccgccgtttcggattccggccgtgtcccggtccaattcgcagattcgggccttcaaacatttcctccatcgggtgtgcaggggaagatctcgggtggaactctacctccatctgatgccgacgattcattttcaagacctgctggtggctcttctagtggctctgatgaaccacaagcaagtggatggcttcataaattcacagttgctgcatacaagccatattttgatgttgatactacagatgttttggatagacttaaggagtcactctatccatttaggggaacatttacagagaaaacagctaccaacccagatttatatggaccattctggatttgcaccactcttatatttgtagcagcgtctattgggacatttgtgacctatgtagcacacaagctccgggataaagaatggaattatgacataa

SEQ ID NO: 3687 - DNA, 317 bp, Gossypium hirsutum
  Clone ID: LIB3825-028-Q6-K6-E11
gcggcatcagttttgtttcggtttaggttaagatggtttagagggtcgtgtcggagtttgagacatggcattcatgttatctttttaaacctctatttactgacgattccgagttttctcctggcttcaaagtaggattgttttatgttctgcaagtataagggaagcttaaattgcagtcaagctctccctgttgctattatttcatacttttgcactgcttgctttggcggtgaaatgaccggtgacggcatgtctgagcttttgaaatttagtttctggtttcaagaatttaattagatttgatcgcctgaatt

SEQ ID NO: 3688 - DNA, 531 bp, Gossypium hirsutum
  Clone ID: LIB3825-028-Q6-K6-E12
cccagctctgttctttttgcacctatgacaaagatcagagagaagaaaataaaaacagtagtttattgatttctctgtattgattcaactcatctggttttccaattgataccccattttcattccttgtttcttcttcgatttactcataaactaacttagtccccaaagattaatacgttgggtgtgtacccatcacccaaagtttccatctttcccaaaaggagtttgtacccatagctgatcaaatttgataactttgttataccctttttttatggaatcagatagtattgattgtatggcatcatcggatgtgatggatgatgatgagatccatcatcatcagttatcttcttcattgccaaagacccacagcaacaatgggaacagcaacaacagtaccttgtcatcagctgttcatgcaagcactactagtgtccatgaactccttgaatgcccctgttgtaccaattctatgtacccttctattcatcagtgccacaatgggcatactctctgttcaacttg

SEQ ID NO: 3689 - DNA, 578 bp, Gossypium hirsutum
  unsure (1)..(578): unsure at all n locations; Clone ID: LIB3825-028-Q6-K6-E2
gtcaacctttcttggnaaggaactgtaaaaccttctgtaccctccagtgcaactggaactggggtaaagcgaccttctactgcagctaatggatctaataactttgcgacaaagaaggccgtggagctggtggcatgcaaaatcagcttgtgaacagagcattggaaggcatatcttatggtgggaggggtggtggaagaggtaggggtcgaggttgggggggacgtggaagaggaagaggctaccggtaattcgaggatgaaacatagtacaacaacgatctataaatttggagaatatgtttgtacctgaagaacatgagaagtcgttgatgtgttaaaccaagtctcttttcaggacaagttttgtttgataccagatgctgatgagtttctagattcactatggactaacaacaggcattgcagtcctctggagattgttttaaagttgattggataacatcttggatttgagttcccaatcctgtcgaattttagtgtatttgaagaaacattgcatgttttttagagtgtggagatggctgtatctttcaggacagtgaagttaaatagtga

SEQ ID NO: 3690 - DNA, 509 bp, Gossypium hirsutum
  unsure (1)..(509): unsure at all n locations; Clone ID: LIB3825-028-Q6-K6-E5
ggnacttcctccatatgatcctgatggtactatatcagagccgcttcctggcgaggaaaattacctgaggggaggtcttggtgttggtgcctttagaaggatttacggtggggctaagagaaatggaagccgtcctcgccatttctgtaagagcagtggatctgttgctcgccacattcttcaacaattgcagaacgttaacatcattgatattgatcctaaaggtggtaggagaatcacatcgaacggccaacgcgacctggaccaagtagccggaaggattgcggttgccatctgagtaacttttaatacccaaatttgcttgtttttgctgttaagcaattttcattttaggtaccgagagagtgaagacatggaatatttttattttagggtttgttgacttgttctctctttatcaccgtcgatcttgaaccttgttgatgaaaactcgaatctttaaattttgcctttttttattgtctagcactcgatgcatggatttcgaa

SEQ ID NO: 3691 - DNA, 580 bp, Gossypium hirsutum
  Clone ID: LIB3825-028-Q6-K6-E6
ctaactttcttaaggcttttctgcttcgcatgtatttatgtatatatatccaaaagaatctttatgtatatatttatgtaaccctagcaatccatgcaaatggaatcacagatggaagcagtgaaggttgaaggttttggccctgattcagaagtggaggatttaggacgatgcgttgatgaaatttccaccactgtcagtcggctcgagcaaagagttaacgatgtcgagcagttctacttgactacagataatatggagttgactattgccaaatctgcttcagcttttaaggaaaaagtcaaggaaaaacagcttactggccttgaaaagcagcagcaagaagcatcacaaagagaagctgctgctctgaagagaatgcaggaacttatgcgccaatttgccacaattttacgtcagatcactcagcacaaatgggcacatccctttatgcatccggttgatgttgaaggtcttggtttgcatgactattatgagattgttcagaagcctatggactttggtacaataaaaagcaagatggaagctaaggatggtactgggtacaagaatgtacgcg

SEQ ID NO: 3692 - DNA, 578 bp, Gossypium hirsutum
  unsure (1)..(578): unsure at all n locations; Clone ID: LIB3825-028-Q6-K6-E7
cggncgcgtggggttangatgaacgatcttaataaaatctctctattaaaatttaagtcaacatagcctttcaattttgccctcgttaaggtctcgatcaatactgtgtaggttctgctaaagcgaagtactagtatttatcttggttaaacgcgaagaataaacaagtgatatttgttggttaaaattggttaatgacttaactaggttattctaataggattagaaacctagagacaagtaatttggataaatcataagatgattagaacaagagttgttcaccaaacttgaatagttacatatgatgtaattagcaagtgttgcttacctagataaccataatcttaagagtaaagccaaagttgacttaagaggaggtgaaatatggatccttaacccacttgaaatacttttcgagaaagtctttctgaaactaatatatgagggtattaattttgtaataaaatagtgggaacatcatataataaatttcatttaatgattgatataaatttgataaattttcacacgcataattttattgttgtagatatattatggctgcaaacactaat

SEQ ID NO: 3693 - DNA, 580 bp, Gossypium hirsutum
  Clone ID: LIB3825-028-Q6-K6-E8
cggccgcgtggggttgagcaaacattattgaattcttcacatactttctggggctttctgaattttcttggacttcgagctcgggttaagcttccttggctttttctgggtgatattctggatagctgatttgacaagctttgatgaccgtggaggaagccgatagcagctccaagtggagtagggagcaagataaggcatttgagaatgctcttgcatcttatcctgaggacttttcagatcgatgggagaaaattgcagctaatgtacctggaaaaactttggaagagattaaagaacactatgagcttctagaggatgatgttaaccggattgaatctggttgtgtgcctctgccgccatataattcttccgagagttcagcaggtgatgaaggagctggtaagaaggggagcagccattcagggaattgtaacagtgagtcaaatcatgggagtaagaattcaaggtcagatcaagaacgtcggaaggggattgcttggacagaggatgagcacaggttatttcttcttggtctggataaatatgggaaaggtgactggcgaagcatatcccggaa

SEQ ID NO: 3694 - DNA, 585 bp, Gossypium hirsutum
  Clone ID: LIB3825-028-Q6-K6-E9
ctaattctttttttatctgcgatttcttacatgtgattcttcaattgaaaagcttcagtgttttggtgtttcggtttcttgcaaacttataaggaaaagcttcattgtttcgatttcttgcaaacttacataacccacacaaagaagacggagaaggtggcacagaaattcggattctgtcatcgggggaatcggtatttaagggtttttgatcgtttcatttttcttcatcatcgtgaagtgcaccattggcatccactcttgtatgggaacgggatttcagttcctccgaggagttgattacagaattttgtccagaatgcaggatagttaacaaagggctgaatggggatctaaaaaatgcaatgaagaatggaaaaccaattataatcgagatacaacacacagagacttctggcatccttatggtgttatttctagtagttggtctggcatcaggatcagtcatagcttggttctaggtcatcggatcatcagacaagatctctccaacacgtggccgctatgaatttctgctaatgatgtgataacctttgtaaagtttatctaaaagccgttgtttgt

SEQ ID NO: 3695 - DNA, 548 bp, Gossypium hirsutum
  unsure (1)..(548): unsure at all n locations; Clone ID: LIB3825-028-Q6-K6-F10
tttcatttcagtgaagnacaagnaaaaaaattttaaaaaaaaaaagaccctctgcagccatggctgagctcaccacattgcgccgactgtgacatgaaaattttcctgaaaaggaccctcaacatcaaaagttcttatggttgccaccctccttcctgttggtggcatcctcctcttgcttgctggtttgagccttattggatccctcataggtcttgctattgccgccccacttttccttattttcagccctgttttggtacctgctgcttttctcattgcgggttccatagccggattcttgacctccggagcatttgggatcactggactgtcatcgctgtcgtggattgctacttatattcgtggaagcaggggctctatgtctcaggggctagacccagtgaagtggcccttgccggacacggcagtgagtatggagcagaagatccagaataggagccaaggaggaggaaggatctctgagggaggcagagaacaggaaggtggcaagagtaagacacaagaaggtggcaaggataagacac

SEQ ID NO: 3696 - DNA, 196 bp, Gossypium hirsutum
  Clone ID: LIB3825-028-Q6-K6-F12
aaaaaaaaaaaaaaaaaaaaaaagggggggaaaaaaaaaaaaaaaaaaaaaaaaaaaaaaaaaaaaaaaaaaaaaaaaaaaaaaaaaaaaaaaaaaaaaaaaaaaaaaaaaaaaaaaaaagggggcgggcctttttaagggtacccacttttacttccccggccttgcaacgtaatactttttttttgggggggcc

SEQ ID NO: 3697 - DNA, 575 bp, Gossypium hirsutum
  unsure (1)..(575): unsure at all n locations; Clone ID: LIB3825-028-Q6-K6-F2
gcgatgggtttcagnattttgtggtggcgatgatggtgggttccatcgcagcggctcagatttcattagcatccaccgtgcctgcttttctatgggctcctggtttctctagcgttgaatcgaaggaatctgtaaattatcagatcaagtctccaaaggatctagctaactctgttctctctcagggggatggtctgacttactgtgctccgagaggaaaaatgagcgccctgttgatctcgccgttgtttttgttggtagagagttgcactcttcagatgttgcagggaacaaacatgcagatccggctcttttgaacttgcttaaggactcttttaccaagtccaacttctcaatggcatttccatatgtagctacttctgaggaggaaacaatggagaatttgttggtttcaagttttaaggaagcctgtgcccacggtttgggagttgctaatgttgcaattttggaatcgtgctctatagagggtggagatttccagaaacttgcaaacttgcattcagtccatgatcatctagttaaaaggatggaaaagagaacaaagggggagactg

SEQ ID NO: 3698 - DNA, 578 bp, Gossypium hirsutum
  unsure (1)..(578): unsure at all n locations; Clone ID: LIB3825-028-Q6-K6-F3
natgnaaaccctcattttaatgattattattcgattaattgctgttgtctagtaggtacttggcatttttggacatctgatgaataattttttcttcaacattttacttgcataatataatgctttgggttgttttggttacataaagtatacttgcaccatattgttaagagaaatactatatttaatttatgataatgcaaataaagtgagaataaagaagccatgtttcatgtttttttttatagggcaaagtaggaacataaatttacttaaaaatatggtaaataacagtttttaatggactaattgtaacgagaagagtaagttatagcattaaatggattaataggtgagttggtgtgcgaatgtgaaaggatgttgcaatgccttggctagtgtaatgactaggacttggctaatgaaatacttcatgaaacatgaagtgtaatggataattgtaataaagatatggctattagctcaatgagcttaaacaaatgtgcatcatgaaaggttgagtatatcagaaattgtgtgaaacaaggcttaattattattgacaaccacctatctaa

SEQ ID NO: 3699 - DNA, 560 bp, Gossypium hirsutum
  unsure (1)..(560): unsure at all n locations; Clone ID: LIB3825-028-Q6-K6-F4
natagttttatttatttatttattatcttaatgttggcaagcttgcagactgcattcctaaagtctcgaagaggatttgttcgtatagccatggaaatggggtgtccactagtccctgtttttgcctttggtcaggtaaagtaattccttttcttgcttcttctccgaccccactttagtgctttaggaaaaagcacgtgcacggaatcccaacctatgtatgatatgattacatatcaatatttagaaaatcaaaacatcagctatttttaagcaattcacttcattgtcattgtcggtcaagaaatattgggtcttttgatgttgtgttactctatttttacttactttaatttgtctccactatcttcgtttagagcaagtatcggatgcttggttgtaaacaagtgtaggataagctttgccgctatgatgtgacccttcatgtagggcatgtgatgttactgacctgatgtgtgatattctcttatctatttataacatacttcccacaatagtgtacgtcacttgattcatctttttgttgtatctcctgcttc

SEQ ID NO: 3700 - DNA, 536 bp, Gossypium hirsutum
  Clone ID: LIB3825-028-Q6-K6-F6
ccggattcggtcgcccacgtccacacttctattctttcagacactgtcgagacagacagcagtcaatgacgagttcttattacgaatacatggttgagttaggcttcaaatcacacttttgtccttttgggagccgggaattcggagaacagaccaagacttgttcatatccgatccaacagagaaaggcaggaaaagcttgacaactgttgaaggtctgaaacaagaactgagttccgataagatccttaagtctcttaaaaaggagttctgctgtaacgggaatgttgtgcacgacaaagagctgggcaaaatcattcaattacaaggtgatcagcggaagaaagtagcacacttccttgttaatgctggaatagtgaagaaagagcaaatcaagattcatggtttttgagtggttttagggatgtcatgtcttttgattttaatacctctggtctgtgggaagaaccctaatggaatatgatgttggagtttcagtttcatttataataaataatggtcatttatttgcttta

SEQ ID NO: 3701 - DNA, 443 bp, Gossypium hirsutum
  Clone ID: LIB3825-028-Q6-K6-F7
ccttagccgactttaatccctcccttttgatgccgatccgccaccataaacgacgtccaacagattcaggcttcgagggtcaacattcttggctattcgtacatgattgagcacgtcactgacgtggcgtggtggagcagcgcacgttgcggagaagtggcattcggcgctcgagggaggtgtgagcagccgacctaggtgcggcgcacctaaggttttctgcttttttgatggttgtcggttagtgctaagtgggctggggttttgggcctaggttttttagtttttgtgttgggtgttttgggctgtaatttagactttgtttttatttgtttttttggtttatgggccccgagctaaattgggctctacacttgaaatttgtggtcgaaccaattgattctattttcaaaaacataaaaaattccatggaagagcaatac

SEQ ID NO: 3702 - DNA, 580 bp, Gossypium hirsutum
  unsure (1)..(580): unsure at all n locations; Clone ID: LIB3825-028-Q6-K6-F9
nccaccactcccttcttttcccccttttacctctaaaatccacctctttcatttctcttcctctccctctccctctcactcgctcttcccgcttccgctctactcacgcgccgtctcctaggcccatcgccgcttccttctccgccgttgaatctaccacctccaccgacggtcttggcaactccaagacgcctcttctcgaagtcagaggtttaactgccgtgattgctgaaaccaagcaggaaatcctcaaaggcgtcaacctcgtcgttcaccatggagagattcatgctataatgggaaagaatggctctgggaagagtacgttttctaaggttcttgtcggtcatccagattatgaggtgactggaggagatgttgttttcaagggagagaatttgcttgacatggaaccggaggaaagatctcttgccggactttttatgagtttccagtccccggttgagatcccgggtgtgaacaatatcgactttttgcacatggcatacaatgctcgaaggaaaaaacttggtgagcctgagcttggtccacttgagttctatgcttacatatatcctaa

SEQ ID NO: 3703 - DNA, 556 bp, Gossypium hirsutum
  unsure (1)..(556): unsure at all n locations; Clone ID: LIB3825-028-Q6-K6-G1
gttttattttctcttgtactaaactgtttggtcgtcgagaaattttagatnatgggagtgccggaaactgatccattggctcaattgagcttgccgccggggtttcggttttatccaactgatgaagagcttttagtgcaatatttatgcaggaaagttgcggggcatcatttttctctgcaaatcattggcgaaatcgatttatacaaatttaatccatgggatttaccaagtaaagctttgtttggtgaaaaagaatggtattttttcagtcctagagacagaaaatatccgaacgggtcacgacctaatagagttgccgggtccgggtactggaaagctaccggaactgataaaattatcacaacagaaggccgtaaagttggtataaaaaaagctctggttttttacgtcggaaaagctcctaaaggaactaaaactaattggattatgcatgaatatcgactcattgaatcttctcgtaaaagtggtagctccaagttggatgattgggttttatgtcgaatatacaagaagaattcaagtggtcaaaaac

SEQ ID NO: 3704 - DNA, 569 bp, Gossypium hirsutum
  unsure (1)..(569): unsure at all n locations; Clone ID: LIB3825-028-Q6-K6-G10
tccgccgtccctgnctctggtatggttccttttgggngagagaaggtcaacatagttgcaaagctagacaggtatctaaacaatcgattattccagcagttgaagttgagcctccgggatgttcatacaatcccacatttgatagtcatcaggattcgttggctcaagcggttgctgaagaaatgcaaaaggcctacaagatcgagttgggacctcagccggttccattaactgttatgggagaagtggttgatgaagatgataaatactttattgaagcagatgatggaaatgacgaccaaatggacgaggagaatttgagtgaggatgataaagcaactgagaaaaggcctcttaaaacaaagagggtgactcgagtcgagttaaataagagagctagaaggaaagaacagcaaaaaaaagaagctgaaactaaaaaggcagtggagttttccaaagacattgacaacttgccagatattttacaagaaatagccaaagaggatgaggagaagcaaaagaggcatcttcgaaaggccatagctaagcaagaaagacttaagtcttgt

SEQ ID NO: 3705 - DNA, 582 bp, Gossypium hirsutum
  unsure (1)..(582): unsure at all n locations; Clone ID: LIB3825-028-Q6-K6-G11
nagagtactagnnatttcgnagtcccacaatgtagaaagctctatataggcgggcacanagcctacatgaaaacttcagatctaatatcagctgaaatggacatcaagaaagctcttgaggctgacccccaaaacaggaggtgaagctacttcagaagacactgagacaactccaaattgaaagcaacaagagggatgctaaactctttacaaacatgtttgcacgaatgtcgaagagatcatctatgcccattaagaaattgaaggttgagatagcagagcctgagaagagtgaagaggctgcagcaactgaaagggaatgcgtggctgaaccttcaacaccttctgaagatagaatggcagttgatcagagttgagaaattccatttatcacttgttatccatctaacaaaaggttaaaaaggtctaatgttcaaaaaccagcacttctccctcagccttgctcgcctgtaagttttagcaggaaagagaggagaaaattagtgtaaccgaactcagtgttaaaatgttaattcctataaactgaaagaagggatgaaagaaatgatgatcccgatatga

SEQ ID NO: 3706 - DNA, 573 bp, Gossypium hirsutum
  unsure (1)..(573): unsure at all n locations; Clone ID: LIB3825-028-Q6-K6-G12
gcgttcgctcggnacttccgattgctggnagagcttgagcgtggagaaaaagtatcggagatggtactgtcagctacggaatggatgatggagatgatatttacatgcgctcttggaccggcaccattattggtcctctcaataccgtacatgaaggtcgaatctatcagctgaagctgttctgcgataaagattatccagagaagcctccaagcgtccgttttcattcaaggatcaacatgacttgcgttaaccatgaaacggggctggtcgaatcaaagaagtttggacttctcgcaaattggcgaagggagtatactatggaggatatattgacacagctgaaaaaggagatggcagcctcacataatcgaaaactggtccaacctcccgagggtacctacttctagctctcaaattcatatatcgatattctggatctaattttatttgtggttatgcaatatatagtttgtaatgcttgttgatcctttataagaacaaatcgtggattggtcaaaacgcttatcgattacttctcggcttcatgttcttgaatggaagctgtttctc

SEQ ID NO: 3707 - DNA, 577 bp, Gossypium hirsutum
  unsure (1)..(577): unsure at all n locations; Clone ID: LIB3825-028-Q6-K6-G3
caataacananaactctctgctagggtttcttttccatgccgccgccgccaccgctcaagccattccacggcctccgacgacgccccgacctccgatcgcgacggaggtggaccgattcgacggtttcggctaaagattcagccaactggggatgtacgtgggacacgtacgtgcgcaagggtggtggtgcagggctgatgtgcggcggctagggttgaaggttgtatgctgctagggttgctgctggaatttagttagtgggctgtttagtttgggttaggtgttgggccattctaggtttagttgggcccgggcattattgggtttgtacaaattttacctagcaaggtttggttttttagctaaagattgcttcatgatctgccaccaatttgagggccccaaggtactgaagatgatattcacccttttatggacacgcgttgctttcaatcggcccagtttcggcttcgttagagggcaccaatttgattagaagtggttacatggacacaaccatgatggaagcctagcaatactcttcaagggccaatggctatttgatttataggttag

SEQ ID NO: 3708 - DNA, 383 bp, Gossypium hirsutum
  unsure (1)..(383): unsure at all n locations; Clone ID: LIB3825-028-Q6-K6-G4
tntttcttggaagcacatttacctccaagactcgcacatctggccgcggttttgagattcttttcagatttcattcctggcttccgaagcacctcggatttctttacgtactacaacgttctcaatgagatgagctcttcagtaactgcttaagaggtaataaggaggacgaaaactgtgtaattgccagtcattattataggtatatgtgatttgctgttgaagttttgatcactttctaaataatacaatgccaactatcccaatcatatgaaatgtagaacataaaaaactgaacagttgggattagattcctagcgagggcagaagaaatatcatacttttcttcatttacacttgtgaagaactgatcattatgtctt

SEQ ID NO: 3709 - DNA, 557 bp, Gossypium hirsutum
  unsure (1)..(557): unsure at all n locations; Clone ID: LIB3825-028-Q6-K6-G7
nacctcttcaattgctcggcttggtgngaggttagacgaggatgaagaagatttgatgaggaagggtgagtagctcgaaactggactcctagaaaagtagcggttgagatcagattagcaacccagtaggaaaaccgaaatagtcaggatgacctcattggagtatggaagtatatcccatgaggtctctcaagggctcaaatggatttctcttctctatatctttatttatctgtcacggttcgctttctgttatagcatttgctaacataactttaaaatggtagattctcacagccgaaagacactagtccacaaacctacttgttatgccacgagaaatttgcggttccgtagtgtaactatgatcttattgctctttccatttcgatttagctcattaactttagtttcatgattgtcaaatgcattagtcctgtccatttcttcaatttcattaaccaagttaagcaatgggaagaacatgtttgcctgcccatgttgcaaaaaggagcgattcgggatccctccccattgccggaactaaaactgggtag

SEQ ID NO: 3710 - DNA, 595 bp, Gossypium hirsutum
  unsure (1)..(595): unsure at all n locations; Clone ID: LIB3825-028-Q6-K6-G8
naaatttatacttgtaatatgatgtttgattagcaataattgggtagaataacaaaatctagatatgcttatactgggaattgtaggatctaggtggatcactaggcagggaggctgcaactggccgtggtgttgtatatgcaactgaagctttacttgctgaatatgggaagtcaattaagggaatgacctttggtatccaggtatatttcgacatgaaccattacatggttaaaatacctttccctttgaggtgcttcagaacttcctttcttaatgtttatattattcgcagggttttggtaatgttgggtcttgggcatcaaggctcatacatgagaagggtggtaaggttattgctgtgagtgacataactggcgctcttaagaacacaaacggaattgatataccagaactgctaaagcatanaagaagctactggaagtttgaaaagcttcaatggtggagattccatggatccaaatgaactgcttgtacatgaatgtgatgttctcatcccgtgtgccttaggtggagtccttaacaggttaggatccattgctgagcatcttggtcctataaactattgcgcggt

SEQ ID NO: 3711 - DNA, 584 bp, Gossypium hirsutum
  unsure (1)..(584): unsure at all n locations; Clone ID: LIB3825-028-Q6-K6-G9
ggnattagtagattgctgtgaaaaattgcctctgctttggcagtgtttaaagttcggacgccaatgaacatcacacctattcatgcatatcatagttcatattctaattgtgatagaaactgactcaatattgctaacaattaaagctggaacctgcaaatcacgtatcaggacttggatcctgcattttacttaatcatcttctcttgtgatgttggctaggtacaagaaaatggatgtgtgcgttactccataccctgatgttagtagttcgagtgaagttgctggtggggaattgaagccattcccagagaggctatttgctgtccctcctagaattgctagtggaagtgttcctggagtttcagttgagacatatgaagaggacaataacatatggaagaaacatgtcaatgcatataagaaaatcaatagacttattgactctgggaggtatcgtaatattttggatatgaatgctggattgggaggatttgctgcagctctcaactctcccaaattgtgggttatgaatgtgatgcctaccatagcagagaaaaataccctgngtgtcatatatgagc

SEQ ID NO: 3712 - DNA, 567 bp, Gossypium hirsutum
  unsure (1)..(567): unsure at all n locations; Clone ID: LIB3825-028-Q6-K6-H1
ctgggttccttttttgggttaagctttgatcaaaanagnaanaataaaaaggaagacgatgatcatggacaagaactggaagtttataagattaaaacaaggtttcggagttggtgtcttgctgtttttgttatgtcaaactttggtttgttggtcattgaatgaagaaggattggcgttgttaaggttaaaagatagagttgtgaatgatcctttttgttcattgtcgagttggaaagaagaagatggagagttagaccattgttcttggtttggtgtcgagtgttctgatggcaaagttgttgttttgaacttgaaggatctttgtcttgaaggaacattggcacctgaacttggatctcttgctcatattaagtccattattttgcggaacaactcttttactggaattatcccccaaggcatcggaggactcgacgaactagaggtgttggacttgggatacaataacttcagtgcaccgattccgcccgaacttggaaacaatttgtcactgacgatcctgtaagtcgacagtgtccagggacgataacggattggatatct

SEQ ID NO: 3713 - DNA, 568 bp, Gossypium hirsutum
  unsure (1)..(568): unsure at all n locations; Clone ID: LIB3825-028-Q6-K6-H10
natattttcttggtttcgttagtcagcctttttctagcttgttcttatatctatccaccacatggcgatgctgcttgctacgtattttcttctaaggttgttggcacatgctctaaaagatccagataaccaacagtttgtgttactttctgaaagttgtattcccttgcatagttttgactatgtctatgactatctgatgcatgctaatatgagtttcgttgactgctttttcgatcctggaccacatggacatggtaggtactcaaagcacatgttacctgtagtagaaaagaaagacttcagaaagggcggcagcatgctctggtagttatggctgacagtctttactactcaaggttccgcgattactgcaagcgtggttttgatggcaaaaattgcattgctgatgaacattacttgccaacttttttccatattatagatcctggtggtattgccaactggtcagtaacacatgttgactggtctgagagaaagtggcaccctaaatcctatagggctcgggatgttacatacgagctactgaagaaattacgtcaattga

SEQ ID NO: 3714 - DNA, 538 bp, Gossypium hirsutum
  Clone ID: LIB3825-028-Q6-K6-H11
gcgttcggttttgtattatggatgctcgtgttcttgatggtataatcaataggttgcttgaagttagaggtaaaccagggaagctagtccagctttctgagtctgaaataaggcagctttgtcttgtttctaaagatatcttttccaggcagcctgttcttttagagcttgaagcacctattaagatttgcggagacattcatggtcagtattctgatctcctgaggctattcgagattggtggtttccctcctcatgtcaattacttattcttgggggattacgtagatcgtggaaaacaaagcctcgaaacgatatgccttctccttgcatacaaagtcaaatatcccgaaaaagttttccttctaaggggcaaccacgaatgtgcttcagtgaaccgcatctacggattttatgacgagtgcaaacgaagattcaatgtccggctttggaaagtgttcactgattgttttaactgcctgcctgtggcagctctggttgatgaaaaaatattctgcatgcatggtggactttcacc

SEQ ID NO: 3715 - DNA, 580 bp, Gossypium hirsutum
  unsure (1)..(580): unsure at all n locations; Clone ID: LIB3825-028-Q6-K6-H2
gttttgttagtttttatgtttttagtattagggttattaaagatggaggtaantcatagcttagggnatagnnaaactgaagnagtatagtacaatggaggatttttccaagtatgcccatagtcctgcccatttagctgttgcccgacgagaccatgctgggcttaggcgcattttctcgactctccctcggcttgccaaggctggcgaggttaatactgaagctgaatctcttgaggctgagctccaggctgatgctgtctcagctgtcatagaccgtcgtgatgtcccaggtagggaaactccgctgcatttagcagtgcggtttcgagatccaatctcggcagagattttgatggcagctggagctgactggagtcttcagaatgagcatggatggagtgctttgcaagaagcggtatgcacaagggaagaagcaattgctatgatcattgcacgacattaccagccacttgcctgggcaaaatggtgtcgtaggcttcccaggattgttgcctcaacatctcgtatccgtgacttctacatggagattacttttcattttgaaagttctgtcatt

SEQ ID NO: 3716 - DNA, 581 bp, Gossypium hirsutum
  unsure (1)..(581): unsure at all n locations; Clone ID: LIB3825-028-Q6-K6-H3
tctaaaaatcgacgtttccaagcccagtcttaagcagctcatttcaatgagtattaaattggtaacaaagccggcatttccagcccaggggagatgtccactcgagaaattcatatgtgctcttcttcttagcttcatgaatgcacaaatcaattaaaactcagagccatttgtttgcttgaaatggccatcttcattggtgngagaaaatttcattgtagtgctataatctttctttgcatttgctgtttcccctgcaaggtgtaggcttattgatgttctgggcattgtttaggtgatgatattagtccagaccgactgcagttagatatctactcatccaatcacgactaaatttaacaggctattgtgtgttattgctccctcttcttctttggcttgcttgattgcttatttcactcacagttgagcttcttgtattcactgaaccactgttgttattatctagttgatgttggatacgcaaattgtgagggatttcttgcaccttttagaggacaaatatatcatttgaatgagtggcgtcagggttaccagccaaatactccggaagaaatttt

SEQ ID NO: 3717 - DNA, 570 bp, Gossypium hirsutum
  Clone ID: LIB3825-028-Q6-K6-H4
tccgctcttaaacaagtcacttgcagcaaactggtcgtaggcatgccatttaaggacttggcaacagtagactcaatcatactgcgggagcttccaccagtagatgacgctgatgctcggctggctcttaaaggttgatagacataagcatgggtgttattacacctttatcggaacagctaacaaagccattgcctaatgctatggctctagtaaaccgtaaggaactatcaactggagcttacaagcttttgcctgaaggtacacgcttggttgtatctgtacgtggtgacgagtcatatgaagagctggaaatcctgaaagacattgatgctacaatgcttcttcataatataccttttgatgaagaaaagattggtcgagtgcatgcagcaaggaggttatttgagtatctatcggagaacagtcttgatttccctgtaatccaccatattcagtttccaaatgggactcacagggatgacttggtcattaatgctggcaccaatgctggagcccttctggtggatggactcggagatggtatattgttggaagcaccagaccaag

SEQ ID NO: 3718 - DNA, 583 bp, Gossypium hirsutum
  Clone ID: LIB3825-028-Q6-K6-H5
cccggtcgcccacctccgggatgtaagtgtcactcagcgccaggaggtggggttgtggctgcggaacgaaaagaaggatcatctctggagaagatgcagtctgctgcatttgtttggcaaaatacactaataacgaagagctaagggagctcccatgttctcacttcatgcacaaggaatgcgttgacaaatggctaaagatcaatgcatcttgtcctctttgcaagaacgacattggcgagaatgtactggacgcaatatccgggacgagcacagccagcatcttgagctcactgtcgggagcacatgataaccagcgacgagctgcatacagtttgatggtgtttctactaatgtgttgggtggtcgtcccttccattctttatggttatcttacggggtgaaagtgaaacactgagaattgagatgtaagcttgttactctcacttgactgtgactgacagacacaacacaaacaaaaacaaaccaaacacacggcaaattcttcgatcaccaaaatattgttgttgttgttgttgtacccccatcaattggcgttgtgcatttgttatgtatgatctgt

SEQ ID NO: 3719 - DNA, 583 bp, Gossypium hirsutum
  unsure (1)..(583): unsure at all n locations; Clone ID: LIB3825-028-Q6-K6-H6
nataggcctgnagtcataccggcaaaaaagaacgacgttacatttgcagacattggtgcgttagaagagaccaaanaatcactgcaggagttagtgatgcttcctcttcgaaggccagaccttttcaaggtggtctcctaaagccttgcaggggaatattgttgtttggtcctccgggcactggaaagacaatgttagcaaaggccattgctaaagaagctggtgcaagcttcattaatgtatccatgtctactattacttcaaaatggttcggggaagatgagaagaatgtccgagctttgttcacattggcagccaaagtctcaccaactattatattcgttgatgaggtagatagcatgctagggcagaggactagagtcggagaacatgaagccatgcgaaaaataaaaaatgagtttatggctcactgggatggcctcttgacgaggcaaaatgaacgtatcctagttcttgctgcaaccaatcggccatttgacctcgatgaagccataattaggcgttttgagagaagaatcatggtgggacttccgggtgcagagaaccgggaaaagattttcga

SEQ ID NO: 3720 - DNA, 574 bp, Gossypium hirsutum
  unsure (1)..(574): unsure at all n locations; Clone ID: LIB3825-028-Q6-K6-H7
ggnaaacacaaaactagggttttagnananaacgggnagccaaagtgagagagaagaggcagatatttttaggagtagggttttgttatattgcttctctagggtttagaaaatggtggccgacaaaggaaagaagctgaaagtagcagagaaagtagaggaagagaaccatgaacaaatagatggagacctcgtcatttccattgagaagcttcaagagatccaagatgagcttgaaaagatcaatgaagaggcaagtcagaaagtcttggaagtggagcagaaatacaatgaggtttgcaagccggtctatgataagcggaatgaaatcatcaattcaattcctgatttctggttaacagctttcttgagccatcctgctcttggtgatcttttgactgaagaggaccagaagatattcaaatatattaactcacttgaagtggaggattttaaagatctgaaatctggatacaccatcacatttaacttcaattccaatccatactttgaaaatacaacacttacgaagacctttaccttcctcgatgatggaaccaaaattacagctacc

SEQ ID NO: 3721 - DNA, 584 bp, Gossypium hirsutum
  Clone ID: LIB3825-028-Q6-K6-H8
gtccgtagctgtgtgaacagtagtgggtgatttgagctgccaccaaaaatcattacgtgtgcttaacaatacactgtaactttaatactaagccagccactgcccttcacgctactaacatctagaagccatggctgagtggcgaaggcaatggacatgtgctctcaaggacatgaccagatgtgcacttaagatgtttaaagaatctagggtgattcctttaaaacaagcatcatgtactcaaaagctataggaccaggtcccagttctgtaccaatgcatttgttgcgagagaagctgtggttctctctctgtccatggtaacatgaaaaggaaaaccgagacaacagggctggccaggtaactttataagagaaagagagagagaggatgggaaatttctcccaatcttctatataaatgttgaaaattacaagccatttgcctggcagcttgagctctccgttgtgaaggcgggaaatagggtgatgaatttgttgtaattttgacagtggaggatattgcttttgaaaatatatcactctactggtatttttgaatgtaaatagatatggaattgccta

SEQ ID NO: 3722 - DNA, 582 bp, Gossypium hirsutum
  Clone ID: LIB3825-028-Q6-K6-H9
cttctccatgctttcaaaattccatttcttgcatcggtagcgccgatcaactagatcttttaatacaatcattgttacctttctagattcctagtttcttcattgatttttgagctcattggagtttaaaacccccttctgcctatgggctcagactctgttgtaccaaatacccttctttaacattctcccctgtctttgttaaccaccccttccatttcctttgggaccttctctatcaaatacatcagagtgttgtatctacgtcctttcggtgccagcatgtgcactgcttcattggccttctgagatttgattttattgattactgttaaagcatctccttcaacgctaacctctcagaatcctagttcatcaacaaaaatgaccacctaaaaacatgcccttacttctgccatggttggcgtcacaacttcactactagagagcaagaggagcagcctccttcatctgtagaggcacatttaagttgtatcgaagcttaccttgagacaatggaaacccaagtctccatgattcttgacatcttgcagagtagtcatccctaacgctgacaaccac

SEQ ID NO: 3723 - DNA, 554 bp, Gossypium hirsutum
  Clone ID: LIB3825-028-Q6-N6-A1
gttaaagtgaatctattaatgctttcaaatagaaagtcaatttagtaaggtgaaagggttcttacaatatggtctagcaccaggtgtttatcctcgagttagattcaaagatatgatgttcatatttgataaaaccaatgttcacaatgccatcaacaaaatcagcagtgattggtaaatttcgtccacgctcctttttctacagacatttctgctcaaagacgatccaaaccaacttcattgccagcccctctgaaaagtgcaatgttcacttcgatagaagtactttcctatttgtttgattgcttcctcacatcaggcatatctaacaaatcatggtttatcttttaacgctactaaggatctaagcacaccaggactgatcttgtcagcgaggacacctttttctgatataaaaaaggatttctccttaacatagctttgaagtttctgagcttcatggtccagccgtgcttgatctgtctccaaaatactgtgagcagcatgaaatggtatcttggcaaaaacatcagttcctgggaacatcatccatg

SEQ ID NO: 3724 - DNA, 238 bp, Gossypium hirsutum
  Clone ID: LIB3825-028-Q6-N6-A10
cagaacagcaaaaaacgaattcataaggagaaagaacttaagagaaatctacctcactagtagtcctcccaggtttcacaatgcaggagcaactaaaaaggcaatgcagctcggggcaacagcaagattcctcccacagcatgcagccaaagtttcctttgcatatggaaaaccgagagaaaaagtttctgcttttgtaccaattttgagcgatgaatcattttcaatggaaccaaaa

SEQ ID NO: 3725 - DNA, 432 bp, Gossypium hirsutum
  Clone ID: LIB3825-028-Q6-N6-A11
ggggggggaacccccaccaaataaaaacccccaaaccccaaaagcaaagtacaaatagggggggggcccaaaataaaaaaaagggcctggccaaccggggggggaaaaggaaaaaaccaaacccggaaaggtttaattcaaaaaaaacccccccaaaaaaaaaacccaaggaccttaccacccacaatcttcctttggggcttttcaggggccaatattccagcgggggggggcagccctttggccccaaaccggtttgagggaagaaccccgggaacccaacccccgaaccccttaacccccccccgaaagggaggaccggcccccccccaccgggccaaccctttggaaaggtaaccccccattttaccaaaacggggaacataaacggccccaaaccctccaaaggaacccggccttgggcggaccaaa

SEQ ID NO: 3726 - DNA, 544 bp, Gossypium hirsutum
  Clone ID: LIB3825-028-Q6-N6-A12
aagttactaaaacttgcatcaaatcatttaatataatattcaaaacagtcatgacttccatttccgcttatgcaatctgcaatgtcactaaaactactttgggcaagctttaagtaaataaaaaacatagaacatccttaaatacttgaaaatccttttcatctatgctcactatagagcagaagcgctagcaaagcacggttcaagcaaaaatatatatattcgaggggaaagcaaggggcaaaaggtgataacatggccaatggcactctcaactgctgtagaaaaaaactgagtcctctaaatcttgttgaatgcaacaatgtcacagctttgaatgtattcgttgcgtggctctgtcgtgaggtactcctctataagagtatcaaccgaaacaagatcatccactatggtaagcatgatctgtagcttcttgatgccataaccaacagcaaccagctttgatgctccccacaaaagtccaggcatctcaacggatcgaacagcttcttccaacttcttcatatcagtctcatcatcccat

SEQ ID NO: 3727 - DNA, 166 bp, Gossypium hirsutum
  Clone ID: LIB3825-028-Q6-N6-A2
cctaaaaaatagagtatattttatttagagtaaaaaaaacagcatgattaagacataaaaaggaaacatacatgggaattgaagcaaaacccacatcattcaaccacacatgcacgctaacaacataatacaaccccccctggacatagtcctttcaggcagtggc

SEQ ID NO: 3728 - DNA, 539 bp, Gossypium hirsutum
  Clone ID: LIB3825-028-Q6-N6-A3
cacgaaatgattatattatatatcacgtgtaagaagctgaatggaatgcctaaatgttcagttcaaattacaattagctggaatcatacagccagggaataattatttttcccatattgtattagtctgaaatttcctgctgctgaccccaaacatctttcatacaggactgtaaaaattcaatgagctctgtacatttcgtatcacagtttccacgacagcaacaggcacattttttttccgaatgaatttgatatcatcttgtagacttggtttctgtgtcgttctcattttcattctcgtcactgtggtctactgacggtcgtttcaatctctggaatatctcatcaagggactcagaatcggatgagttgacatgggaaatgagtgtggcttcctgattctggcgtacaggaagaaactttctggcctcaatatttgctttaaaattttgaaagccagatttcattgatcgccatgttgaggccagtccagcagatggcccacccttgaggttatcaggatgcgaattgcctacc

SEQ ID NO: 3729 - DNA, 544 bp, Gossypium hirsutum
  Clone ID: LIB3825-028-Q6-N6-A4
aggccaacagacattatagatttcaaagtaaaattaaagaagaatccaactcaattagtgttcataaaacagcaaacaaaggtcggaagccccatagaaaggttcgggaaaacacttcggacagaaaactacaaacacaattttcctacaggaagaaacataaagaacagcgacagcattgatttgtttcatcaccagacacatcgataagtaacatgtgactcagtgatttcacccccatacgtaacttttatcacctgacccttttcaaaaccatagtatcttgcaatggcatctttttttaacagtcgagggagctgtttttcttctatgctgtacttctgcaagagcctttgtttctcatgttctgttagtacccggtgctggggcttcagcacatgctttgtgatattaacaagtaggtcagtaatctggaatatctccaccttaaaagagaaaaggtctaaagctttcaaagcttggtttgttatgtggttttgcacgattaatatcaaccccgtcaaagtttctttgctagtaatta

SEQ ID NO: 3730 - DNA, 556 bp, Gossypium hirsutum
  Clone ID: LIB3825-028-Q6-N6-A5
caagcacaacaagatttcttctttaatagaaaacaacgaagtacatcattaatgaatcttcggcttctaacattttaagttacataaaatcctagatccttgggtttttatcccctatttactttatactacacgaaaatataagttgaacaaaaaatataataaaataagaagggaaaacatgttctaattttttcaaaaatatttatatataaaaaatgagattactattattaaccagaggatgaaggacaagaccacggcggcaccggaaaatctgactcacttgccggagttcgatcagagggttgcctgaaaatgctcatttgttggtgctcagcaaaaagcagaggaaaagaagcagaggaagatgatgatgatgacccagaagccgcaaaagaagccggcaaagatggaaaagacgacgacaccattggctgctggatattagcaaactgagaatattgaatcatttggtctaccaagcttgtagcttgttgtccatgcaaatcaccagaattctgtagcaactgagagtactgccaatagtctctca

SEQ ID NO: 3731 - DNA, 544 bp, Gossypium hirsutum
  Clone ID: LIB3825-028-Q6-N6-A6
cttctaaacagctagaaatatacttcatttatattgtagacatagttacaacctaacttccaaaatgacagatctatgccattgcacactaccttaacaaaccaactgcaacatttcatagtaggctacaacagtgccatttaaaacaaaagcgccatagttcaagaccagattcctttgaaaagtggagtagtagatgcagtgtccccaaaagtcctcaccaaatccgaacaagaaggatctgcttccccttcagtctccagttccaaccccagttctttatcaatatcatcggatgccgatatgagtagaaactcacatccttcgtagttcaaaaagtcgggtggatcagccggatggtatcgggtattcccaaaccgggcttgcaggtgagcagggaaggctgcctttcgtttgtttccaactcccctaaactgggaattgctagcttgtgatgggttcttgatttgtatcaagaaggagccttctcgctcgatgttaagtgattcttggggttcattctcttcttcttttggtggaggga

SEQ ID NO: 3732 - DNA, 555 bp, Gossypium hirsutum
  Clone ID: LIB3825-028-Q6-N6-A7
caagaatcgacgcgcattattataatttttaaacaacaatacatgatagatttaacacgatacaattgcgcgattattgcaaattataacatagtaatacagtacaagaacgaaaatcatgattatagtaatatggtaaaggactcaatttattatatgtaacttcaattttgagcgaaaaccgggctttaacttgtcaaagtgggcatgtttttaatcggaaattggtggtgagagagaagcaaaggcgtggagttgttggccggattcgatgttctttgcgcggtcggaaaaggcaaaacgaaagaagtccatgaaattaaagtccttgtaaagctgaggatgttgctcatctataagctctttgggtgccttaattatggtaccctcacctggaatggcgaaggcggctattgaatatcgatctttatctccgctcatcatcactctatgattcaccgctttcaatctcccattactccatgccttgagaggatctccaacaacgaagacaaaagaagaaggagataaattagataacttgatccattggcc

SEQ ID NO: 3733 - DNA, 546 bp, Gossypium hirsutum
  unsure (1)..(546): unsure at all n locations; Clone ID: LIB3825-028-Q6-N6-A9
aaaccaanaatcagtcatataatataagtccccatgttttatatatgaagaccaattttgtaggataataatatatacatacaaacgagattatgcagtttatttatttaaacactgaaacaattacttgcagaaggaagcaaccacacagcaaattcaccagccaattctcttacaaagcttgtagccagacaagattgcacaaattgccataactagaaatgttgcaaaggccatgctggttgatacgatggttcccttcctaagtgctgtgcctcgctcaacctgtccaatggttggcactgctaccgaagcagatgagacgagaaggtaaaccaacaactgttttccagagcaaccccatgaattagctttcacacacaagaattataatagcagcgatacaaatagtgtgtttacaacggcgagtggacttgcctggtcaaggacaaagcttaggtagtctgaggttaaatccgagatcagaatgcctctatgagcaatgtcactaatgcctttaaacaattggaaagctgtgtataccaa

SEQ ID NO: 3734 - DNA, 586 bp, Gossypium hirsutum
  Clone ID: LIB3825-028-Q6-N6-B1
cgtccagcaagcactttattggctttctataaaatttaagattcttagactatccccagaaattattttccagtccaaaaagaatccaacagaaaattattaatagcaattgacttgcatatttaaaatgacaagcaagttagttactgacatcaaggggaggatttagatattctattccattgcttatctgaccatatggctccattaaatcaaccacattttgtagatcatctttggtcaaatttagtccaaggtgattcaccagcatttggctaatttgcttgacaattttggttttccacagccattttgggatcatgctgctgaaagtctttggtatttcttgatgcagtgaaggtagttccttcggacgataatggtccttaccatttttgcactatggtaagtaccggtaaggatacggcctctaatagaaacagtgccagtaaatgggcttttcttaattatcaatatatgttccttcaatggcctctctgggtgtcttaaagcctaacccaatgcttttccagaagcgattccctccctttcctggtctctttcctttcccagtttttttacagta

SEQ ID NO: 3735 - DNA, 597 bp, Gossypium hirsutum
  unsure (1)..(597): unsure at all n locations; Clone ID: LIB3825-028-Q6-N6-B10
agaaaataaagacacatatattttacgtggaaaccctttcgggaaaaaaaccctcgggcagaggagaagaaaattcactatgttgaatttgaattaattacaagaggagtagactatgcctatttataggcttgtaaacctgattctaataggagtgaaactccttattctaataatatcaaatagatggagtttaatgaggtttaaaaaatcttattctaaaataaaataaaagaagtataattctatggggattttacttttattttattttaccacagtattttatttaaataaggatttgggtcacttaattctaacaatctccaccttgacacgaattcttaatgaacaagttcttcatcgcgaactctcaacgaacaagtttctccacctcttccataaagccccttaagagtttatcttcaacaatgaacaccaaccaagtctaagcagtgctcaaacttggttataggaaatgacttagtcttcatatctgcagaattttcatgagtactaattntactcacaacaatatcaccactagcaataatatcacgaacaaaatgataccgaancatcaatgtgttttgttct

SEQ ID NO: 3736 - DNA, 566 bp, Gossypium hirsutum
  Clone ID: LIB3825-028-Q6-N6-B11
agctcaaaaaatttgcaaatcaaacagctcatgatggttttcaagtgtggaaaggagaaccatctggcgaattctcagtcaaatgtgcctaaaactattacaagatgctaggttgggtcctaataacaatataaaggaattctacaaaaagctctagattctacagctacctttaaaaattacaattacaattacaatatggagaatatcatgaaactatatccctaccctagtaaacctaaagcataaacgagcaactaataatgtattatgtcctcgctgcagaaatgggaaagaagatagcactcatgtttttcgacaatgtcctggatctttaagaggagtacttctaaacagtgccgaatgttctgccgcagattgtggttcatcttaaacacgaacagaagccacagccaacaaggtgcaaataccagggcgatgattcagattgacgcagcttttgacaaaagaaatttcaaatcggcatcgggcttggttgtttggggccagatgggggcactcctagcaacgaagactgttttgaacacaaacgttccatctccgtt

SEQ ID NO: 3737 - DNA, 538 bp, Gossypium hirsutum
  Clone ID: LIB3825-028-Q6-N6-B12
cgagagagaggcaattttatttaagagaaagtagctacagcacggtagaggaccccaattacgtattaccactagactagactagactagaaagccatgaaatctccctcaatacaataatgacttttaatatgatggcctaataaaataacctgaagctaaacttagacttgaatttctacgtgccatctgtacatctcctccgatggcactggcaatgtaagtgtcaccaatccggtggctgagtcatagttgaagtgagtgtcggcattgtccacacaacacttcaacggatgctgagatgagtatgcaccaaacctcccacaaccccggactttgagactgatcgctgctgttggattccggttgttgctgagtgaagttgtcaactccgaggaaacctcgccatcaaagaactgcagtttctcattggatgtcatttgtacttcgaacttctccacggcaccgttgctgttgaacatgtcaagaaggccgattggtgcaaatgaaatggtgttggaaatttccttgacgggac

SEQ ID NO: 3738 - DNA, 533 bp, Gossypium hirsutum
  Clone ID: LIB3825-028-Q6-N6-B2
cgcacacgaatttcgaaatgggtttattaagataatgcttagctcccaagaaagaaattttctactctcaaaacctcaaaggtccatagtaattaaacaaatggagacaacatttatgcacacaaaaatgacttcttttaagtctctaaccctcaaaaaaaccagctagaaaacttaaacacactctcttgaatatacatatcccgtactacaaaatatcaacttctaaaaacatagggtttagcaccttaaaaaccctttctgctttaatttctccctgtatttgcttgggtatatgacaacagagtctaaacatagaccccctttcgtatgcgtgcaatcgatttgagtcatcgatagcttaatctttgttgatgaattcgagttctcgacattgaagtccccgatatggtagtgaaaccattttccaggttcattcaaagtaaattgagatctggcatgctgaccatctgatgtccatagttgaaaccttacgggttttttatcccaaccatggatgtgctccgagttgc

SEQ ID NO: 3739 - DNA, 394 bp, Gossypium hirsutum
  Clone ID: LIB3825-028-Q6-N6-B3
acaatattccaatcaaaaagcagtcggggttttttctttgcatatatatatatcaaaagccatttacttttttttccatttacaaggaatacgtactcgatggcgaccacatcataaagaagttactttgatcaactttgacactcttctgtacgtacaatacgaggacatcatgataacgccataggcataatgaaataagccaaaataggcaaaaaaagaaatgagggtagaattttatcatttcaactgctactctttttactacgttattcccacaggcgctttggggggttaacctgctgactcgatcgaccatgtgaccggataagcaataatcaaccattactatttaactaccgagtgccaacttcactttattttcatatttgtc

SEQ ID NO: 3740 - DNA, 541 bp, Gossypium hirsutum
  Clone ID: LIB3825-028-Q6-N6-B5
catgaaaacagatttggatactttcccaattctttaaacttaaaatacattgcggagtttttattgtacgggcccaattctaccctgaccttaaacacaaaacacacaataataaacaaaattaaaacaaaatccgtagcccaaataaaaacacaacagaggcccaagatggcaaaaccctagcccaattcagctcacaaccagcagcctcagtgcgccgtacgtctcctcgtgcatttgcagcgcactcaacgcccgaagcacgaccagttttgcaccaaaaaggctaggtttattcttccaatacccgttgacttcaccagtaccggtctcgaaagcccgtcgccggagaccatcttcggtgttggaatcggaccgagaaggagacgaaaggtctctccttgtttcggcttgtttggtctggaggaccgggccttaaggtggaggtcgagaacggggttaaaaagccctccttttctcgctccgaccaccgttcgtgaaggagctttggcctttggaaccgccgctcgccggcgtggga

SEQ ID NO: 3741 - DNA, 558 bp, Gossypium hirsutum
  Clone ID: LIB3825-028-Q6-N6-B6
catcagaaaaactaattctaattcaacagcaatcacctaaagttacagatttcatttcattttacattttacatctacagtaaaccctcttctacaacttgaaatgacacaagttcctcaaatatcataaacttaaccaacatgcttgttttgcctgcatcacgatcaactcacattagggaatcaagatataagtagttcctccgccggccatactcaagaaggctgccatatgtacgatcccatacgccaataaagagagactctgtgtcgggactaaaggataggccggatatctcaccaaagaaatcgatttcttgttcattctcgtacccacttttcacgtcatacacatgcacaaagtcagcaggctcagccatggccatgtacttaccatcagatgtgtagcgaatggaccgtattgctccaaggttccccttgagaacagcaactgaccttgacaagtttcgaacatcccaaattcggcatgttttgtcttggttcccagttgcaaaagtgacaccatcaggatgccatgccgacgcaaatgagaagtct

SEQ ID NO: 3742 - DNA, 583 bp, Gossypium hirsutum
  unsure (1)..(583): unsure at all n locations; Clone ID: LIB3825-028-Q6-N6-B7
atcgaaattacacataaactttgattcaatatgcaattatacatgaactttgtttgatgcaattatacacatngaaactttttttttttgtgaatattagaatataggaagttgttaattagttatgagtctggtaaggttgttgagaagtttagactagtcaacaaagtctataaatactgtaagttgagaattcagaagtaagcaattttgaatacaagagaaagaaattcattttatcctctcgtttatttctgtttggctagttctttcatggcatcaatcgccatttctgtttggctagttctttcatggcatcaatcgccatttgattctggatcttgtctatcatggcttccgctgatttcgtaactggtgagtctagctctgcagtgttctccggcgatcgtgtcacaaccggtcttcctcggcatgaagtggttaagcttgatgaaggcacctatattcaatggcgcaaacagatcaaattaatagtggatggatatggacttacaggattcttagatggcaccgttgttccaccgtcgcggtttatgcctttgcccgaggttcgcgtgctcca

SEQ ID NO: 3743 - DNA, 564 bp, Gossypium hirsutum
  Clone ID: LIB3825-028-Q6-N6-B8
ggaaaagttcaagcataattcaaactaaataaaattcatgataatgggccggtacgtacaactgtacacaagttcacacagtacagcacacaccgctgataaatcattcaaagcatatttacagaaatttgattattcttctttcatctaaaaaccgcggcccttaaagaaagtgaccatttcagcccctccctttaaatttactaaagtaaattaagctgcttccttaactacctttcaatcaccccatatgtacaaatatgtcccaacatctgctcaactttttcacatatacagatagcagtgttcccctccccaataaaagctatctacagaacatatcaacgccaccataaacataattactactcggggcggaagtttaccagattagggagaccagctgactgaagcctccttatgtcatttgctgtgaccttgcaagcctccaaggtcagagatcttaagttcttcaggggctttagatgtctcaatcctgcacttgtcacacgggaatttgaaacgttcaaagagatcaatcctgtcaacccggagatcatctcc

SEQ ID NO: 3744 - DNA, 527 bp, Gossypium hirsutum
  Clone ID: LIB3825-028-Q6-N6-B9
ctctttttatgattgggggatgttggggagagagtcattaatccctatatgtatacccagcacgcttaagactttgcaactgcgatcatgacataacaccaaacatttttggtgcgaaaatttgtttagttaatatataatgagccttagagagaaagcaagcgtagtctcttgaccaatcatagctgggcggaacagactatactatcgtgatgtagaaccagacgtctctgcgaacacctagaagtggacagacatcatagcatgccctgaggtgggcttatttctctggagaatcggtaaaaccattggggcgatgatggcccatatccattgatacacctgcacatggactcaacgctatatttgggtcttcaatgcaactcacgctctgcctttaacacgagaagcatagagtattttagcatacccggatcgcctggcagaagtaacaagaggacatgtcttccccatgcctttgtcaatgcagcaaccattttcaaaactgacgttactttaccacttcc

SEQ ID NO: 3745 - DNA, 515 bp, Gossypium hirsutum
  Clone ID: LIB3825-028-Q6-N6-C1
cgagagagaggcaatttttatttaagaaaaaagtagctacagcacggtagaggaccccaattacgtattaccactagactagactagactagaaagccatgaaatctccctcaatacaataatgacttttaatatgatggcctaataaaataacctgaagctaaacttagacttgaatttctacgtgccatctgtacatctcctccgatggcactggcaatgtaagtgtcaccaatccgggggctgagtcatagttgaagtgagtgtcggcattgtccacacaacacttcaacggatgctgagatgagtatgcaccaaacctcccacaaccccggactttgaaactgatcgctgctgttggattccggttgttgctgagtgaagttgtcaactccgaggaaacctcgccatcaaagaactgcagtttctcattggatgtcatttgtacttcgaacttctccacggcaccgttgctgttgaacatgtcaagaaggccgattggtgcaaatgaaatg

SEQ ID NO: 3746 - DNA, 452 bp, Gossypium hirsutum
  Clone ID: LIB3825-028-Q6-N6-C10
gaaaggagaaacttcgagcgaatttacagttaggagtgcatacaaactattgttcaacatccctactgtttctagtgctaatgagatacaggattaaatgaaacctttttacaaaaaattatggagccttaatctcacagcaaagcaaaagattacaacttggaaagtctcttgggactttctgcctaccctaaccaatctatagtgcagataactcagatcaagtacagtatgcccaaggtatggtttgggagtggaaacctctgtgcatgtatctcgagaatgtcctgggtgtttgaagatggttcgaacaaacaatgtcgattattctgctatgcactttgggttatcaaacacttttcctctttggaatgttgactccaaaagaatcatgtggttcgcattaatttttatgcggcttttagccaacaaattttcaaatctgcttcggg

SEQ ID NO: 3747 - DNA, 550 bp, Gossypium hirsutum
  Clone ID: LIB3825-028-Q6-N6-C12
ttttttttttttttttttttatttttttttttattttttttttttttttttttttttttttttttttgtttttttttttttttttttttttttttttttttttttaaaaggtttttttttttttttttttttctcccccactccattttttgttttttttttggtgaaggggaaaaccccaaccggggggggccgggggggggaaaaaaaaaaagtgggggggccggggacaaacccccaccccccccccaaattggtctgggcccggggggccccccccaccccaagggggggggggggaaaaccagaaccggacaaaagggggggccgaacaaccaaccgccctccaccaatccccactggcagggggccatagggaaaaacaaaacggggggggggaaggggaaagagaaaacccttccaccggcccaaaaatccccccggggggtgccccccaaacccccccccaggggagccaaaggcaaaacctttccggcagaaggagctattggggcttttcaaggccccgcggagggaaatcccccgcccc

SEQ ID NO: 3748 - DNA, 451 bp, Gossypium hirsutum
  Clone ID: LIB3825-028-Q6-N6-C2
catcataaatcacacataatcaatgttgtaagttctaacagtcactcgaaatttaaatttgaatttttcggtgttagagatatcaaaatagaaacaatagtcaagcagttgccagagggtcgaaactcgctaacacgatgccttatgtacggaaacggataataagtaaggagagtttgttcagaaaatacccccatctatggaaggaaagtcatcaaagctccaaaaacccatttcgtttccgccatcctgagttgcatctccattaaggaagtcatccatcgaaacattccagttctcgtcaataaatggtgtctgaaagtagttcacttgattgtccatagctaatagctcatcggataaactctttaccgaattgtctcctccagtaggcatgacattattcaagctcagtttcaacttcttcgtagggtttgcgttgtccagaaac

SEQ ID NO: 3749 - DNA, 538 bp, Gossypium hirsutum
  Clone ID: LIB3825-028-Q6-N6-C3
ttttttttttttttttttttttttttttttttttttttttttttttttttattttatttttatttattttattctttttattttttttttattttttttttttttcaagggaaaattaaaaaaaaaaaaaaaaaaaacccacaaaaagggccccaagggaacccctaaaaacctaaaaaaaaccaaaaagcccccaaaaaaaaaaaggagggccccacaaaaccattaaaaaaactaatttaacaaaaaaaaaaaaccaaaaaaaaaaccccatgaaccaaaagggggggcaaaaacagggccaaaagaccccaaccaaacaaggaatcccagggcctaaagggctaaaaaccccggccccttgttttaaaactaaaggggggggaaaaccccaaggaacccccaaaaaaaaaattccggaccccaaaggggtttcaaaacttttttccccacaaaaaaagggccggaaaaaaaaaaaccaccccccccagggttgaaaaaaaaacaaaggaacattcggccccaaattgttgaaccc

SEQ ID NO: 3750 - DNA, 540 bp, Gossypium hirsutum
  unsure (1)..(540): unsure at all n locations; Clone ID: LIB3825-028-Q6-N6-C4
gattgcagatatgggactgcaaatgtttgngaagactttcactgatctatttgattattttccattaacagcattggttagtatttttattatgggtaaactttattggtagtcaccttactattagtaatttcttttatggtcacccaattatgaagagttacaaaatagtcacccaactattaaactttttctttgtcacccaactatttgaatttttctgttttagtcactagccattaaattgctaatagaaagataacttggcagcttataaaattggcataataataattttaacctcagcatttatacattgtgtcaatttagtcttgattttaaaaaaattaacccttaacatttacatattgtgtaatttgtttttttttcaattttacttttatttgtgatattgagggttaattttaaaagaatgagaaaagatgaaaattattatcttggattttcaactctttccaatttttgtatattttcgaccaaatttagttgatagatttttttttattttttattttagct

SEQ ID NO: 3751 - DNA, 526 bp, Gossypium hirsutum
  Clone ID: LIB3825-028-Q6-N6-C5
gacaactcaaaaattttaactccttcatttagttcaagatgagtacatatttcgatttatttgaaggggaaactcatttagagttaataactctacaatttttcctaatttctccagcatttccaacaagaacttgaatattccccatcttcaccattgcttgagcaaaccttgttctaaacaaattcgcatttgaagcaaatctcgatacgattccactcgataatctatcatcagccaactcttgatctatcttcatcacccctttcttcgcccgaatctgcctataaaactcattatcaaaactaaaagacgtgccctggtccaaaaacgccttagggttcgatccattaccacaaatccctttcagcgtagttaccaaacccgcatgcatacttgggtcgggtttccctgtcccttggaaattagtaagccgacccgagaaaaaaaagcaatgtgccacaccaactgtatggccacctaaaagtgtaaccatatcgtccattgtcaggcctttatccttaaa

SEQ ID NO: 3752 - DNA, 555 bp, Gossypium hirsutum
  unsure (1)..(555): unsure at all n locations; Clone ID: LIB3825-028-Q6-N6-C6
agacaaacttataacaatggatggtttattcaaatccaacataccaataatactacactttcacttttccaaaaaaacataaacccaaaaataaacacttgaataaataaaaagcactacacttatttagtatcaattcgcaaccaaacaaacactacaacagggaaacagacagttaccgttgcgaactaagcatgaaaaacactgagaaaagaaagattttggaagagtgatcagggacattggaagccggatggaactttttttgagcagacatttagaagcaagctgagggaaactgggatattaagattgatacccaaaatgttgcctttgatcgctgtgcaaaggcaaacagcagcttcaagatcagcaaggcctttgataagggtgcagcaaggttgaactgggggtgacccaacagttacattgactaaaccaagcacctcagcacatacacctagtttaagggtatttatggggcactttccttccgcagcaggagttggggagggagtgggngtttggttttggcttgggggaagggcaagaaca

SEQ ID NO: 3753 - DNA, 539 bp, Gossypium hirsutum
  Clone ID: LIB3825-028-Q6-N6-C7
gactaaaccaaaacactctaaattaacattaggtcccaaatcatcaatcagaataaatcatcattacttgtatgtctcattcattgtctggtaaagaacgaagtttaccgattcaaacaaaaatggaaggaaagaaaaagaaaagggcaagagatgagggaaaagggtagggtaacaggggggttgaaacacatgtaacaacaatttctcaaagtgtttgatccaattcaatttagtataaaaataactcctatagctaacctacttaatgtactgagaaacccacttgaaaccatctccataacccattttacgaacaatgctacacatgaatacctcgaggggacgaacgtttgagtctcccaaattgaccttacccttgcctgtggtgaaattggtgagcccaaggtgataacgcaactcatcttctgaagcagcatatggtatatcaatcttgttgcccaagatgaggaatgggacattagccaaagcttcatctgagagaagagcatccagctccctttttgactcggcaaacc

SEQ ID NO: 3754 - DNA, 561 bp, Gossypium hirsutum
  Clone ID: LIB3825-028-Q6-N6-C8
accagtaaattcattcagcagcacttgtgtatataatctttttctcaaaactatgtccggcattgaattttcatgaagtttcaataattgctttaatttctacaatgttattagctaataaataagacatattacaaacaataagaacaaaattcacaagatcttcaggatataatgacataaaagttgctgacaagttcagagtattacccatatcaactacgtctacgccgtcgaaaatgtctgagaatgaagctgtctgcatatagaggatagttttttctgattaggcccttgatgcatttccaataagaaaagtcaaccagttctccatcttttcgaactatgaacaaacatctcgagcctacaaagtcgggatggtaaccaacagtgatgtaatcaattccacatccaattttcttctcgaactctggatggtaaggaagcaacctttccaaaatcgtcctttcatgctctggactcaatctatctccagctccatattttccagagtgaataatcattctaacaaagccgacaagaggcacggtgtcctctaaa

SEQ ID NO: 3755 - DNA, 559 bp, Gossypium hirsutum
  Clone ID: LIB3825-028-Q6-N6-C9
acgataaaagtattgactcttaacgacaagggaaaaaagttacacttttctaggagaatataaaagggatgaaacatccatcttatcctacattaaggtaggaaatctaaacagaggaccatacaagcaaatgtttatttgttggctattgattgaatcatctacaaaagaattgaaaataacaagcactaaaccgaacccccgaaggaaccatgcgccacaaccggtaccattacgcgttgcagaagcttaaccagaactcaatgcttgatgcatcgatttggaaaatatgccatccaagtcggtttctacatcccactctaagccacttcagcctcgtgtttgcctagtattgtatgacttgcaattcggacatttctgagccaggacatgaaaccgaactagagattttgtcccacaatcgttgcaaaggatcgaaacaattttgttatggtactcttccggcattggcgcagctgcgatctcctcatcaaatttttcccagacctttgacatgtcacaaaccgatttggagcacagagggcaggcatattggaaa

SEQ ID NO: 3756 - DNA, 513 bp, Gossypium hirsutum
  Clone ID: LIB3825-028-Q6-N6-D11
aagcaggctaaagtaaaaaattaataagaaaaattttgaacaataaatataacttctcaaaacaaaaagcaataaataaatatcactaagtgttggcgagatctttgggattagacaaagaagcaagagctggatggtcaattcctttacgagatgcttcccaaagctggtggtctattcctaacttctgcagctcatataaacctcgatcaacatccacagcatcatgggaaggaggggtctgtccaatatggctaatccaaaactcaagtcgctcttctgcaatatcatcttccacgccatacactttggcttttctccaaaaatacgttaaccaagcctttttgaaaagaacatcttctctctcctcttcacttagttcaaatgcatcaatcaacttgggatcacctggggactttgaatctgagacggattgatgaagcaaaccaagtctcttatgcctgcctaatgcctgtacaacagcatcctcaacctttaaagatgctaattccc

SEQ ID NO: 3757 - DNA, 545 bp, Gossypium hirsutum
  Clone ID: LIB3825-028-Q6-N6-D12
aatcacatcactagttcacattaacttattataaagtattcactgttagacagcatgccatgtgaagaaggaaaaaagagttaaagaagaaaaactacaaaagaaacaaggttttacaatgcataaaatcattcaaaagaaaatataatggcagcacatttcaaatggatttccttcttaacgtacagacatacctaccctaagctgctctacatgtaccaaaaattttaagtgtgcatataatcacacgatgcccctttcttgcagtgtccattttcatggaatttgcatactctttgacctttaaatggtggtctagaagaaccaccacctccactgccaaatgatgattgcctgttccaaggtttggtgccaccaaaacccgattcgttaccctgggagctcctatctctttgatctgaaaacttgtctccgttgtgatttggctcggctccggctcctccccacatgcttgagtttctagacggtgttggataaccagggtttgcatttcctggtgctgcaacttgtcctggtgcaaccca

SEQ ID NO: 3758 - DNA, 557 bp, Gossypium hirsutum
  unsure (1)..(557): unsure at all n locations; Clone ID: LIB3825-028-Q6-N6-D2
aaaaaaagccaaacgacaacaattttataaacctagtgacttgaatgaaaactttcgaataatacattanaaaaccaacactggaaataaaacatcatctacaataccttattgaaccatttcccttaaaaacccacagtgaaaatgacgattatgattatttgcttatttagcaatggcactattttttttttcactcaaaccccatagttctaagatttcatggaagcttcatcaaagcttagaagaaacatcctttggatgatgaatgacaatgtaattataagcatcaagtgtcaaaaactcatccaaagttgaagcagtgcattggcgagtaaaaatcttgcatgcttctttatacattcctttcttaaacttctcttttccgacctcacgttcgatccgagccatttcttcttcaaccactcgcccgaacacatggttcactcgaaccccaagtccatcaccgtctaattcaacaccatatttcaaccactgccagatttgaaccctactgatctcggctgtcgcagcatcttccattaggttataaagcg

SEQ ID NO: 3759 - DNA, 517 bp, Gossypium hirsutum
  Clone ID: LIB3825-028-Q6-N6-D3
gaaaagctggaaccatccttttaaagttctcaaaattaatccaaggggtatgtacacaggcaagtgcgtgggcaaaaaaggaatgatccaataatatgcataagcctatatatcaagttctctaggtacatcatcctgtttaccacgtcattaaacagtaaacgtgtgcccaaaaaaggaatcagcataatctgggggtttgctaagtcagcaggccgaatcaactaatcttacatcacagttcttgttcaaatttaaaagcattatcttgaggaattactgccccgggttacctaaaagtctctcaactgccgcatggacatttccagcagtagcacgtagtgctctgatattctctaccgtatcgtaaaaacccatttcttgtaattgggataattggggggcgtaaagttcttctgggggaacgtcaggttggttgggaacactcaggcttccagcacctagaccaccaaacatattcatcaacgactccagaccagcagcacctggagctcct

SEQ ID NO: 3760 - DNA, 518 bp, Gossypium hirsutum
  Clone ID: LIB3825-028-Q6-N6-D6
aatctcaatgtcatcccattttcaaacacattcagacttcgtcacatatatttacacacctttgtctgctacttattcacaaccttatttatatgtgctttgtttcatcttagattaacacttcttccttaatttacttggtggtggaactagcatctctaaatatcctcctccatcccgacttccggtcaccactgtcttggctattcggccggtttttcttcagtcgtgcgcttatcccgcgccccatcaatatagtgagcttcatggctgtaaataaaccaaaggcaattgctagtggtctcactgcccaatggaaatcctcaacatgatggtatttctcgactataccaggacaagtatagaaggacaccgattccacttcgttggggtcggctaggaatctgttgggttcgtttccgagaacaaatctacctggaaactctacaacgaggcacccgtttggaagtatttctgaaattcttccactgcaccatgttcctccactcttccgtggc

SEQ ID NO: 3761 - DNA, 550 bp, Gossypium hirsutum
  Clone ID: LIB3825-028-Q6-N6-E10
cccacaggcataaaaatgaatgaatagatgatgtttttacttgtcatgaataatattttcgccaattaaacggccgaaggacaaaaattcactttctttgtgatctacaactaaaccgatttagctttatggaagaacggtttactcttataccgaaacggtgaacaaatagagtttgagcacaacagcaagacccagctgcaatagaaagatgccagcaacgattaagacccatctttctccagctgaagtaatgtgagctttgagattaagtgccacaaaagttgctgacatgaacccagctacagctgcaattatccatctgaaaatttccaaggggacaacagatagacactgcaaccaaggacaaataaaatttttagctacaaatgaagttatagaactgttatatcacacatatatgtcatattaaatgttatgttgttaaggacaagaacgtccagataatatgcctcactcgagcaaaatctctgaaagtcgagatgttagctttacaatgaatattttccacatgaacgtttcaagcatg

SEQ ID NO: 3762 - DNA, 316 bp, Gossypium hirsutum
  Clone ID: LIB3825-028-Q6-N6-E11
aattcaggcgatcaaatctaattaaattcttgaaaccagaaactaaatttcaaaagctcaacatcccgtcaccggtcatttcaccgccaaagcaagcagtgcaaaagtatgaaataatagcaacagggagagcttgactgcaatttaagcttcccttatacttgcagaacataaaacaatcctactttgaagccaggagaaaactcggaatcgtcagtaaatagaggtttaaaaagataacatgaatgccatgtctcaaactccgacacgaccctctaaaccatcttaacctaaaccgaaacaaaactgatgccgc

SEQ ID NO: 3763 - DNA, 508 bp, Gossypium hirsutum
  Clone ID: LIB3825-028-Q6-N6-E5
cgaaatccatgctcgagtgctagacaataaaaaaggcaaaatttaaagattcgagttttcatcaacaaggttcaagatcgacggtgataaagagagaacaagtcaacaaaccctaaaataaaaatattccatgtcttcactctctcggtacctaaaatgaaaattgcttaacagcaaaaacaagcaaatttgggtattaaaagttactcagatggcaaccgcaatccttccggctacttggtccaggtcgcgttggccgttcgatgtgattctcctaccacctttaggatcaatatcaatgatgttaacgttctgcaattgttgaaaaatgtggcgagcaacaaatccactgctcttacaaaaatggcgaggacggcttccatttctcttagccccaccgtaaatccttctaaaggcaccaacaccaagacctcccctcaggtatattttcctcgccatggaagcggctctgatatagtaccaatcaggatcatatggaggaagttcc

SEQ ID NO: 3764 - DNA, 541 bp, Gossypium hirsutum
  Clone ID: LIB3825-028-Q6-N6-E6
aaacaaaaataaatgcattgtatataaagcacggacatgcctggcagtgtcgctatgtcatatggtacctgtattatgtgtcggcgttcgtcaatgtcattatttacccttcaataataagacaaaaaatttacaaggttctgtaatcaaaatctatctatggacctttacatagtcgtaacgagttctgccaccatcataactccgattctaacaactacacatttaagaataatattcagcatctgggcaacttcaccggtttaaggacaaaaccagtataatactagcctgcaacagtgcttgctcatgagttaggagagagcttcctattcctctttatggcattctttgtaagcgcgtcagatatctctcttcttcttttcgagttgctcttgatggtattctcattattgtttatgttgttgcagaccacagcttcagagcactttccagcaagttttagtttatcttgaacaaaaaccttcaatctccacaacgttaattcactctgggcatctatatcaagatccacctcttg

SEQ ID NO: 3765 - DNA, 558 bp, Gossypium hirsutum
  Clone ID: LIB3825-028-Q6-N6-E7
aaaaggaacaacacttattcttaataattatctcaaaaccaattttgtctaaacaagaaattgaaataatgtttttagtcaaactgggcacataataacaatcctctaaacataaaccaagtccactaggcaaagataaattatatgttcccacagctaatgtagcaacttttgctccacttccaactcgtaggtccacatctcctctagccaaagtcctactcctttgcagtccctgaagtagacgttccgcttattttggccttcttgacttcttcaaggtagatagggcagttccacttccaatgtccagtcacaccacaatgaaaacaatttccttccttagccaccccacctttaggtttcaatgcagcctttacttttccaggcttggacctacctttgcccttaggctttgtctgaactttagcctttcccttgcccttgttattatagaccatcagtataggcttgggtccaacctttttcatgttgccttcagcagttcgtaacatactgagcaactgtggcagagtcttatcaatttcattcatattg

SEQ ID NO: 3766 - DNA, 562 bp, Gossypium hirsutum
  Clone ID: LIB3825-028-Q6-N6-E8
gccaaatggtgtcctacccataaatctgccacattttacattttcatttttcatagtttcttataaaaaatacatgtaaattctctccctatggcttattttagattaaataaaagacataacttgtgcttgcaattaagcaactcttattcaggctaaaatggaaaacagtgtgacctaatatcagcacaagcaaaagtagccttctttgtacattttgtagctaaacatcatcgtattacctatgagcagatgtatgcggcatagggtatgtcacgggtgcacctggaaccactgctcctggtaatgtagctctgactccgtaagccatatgtgccggagcaggaaggttcactggcgtgccaactgctgagatgaggggacctcctattggttgccccatagttggaactccatgcacactgatacagggtggtgcaacagaatgtccgggcggctgtttggttgattttgctgcagaacccccggatgcggtgtcgtttgattgaccggtgatcggaccttggggtgctgaaacatccccattgccaacactggtaat

SEQ ID NO: 3767 - DNA, 557 bp, Gossypium hirsutum
  Clone ID: LIB3825-028-Q6-N6-E9
aaaagcagataatagccaaatgtttccattttttctttttcatgtttttaagatgcaggcatacattgaaagcagatatgcacacttcaggcacagtattcatcatacaatttgaagaaaaacactgctacaaacaacggcttttagataaactttacaaaggtaaacacatcattagcacaaattcatagcggccacctgttggagagatcttggctgatgatccgatgacccagaaccaagctatgactgatcctgatgccagaccaactactagaaataacaccataacgatgccagaagtctctgtgtgttgtatctcgattataattggttttccatctttcattgcattttttagatccccattcaaccctttgttaactatcctgcattctcgacaaaattctgtaatcaactcctcggaggaactgaaatcccgttcccatacaagagtggatgccaatggtgcacttcacgatgatgaagaaaaatgaaacgatcaaaaacccttaaataccgattcccccgatgacagaatccgaatttctggccac

SEQ ID NO: 3768 - DNA, 427 bp, Gossypium hirsutum
  Clone ID: LIB3825-028-Q6-N6-F10
aaaaaaagccccccttggggggtaaaaaccccaaaagggaaaaaaaaaaaaaaagggcccgggctttttttggaaaaaagaggggggttcaaaaggtaaaataaacccccccaaaggcccccacaggggatgaaactttaaaaccacacaggcgcccaaaggggggggactcccttttgaaaaacaagcccggggctaaaaaagaaaacctcccccccggggtgggggcccacccctgcggggggtaaactcttcgccacaaactgggggggacaacctcgccccccatttgggggtaaacttggcacaccccggggatttcgccccccaaaaaaaaccccccccccccgggggggaaaaaagggggacttgggcccaaaaaaaaccgggggatcccgggggggccactaaaagggggagaccccca

SEQ ID NO: 3769 - DNA, 444 bp, Gossypium hirsutum
  Clone ID: LIB3825-028-Q6-N6-F12
ggggcccggggggccccccggggaatccgggccgggccccggggggggccccactttccccttagggggggggtttaaaggcggggggaaaaaagggcaaaaggggttcccgggggaaaatggtttcccgccaaaaatcccaaaaaaaaaacaaccgggaaaaaaaaagggaaaacccggggggcccaaagggggggccaacccaaaataaatgggggggccccaacggccccttttcaaggggaaaaaccggggggcccccttgtataaaaaaaccgcccacccccgggggaaggggggtttgcttttgggcccccaggggggttttttttttccccaggggaaggggaaaaaggggttggcccttaaccgcggggccctaaaaaagttgaaaaaaggggcccccccgggttccccccaaaaggaaaaaacccgggggggggg

SEQ ID NO: 3770 - DNA, 548 bp, Gossypium hirsutum
  Clone ID: LIB3825-028-Q6-N6-F3
aatataaatctataataggctcataaatattaataaatcatatttactaattcaatcatcaaaaaatagagtttcgaaatttccgtttctggtatagctgaaaaatgagttgttatattgaagggagggagttgttttattttctcaaagttggtggttgtttgcatgattttctccatgtacgttgcggtttccttaattctttcaaggctggtaagtgctttcttgattcactccatggggttgaagaagttgaagactaggtccctcatcttttgaatttttgttattttctccttaggcatatggtttaggcttctgctggaccttctggtttgttgttcatctccagaattgggttaagacgtgttctgaagcccaacaaagctgattttggcatccaaatttttagaattcccaagcccaattcattggtcctatgccgtggcatagctgcagcattaggcattagtatgtgaatttcaattctttcttccatttgagtccaccggtcacctaattgaatgcgaagagccactgcctggtgc

SEQ ID NO: 3771 - DNA, 476 bp, Gossypium hirsutum
  Clone ID: LIB3825-028-Q6-N6-F4
ggggctcaagaataaagggaacttttgaaggcctttgttaatataggacgaaattacatcaacaaaggcattattctataacatacatcgggcttccattttgggtaataaactaaaagttttaatagaacaaacagggttaactgaaacagcctgtccctacccaaactaacttcacattatcaaaggatctttaatggaagatcaaaatatccaacccgagccttgggcctggcaaacaaatcttggagggctttaacaaattgggcttgtacttaaaggaccttttcggggggaggatgggtatttttcttcaactcaatagggttacccaccaccacatgcattggatgttgatagggtaaaggagttccaaaaactccccaaaataaaatagggacgaatttgatagccctcgcaagttgcatgaaaaaatttccactcgggttccaccacttataggaatatgactgaag

SEQ ID NO: 3772 - DNA, 439 bp, Gossypium hirsutum
  Clone ID: LIB3825-028-Q6-N6-F6
aaaggcaaaaaagggccccttttttttttaaagggaaaggggacccccaccatcatttcccatggggggcctcccccccgcccggggggttaaaaaaaaaaagacagggcccccctaaaccccccaaaaacccgggaatttgggggggcttttttttaactttcccaaaataaaaaggggggggggcttcttttttccggggaccccctggaaaaggaaggatttcccccaattttttggggggcaaaaaattcccgtaaaaaaaaaactccttttaaaaaaactaaggggttttttgggaccccatttttggttcaaacccttaaacagggggaaaggtttcccggccattttttggggggattgggaaaaaaaaaaaattttggggcccgggttttccaaattcctgggcccccgaaaaggaaaaaaaggggggggg

SEQ ID NO: 3773 - DNA, 443 bp, Gossypium hirsutum
  Clone ID: LIB3825-028-Q6-N6-F7
gtattgctcttccatggaattttttatgtttttgaaaatagaatcaattggttcgaccacaaatttcaagtgtagagcccaatttagctcggggcccataaaccaaaaaaacaaataaaaacaaagtctaaattacagcccaaaacacccaacacaaaaactaaaaaacctaggcccaaaaccccagcccacttagcactaaccgacaaccatcaaaaaagcagaaaaccttaggtgcgccgcacctaggtcggctgctcacacctccctcgagcgccgaatgccacttctccgcaacgtgcgctgctccaccacgccacgtcagtgacgtgctcaatcatgtacgaatagccaagaatgttgaccctcgaagcctgaatctgttggacgtcgtttatggtggcggatcggcattcaaagggagggattaaagtcggctaagg

SEQ ID NO: 3774 - DNA, 549 bp, Gossypium hirsutum
  Clone ID: LIB3825-028-Q6-N6-F9
caattgaactgattataattattattccatatatctgactttcatcagctcaaaatggatgacttggtaaggcattgaaaatggatatgatcaacaataatcatgtagtaaacaaagttcattctttctaaaaaccctaattcccaaatccccaagtgagaaatggaggagaataactctaagattcacatgccaaagttacaggttaactataaaaccaaaacggtatagggtgccattattcatacctaagggctgaagctccatgctccctttaaatgatggtcaaacctcatttcttgaatttgcaatgtcattcactgtggagcagacgcgattctgaattgtatgctaagcagcagaaattgcattatagcctttctcctcgagaacttcagctaaggagctatctcctgtcttaatgattcttccattctccataatatgaatgaatgtcggctttataacttccaacagtcgtcgataatgagttatcatcaaaactgagtttgttggagtcaaaagaccattcactgctttcgctacatc

SEQ ID NO: 3775 - DNA, 550 bp, Gossypium hirsutum
  Clone ID: LIB3825-028-Q6-N6-G1
attgtctaaacccaaatccacccgattgagtcgggcaccgaaacccatacgggtcaatcgagttagagaagttatgactgttcaacacattcgaattttgttgaactatccccgagttatcagctcgctgagttctgagtccactctgtacttcctcttccaccgagttaccaatcttatttgtcgacacgtccatctgacaaagtgtaggcggcattgtgctgacatatacgttactatttccataactagtaatcccctgactctgagtttgagtttgtgtttgagtttgtccactcggtaccagctcaggcaccgagctaagcccaccaagactcccccaatccaaattccctatacccagattttgaaaccccagtttcacatcgttttgaagcgttttgaacgagttaatgcgcggcaaagcaaagaaacgatcgtccaactcgggcaatgagtcaagcatgttatccagttgtgaagaacacgatgatgatgacccattcgtgctttgctctctgcttgaaacacttgacaatggtttttgacc

SEQ ID NO: 3776 - DNA, 556 bp, Gossypium hirsutum
  Clone ID: LIB3825-028-Q6-N6-G10
gcatgtaatgaaatttatagctcattcgacaagaagtaacagaaataaggcctcctaggacaaaatttgccttttagaaaacatcattaaactatcttttccaggtttttgttacatctcataagacttcggtttggtcataaaaaggaagggaaagcaactatatgtgaatttaactatcataaaaacaaaaggaaagcatttaaagattgaagatggatccagcttggtctcccattaatggcaacaggtgaaaagccttctcatttgcctcaccgaaaaatttgaacagtcgatatccttggaaacaaattctctctatttccttccactcttggctgatgggggaattaggcctcttttctctaagcttttaaatctatctcttgcaagtgtagcacaaccctttagcttacggagagatccagtaagttcttcggataagaggacttgtgggggagcaggctggaatttatatttccctaagcgtggtggacaagacttaagtctttcttgcttagctatggcctttcgaagatgcctcttttgcttctcc

SEQ ID NO: 3777 - DNA, 554 bp, Gossypium hirsutum
  Clone ID: LIB3825-028-Q6-N6-G11
gaggcagacacaggagtgctctgttaatgaagaacaatcaacccacctgtgttcaactacaaacaacagaaacacatacaatgtgcaagattttggtcaaggttcaatgtttatgaataaatatgaaatgttaggacatcttaatcgcctcttcatatcgggatcatcatttctttcatcccttctttcagtttataggaattaacattttaacactgagttcggttacactaattttctcctctctttcctgctaaaacttacaggcgagcaaggctgagggagaagtgctggtttttgaacattaaacctttttaaccttttgttagatggataacaagtgataaatggaatttctcaactctgatcaactgccattctatcttcagaaggtgttgaaggttcagccacgcattccctttcagttgctgcagcctcttcactcttctcaggctctgctatctcaaccttcaatttcttaatgggcatagatgatctcttcgacattcgtgcaaacatgtttgtaaagagtttagcatccctcttgttgctta

SEQ ID NO: 3778 - DNA, 528 bp, Gossypium hirsutum
  Clone ID: LIB3825-028-Q6-N6-G12
aatccctatagaagagtatatttacttatgtcattttaaccaatactaaaataacaaacaaaacaacaagaacaacatagattgctattcatattgtacccccaagaaaatatctgcacgaaacccaggactgaactccggtagtgcggcaatgcgtcctcaatgtggtctacgtcctctcatccagatctttggcaagaaagttgcatggtacccggaatttgaactcgaatagttcatgtagtcatccttacgagatggtattaccattcaataagtgtaaaattcgagttccaacatctacaatccatattcctatcctgtgactaaagtttagtctcggggtagaaggccttcacgaagcaacccgagcagtttttacagcataagtaggggaaaaagaacaagctgtttttcgttctttttggtgcataaggaggaacaaagagatcaatgaacaagaattttccgaaacgataatagaacaagtaaaacctagcgagaactaaaacaataaccaaaagggat

SEQ ID NO: 3779 - DNA, 543 bp, Gossypium hirsutum
  Clone ID: LIB3825-028-Q6-N6-G3
cgaaaaaattatactcaaatttgaatttatatttacaataaacagaattgataaatgaaatttagcagcgtagacatttgtatagaataaatctctaccattacatatcccaatctcgatttcaacatatctaacctataaatcaaatagccattggcccttgaagagtattgctaggcttccatcatggttgtgtccatgtaaccacttctaatcaaattggtgccctctaacgaagccgaaactgggccgattgaaagcaacgcgtgtccataaaagggtgaatatcatcttcagtaccttggggccctcaaattggtggcagatcatgaagcaatctttagctaaaaaaccaaaccttgctaggtaaaatttgtacaaacccaataatgcccgggcccaactaaacctagaatggcccaacacctaacccaaactaaacagcccactaactaaattccagcagcaaccctagcagcatacaaccttcaaccctagccgccgcacatcagccctgcaccaccaccctttgcgcacgtacgt

SEQ ID NO: 3780 - DNA, 384 bp, Gossypium hirsutum
  Clone ID: LIB3825-028-Q6-N6-G4
aagacataatgatcagttcttcacaagtgtaaatgaagaaaatatgatatttcttctgccctcgctaggaatctaatcccaactgttcagttttttatgttctacatttcatatgattgggatagttggcattgtattatttagaaagtgatcaaaacttcaacagcaaatcacatatacctataataatgactggcaattacacagttttcgtcctccttattacctcttaagcagttactgaagagctcatctcattgagaacgttgtagtacgtaaagaaatccgaggtgcttcggaagccaggaatgaaatctgaaaagaatctcaaaaccgcggccagatgttgcgagtcattggaggtaaatgctgcttcaagaaata

SEQ ID NO: 3781 - DNA, 534 bp, Gossypium hirsutum
  Clone ID: LIB3825-028-Q6-N6-G7
aaaaaacgaaactaaaattttacattatatccgaaccaatccagaatttctttttgtcatgagtagttaaagttaggacaaagaaccaaagaaaaaaaatagctacagtgtgagaatcaattaaaccaaaggaaaaaaaatagctaccgtgtgagaatcaattattcatttaagccttctccattttcatcttccacagcaatctcaattctcttcttcatcaatctctctgcggaattaaccctcagcttataaccaatgaccaccaccaccgcagtcacttggggcggaggttcggcaatcaacgtggagctcgaaaacgtcgctcgctttgctatcgatgagcacacaacaatagagagaacggtacggttgtgtttgtgagggtagatcaagcagccgaggccatggccatggccatggccctggttggcaatgtattccagcgcacgatcctgttgttgaataagctgcaactcatgctctgaagaccattcagcagagatcaaattcccttgtgctttatcaacttaa

SEQ ID NO: 3782 - DNA, 568 bp, Gossypium hirsutum
  unsure (1)..(568): unsure at all n locations; Clone ID: LIB3825-028-Q6-N6-G8
aacaatggtaaagtaaaattgtatttaatttgataatatgaacacgtcacttcgaaacgaaacggaacttacaattgcatggnaaaataataataataattcaaccccaaagttgaaagaatattgaacacattgaatgggactattccaaatacaaagctggtacaggtatcccccctaataaatataaggataaatgggagaaccataaaaagttaaaaaaagctttggaggggtaagctaagaattcttgaaagttattgcttgtgcttttcaatggagactataaactaagagaaataaaagccggaagggaggcgtttatgcttcccatcctctcaggatagttgcacgggcaacacggttcaccccaagtgtaaatgcacccatccggagattgcagtcgtgcgactggcacatgttcttgatgttatgaaaagctttagtcatgtatttcttcagctcctggttcactttctcctcatcccacatgaaaccttggatgttctgaacccactcaaagtagctgacagtcacccctcctgcatttgcatatnatatcgggtag

SEQ ID NO: 3783 - DNA, 541 bp, Gossypium hirsutum
  Clone ID: LIB3825-028-Q6-N6-G9
aaacaaaaaaaagattaattcaatcatcattaaactttggaagcatagtttatagctatctgttcataaattaatacaaatgaatacagactgatccttagttcacctaatcctgtgacccaccaaaacaatcctgctggcaaaaattttcaggctggaaattcatcaattgaatataatccacaaactcagttcatgccacggtttaagcttgtcgccgtctgctgtttactgtgcagatgtcgtgtttcccccaacggtccaatattgcttaacagcaaccaatactttctcaggaaccaagggaccgtcttcatggtctaccatcttagtgtcccacctcattcctgctgttatcttcttcactttaattagaacatcaacttcatcacggaatataaccgcaccttctggacgcagaattcggtccatctccaataaaatgtcttccaaattacatttgtccttgtacaaactgaatagaccatgtgcatgaatgagatcatacgtccttgggtatgtggagaaagcctcacaccag

SEQ ID NO: 3784 - DNA, 557 bp, Gossypium hirsutum
  Clone ID: LIB3825-028-Q6-N6-H1
ggcttgcaaattatgctttttcttttccatttgcgtattttcacgctgaaatgcagaacgaagattttcctggatttcctctctttcttgagtgtatatatatgtatgtatgtatgtatcactgcatcagtgtgtgtgtgtatgtatatacaacagattttcaattcacctaaactaaatacgtgcaaccttcgttttgccttttcacctatataagatatataaaaacatcaaagtttcattcttataacttcaacttcatcccctagcttgcttctgtggacataatctccagctccgcccaccaaagaggagaaactttcgggattgcaccttcaggtgtaattgcagtgatctctctcaatcttgcaccgacttctctcatatctggtctttgttgaggttcagggtggacacaagattgatcacctctccgattttctcaacttgatctgcatcgaaagagcttagagttggatcaaccatctgcatgagtggttgatcccttcttaaatagtccgatgcccagtcgtagagcgaaccattgtcatccacca

SEQ ID NO: 3785 - DNA, 562 bp, Gossypium hirsutum
  Clone ID: LIB3825-028-Q6-N6-H10
aagaaaatacaatgttacaataattattagaaaaagggtgcaagcagtagctttgtttttgaacttcaaaattattacatccccaacaattctctctaaatcggaaaaaaatctacatgcaattgacgtaaacccagcaagttgttattgtcacatccaaacaaaaaatttatattcaaaaattgtgaagcttcatcagtttatgtagggtttctggatagaatttcctagcaaataggtagcatggtcgtcggacaccgttccataggcaggcctgtacctgctcttctctcttttcatcacttgttacatgcacactcaactcaattgacgtaatattcttcagtagctcgtatgtaacatcccgagccctataggatttagggtgccactttctctcagaccagtcaacatgtgttactgaccagttggcaataccaccaggatctataatatggaaaaaagttggcaagtaatgttcatcagcaatgcaatttttgccatcaaaaccacgcttgcagtaatcgcggaaccttgagtagtaaagactgtcagccataac

SEQ ID NO: 3786 - DNA, 546 bp, Gossypium hirsutum
  unsure (1)..(546): unsure at all n locations; Clone ID: LIB3825-028-Q6-N6-H11
ggttaaaaaaaataatgattcactcaaattttgacaccattaatatccccagggctccagtgcagttaagccctcctcaccaccatttctacatattttccaaacaacngaagaaaaatgataaacagctcaagtccaaagatccctattatcttcatgcaaaatccatgaatctgaattgacagatgtacattcaaaagacttcatgccttattgtccccatctagaaagtagcatttcttttttggccttattttctcttcttttttcttggccttatgttttttttccttgtatgtgttgttctaaatcaaaagaaagcaacaaatcacatcaaatgacacccctcttcttcctcctgctccggccattgctccttgattctagtaggagtaatggaagacttggttgaagctaaggttccaaacccaaacttcggtttcttatctgcagcctttattatctggaaagaacaagttaaagactcatccacgctcatcatggcagcagcattgtcgaactcgccgcagtaatttggtgctgaaa

SEQ ID NO: 3787 - DNA, 532 bp, Gossypium hirsutum
  Clone ID: LIB3825-028-Q6-N6-H12
cacacaccatttcaaaggtattgtattagttttgtagtatgacatgaaaccgagataatttacatatcctgatttcattttcagcttcaaaaactagcaacacaacagcatcctaactacgatatattatatattgccatccccaaaaagcttgtggcaaaggaacatggggtagaaacaagataaatggattcttgcagttcaaaaaataaaatttaaaatccttgctaatgtcagatctaaaaagctagggagctttggctgaaaattctttttacacaggctgctgaactgcagtatcagtaccactggcgattccggtttgttctgtagcagcaaaatggctgaatggtggaggctgatccagtccggccattgccattgttgatggagcttcctgttttgaatggtcaaatttgcaggctggtccaaacttgcaaataccatagcggctatagtgtgagcagatggtttgatcaggtctgagtggcaatcccttgtcactgagaacacatggagccatctttgcaac

SEQ ID NO: 3788 - DNA, 516 bp, Gossypium hirsutum
  Clone ID: LIB3825-028-Q6-N6-H2
actcttcttgccatccacagcatcttcctttgaaatttcagaagatgatttgtggctatcagcatgtctctgattgctaccttcaggggccaattttgagaacttcttcaaaatctttgaatcctcaggatcatcactattctttgaacctttcttattccagccaaaccaacccttcttatccttagcaacaccatttgattcacaattttcataggaagctcccgaaccattttctttgcactcaatgacaccatgctcatcatcatcacaaagaccatctgaatttcccaaacaaagtgccgaatccagctgcatccgttcctcagctgttaatacatcatcatactcatcattatcaccaccttttgccatcctttcttcatcatccacagaaaaaagctcttcatcagtcattgcaccaggaacacttcttgacttcacactcactgtcacatgaagcatatcataaactttagccttccagttcccaaccatctcacttctctcttgtcg

SEQ ID NO: 3789 - DNA, 528 bp, Gossypium hirsutum
  Clone ID: LIB3825-028-Q6-N6-H3
gatgaatcaatagaaaataaattataattcaacaagtctagtacaatacaaaaaacaattcaaacaccatcaaagtttcttaaactagatacatgaaataacataaataaattaacatttactacttttaccttaaacctaactaatttctagatgcttgccattcatcaaacatttggttggctagctccatcctccaactagctcatgcatccgatggatgaatatttacgatattcggttcatcgtcatctatcacattactaggtaatccttctcccaactaggatagaataatggactcctaagtattcctcatctaagttttaataacccaaagcatctttcaataacattatgcgctgaagcatgtttcatattgaaaaattcttccggagtacttggctggtaaccctgacgccactcattcaaatgatatatttgtcctctaaaaggtgcaagaaatccctcacaatttgcgtatccaacatcaactagataataacaacagtggttcagtgaatacaa

SEQ ID NO: 3790 - DNA, 548 bp, Gossypium hirsutum
  Clone ID: LIB3825-028-Q6-N6-H4
aacacagaatactttatatatttttttctgtcaaagtcacgtctacaattcgaaacatttatatgttttacaaaacattgcatacgaatttgtgcagcctgcaatgaggcaatcatttttgcccacacgatcttcaaccgctattatttactatatgtggttcgaagatgggaatgtgattcccccttgacccatgcttcttccatccacaggctataacctcctaaacttattcttcagcaggaggatctacccatcgcccatgatcttttattagttggatcagagcatcggttgcatgctccattgcgattccacgcttcacaacagtcttgcctacatagaggtcgatttttcctggagcaccaccaacatatccgaaatctgcatcagccatttcccccggaccattaacgatgcaacccataattgcaatcgaaacaccaggcaagtgtgacgtcttttctcgtatttgtgcacttatttcttgaaggtcaaacaatgttctaccacaagatgggcatgaaacatactccgtcttggtattc

SEQ ID NO: 3791 - DNA, 536 bp, Gossypium hirsutum
  Clone ID: LIB3825-028-Q6-N6-H5
gagagtaaacagatcatacataacaaatgcacaacgccaatgtgatgggggtacaacaacaacaacaacaatattttggtgatcgaagaatttgccgtgtgtttggtttgtttttgtttgtgttgtgtctgtcagtcacagtcaagtgagagtaacaagcttacatctcaattctcagtgtttcactttcaccccgtaagataaccataaagaatggaagggacgaccacccaacacattagtagaaacaccatcaaactgtatgcagctcgtcgctggttatcatgtgctcccgacagtgagctcaagatgctggctgtgctcgtcccggatattgcgtccagtacattctcgccaatgtcgttcttgcaaagaggacaagatgcattgatctttagccatttgtcaacgcattccttgtgcatgaagtgagaacatgggagctcccttagctcttcgttattagtgtattttgccaaacaaatgcagcagactgcatcttctccagagatgatcctttccttttccgttcctgc

SEQ ID NO: 3792 - DNA, 554 bp, Gossypium hirsutum
  Clone ID: LIB3825-028-Q6-N6-H6
actgcaaattatatcatctataaacggaatcaaagctgttgatatagactagatttccacgcctttgttttggcttgaaatataacagacactaatggtatgtagtactttatcaccctaatccctttaacaagctctttaagttaatacactcgtacgggtacaacacaaaccactgtaaaataatattacaaaccttttcttgtatcataacaggacttggctagcaacaaggatagatagattctcaggttggcttttgcttctcccggttagcatcgatttgctggcttgttctttagtcagtatttcatctggtcgtcaatgaaggatgacttcaatcatggtttctctgttaaaattcttcttgcggtgtctgtaactgtaaaacgaaccccttcataggaagtaagatagttgctccttttttcttgaacccccttctccgtacaagtcattccactgttttaactcattcattccagctccctcagatgcgaagctagccgccacctgattctttgcttgcctgaaatcttccatagacaatggca

SEQ ID NO: 3793 - DNA, 474 bp, Gossypium hirsutum
  Clone ID: LIB3825-028-Q6-N6-H8
aaaaaattatagggaaaaaagaaactgtttacatgcctgagggaaatgagaatatggggcagtggggggggggaggcgagccgggaaggggccgggaaaaggcagcagggccgaaggagggaacgaactcacgggaagggggcgaagcggaaagcgaaggggggagacgggaaaccaaaaggaagagcggcagggaaaagaccaaaacacgcccggcaaaaagacaaaggccaaagcccggaccccgggggcgacccggggaccccggaacacaaccagaaggggcggcaggcaaacccatggggagggagataaaaaaccgggggggcaacggacaaaggcccaaaccaggggaaaaggggggtgaagggacaacaacggacgggacaaaaagcggaagccaaaaagggaaaacccaggccccccagcgaaagggcctaacaccccaaaaacgggaagggaaaacgggaaaaa

SEQ ID NO: 3794 - DNA, 553 bp, Gossypium hirsutum
  Clone ID: LIB3825-028-Q6-N6-H9
aaaatggaatggcagtatgcttactgacacatgaaactagaagggaaaaaaaatttctttcaatttcaagtgaattcaagtgccatatactaaaattagctaacccacctaaccactaattacatgaaatcaaaattagatttttcttttctaaatatggcttttacaaagttaaaaatctgatcagcccttaaatgtctcaaaatttccaatttgaccccttttgttgattgctatctaattagtctttttctgcttgttttttttatttaaggcatccgaatttcgttcttagcctatgtttatcctcaagcttttgtatgttcctacattagaaattgtccaataatttatcagaaatcaagcctctcttttgcaaccatgatcaatgtaaataatttaggcaaatgaataagtgttcaaatatgcagtttaatcaaccagtgtcatagaattcaaaaatgtaaattaaatcacttcactaaattgcaattgaaccaaaatttgtaaggtatttattctcaaacaattatacagtaaatttgggatatag

SEQ ID NO: 3795 - DNA, 102 bp, Gossypium hirsutum
  Clone ID: LIB3825-029-Q6-K6-A1
cagcaggaccgtaacactcgctagtttcgttgtgttcgcttcttttgttgtcttgctttccttttttgccacgtaagctgtatatccccggctagctttaag

SEQ ID NO: 3796 - DNA, 511 bp, Gossypium hirsutum
  unsure (1)..(511): unsure at all n locations; Clone ID: LIB3825-029-Q6-K6-A10
gcctgnananacagntgagttggagagaattgaagccggcggcggatgggtgataaaatggaatggacatcgcgtgcttggagtactcgccacttcaagatccataggcgatgggtgcctcaaaccatttgttacatccacaccagaagtgacggtaagcgagcttaccaatggagatgaattcctgatactggcgagtgatgggctgtgggatgtggtatctaatgaagtggcttgtggagtagtgaggcgatgtttgaacagccaaatgacgaagaggaaatcatcgcttcagttcgtcgacggaaaccgacgtgccgaagcagccgcggcgatgttggttgagcttgccattgctcgaggtagccaagacaacattagtgtcatagtggttgacttcagaaactcaacctatcactaatctccagtaaatctatctgtgtattattattgataaatttgtacaaaggaggcatagaaattcgggaataaaataattgtacatgtttgg

SEQ ID NO: 3797 - DNA, 578 bp, Gossypium hirsutum
  unsure (1)..(578): unsure at all n locations; Clone ID: LIB3825-029-Q6-K6-A11
aaacatttcttctttcttgctgtcttcttcgtagcttaaaggcttcttctgtcgtgagnagccttgaaatttggctttcctattagnatttcttttntcttctttggattacangtaaaccagtaagtggggaagtgtaatggngattttgtatttggtccattgggagactccagcaaggttggtgtggacaactagcttctttcgccacaagctaatgatcttttaatttttatgtaaaagtaaaacacagaaattatctgtgtacaatctttgcttttcttcttttacagcaattttttgtgtctttttactcgccggaaagttttaggcacaaaaatattacacacatacacaaagttttaagatatagaaagacaaatttgtataaagaaaatggagtctggccgtctttttttcaatccctccactacccaccgcaacatgttgcttctcgggaacactgaacccatctttcgaggggcaagaacaatggttagcatggaggaaaacccaaagaagcgactgttcttcagctcgccggaggatttgtacgacgaagagtactacgacgagca

SEQ ID NO: 3798 - DNA, 590 bp, Gossypium hirsutum
  unsure (1)..(590): unsure at all n locations; Clone ID: LIB3825-029-Q6-K6-A12
ggnaagaagctcatgacttgtcgcctacccttccccgactcgctattactcagttaactcgccctcccttcactcactcccaccatggcattccatttttctgcttaaaagctctttcctttccttttttgtttttttttcctcaaatctcatcttttgaagtaaattatttttatcattattctttagagtaaaagggagagtaaaagggagagatgtatatggtgccgccaccccagcgatcggatccgggttccatcggcggcgggtcgggtgatttacgggtttaccaagcttggaaaggcagcaatatatttttatttcaagggaggtttatatttggaccggatgtaagatcattagggctgactattttgcttatagtagctccagtttccattttctgtgtttttgttgcaaggaaattgatggatgatttttctcatcacttgggtaatttaattatggtggttgctgttgtcttcactgtctatgatttacttcttctattgctaacatccggaagagatcctggtataattccgcgcaatgcacaccctcctgagccagaaagttttgatggaaatgta

SEQ ID NO: 3799 - DNA, 589 bp, Gossypium hirsutum
  unsure (1)..(589): unsure at all n locations; Clone ID: LIB3825-029-Q6-K6-A2
ttttanattatccatctttaagaacaccctactggnaaagcaanaggtggttattgtgggngaagattgatggagagtctgttaaaattagacagtctagggatgatggatatgctgatgtaaatacctattcaaagagagatgttagcagttggcagttgaatcatcggaaacgcccatacttggatcttacagaagcagttccagaaatgtctaccgagtcaagtcaaagaatgccatggagtgaagtgaggagagtttccacagatagaggaagtgatgacaaaaagctgaagacgggtttcactggaatatacgaatataacggtgctagagatgaaggcacatttagtgataatactgcattagatagacatggtctgggttctggctcttgtgttaaagagagatgtaacattgcttgcgaagaaaaaggtgtccccaaggacatgggaagtggcgaaaggttctttcccataggttcagatcgtgctagggaaattcgaatggaatggagggaagagcttctggtaaaagatgaggacagagctggggatgcctctccaaatcttgagcttgctttgggggc

SEQ ID NO: 3800 - DNA, 587 bp, Gossypium hirsutum
  unsure (1)..(587): unsure at all n locations; Clone ID: LIB3825-029-Q6-K6-A3
ggnaccgtatcaagtaacacatttttggatgaacaaaatcacaattctactgtaagcatggaatatcatgttttgggcctggaccaacagttctctataaacctctttgctgcttgttgccgattattgtactccattctgaaacatcacaagagtgaatgtgaacggtgcattgctgtgcttgaagaatctgtttcccttcttcttcattgtttggagacagtggatgctgatctagtggtccaaaaaggttatttttcatggngaaatacaagagggagtgaaatgtgctggttttctccgaagaatctatgaagagataaggcagcagaaagatgtctttgcagggcactgttacaagttcttgtcaacctacatatgggttttttcaggatatggtccccataaaactggcattagaagggagatagatgaagctctaaaaccaggtgtatatgcattaatagatgcttgctcagctaatgatcttcaatatcttcatacagtatttggagagggtccttgtagaaacactttggccagtttgcaacgtgattacaaactgaatttccagtacgaaggggaaa

SEQ ID NO: 3801 - DNA, 585 bp, Gossypium hirsutum
  unsure (1)..(585): unsure at all n locations; Clone ID: LIB3825-029-Q6-K6-A7
cttcaggctagnattatgctgcagcatctctggaccggccccatttctaatgcatctgttgatgttgttcaagggagtcgatcggttgaggtgcgacctgttggtgttacaaagggggcagctattgatcgtattttaggagaaatagttcacaacacgtcgatgacaacaccaattgattatgtcctttgtgttggacatttcctggggaaggatgaagatgtttatacattttttgagccagagctgccttctgatgtaaatatggcaaaatgcaagccaatcgatgcaccaaagttacctactgagaaaaaggctccctcgaagcttccagcagccaaaagtgggccaaaatcatcacaaacaaagacacccaaaccatccccggctcctgataaaagaactggcaataaccatagcggtgggagttcacggcgtgcatcaccggaaaaggtaaaggagaaggaaaagatggcctggagcgtgcttgatctcaaaggagataactacttctcctgtgctgtcggacggaagcgtacatctgctcgatatttacttggttcatcagatgatgttgtctcgttc

SEQ ID NO: 3802 - DNA, 350 bp, Gossypium hirsutum
  Clone ID: LIB3825-029-Q6-K6-A8
acaacaaaatagaagtattttggctttaaaagtaaatgaaaagcaaagttgctgttttctaacttagtgaaatagtattctcaatctttcttgtactcttttcatagtctatatgtttcgacttggatgtttgatgatttcataccaaaactttgtttcatcttctggtattgttgatggatgcatctaccaacctgaaccaaattaatgggaataatcaaagcattacttttaaaaaaaaaaaaaaaaaaaaaaaaaaaaaaaaaaaaaaaaaaaaaaaaaaaaaaaaaaaacaaaaataaaggaaccaaaaatacaaaaggcgggcatgcgaaaaaaataaccaccta

SEQ ID NO: 3803 - DNA, 531 bp, Gossypium hirsutum
  unsure (1)..(531): unsure at all n locations; Clone ID: LIB3825-029-Q6-K6-B1
tccgctttttgcctttttgctgaagaaaactttcttggntattatcttttagctcaacaatcttccatttgcattttctaatcattcagttttaatgtgtagtcctgtttcattttagggtgctctggatgggggaattgatattcctcacggtgacaagaggtttgctggatttaacaaggacagtaagcaacttgatcctgaagttcaccgcaaatacatttacggtggccatgttgctgcatacatgaggactttaatggaagatgagccagagaagtaccagtctcacttcagtgagtacattaagagaagcattgagcctgacaccatagagggaatgtacaagaaggttcataccgccattcgtgcaagtccagaagcaaagaaatccaagaaggctcctcccaaggaacacaaaaggtacaacctgaagaagctgtcttacgaggaaaggaaggcgaagntgattgataggttgaaggctttgaattcagctgccggagttgataatgattctgatgaggatga

SEQ ID NO: 3804 - DNA, 556 bp, Gossypium hirsutum
  Clone ID: LIB3825-029-Q6-K6-B10
ctctgtgtcaaacttgttgtgcttgttattgacaagtgtactcttgatgtgttgtatttctttaagctagtttattaattatctaataattttcaaccaacaagtgattctggtggtgcccaaaaagttcgaaagaccatattaatcttgtactaatattgcatcataaaaatctcaaatgcgccatgcacttttctacccctcttaaggtaaacaagattcttttgaaattatatgagtgttacaggaggccatcaatgtggccgcaaaagactggggcctgcaatgtctccgttatgagataagggatatatctccaccccgtggagtaagggcagttatggagatgcaagcagaagcagagcgtaaaaagagagctcaagttcttgaatctgaaggagaacgacagtccaatataaatattgctgatggtaggaaaagtgctgtgatcttagcatctgaagctgcaagaatggatcaggttaaccgagcacaaggtgaggcggaagcaatccttgctagagcacaagctacagctaaaggaattgccttggtg

SEQ ID NO: 3805 - DNA, 590 bp, Gossypium hirsutum
  unsure (1)..(590): unsure at all n locations; Clone ID: LIB3825-029-Q6-K6-B11
cataaccaaagctaagnaacttattaggcggcacacaaanaagttccgttcaggggacaaaaggttcaggttcaggttcatcttctcaacagagagaatcacttccatcatcaccgatggagttggagatcacttcatttgaaacagactcttctagtggatcctcaccatatgaggattttcatgaatagactcgtctctcatcaaatgacagtattattcttaggccttgaatggagcaaacagtatgcagtccgcaaatatgtgcccaattacttcagagcgttgatgacaagcaaccgcatttttttgctaaaatgtaacagtgcttgaagacagactcgtttctgatcttcaaaaaaaaaaaagatggttgaagaacacccagctccagaaatatgaaggtatgcctgcttggttattgactgtgcaggtactggttgatgatgtacccttgtattctatggtgattgatctttgaaagctgggttagatcatgtttgttgttttatgaccatctgcttcatttgaccgagtgattgaagcaggttcaaatccataaattttgtaggttgggtagaaaatattaa

SEQ ID NO: 3806 - DNA, 574 bp, Gossypium hirsutum
  unsure (1)..(574): unsure at all n locations; Clone ID: LIB3825-029-Q6-K6-B12
gnatttcaacagagttgatgttttgagtaagatgaggcatccaaatctggtaactctgattggtgcatgtcctgatgcttggactcttatttatgaatatcttcccaatggaagtcttgaagaccgacttagctgcagaggcaattccccccctttatcatggcaaactcgtatccgtcttgctactgagttatgttctgttctcatcttccttcattcaagtaagcctcatggcatagtgcacggtgatttgaagcctgcaaacattcttcttgatgctaattttgtcactaaactgagtgactttggaatctgtcgtctgctaagcgacaatacaaccatctgctgtagaactgaccccaaaggaactttcgcatacatggatccagagttcctttcaactggagaacttactcaaaaggctgatgtttactcttttggagtcattttgttacggttgttgacaggaagacaagccttgggtataataaaggaagtgcaatatgcattagatatggaagtttgaaaaatctcttggatcctttggctggagattggccttttgtgcaagctg

SEQ ID NO: 3807 - DNA, 585 bp, Gossypium hirsutum
  unsure (1)..(585): unsure at all n locations; Clone ID: LIB3825-029-Q6-K6-B2
ctttcatgnacagnagnaattaatattttctaataaagtggtagtcgttatgctttgtgtttattctttttgtatttttcatgtctttcagaaagaaattgaaccttgttatcctccactttagtggtgtctctgcacagttctttttgcaattgatttgtcctcgctgttagagtgatctgtgatacgagagtttaattcttatcatgctatgataagtttgtttctgcaccttctcgaacttggtttcctacaaaatagaagttatatagctatccaagttgtaccgtaggcaagacttaaggttaagcataatgatgggtggaagcacctggtaggtccctctattatagagcttggatcaaattagtcctactattaaatgggccaacttattccttgtactattaaaaggaatcaaataaggccaaatgtcaacagagttaacatttattatttgaaaaatgtcatttactgtttaacagagttagttgtttcgaaagctgttataattttgcaaacgaaatcttttgtttgaaattgagctgcaaatggtcactttttaaacagtaaatgttagctctg

SEQ ID NO: 3808 - DNA, 568 bp, Gossypium hirsutum
  unsure (1)..(568): unsure at all n locations; Clone ID: LIB3825-029-Q6-K6-B5
cggccgcgtgggngaaaattcacaaatcttcttctccttctcagaaatcttagtatcatcactatggcctcaatcccaggtcttctttgacatgacgatcggtggtcagcccgctggtcggattgtgatggagcttttcgcagattgcactcctcgcactgcggagaacttccgtgccctctgtactggcgagaaaggcgtcggccgcagcggtaagcccctccactacaaaagctcttctttccatcgtgtgatccctaactttatgtgccaaggaggtgacttcaccgccggaaacggtaccggaggtgaatccatctacggatcaaagttcgctgacgagaacttcatcaagaagcacactggtcccggtattctctcaatggctaacgctggaccgggaactaacggatctcagttcttcatttgcacggctaagactgagtggctcgacggaaagcacgttgtgtttggacaagttgttgaaggcatggatgtggtgaaagccattgagaaagttgggtctagcagtggaagaacttccaagcccgttgttgtcgctgactgc

SEQ ID NO: 3809 - DNA, 572 bp, Gossypium hirsutum
  Clone ID: LIB3825-029-Q6-K6-B6
gtctccagcagctgcaccacaactacagagaaaggtaaggggaaaaaagcgtcgttgttcttgcttcttcttctacttcgctctctctctttctccgaagttcctccttcgttcttttatttattcagtattgtaaaagatggccgacggtgaggatattcaacccctcgtctgtgataatggaactggaatggtgaaggccggttttgctggtgatgatgctccaagggcagtttttcccagtattgttggtcgtccccggcacactggtgttatggttgggatgggtcagaaggatgcctatgtaggagatgaagcacaatctaaaagaggtatccttactttgaaatatcctattgagcatggtattgtgagcaactgggatgatatggaaaagatttggcatcatacattctacaacgaactccgtgttgctcctgaggagcaccctgtgcttctcacggaagcacctctcaaccccaaggccaatagagaaaagatgactcagatcatgtttgagaccttcaatgtacctgctatgtatgttgccatccaggccgttctctctttgt

SEQ ID NO: 3810 - DNA, 585 bp, Gossypium hirsutum
  Clone ID: LIB3825-029-Q6-K6-B8
aaggcttggcctttttctggtaagaatcaaaaataaaatctggggttcttgtatggtgagtgaatgttcgacttatttctgctgatccacgttcgctcacaaatttggcttcgcaaaaggaagaaaagaaaaccaacaaaaccccattcttttttcttctttttttatacctaatcatactaacgaaagaaatcttttttttttttcctttttctttccgcttagatttcctaacttttgtacagtccaaatactggaagaataaatacccctcataaattttccttctttttgccttttgatcctttcatcgctctcgtattaatttgtagctttaattttatagaaaacccaagtagttggagttatattttaatagagctgggttgttttacatttgagttttgaataggattttgaggtggtttctgattaattttggtgaaaggataacaaaaagagagcagattttagttatttgcactaaacagcttacaaaagtggcgaaaatgagtttaagtgcagctgaggatgattcaaggtcagagattcatataccggcagatatagattggcacatgcttg

SEQ ID NO: 3811 - DNA, 579 bp, Gossypium hirsutum
  unsure (1)..(579): unsure at all n locations; Clone ID: LIB3825-029-Q6-K6-B9
gggnaaatttaactcactggnacctcgnctatcttttacaaagcttgttataagtgtaatcaagattctctcagggctttattgtaagagttcttgtggatcatccagtataggaaaggcttgtggcaattctaaagccgtgggtggtgttgatgaatttgctctaaccacagattgtaaagtggatagacatgatattatctacatcagttcattctgaaaaatcctcaagcatggagtggtcctctngaaaaatgtttcaataaatctcagattgagccaggtccctccactcagtggttaggtcatctcgtacctagttttcaaagtgagaatacatccacgaatgatagtcgtttactaaaaacgagaacccgttcttcctttgccagctcatgcagcgggaaattaggaaattcatatgatgaaatacctgtaacaagtaattggtcagggattctttctgagaggcctgttggttcaaaagatgacaaatggcaagttttagaggatagtcaggatccttttgcttttgatgaagaggaattcgtgccgtcaaagtgggacttagtctctggg

SEQ ID NO: 3812 - DNA, 577 bp, Gossypium hirsutum
  unsure (1)..(577): unsure at all n locations; Clone ID: LIB3825-029-Q6-K6-C1
gttngaacagnaaatgcgatgttctgtcccatgatatgtcatgaagtttacaaaaaggctgggatcctccaagaattatgctatatctcttccccagcaagtcaatcctgccatgttaagtctaatcctcgaatttgccggtttcatcaggtgcctggccgctcgaacaaggagcgcaaatcttttgatgagaagtttatccgaatggacacaaagaggctctgtgagttgacatctgctgctgacagccttcagttaaagcctctagttgatcttactagtcgtgcccttgcacgaattattgaagggaaagcccctgaggagatacgtgagatatttcatttgcctgatgatcttactgaggaagaaaagctggagcctctgaaaaatgccaccgatgacccacgcattcgactgttaaatagattgtatgcgaaaaagagaaaggaactaaaagagagggagaaactaaagaatgttgaggttgacgaagagcttgttgatgatcgttcagttgatgacctcttgtcatttattaacggagatgatggagattctaaagggattaaaacttcaa

SEQ ID NO: 3813 - DNA, 355 bp, Gossypium hirsutum
  unsure (1)..(355): unsure at all n locations; Clone ID: LIB3825-029-Q6-K6-C10
naaaggaaaaaaaaggtttcttcattctctgctagggcttcattcgcatgccccatggttgtcgcagcaccaacgccactttcggtggccaacgacgccgagaaatgagtctttcgaccccgatccaaggctgtattctgatcgtgaaggcgtgaagcggagcgcacagacgtggggcgtgcaataagcgagctgggggacgtgcttgatgtgccaacatgcgtagtggctgtggcgcaaggcaaatagaactctagggcttcctgtttctgaaaacgatttgggccattgngcttgtgtaaccaattattgggccattgcaaagttnttggcctggtgtaattagatttggact

SEQ ID NO: 3814 - DNA, 600 bp, Gossypium hirsutum
  Clone ID: LIB3825-029-Q6-K6-C12
attaccccttctttgatttacatttacagggaaaatttgaaccagagacaaccaataaggcctcaagcagccgaccaggctgtcgactacggcgatgttttcggtgtcaccggtgctacgccttcatctccaactccaacgggtgcgggtgatcaaagtggcatcaccattggagaagctttggaggcaacagctatctctgttggcgacaaaccggttgaccgaggtgatgcagctgcaatacgagcagctgaggccagagctgctggtggtaacgtcacccaacgtagcggccttggcgccaaagctcaagctgctgtcaatttcaatgaccgtgtggcttatgattacaataaaatcactatatcagatgttttgtcggatgctagtgcgaagctgcctcacgataaagccgtgacaagcgaagatgctgatggcgtgagaggtgcggagctgagtaacaatactgaagcaatgcccacaccaggaggagtggcggataccatggccacagctgctagggtaaatcgggatgataagccatgaacttcatttctgtagccaatgttatggttttagtaaagcagttttatggtagaa

SEQ ID NO: 3815 - DNA, 582 bp, Gossypium hirsutum
  Clone ID: LIB3825-029-Q6-K6-C2
cgctaccattctctcttttccttgtgtctggtgtcttttagataaaagagagtacgctggatgcaactagagcagaacttgctcttatagttttgtatttgaataaggctgaagcaagggataagatatgcagggctatacaatatggttcgaaattcttaagtaatgggcaacctggcacagcccaaaatgttgacaagtcaaccagcttggctcggaaagttttccgtctttttaagtttgtcaatgacttgcatggtcttattagcccagttcctcgaggaactccccttccactagctctgctgggaaagtccaaaaatgcgctgttgtcaactttcttgtttctcgatcaaattgtctggcttggcagaacaggtatctataagaacaaaggaagaactgagctgattggacgaatatctcttttctgttggatgggttcttcaatctgtaccaccttggttgagcttggggagctcagaaggctatctaaatcaatgaaaaagttggaaaagaatcttaaggacagtgataagtacaagagtgaggaatactgtgccaagctccaaaaatcaaatg

SEQ ID NO: 3816 - DNA, 599 bp, Gossypium hirsutum
  Clone ID: LIB3825-029-Q6-K6-C3
gaaaagtaacatttcccaaccaactagggttagggttatccctaatccgcataaagttttttttacacgctctattcttgctacttaattatcaaatatgggcgcaccaacagactcagccctcgatctcgatgaacagatctcgcagctcatgcaatgtaagccactttcggagcagcaggtcagagcattatgcgacaaggcaaaggaaatattaatggaagaaagcaatgtccagcctgtaaaagcccctgttacaatttgtggtgatattcatgggcagtttcatgatcttcaagaactttttcgaattggggggaagtgtccggatacaaactacttgtttatgggagattatgtggaccgtgggtactattctgttgaaactgttacgctgttggtggctttaaaagtccgttacccccagcggattaccattctcaggggaaatcatgaaagtcgccagatcactcaagtttacgggttttatgacgaatgtctgagaaagtatggtagtgctaatgtttggaagatctttacagacctttttgactattttccattaactgctttggtggagtcagaaatattttgtctgc

SEQ ID NO: 3817 - DNA, 459 bp, Gossypium hirsutum
  unsure (1)..(459): unsure at all n locations; Clone ID: LIB3825-029-Q6-K6-C6
ctacctcggnaggtctttgttcctggttggcgggtacatatatctgtgactatctccaaccatcagagacacttgaggttttaaaagatcattgtgttgagttgatgtccatggaagctccaaatgatgcatcaaaaatttggaacctgaagaagaagccattagagtgtccactagatctttttgggatgtagttctcccttactgttcgacatcaagctctacccaagaaaagaacatggaaattaccggcaaagaaaatagccagaaaactagcaagtcacccagtctctacttcattgcagccgttatcatcctcctcctctcagtattagtaggtttcgtgtttgtaagaaaatcatagtgcagtgggtgaacatttcggtagtaatatggagcctttttagaaccaatatcatatcaagtagtgttatgattgattacctcaaattataatag

SEQ ID NO: 3818 - DNA, 581 bp, Gossypium hirsutum
  Clone ID: LIB3825-029-Q6-K6-C7
ctttttctttcaaaaaactgacttttctttgattttcggcatacttagggacattcatttctaggtacaccttctcctttctttttaaagtttctgttgcgagtatatgagcaagggcgattgcgaatctcggtatatgtttgaacatgaaatttctagatctatttgttctctgttgaatatcatatatgaatgctcctatcagtggtcggtcttgactcttgtttttacatttcttgattactgcgagggactctcctttgattatgattgctgaccatttcttttcaactcttatttggactgctttccgacatgcaattgcttcagcagcaaaggcggagacgaccccttgatggatctctgagcaagataagagcactatcccttcttcatttctgaccacaatacctaaagccgaatgattataattcctatcatacgcactatcgaaattgattttaatgaactcacgaggtattcttgtgtttctatctcccatatggccctgagtgcacagcagaaattgcggtattgacaagggtaaactgatcaaacacccaggacattcacgaaataaa

SEQ ID NO: 3819 - DNA, 596 bp, Gossypium hirsutum
  unsure (1)..(596): unsure at all n locations; Clone ID: LIB3825-029-Q6-K6-C8
ggnattatggccagnattagtgatagaacagcattcagaagcacttaagtgggactgattggtaaatgaatgaatagctgtcacgttccttctttcctgatgctcccttctctttatagtaatcggtgataatccaaagcttaagcaggagtgaggtttgaaccttgtccctgcatcatcaatatgagccacagggccaaatcctgcagttcctcttcaatgcccccttcagtttcagcggaatggaaagttaatggaaactattgagattctttgctcgtgcttttacttctgttgaaaaccaatttgattaagtgcttattttcattttgtctggattgagagtaaaacaatttatgcatcctatttcctataggcgatgctgccatactcgttagatattccactattataatcatatttggatacatatctatattcagcactcataaaaacacacatttgattctgctgcgcggttgtataaccgctggaatgctcctgcatttcatgcagcctcatctgaggcaactgtatttgggtaaaatacccaagttcatatgatactaacatgttattgcttccgcttattgcag

SEQ ID NO: 3820 - DNA, 599 bp, Gossypium hirsutum
  unsure (1)..(599): unsure at all n locations; Clone ID: LIB3825-029-Q6-K6-C9
gctctcatcacctgnaaaggnaggaaaaanaagcagaagtagtagaagcaccaaaaccagctgactggttcaataccttattatctcttcaagctgatctcctttacaactgtttcaccactctttcttcccctttcttcaccctcttatcggcggcctttgagtcataccgccgtgccgaagagacgacagccaacgtcgaaacggcggttcaaaatctaccttccagcatcacccacggtagcactgtcttgctcaagagagtcgggttaggactttttggtgctgctcaaatgtgcatggtgttggtctttctgatggttttggctgcttttgtgggaattgggttggtgcaactttgggcggaggagcctgttttcgttagagaaaaattgttctttgattacacagaggtgaatcctacggcggtgttttgtgctggtggaggtggctttgatggcggctgttataggaagaagcagatgggtgttcccgttggtcataccattcatgtttatttgcttcttttgatgcctgaatctgatttcaacagagatattggagtatttcagttgaatgcagaactgatatcaatcaat

SEQ ID NO: 3821 - DNA, 572 bp, Gossypium hirsutum
  Clone ID: LIB3825-029-Q6-K6-D10
ggaaacttgggggaagaacttgctatcccttgcttttctctcgcaaaaaatctcaaacttgtttttaacgttcgctgaatactatcgctcatttcttccctcagaaccctaatcgataactgaagccatttaatcatgtttgggcgtgttccaaaaaaatctgataacactaagttttacgaagtacttggggttcccaaaagtgcaagtcaggatgaattaaagaaggcttataagaaagctgcaattaagaatcatccggataaaggtggagaccccgagaagtttaaggaactggctcatgcttatgaagtacttagtgacccagagaagagagaaatatatgatcaatatggtgaagatgctcttaaagagggaatgggaggaggcggttcttctcacaacccatttgacatatttgagtcatttttcggtgggggagccttcggaggcggtggtagctcgagaggaagaaggcagaagcgaggtgaagatgtagtgcatgctcttaaagtttctctggaagaattgtacaatgggacgacaaaaaagctctctctttccaggaacgc

SEQ ID NO: 3822 - DNA, 576 bp, Gossypium hirsutum
  Clone ID: LIB3825-029-Q6-K6-D11
gtggtgttattaagctaggtgaaaagcggctgatagcaagtgtgctcttgtttatggtcaaatgaatgagccccctggtgctcgtgctcgtgttggccttactggtctgactgttgctgaacatttccgtgatgcagaagggcaggatgtgcttctcttcattgacaacattttccgttttactcaagcaaactctgaagtgtctgccttgcttggtcgtattccatctgctgtcggttaccaaccaaccttggctactgatcttggaggtcttcaggaacgtattaccaccaccaagaaaggttctatcacttctgttcaagccatatatgtgcctgctgatgacttgacagatccagctcctgcaacaacctttgctcacttggatgccacaactgtgttgtcccgacagatctctgagcttggtatttatcctgctgtggatcctttggattctacatctcgtatgctctctcctcatattttgggtgaggaacactacaacactgctcgtggtgtccagaaagttctccaaaactacaagaacttgcaagatattattgctattttggggat

SEQ ID NO: 3823 - DNA, 537 bp, Gossypium hirsutum
  unsure (1)..(537): unsure at all n locations; Clone ID: LIB3825-029-Q6-K6-D12
cccaaccttaccgcttnganacatacacaagcctccgcagcgaacagagaagcaaccttcttcttcaatgacgattttgagatcaggacctttccactatcatctttggcaattagtcccgaggccgatctaaattgtagaaggttataggccgcgtctaagtttattcaaatggtttggttttctggaggcctccattcggaaacaatacaccgtttgataacccaaagcgcgtagcaaaagatacaacattggtgactcgatcctcttctaaacacccagtgttttcaggtcgactcggggtttgagatcgtcggaggcagcatcacactatcaagccaatacctttggaatattgttacatatgttagaattatcaagtcagtggcatgtatagggacctagttttatgacatttgttattatgatttggccaaatgtattgccctattttgagctattgtatacggtcatgagatgtggctcatattgattatggcttgtaagtctacctagtcatgttatgatttattactt

SEQ ID NO: 3824 - DNA, 580 bp, Gossypium hirsutum
  Clone ID: LIB3825-029-Q6-K6-D2
tgctttctctccgattaccaccgctgcttctgccccttattcttcggtttccgatcggagaatatccgttagattaccgggatttcgtggtctcaagagtaaatcgacgtcggcgtcggtggttccgttgttccgatcggtgatccgggagccgcttatacgcggtcgaggtggccgtgtagtatgtgaagcccaggagaccgctgttgatgtgtcagcagtgaaggaagatgcatggcaatcacttgttcttgattgtgaattgcctgtgctggttgagttttgggctccatggtgtggaccttgccgtatgatacaccccgtagttgacgagctgtcgaaggattacgccgggaagctcaagtgttacaaagttaacaccgacgagtgccccaacattgcaactcaatacggaattcgaagcattccgactgttatgatctttaagaatggggaaaagaaagatgcagtgattggtgctgttcccaaatccaccttgataacctgcattgagagattcttgtagaagtggtaagcaaatatcacttctcttctcttctgtaatttaagctatttctag

SEQ ID NO: 3825 - DNA, 588 bp, Gossypium hirsutum
  Clone ID: LIB3825-029-Q6-K6-D3
cgccagtcctgttggtgttcttgttcttgcgaaggttaaggaaattgttaaagaggtaaatgctggtttggagtgtggtatgggagtggaagattatgatcaatggcaggaaggagatatccttgaggccttcaacacggttcaaaagaagcgaacacttgaagaggcatctgcttcaatggcagccgcactggaaggagtaggagtcgagttgtagaatgacacaagcttcaaatggttttcttgatggaatcaaaattttcatgaaagaggcaaaccaccatgtagtgtgtctactgctgctctggccattgctcaatgtgcattgatataagagattttgcctcgtgcaacttattttggaatgcagcatgttgaggtttgtggacatgcagatttttgccattgttgttttatttttatttaatgtatgctgtatatattaacatctcattccagctttgcatttggaaagactggatagttggttacatattccacaggattcgttgtagaaaataccttggaacacttaacccaaaatggggaaaaggaatatagttggataagtgtgggataatgtcttga

SEQ ID NO: 3826 - DNA, 559 bp, Gossypium hirsutum
  unsure (1)..(559): unsure at all n locations; Clone ID: LIB3825-029-Q6-K6-D4
gnagataacaaagctcatttggcagtcagccatgtaacgtatcagatttctttatatctgacatgataattgcaagcataccttttgatggaaatgctgttgatgataacatctctggaaccgatgcatttcctgatttcaagtgttctgagccaagcatgttgtttgacgtggctgagcaatacatgatattacctttcctcgaggacactgtcaaagccaatgaaataaattatgttaacttgcatgaggaagccttgatggctcaagataatactggtatacatctagcaattggtcagatgagatcgtgtgtagaggactctgatgttaactctgactctgataaagcagatgactttgacccacaatcgtttataaaaagtttaccagaactatctgatgtagtgtcaagtttccggcctgctgcaactgccatggaagctcggagaaggaagcccataactcttgtgcttgatttggatgaaactcttgtccactctactcttgaaccttgtgatgatgctgacttcacctttacagtctttttcaacatgaa

SEQ ID NO: 3827 - DNA, 572 bp, Gossypium hirsutum
  Clone ID: LIB3825-029-Q6-K6-D5
caagctttctcagcttttattttcctcttatttcttaaaaacaaatggcttctttccttactcaagtgtcctcaaacttttccttgtcatctctttgtttcaaatctctttggccgttaggaagctgagtgaagtggtgcaagaccagcctcagctcttgacataccacaatggtccccttctttctggcaaaattactatcaatttgatttggtatggcaagttcaagccttccgagagggctattgtctctgattttgtcacctccctttcctccacggctccatcgcaaagcaaccggccttcggttgcccaatggtggaaaaccactgagaaatactaccacctcacctccaagaaatcttccctttccctgtctttgggaaagcagattcttgacgacaagtattcgcttggcaaatcactcaaaaacaaacaaatcgttgagctagcttcaatgggtgaccaaaagaatgctatcaacgttgttttaacagcatctgatgttgctgttgaagggttctgcatgagccgctgtgggactcatggctctgccttgggctccaccgatg

SEQ ID NO: 3828 - DNA, 81 bp, Gossypium hirsutum
  unsure (1)..(81): unsure at all n locations; Clone ID: LIB3825-029-Q6-K6-D6
naaaaaaaaagnaaaaaaaaaaaaaaaaaaggaaaaagnaaaaaaaaaaaaaaaaaaaaaaaaaagaaaaaaaagaaaaaa

SEQ ID NO: 3829 - DNA, 580 bp, Gossypium hirsutum
  unsure (1)..(580): unsure at all n locations; Clone ID: LIB3825-029-Q6-K6-D8
atccggnaccaggacgatgtaggaggaccgtggcaagaaaggcggtgttccaaagatgcgtatccggactcaaagtttgcgagcgccatatgcaccgtggccgtaaccgttcaagaaagcctgtggaatcacaaactatggcacagtcattatctactgtgacatcattgactgtttctggtagtactaccagtggtggtgggactgggacggcaagcttccagagccttccattacatgcctttggtggtacgcaagtcactgctttggcaaccggtcagtctaattatcatgtggagtcaatcccctatggaatcccgaggaaagattataggtctcaaggaataaaacccgacgcgggtgggcatagtttcatctctgaggctttgggaagcaaccgggacacatggcctctaatgcaatctagagtctcttcatttcctcagtcaaaatccgatggcaacccggtcttactgaatgattaccctcagcattcgtttttcagcgatttcaactcgggagaaactgtgaagcccgagggtcaatctcttcggccgttctttgacgagtggcctaaaac

SEQ ID NO: 3830 - DNA, 588 bp, Gossypium hirsutum
  unsure (1)..(588): unsure at all n locations; Clone ID: LIB3825-029-Q6-K6-D9
gtttgtgttatgagcagtgcattatgttggggagttccattatcagcgcacttggtggttgtgatggggactcaatattatgatgggagggaaaatgctcacacagattacccggttacagatttgttacagatgatgggccatgcgagtcgtcctctacttgataattctggcaaatgtgtcatcctctgtcacgcccctcgtaaagagtattacaagaagttcttgtatgaagcattccctgttgagagccatttgcaccattttctacatgataacttcaatgctgaaattgttgctacagttattgagaacaagcaagatgctgtggattatcttacttggactttcatgtataggaggctcacccaaaatccaaattactacaatctccagggtgtaagtcacaggcatctctctgatcacctttctgagctcgttgagaacacattaaatgatctggaagcaagtaaatgtatcactatagaagatgacatgngatctttctcctttgaatcttggcatgatagcctcttattattacatcagttacactaccattgagcgtttcagttcttccttgacttc

SEQ ID NO: 3831 - DNA, 585 bp, Gossypium hirsutum
  unsure (1)..(585): unsure at all n locations; Clone ID: LIB3825-029-Q6-K6-E1
gcgagccttgcacgagnacagtattaccaggacaacatgagagggaaggtaggtggtggtgggaggatgccaaggccaaggagtgtggtcttcatttaaagggaacctgaaanaagacggtgcagctcaagttaatggaaatggggctaccactngaaagtgacattttcaatagccagagcttggtcacactgagtaggactggaattgagaatttggcaaaattggagagtcggaaagaatcatggattgttgtgctctatgctccatggtgccctttttgccaggcaatggaagcatcgtatgttgaattggctgagaagctggcaggttctggtgtgaaagttgcaaaattcagagctgatggtgaacaaaaggaatactcgaagaacgagttgcagttgggaagcttccccactatacttttcttccccaaacactcagctaagccaataaagtatgcctctgagaagagggatgttgattcattgatggccttcgttaatgccctccgatgaagggattcataaattatttgtccgagttaacaaaaaatcaacttttgagtggtggttcatgctggtt

SEQ ID NO: 3832 - DNA, 580 bp, Gossypium hirsutum
  Clone ID: LIB3825-029-Q6-K6-E10
attgcatgtaatattttcctcttttcttccatctcttctcttttctttttagggttttggtgttaggaggcaatgcagaataattcatcaaagaacaaatgttcatctgcatctcaccagcagatggtggacaatgccaagaaccggctaaattttctccaagaacagttcactgatcttcaagcagctaggaaggaaggtcgagccggtgatgttgcagtgttagaggagcaagtttatcagaatcttcgtgagtggaaagctgagctctgcacaccatccccggcctcttctttattgggtagtcttggatcattctctgatgatataaaccgattgttgcaactgtacgaggaggaagatgatgccactagtccattaaaggagccagctgtgctgaagcctgagattgatgatcaaagcctaaatcccagtactttacctgtaattcccgaggactattttgtgactcatgagccacaagaacaatcatttcaagggtttgatttatgcaaagtttctacctcggctaatgctgacataaattatcaattggattatcatccatttgatttacaac

SEQ ID NO: 3833 - DNA, 263 bp, Gossypium hirsutum
  unsure (1)..(263): unsure at all n locations; Clone ID: LIB3825-029-Q6-K6-E11
ggcatattccttagnanatcaattttcccttcggccttcaacttgcagcccccttgtcttaagctagaagaagacattgaaatgtctcgtctttgtatttttagtctcttatatttgacactccattgatgagctctgattgcaacttgtattgatttaagaaacagaacaagctagtttttttttgttcttttgttggatgtcccattaagttggttctctcgacagctttttaatggaaaatatttcaagacattgtgtat

SEQ ID NO: 3834 - DNA, 365 bp, Gossypium hirsutum
  unsure (1)..(365): unsure at all n locations; Clone ID: LIB3825-029-Q6-K6-E12
gcttttgcganagggagacaaanaaaacaggagaagagaagcaaggagagagcaagaggaagcttggaaacaggaagaagaaaggcaaaggagagcagaagagccgcacaaaggttggagggagagggagaaacaaagaggacaaccagtaggaaaaagaaacggaagaaggtggcgacgagggccctaaccgaagaagggctgcgaagaaagtgtggttgatttagtcttaatccattcgcagatggttttgcagtagtgaataagatctgccctactatgctatcaagtctaggttattagattccatgtttagcgtctgtgaaaagctttctaaatctatggtttttttgggtcttgatctt

SEQ ID NO: 3835 - DNA, 568 bp, Gossypium hirsutum
  Clone ID: LIB3825-029-Q6-K6-E2
cgcaaagcgcaattgaggataagactagaaaacttttgcgattgcgatctcaggttatcttctccaataaattagtggttgcatttttctttttcttgcaagaccttttatattgaactgcaggaatggctgaggagggtcataaggtcaccttgaatgtgtatgacttgagtcagggactggctcggcagctgtcgatgaccttattagggaaggttattgagggaatatggcacactggtatagtagtttatggtaatgaatactatttcggtggaggaatccaacacattcctgctgggacagcaccatacgggagaccaattaaagtgatcgatctaggtgtcactcatgtgcctaaagatttgtttgagatgtatttacaggagattagtcctcgttacacagccgagacctacagtttgcttacccacaattgcaacaacttcagcaatgaagttgcccaatttctagttggtactaacattccagactatattttgcaacttccaaatgaagttatgagcagtccaatgggttcacttttaatgcccatgatacaaaatct

SEQ ID NO: 3836 - DNA, 582 bp, Gossypium hirsutum
  unsure (1)..(582): unsure at all n locations; Clone ID: LIB3825-029-Q6-K6-E4
tccgaagnatggnggttgngatgtcactaatgcacttgtgaggcttcctttatcgagtacttcaagagcccatcacgaacctgtcgacgggttggtgaaacactcgctattcagctccagaacaacgccgttgcggttgccgcagcagacccggagacagcaacatggaggagggatgttggtggttgaagctaaagggaagaaaggaatggcggctcgtcaattccaaaggcctccacctcctcctttgcctaagattgaagacgatggcaaccctcggtttgttatcttcatacgcatggcaaatgttaatctttggtacccacttagtcttataactggtggcaccactgctaaaatcatggttgcagcaaaggacaatttcctcggaaaatacatctacaaagatacaattgctagaaatctcgcagcagttatttacagagatgagaaggagatacaaaagacagcatttaaacaattccgagttttgcaatctgctactgagttcagatatggctacaaacttgttgaaaacggtaatgtgaaagctgcactttctaccaatgatgttattgagct

SEQ ID NO: 3837 - DNA, 562 bp, Gossypium hirsutum
  unsure (1)..(562): unsure at all n locations; Clone ID: LIB3825-029-Q6-K6-E5
cccagccgtccganatttccagtgtcctttttttaaaagaaaaaaaattatctgttcttgctttggagatgcctggaagtatagaacctttagatttgtgtaatgttcaagttccgtactatttcaggtgcccaatctcactcgaattaatgcgtgacccggtaactgttagcaccggccagacctatgaccgaaccagtatcgagtcatgggctgctaccggcaacaccacttgtccggtcacacgagcaccgctctcggatttcactctcatccctaaccatacacttcgccggcttatacaagattggtgcgttgcgaaccgggcttttggtattgaacgaattcccacgcctaaacaaccggctgaaccgggtatggttaggtcgttgttgaaccaggcttcaacggtttcgaatccgttttcggttcgtcattctgctttggttcgactcaaggggttggctcgggagtcggagaagaattggaacgtgatttgttctcatgaggctagggagatactgatgaggattttgttttccgatgtgagttccggttcgtc

SEQ ID NO: 3838 - DNA, 590 bp, Gossypium hirsutum
  unsure (1)..(590): unsure at all n locations; Clone ID: LIB3825-029-Q6-K6-E6
cggncgcgtggggtttgctgagaggcaaagacactaccatggaaaagctggtgagtacaaagactatgcatctgagaaagcataccagagtgctgataaggccaaacagatgaaggatactacgaaggaaaagctgctgaatatacagattacgccgctcagaaggcaaaggagacgaaaaactcagcagcccagcggacaaaagaaaccaaagacactgtaacaggtaaagcttctgagtatacagattatgctgcccagaaagctaaggacgcaaaggacaccacagcaaaaaaggcttccgagtatacagactatgcagcacagcaaactaagggtgcaaaggatgctacaacggggaaagcgactgaatataaggattatacagccgagaaagccaaggaggcaagagataccacagcccaaaaggcttctgagtatacagattatgctgcccagaaagctaaggacgcaaaagacaccactgcacagaaggcttccgagtatacaggctatgcagcacagaaaactaaggatgcaaaggatgctacaatggnggaaagcgactgaatataaggattatacagccc

SEQ ID NO: 3839 - DNA, 514 bp, Gossypium hirsutum
  unsure (1)..(514): unsure at all n locations; Clone ID: LIB3825-029-Q6-K6-E7
cggccgcgtgggcggccgcgtgggcggacgcgtgggcggacgcgtgggttcatctaatggggataactccactgtcactgctngaagnatgattaacaagatccttctgctgtggtgagtgctatgtaacttgatgtttaaggggcacaggtcgaactttgttgtaataattgagttcgtttgacaactgtatatatggttcattgccgatcattatgtaactgcagaattgcgaaatacagcctacatggtgtctgtaggaagattagaaatgatttcttccttttaaaaaaaaaaaaaaaaaaaaaaaaaaaaaaaaaaaaaaaaaaaaaaaaaaaaaaaaaaaaaaaaaaaaaaaaaaaaaaaaaaaaaaaaaaaaaaaaaaaaaanagggggngccanttaaaaaaaaacaaaaaagggcgggcccctttttaggaaaacccaaattttctcttcccggggcccccccaaaaattaaattttttttgtagggggcccctctaaaataaat

SEQ ID NO: 3840 - DNA, 578 bp, Gossypium hirsutum
  unsure (1)..(578): unsure at all n locations; Clone ID: LIB3825-029-Q6-K6-E8
tccgagggaaaaaggtagccgtagcttagtattttctgctccntatccctgagtgacctccaaagctcttgactgttgcgttttcatttcatttgcaatggcggatgaggaacctgttgatcaaaagaagttcttgaagagggttgcaagcctaatgtgtgaaacaacttcgtgcttacgaggcatgtgttaagagaattgaaggtgacgaaagtggccacaagcattgcactggtcaatattttgattattgggcttgcattgataaatgtgttgcacagactctattctcgaaattgaaataattgagggccaatgttgtgtaacaatagcatcatgtggagctgttttgagttgaaaagcgagttaattgtttcataaactattggtatccttgtaccttagacatgagatggtgcctgctgcgtggctaatctgagcactggtaaacatttttgttattgttattgttattgtggaaacgtttactcattgtcaataaatttggttcctagtagacattcccgtgggcgacagagttggaacgatctttgcttacatttcccactcttcatttg

SEQ ID NO: 3841 - DNA, 605 bp, Gossypium hirsutum
  unsure (1)..(605): unsure at all n locations; Clone ID: LIB3825-029-Q6-K6-E9
gttctgcctcaaanatctcgctgtggcagagcttcgtacaatggtgcattcgctgtttttagaatcatgtgcttctatagagctcgcttcacgcctactttttgttgtcttaactgtgtgtgttagtcatgaggctcagttcagtgggagtaagagaccaagaggtgaagaaagttatcctcctgatgagggcgttgaggagtcacaggcacaatctgaagctgaaagacattaaacctagaaaagcaaaaaaacaagggcctgtagctgcgtttgattcttatgtgctggctgctgtctgtgctcttgcctgcgagcttcagttgttccccttggttacaagaggaaatactcattcaactgctaaagatgttcaagctatggccaaccctgcaaaagtaaatggatcttctatagagtatggacatggtattgactctgctattcatcatactcacagaatcttagcaattttagaggcacttttttcgctgaagccatcttctgttggcacctcatggggttatagttcaaatgaaatagttgctgcagctatggttgctgctcatatttctgaactatttagacggtcaaaggcttgcatg

SEQ ID NO: 3842 - DNA, 565 bp, Gossypium hirsutum
  Clone ID: LIB3825-029-Q6-K6-F1
cccagcgtccgtgattttttcttctcatagcaaaaactcctttttgctcttctagggttttgacctcaacaaaacacgccgtcgccagaccaccaccatatcaggtgaccggtaacgcgcgaaggctcccgtttcagacgaagaacctgatcgacgaaggctaaacaccgaggtaagtaccccttttctttttatttatttcttttaaaatagatttgaaaccaaaaataagaaaaaagatcgaaagaaaaaaaaaagaaaagagcatagaatccaaaaacaaccttttttttttgtttttgcttttgatttctcgtatgcgtgtgaaaataccatcttttttgtcttccaaaaatcccccaaatacaatcggttccccctatttattttgctaccctcttctatttgttgcttgctgttttctttctttactttgcttgtctctctgctattttcctgtttcgtttgctggtctaggcaaaagtgatgggacgggttggtgcaaggacaagcagaggggtcaggcctcgaggccaggcgcgggcggtgcactcgaggcacgtgg

SEQ ID NO: 3843 - DNA, 401 bp, Gossypium hirsutum
  Clone ID: LIB3825-029-Q6-K6-F11
gcgttctgaattaccttcggttctccatttatagtaggatatcatcatcataacgacgaggagaagccatcaatgcttgtgaatcatcataatataagtggaaagaaccaaagccaatggcatgttacagatagaatgagtagtgctgcaatggctcaaataccttcatcaatggcggcatcatcttctagcttttcaaacgatgatttcttcactgaggccaattgggatgagctgaaatcagttgtggagtttgctcttgaaccctttcctatgtaaatatatataatatgctttatagggttgcacttttttttttaattttgatgatgagggaatattattaattaataattagttgctaattttatatttaataatggaatattttatagagactg

SEQ ID NO: 3844 - DNA, 536 bp, Gossypium hirsutum
  Clone ID: LIB3825-029-Q6-K6-F12
gcgttcggaaaaggaaacagcaaaagccccaggaaaaagagcaattcgatttggtaggaggtttcctctttggatgggaaagaatgcaagttttgagaggcggaattcgacaatcgaagaggatcaacgacaatccggagagctctgcttccttagttccgactgctcggaatgctgctcctaatagaggtagaggtagagggagaggtaggggtagagggcgtggaggaatgaatcctgaagaaaatcaaaagcttgttggtcccagtgcttgtggccggggttgcaatggaataaacttgccagtgagacaggtcgttgaaaacagtgcggaaaaaccggttgctgtcaaggaagaaggaagcactagttcactacctgaaagggtacaacttggtaactctcctgtgtacaagttagacagaaaactcggtaaagggggtttcgggcaggtttttgttggaagaagaaatctggtgggacggggtgcagtggaccagatgctttcgaggtcgcgttgaagtttgagcatcaaa

SEQ ID NO: 3845 - DNA, 306 bp, Gossypium hirsutum
  Clone ID: LIB3825-029-Q6-K6-F2
gctggtcattagcttctccatatagccgcacacccttgaattacaattcactaggccgtctctctacaacgtctcagatggcaaaaccctggtgttacaccaacttaattgtcttgcatacatccccctttctccagctggacgccatactcatacaaaggcatatcaccagatcgcccatcccaactattacgcactctgtatggataatgggacacccaactgtatgtttagaggaagcgctgcagtcagtggatggttacttctcacaagagaccgatccactactacaaaaaactagcgccc

SEQ ID NO: 3846 - DNA, 589 bp, Gossypium hirsutum
  unsure (1)..(589): unsure at all n locations; Clone ID: LIB3825-029-Q6-K6-F3
cttacgagcatgcaaaanagctgtggtcggtaagagccatgagagggaaggagtttacggaggtggagggaagacatgggggactactgatgaaggtgataatgcgaaggagtttgctgagaggcaaagacactaccatggaaaagctggtgagtacaaagactatgcatctgagaaagcataccagagtgctgataaggccaaacagatgaaggatactacgaaggaaaagctgctgaatatacagattacgccgctcagaaggcaaaggagacgaaaaactcagcagcccagcggacaaaagaaaccaaagacactgtaacaggtaaagcttctgagtatacagattatgctgcccagaaagctaaggacgcaaaggacaccacagcaaaaaaggcttccgagtatacagactatgcagcacagcaaactaagggtgcaaaggatgctacaacggggaaagcgactgaatataaggattatacagccgagaaagccaaggaggcaagagataccacagcccaaaaggcttctgagtatacagattatgctgcccagaaagctaaggacgcaaaagacaccactgcac

SEQ ID NO: 3847 - DNA, 562 bp, Gossypium hirsutum
  unsure (1)..(562): unsure at all n locations; Clone ID: LIB3825-029-Q6-K6-F4
tgcaaaatgatgatcggngnatcaatccaaccaaatcccaccatcaaaatccccgtaggggacccattcaacgatccgacggctagctttcactccgttaactttaactacaacaatgcagtcagtagtccttgccccgtcgattacctcgggtctctccaccgttacctaccgtcaaacgactacgagtccgattcgctgagtgatgattcggacttacctgttgatgcattctcatgcgaccatttccggatgtacgagttcaaggtgaggaggtgtgctcgtggaaggtcacatgactggactgagtgtccgtacgctcaccctggtgagaaggcccgaagaagggacccgagaaagttccattactctggaactgcttgccccgattttcgcaagggaagctgtaagaaaggcgattcatgtgaattcgctcacggcgtttttgagtgttggctccaccctgctcgctaccgtactcagccttgcaaagacggtaccagttgtcaaagaagggtttgttttttcgctcacacaccggagcagcttcgggtgttgccgc

SEQ ID NO: 3848 - DNA, 596 bp, Gossypium hirsutum
  Clone ID: LIB3825-029-Q6-K6-F5
gtcgacccagcgtccgtgttatttctaaccattctaaacagaaaaccctagccttaaaatccctaaaattgctacatcgtttcgtttctagttctttttcgcaatggatggcgaagacgacgccccgaatcattgatggaggagatgtacgcgaacggcatcgagggcgttgacgatgcgccgtcatcctcaacttcgacaacgatccggaagaaccggcccatcattagcggcgagcagctagacatcgaggcctacgctgcgctttactcgggccgtaccaagatcgtgcggctcatattcttagctgaccactgcgacaattcagggatgcaattggaggccctaaggatggcttacgatgagctcaagaagggggagaacactcagctattccgtgaagtggtccagaagatcgacggtcgactgggtcccaactattcgatggatgccacgtggtgcgctatggttgatcgaaaagccgaccaaaggaaagataaactcgagagcgaactcaatgcctacaggacgaatttaatcaaagaaagtataagaatgggatacaatgattttggagatttttactatgctcatgg

SEQ ID NO: 3849 - DNA, 588 bp, Gossypium hirsutum
  Clone ID: LIB3825-029-Q6-K6-F6
gtttctgcacaattcctttattgagttatgctctcaagagttcaaaactcatctaggaaggcaatagtttgtgttgaacagctttctaagatattgcaaacaggtctaaaaacaaagaagaaggaggctgtcaaaaggatatgcagttggcaatatacaaactgcatcaatctttgggcttcatttatatcagcaaacgtgaaagattatgatcttcagccattgttatacatgatcattcagattatcaatggagtagctgtcttgtttcctggaccaagatatttacctctaagaattaaatgcattcagtggttgaataacctttctagtgcaagtggggttttcattcctgttgcatcatttgctatggatattttggaatataaaactgggaaggacaatgggaaacctggaaaagatttcaacttctcttccactataaagttgccaaaacattggctaaaatctcgtaagtttcaggacaagtgtgtttcatctgtcattgaattacttgcaacgcactttgctcaatggagctgccacataactttccctgagctggctactatacccctgatctgcctt

SEQ ID NO: 3850 - DNA, 579 bp, Gossypium hirsutum
  unsure (1)..(579): unsure at all n locations; Clone ID: LIB3825-029-Q6-K6-F7
ctttcataaaattgaagagcagtcaatgaaggatgctgctgcctctgctaaggccggcatggagaaggccaaggcctccatgcaggnnaaaaggtggacnncaaatgaanacaagnannaccctaatgagnaaanagatggcgagggaaaggaaagaagagagacaagaagatgcagagctgaggaaacaagaggcccgccatcataacgccacagctggccatgctggtggtggtggtattggtggcactggctacaccacagctgggtacaacataggcgacactggtggctatggcggtaccggtggacatgacaaccgtgggtaccccaccgcaggtagtgggtatgatacaggcaggcaagatgacctcagcagtatggggtttggcggagatacagagggtgcttacggtacaacggggaaccaagacttcccaaatgcggcgtctaacaatgctgggactagaaggaacacccgcggaggtacccaggatgatccttattatcgatcctattaaatgaaaggagcgagtttttgtgctctgctactgccttgagtctgtgtttgttgtttga

SEQ ID NO: 3851 - DNA, 564 bp, Gossypium hirsutum
  unsure (1)..(564): unsure at all n locations; Clone ID: LIB3825-029-Q6-K6-F8
agnaatttaaggnaaaaaaaaaaatcattgcaatttcctcctccttctctctgtccctgcaacaatcgttcgacgatctataaaccttctctcctcaggattttagggtttttttcattttctactgtaaactccaaaatgcataaactgggcagaggtcatcgggacaaagtccagcagttcatgactataactggagcgagtgaaaaacttgctcttcaagctttgaaggcgagtgattggcatcttgaaggagcttttgattttttctatggccagcagtctcatattaaaagttataccgatactacatatttggaagaactttataaaagatataaagatccttacacagatatgatactgcctgatggtattactcttctatgcaacgacctgcaggtggatccccaagatattgttatgttagttgtttcatggcacatgaaggcctccaccatgtgtgaatattccaaggaggaatttttcactgggttgcaggcactagggatagattctttggagaagtttcgtgagaggataccatttatgcgttctgagctg

SEQ ID NO: 3852 - DNA, 555 bp, Gossypium hirsutum
  unsure (1)..(555): unsure at all n locations; Clone ID: LIB3825-029-Q6-K6-G10
tgnatctcaaattagattcacttgcagtactggtgatgctatggggatgaacatggtttccaagggagttcaaaacgttttagatttccttcaaacggatttccctgacatggatgtcatcggcatttccggaaatttctgctctgacaaaaagccagctgctgtaaactggattgaaggacgaggcaagtctgttgtctgcgaggccatcattgagggtgatgtggtgaggaaggtcttgaagacttgtgtggaatctcttgtggagctcaacatgcttaagaaccttactggctctgccatggccggagctttgggtggatttaatgcccatgccagtaacatcgtgactgcaatctacatagctactggccaagacccggctcaaaatgttgagagctctcattgcatcactatgatggaagccgttaatgatggaaaggaccttcacatctctgtcacaatgccttctgttgaggttggcaccgttggtggtggaactcagcttgcatctcagtcagcctgtttgaacttgctcggcgttaagggtgcaag

SEQ ID NO: 3853 - DNA, 593 bp, Gossypium hirsutum
  unsure (1)..(593): unsure at all n locations; Clone ID: LIB3825-029-Q6-K6-G12
tctcgtgaangggagctttgatcaacaaaattccatcaatggcgggggtttctttgaagtgtggggactgtggggctctgttgaaatcggtggaggaagcccaagaacatgccgaactcacctcccattccaacttctcagagtccactgaagctgttctcaatcttgtttgctcttcttgtggcaagccatgccgatccaaaatcgaaagtgatttgcatacaaaaagaacggggcatacagagtttattgataagactttggaggcagtaataccaatcagtttggaggttccaaaggtagctaaggagtcagaggaggctattgctgcaggtagcaccggtgagcctgaagagatggttgttccagaggttgacaaaaaactgcttgaagaactggaagcaatgggtttccctacagcacgagcaacccgtgcactccatttttctggtaatacaagtcttgaggctgctgtgaactgggtagttgaacatgaggctgacccggacatagatcagatgcccatggtacctgtcaacagacatgttgaggcatctaaaccttctcttacagcggaagagatgaaactcaaa

SEQ ID NO: 3854 - DNA, 577 bp, Gossypium hirsutum
  Clone ID: LIB3825-029-Q6-K6-G3
ctcctcccagcgccgccttctttcctttcttccattttgcccttcctccccctcgattcccccattcctccctcgtttcctcgagggtatccccgtcttttcgcacccaagcttcagccgccaccgcgaccatgggtgacgctcccgacgttggtatggacgctgtccaaagacgcctcatgtttgaggatgaatgtattttagtggacgagagtgataatgttgttggccatgaatcgaagtacaactgtcatttgtgggaaaagattctaactggaaagatgctgcatagagcattcagtgtatttttgtttaacacaaaatatgagttgctccttcagcaacgatctgcaacaaaggtaacattccctcgtgtctggacaaacacctgttgcagccatcctttatatcgtgaatctgagcttatttcggagaatcatcttggggtgaggaatgctgcccaaaggaagcttttggatgagctcggtattcctcctgaagatgttcctgttgatcagttcgtcccactgagccgcatgctgtacaaggcaccttctgacggcaagtggggcgagca

SEQ ID NO: 3855 - DNA, 570 bp, Gossypium hirsutum
  Clone ID: LIB3825-029-Q6-K6-G4
gctgctgctgctgctgctgctcctagtgtttttttgcctattgaaaaatttccagtgttgatttcagtagccatcgaaaccctaattcctctttcaccatgaactgttcaatctccggtgaggtgccggaggagcccgttgtctccacgaaatccggcttgctctacgagaaacgcttaatcgagcgtcatatttcggattatgggaagtgtccagttactggggaggcacttactatggacgacattgtcccggtcaaaaccggcaagattgtgaagcccagatctttaacagcagctagcattcctgggatgcttggaatgtttcagaatgaatgggatgctttaatgctatccaattttgcattggagcagcagcttcataccgccaggcaagagttaagtcatgcactctaccagcatgatgctgcctgccgtgtgattgcaagacttaaaaaggaaagggacgaagccaggtcattgctcgcacaggctgagaggcaggcaccgttgcctgcatcagcagctactgccaatgtttctgctctcagcaatggaaagagagctgcag

SEQ ID NO: 3856 - DNA, 584 bp, Gossypium hirsutum
  Clone ID: LIB3825-029-Q6-K6-G5
ccgccgcgtgcgcggccgcgtgggctcagctgctccgtcttatataggcaactactatggctgccagattgtgtggtctatacgttaggccgtaaggtctcaaagtgggagtgtgaatatactcaaaggggaacaaaagctgacgagatctttacatgacaaaaaactggaccaaggaaaaagagagaaaaacttgcacgcagaggacccactccagaagcaaaacgcgcctgctggttcagggggtgctgccaccgctggtagcactacctttactgggcaacatttgctgaaaagttaacgtaagtccctaactacgtatttcttgctggtgttgcatcacctcggtgctgccgcgggatggtgtctcaactctaaagacagcaagcaagatgactgaaatgggggttaatgcgattggattctataggtggaacatggcatgatatggataaccccactgccctgttgctgtgcatagcaactgaaaaactaaacagactctcgcaagcaggtcatcatgatgatctgataacatctaggctatgaatcaataggggccttgtgtacctcaatgccaatga

SEQ ID NO: 3857 - DNA, 585 bp, Gossypium hirsutum
  unsure (1)..(585): unsure at all n locations; Clone ID: LIB3825-029-Q6-K6-G6
cggncgcgtggggtttgctgagaggcaaagncactaccatggaaaagctggtgagtacaaagactatgcatctgagaaagctaccagagtgctgataaggccaaacagatgaaggatactacgaaggaaaaggctgctgaatatacagattacgccgctcagaaggcaaaggagacgaaaaactcagcagcccagcggacaaaagaaaccaaagacactgtaacaggtaaagcttctgagtatacagattatgctgcccagaaagctaaggacgcaaaggacaccacagcaaaaaaggcttccgagtatacagactatgcagcacagcaaactaagggtgcaaaggatgctacaacggggaaagcgactgaatataaggattatacagccgagaaagccaaggaggcaagagataccacagcccaaaaggcttctgagtatacagattatgctgcccagaaagctaaggacgcaaaagacaccactgcacagaaggcttccgagtatacaggctatgcagcacagaaaactaaggatgcaaaggatgctacaatggnggaaagcgactgaatataaggattatac

SEQ ID NO: 3858 - DNA, 578 bp, Gossypium hirsutum
  Clone ID: LIB3825-029-Q6-K6-G7
gctttctgtatttgggtgttactttcatcttgtctattggagcatatttgggtttcttccgtagacagataaaaagaaaattcaatattaggggcaatgatagcttattggatgactgcgtctaccatctgatctgtccttgctgtacactatctcaggagtctagaacattggagatgaacaacgtccaagatggtacatggcatggtcgtggtgatatatgcataggaagctatgctgaaggcaccaagccgctctttgggctacaccctcctcctaccatgtcaattaagacccctgaaccctgcagcatgcaaaatggtttaaatggcgacgataatggtcaaacatgagaagcttactcaaaagatgtaggccaatattaggtgtgaaagagaaattcaaacatccgagtcaatttattctttgatggagcgatgttgcagaggtggatttagagagcaaagcttgtgcagcttggatcattgaatcctgcaggaaggagatccagaagcataacagtgcttccatgtgcatagaaggaaactactttgtatcagtttgggggagttttagga

SEQ ID NO: 3859 - DNA, 592 bp, Gossypium hirsutum
  Clone ID: LIB3825-029-Q6-K6-G8
tccgctttctcttccttggttccccatcctcatcctggatcgccagtctttgatccctcgaagaatcgattaatcggcggcggcggcggggtttacacttgtgctggatttgaagttggtttttgttggtggaaaacaaagggagaaacattaataaaatttgctaacttttattcatattttttaaaattttggggaggttaaggtttttgttaaaaaggggatttgcacaaaaattgagcggttttgaattttagagatgttgaccttaaccggtgggctttgaactactatggaactggttgttacatgacatcaagatgacgctttacattggtcgcgaagcttcaaagttgtggaagagaatttgtgcagagacaactacagagatcaaccttcttctagacaattggaaataccttcttgctggtctaatttttcagtatattcatggtctagctgcccgaggagttcattatttacaccggccagggccaacacttcaggatcttggttttttcattcttccagagcttgggcaagataaaggctatatcagtgagacagtgttcacctgtgtctttttatcatt

SEQ ID NO: 3860 - DNA, 564 bp, Gossypium hirsutum
  unsure (1)..(564): unsure at all n locations; Clone ID: LIB3825-029-Q6-K6-H1
ggttatttcggtttcatttttgtgattttttgtttttgagacgttgcttgagtactacaaaccctgcttgaatttttgaattagttgtgtattttgtgatatgccattgaagagagcttgttgtttttgttgttangatgatggaaaataaatatatgttgttagattttcatgttttaattaataatttttgataaaaaatgtgtattaaggactaaattaagaaaagtgtaaattgaggggtcaaaatgtgaaataaatgaaatgtgtagacttagatggactataggaatattcggccctggcatgataaatgcaaattttgtgtattttgtgttttatgcaatagggactaaattgtaaaaagtgtaaaatgtcaggggcaaaatggtaattttcctatttatgtgtttttggattaaattaaatggaattatgtttaaataagtttaatttcaatatgtttagatcatgaaccaaagaaaatggatttgngatcgagggaaaaacaaaaataatcgaatagtcgtctattccgtccgtcgatatccgaggtaagtttat

SEQ ID NO: 3861 - DNA, 567 bp, Gossypium hirsutum
  Clone ID: LIB3825-029-Q6-K6-H10
gtcactgtcttctctgaccctttccccatctctccctcttatttcatggcgatcgccgctgcttcttccttctccgtcggttcttcccagtgtcatttatgtcaagtagaaggggcttattactcaccattagttggtgtcaacaatggttggatcagacatacatttgatggctgcaaagtgacagactcgcccggcataagtgtcagatgcaggaacctgttttttggatcaacacaatttcattggttgtctatgggacgtgatctttccctttcaaaagttttagttgccgcggattattctgattctgttcctaatccatcgagttatgaaagcaaccaaggttatcaccctcttgaagaacttaaagtttccaaaaggatccaggagatacaactgtcatcagctgaaatagcaaggacaaccgtcgaggctaacagcagtgctttgctagtctttcctgggacagtacattctgaacctcatgaacagatttcatgggctgagtttccatatgttgttgatgattatggagatatcttttttgaaattttggatgatgag

SEQ ID NO: 3862 - DNA, 530 bp, Gossypium hirsutum
  Clone ID: LIB3825-029-Q6-K6-H12
gaggagttacaatcagtttcggatctcattaacatttcgaacaaaaagtggaatacggatttgatttacaataccttttcagcagaaattgcaaaaaaaattttacagatcccacttgcagagacgggtcatgaagatattcaagtctggaaaggagaactgtccagggaattttcagttcgcagcgcctataaactattacaaggggctaatccagatctagtaatttcttaatacaaacagaaactacagatttctataaaaaattatgtggtttacagcttccttcaaaaatcactataattatttggcgaatctcttgggatttcatccctcatctagctaatctcagatacagaagagtttctgcaagtgacagatgtccccgttgtcgttcttgggttgaaaatagtctttatattttctgtcaatgccgtgggttttcaagagaggaactgcgaaacaatttcgccttttctgtattgctttatggctaatctagttttccagaattcaacgagaataacaat

SEQ ID NO: 3863 - DNA, 578 bp, Gossypium hirsutum
  unsure (1)..(578): unsure at all n locations; Clone ID: LIB3825-029-Q6-K6-H2
gtcgtatcagnagtttttctcttcttctctgaaattcccttgctatcgttctctggaagaatttttttgagatggcccgtacgaagcaaactgctcgtaaatccaccggcggcaaggctccaaggaagcagcttgccactaaggctgctcgcaagtcggcaccgacaaccggaggcgtgaaaaagcctcaccgatatcgccctggaactgtagctctgcgtgaaatccggaagtaccagaaaagtctgaactcctcatcaggaaactgcctttccaaaggctcgttcgtgaaattgcccaagactttaagaccgatctgcgtttccagagccatgctgttttggcgttgcaagaggcggcagaggcataccttgttggattgttcgaagataccaacctgtgcgccattcatgctaagcgtgttacaatcatgcccaaggacattcaactagctaggaggattcgtggtgaaagggcttaataaattcacctctctgatttgctgatttgttgctaggatatttgctttctttgatgtttaatgaattcaggatggtctgatgctgtaaaaacctata

SEQ ID NO: 3864 - DNA, 573 bp, Gossypium hirsutum
  unsure (1)..(573): unsure at all n locations; Clone ID: LIB3825-029-Q6-K6-H4
ctgntgacttacgttcttggnaaggctgggtggaatcccgtctgaggcagctgactttngatgattgagcgagacacttatggaaagttgcagtgccatccttatgctcaggattatgtagatgcctccaagccatgtgcccattgtgcattttttatgggtttacaaagngaaacatggnagaaatagttcaagaaggtcaacagtttgatattcgtgggtcagttgatgagttccgccattcaataagtatgtacatgttttggaagcctgggatggaaatctatgtatcccatgtccgtagaaagcagcttccggcttatgtttacccagatggctgtaaacgttctcggaatctacaccttactccccagcagccttcttacaaaatatctcgcaacaatggtgttgcatatcaagctgaatctggtgagaaatgccttaaaaggaagaaggatcccgatggagaaaatagtgagcaaagtaggctggataaacggaggagtcctgataggaatcaatcagtttctcccgagattgttagtcgcaagcttggcagcgcttgcacaggtt

SEQ ID NO: 3865 - DNA, 484 bp, Gossypium hirsutum
  Clone ID: LIB3825-029-Q6-K6-H6
ctacctcgctgtgtctgtgttccctggctggcggctacatatatgtgtgactcttacccatcctcttagacacttgaggtgtcaaacgaacttgcggggcgtagatgaccgtgtcaagctacaaatgatgcatgaaaaatttggcacctgaaaaacacagcgttagcagggtccactccatctttccttacatgtaccacatccttactgatctacatcactctctacccagagaaagtaacattgcaaattactcatcaacggaaaatatccatctatactattcgagccaccctacctctactagactgcacgcgttatcatactaattctttcacgcttattaggttacgtgtttgtggcaaaatcatatcccaatgggagaacatttctctttttatatgcagactttttacaaccagtgtcatcatctctaacgctgttagtgattatcctcctattgtcaatacaaagcagatttttt

SEQ ID NO: 3866 - DNA, 562 bp, Gossypium hirsutum
  Clone ID: LIB3825-029-Q6-K6-H7
ggacgcgtgggtacgcatagcaactggtcagtctgaagattggattcgggaattttctcacgggaagcagctgaaaggtttggtgatgaaaatgaaaggtcaagggccatgactgaaatgaatggtgtgtattgctcaagtagacctatgagaattggtgttgctactcccaagaaagcatccggatatcggcaacagtattcttcacaagctgtggtattggctggtggacatgcatcaaatggtgctgtagcccaaggttctcaatacgataatgattcaaataatgcaaccatatttgttggaggacttgactccgatgttagtgatgatgatctcagacaacccttttcccagtttggtgagatcgtctctgtgaaaataccacctggaaaaggttgcgggtttgtgcaatttgtgaacaggaagaacgctgaggaagcaatccagagtttgaacgggacaaccatagggaagcagactgtccgtctttcttggggtcgcaatgtaaacaaacagtggagagccgattcgggtaaccagtggaatggaggatattatc

SEQ ID NO: 3867 - DNA, 570 bp, Gossypium hirsutum
  Clone ID: LIB3825-029-Q6-K6-H8
cttcattttgtctcaaaaagaaaaaagccaggcctcaccattggagaccagtgcccaaccttgaattgaaaccacccacggacattcaaccttcatgactacttcaacaatgggtggaccatcattttctctcatccttctgatttcactcctgtgtgtacaacggaactggggaagatggcggcttacctgcctgagtttgaaaaacgagggattaagcttctaggtttctcttgcgacgatgtgcagtcacacaaggagtggatcaaagatgttgaagcctacacgcctgggtgcaaggtggcatacccaatcgtggcagatcccaggagagagatcattaagcaacttaacatggtggacccaaatgaaagagactcttcagggagcgagctcccatccagagctctgcatatcgtgggctctgataacaagcaaccacagggtcgaaacatggatgaagtgatgcgggcagtggactcactgcagaagacatcgcagtacaaagtggcgacaccggcgaactggaaacaagggagccggtagtgatttcgccatcggtgcccaacg

SEQ ID NO: 3868 - DNA, 598 bp, Gossypium hirsutum
  Clone ID: LIB3825-029-Q6-N6-A1
tcgcgatctagaactcgcgtacgcgtgcgcctacccggacacttcggaccgacccctgaatgcgtgccagctcctgctatcgtgccacctattactattgggagtaatcatagacctagctgtaatctgggtgatagctgtatcctgtgacaatattcacactaacattcacaaccgcacacatcatacgagaagcctgcatagcctaatgagccagctaacccacatgagtgacctaactcacactgaccgctttgcactcactaaaccttttccaccagctaaatcaatgaatccagctacactcatgaataggccaactcgctattagacgccattggcgtattgctctccaccagggagactgtctacaccagatagaccttcaccagctgatcgtcatagacctgctgcacgcgatacacgctcattaagcccaccacgctaaaatgctccagatgcgaaaaactgcgggatataacataacctggctatataacatgagcatcctactacctagatatatgccactaccgacatactccgatcaacaatcacgcgcatctcgcccatggccctcattgcgcccagcaccatc

SEQ ID NO: 3869 - DNA, 531 bp, Gossypium hirsutum
  Clone ID: LIB3825-029-Q6-N6-A11
gtaaaacttaaacatattagtattattattattccattgactttagactatatttcatccatatactttaccctatgtaccgggtttctgacatcacttgtatttttggttattttcaactgttgtcttgattcaacgcgtgacatccatagcatgaaacactagagagatatttttttgcaggatcctttaggttaagaccaggcccacaatcctaatgcctcctgctctgtggttgcgaacacatcggagaagtaactcccgcaattatcactgccatcctcatcttccgactgaaccccatcgaaagggccaatgcctctggagtattcatcgcttggaaagtaggaattgccgctgtccaccagctgtggggcatcctcatccaccaccgcgcttccgacactgccgctactaagacggtcctccaccttcatactgaattggagggcggaggccatctcagctgctaacccttcatccttttcacctgctattgcttctgttgccacatctttggcttgtagtttt

SEQ ID NO: 3870 - DNA, 522 bp, Gossypium hirsutum
  Clone ID: LIB3825-029-Q6-N6-A12
gaaatgaggatattacacgacactaaaacgaatctgaaagggtcactacaattagttactaacaaatcaaattgaaaaacctcactttcatacaacatactacacaccagttcttccccaaagcagagggcctaaccaacactttcaaatgccctgccaaacccaaaaacatatgtccccatattacacatgattgaaacaagaaaacggaaccttagcagtcaatcccttttccatatcctacattcaatatcaccacattggtcatgtcgggcggctttcggttgtcaaattgttgctactgctgcctccaccgactcggtttggttcccccactctagctgccaaagcaagtacttcaggtgacatttcccatcgaccactttttctaccccagctagaccgcctgggatgtataccaaaacggtcacctatgtcatctactgtacttctaatatctggagataaatctcctaattcaccctccttaacatttacacggtcacttatgagttgcccttc

SEQ ID NO: 3871 - DNA, 506 bp, Gossypium hirsutum
  Clone ID: LIB3825-029-Q6-N6-A2
gtgttttttttttttttttttttttttttttttttttttttttttttttttttttttttttttttttttttttttttttttttttttttttttttggggggtttggaaccggggggaaggggggtctcccccccaagccccaggggggagaggggagggggcctgggccccgggttcccggtttccaacatttagggggggccgccaacaggaaccccttttaacaaacctggggcccccctccttctatggggggggggatccccccaaccggggcgggggaggttccacccccggggtttccgggcggaaccggccagttttagataccggcttcgccttcccctttggctccggggccggggccccccgggaaagggaaaggggggcctccaaatcttcccccctttcctttccgggtcccttacccagggtcccactttgggggggggggccccccaaaaagagcgggacccccttttttggggggcttttttcacccccca

SEQ ID NO: 3872 - DNA, 539 bp, Gossypium hirsutum
  unsure (1)..(539): unsure at all n locations; Clone ID: LIB3825-029-Q6-N6-A3
gagttcctaacatgcccatgacgacggtngaaaaataaatataaaaaatgaaattttagtatttatacaacaagctcatgaatgaaacaaccgaccttccccaagctagcagcctcggaaacgtcagagacgatccatcatccatgctctttaatttccctcctaaaaataaaatgataaactagagaaacccacaatacaccaatttctacaatcatctggtaagctccaaagcatttgaaatccaatataacaaaagacatgaattattcctcttggttctacccaatccgactaatcttatatggataagttagcctttctcggaccaaatgtctggactttatcccttatattaagaacccaaacgggatcatcaagcttatcaattttcgcgaaaactgtacaataacatgatgctctctaaaaagttcgtttccttgtaactaagatgagttaaaagtggaaaaattgatgacttgccaatataacctaccacagtaaatggctgagatcagactttcccctcgtactggaaa

SEQ ID NO: 3873 - DNA, 528 bp, Gossypium hirsutum
  Clone ID: LIB3825-029-Q6-N6-A7
gcatcaaccagtaattttgtcaattagcagttttcaaattccctaaaaaagatttcaaagcttggcagctgggtactctgtatctggttatagatggatccacctttaatacaacaataggcatgtctaaatgaatctcaagtcaaaagggttgaagttccaaagagaaaagggaccataatttaaacattcaaatactggggaagccattggagttgttggataaactggtgcaacaatgaaaagaaaatttcggcgccatatattggtttccttcatcatatatatattttgacccaatgaactatgctgggggtcgttcatatgtctgaaaactttagctttgcacagtttgttctcagaagggtgggagaatcaaagggaaaagggccgatcaatggcaacatatttgcctcgactgttaaggaaacacttcgtttgattggggagtcctcaaatgctagaaattattagacatataaagtcgacaactgaaggcgcgttatcaagggccttttgctagtctgc

SEQ ID NO: 3874 - DNA, 524 bp, Gossypium hirsutum
  Clone ID: LIB3825-029-Q6-N6-A8
aaaattaatgcttttatgattcccaatgattggggcaaggggggaggggaggccagccacccaacaaaaaccccgaaaaagagaaacaaaagagtccagagcccgcaaacacggcaaacaaggcaaaaaagaaacagaggggacgggggaaaggaaaccccgaaaggacggagaaaaaccgaacaccagccaaaggggcaaaacaacaacagaaaaaccaaaaaccaacaattgaaaaccaaaaaacccccaaagtcagggggcacggacgcggcggaaaacccggaaatgccggaccggcacccgccggggcccccccgggccccagaggcaggcgccagaaagccggccgcaaccaccgaaagagaggggccccgggggaaaaggggaaccgggcacaaagccccccacccgaaaaaccggaaccccaaaggcgaaagcccgggggccccaaagagggagcgaaaagaaaaaaacgggggggcccaaaaggggagcctcccaacccaaaaacccggcgggcc

SEQ ID NO: 3875 - DNA, 570 bp, Gossypium hirsutum
  Clone ID: LIB3825-029-Q6-N6-B1
ataaaattaaactatcaaataacggaagcagcaggcaaaaatgccagttcctcgtatacctaataaagaagcaaagccttcagtcttttttttttcttaaattctagcagcaaaaggatgaagttttagaaggaaaaaaaaagaacaaaaacaaaaattccgatgctgaattcacccagtgttttcctcaaccgtagcatcaacttcagcggcttgatcaatcatcctcatcagaatcattatcaactccggcagctgaattcaaagccttcaacctatcaatcaacttcgccttcctttcctcgtaagacagcttcttcaggttgtaccttttgtgttccttgggaggagccttcttggatttctttgcttctggacttgcacgaatggcggtatgaaccttcttgtacattccctctatggtgtcaggctcaatgcttctcttaatgtactcactgaagtgagactggtacttctctggctcatcttccattaaagtcctcatgtatgcagcaacatggccaccgtaaatgtatttgcggtgaacttcaggatcaagttgcttactga

SEQ ID NO: 3876 - DNA, 574 bp, Gossypium hirsutum
  Clone ID: LIB3825-029-Q6-N6-B10
aggatgaagttttttcacttgggcaacacaagtgttcctttcctgaaaactttttaacctttggttgaattcttgagacaatcaaagataactatatccgtcctacatgacatagtagttctaaacacctggcaaatgaatgagcatcctttcatcaaattctaaaaactcccttaaatccttgccttccttttggtaattttcagaaccttttaactactaccaaagatgtgcccgtacaagaaccccagaaacaaaatctggttttcaatgggaatttgggtaaaatcacttctattctttcttcttggagctctgaagtgaaaatcctacttcaccaacatgatttgtgtcccttgcttccacagctctggggttagggatttcgccttcagtctctccaggaggagcatgctttgtgcttctggatagctcaagagaattgcttacatgagaatcaccagtagaagaattgctcaccaggcttttgtacatggtgagagcttgggcaatcatgttggcagggtttgcagctgaactaggaagtaacattgttgtaccctccttggcaata

SEQ ID NO: 3877 - DNA, 560 bp, Gossypium hirsutum
  unsure (1)..(560): unsure at all n locations; Clone ID: LIB3825-029-Q6-N6-B11
gattgtaactttcacatttatttctattccaatatatattatttaaatgtatgtacaaaattatagtacttggtagctcgtataatctgttaatattttctacccaacctacaaaatttatggatttgaacctgcttcaatcactcggtcaaatgaagcagatggtcataaaacaacaaacatgatctaacccagctttcaaagatcaatcaccatagaatacaagggtacatcatcaaccagtacctgcacagtcaataaccaagcaggcataccttcatatttctggagctgggtgttcttcaaccatcttttttttttttgaagatcagaaacgagtctgtcttcaagcactgttacattttagcaaaaaaatgcggttgcttgtcatcaacgctctgaagtaattgggcacatatttgcggactgcatactgtttgctccattcaaggcctaagaataatactgtcatttgatgagagacgagtctattcatgaaaatcctcatatggtgaggatccactagnaagagtctgtttcaaatgaagtgatctccaact

SEQ ID NO: 3878 - DNA, 556 bp, Gossypium hirsutum
  Clone ID: LIB3825-029-Q6-N6-B12
aatagataaaaggataattaatacattaatcatacacaaaactaataaataacagaagtgtgtaaaactaattttatgagtgcaaataaatctctctcgtatgcgtgtatatatattatactttgagagagaaatcgggttttttctttttagcttttggctacacaagggtacaattataaacaacaaactaatatatagaagcaaaaaactaaaatggtagtactgcattttagtgttgttgcagccactcctgaatggcagagcgaagagcaaggttaggaacgagattggaatgtgccagcttaatatttgtcatgggtgaggtgtcatgtccactatccaaccaacctctcaaagcctctgcttcgtatgtgaaaccatcggctgctacgtgaggatcttgcattacttcctggaaaatggggcagataaaataggaaggaggatggcattgctcttcagaacccagctgaaacgaggatgagcctccacatgaagccctcattggctccagcaccctccacacatctgttgaaaggtcaggccgacacct

SEQ ID NO: 3879 - DNA, 574 bp, Gossypium hirsutum
  Clone ID: LIB3825-029-Q6-N6-B2
atataaaagtacacaataattaatattcaaactaaaaaaaaaaaactcaaaactaacacaatttcaaatgttctcaaatggtgaaaggcaaaaaaaaaggacattttgatcttaatgatgaaatactcaaaagcaacaaaattttaggcagctcccttccccctctttctctgcatcttcttcatgtaaaactccagctctttgccctccaagatatatccatcagcacggccgcattgaccaggccgtgaagagatgcaagccagtaaacgaccactaccaaattgctcctcgatatgggggtcaagtgtgcgactctgctgacgtttctccagcttcctcaagacatggctgctcttcttcacttcctcagtagcagtttcaccttcctatagataaatggaggattaaaagaagaaccatacacatcattacctccctctattttagggactagataaaattagtcctattgttaaatggatcaatttaatctctgtaattttaaaaaagtcaaataggactgaattgtaacagagctaacatttactgtttaaaaagtgaccatttgcac

SEQ ID NO: 3880 - DNA, 531 bp, Gossypium hirsutum
  Clone ID: LIB3825-029-Q6-N6-B4
acgataaaagtattgactcttaacgacaagggaaaaatgttacattttctagaaaatatgaaaggatgaaacagccatcttgtcctacattaagggaggaaatctaaacagaggaccataaaagcaaatgcttatttgttggcctattgattgaatcatctacaaaagaattgaaaataccaagcactaaaccgaacccccgaaggaaccatgcgccacgactggtaccaatacacgttgcagaagcttaaccagaacccaatgcttgatgcatcgatttggaaaatatgccatccaagtcggtttctacatcccactctaagccacttcagcctcgtgtttgcctagtattgtatgacttgcaattcgggcatttctgagccaggacatgaaaccgaactagagattttgtctcgcaatcgttgcaaaggatcgagaccattttgttttggtactgttccggcattggtgtagctgcgatctcctcgtcgaatttctcccagacctttgacatgtcacaaaccgatttgg

SEQ ID NO: 3881 - DNA, 573 bp, Gossypium hirsutum
  Clone ID: LIB3825-029-Q6-N6-B5
gatgatgaaaaagagttcttatttaatggtagttaatcataaaaactacataaagcaagttcttgaaaaccaccaaacccagtgacgataaaaacagcaccataaaagagtctaaatgacagacattaaatattctagacattagacaacatcccagcttaacacatagttctctttttcttctctaagagagctgtccgcagtcagcgacaacaacgggcttggaagttcttccactgctagacccaactttctcaatggctttcaccacatccatgccttcaacaacttgtccaaacacaacgtgctttccgtcgagccactcagtcttagccgtgcaaatgaagaactgagatccgttagttcccggtccagcgttagccattgagagaataccgggaccagtgtgcttcttgatgaagttctcgtcagcgaactttgatccgtagatggattcacctccggtaccgtttccggcggtgaagtcacctccttggcacataaagttagggatcacacgatggaaagaagacttttgtagtggaggggcttaccgctgcggccgacgccttt

SEQ ID NO: 3882 - DNA, 557 bp, Gossypium hirsutum
  Clone ID: LIB3825-029-Q6-N6-B6
gaccgcaaactgactctaatttttcaaaaaaatctcgtacaataatagctatgaacattaatgttctcaaaacccttgaatattaaataataaaataaaataaaaaagcaccacaatccagtctccagctccaaacatccttttaagcaacatggttcaaagatggattataaggaaggaattaagcaccaattgtccgcccaccgccatctccataggacccatcatcttaatggtggtgatacggtgaaaggctaaaataataatacgtcaatatcaagtacaccatcctacaatgatccctaactctccccacataaaccagactttggacttcacttaacatcgcacacaaaaaaagccaactaaatgcaaaatgtagatcaccatcaaaagcaattacaaaacttagaagcacttcctgtggacaatggatggaccggattcatcatactcacccttggaaatccacatctgctggaaggtgctgagtgatgccaagatagatcctccaatccagacactgtactttctctctggtggcgcaacgaccttaa

SEQ ID NO: 3883 - DNA, 556 bp, Gossypium hirsutum
  Clone ID: LIB3825-029-Q6-N6-B8
aaaaagaaaaaaatcttattcatagatatatgttttacatcgatagtgatactcatcattacagagccaaagtaagaagataaaaatgtacaattaactaaggaatagggtcacaaacttctcaagtgtgagaaatctgtatgtttttcattcatgatgataagctgtcttgactcttagctgataaccgttttaagaactcataggtagtgatcatggttgtggcagacatagacattgatgcccaccttggtcccagtcccctgtaacaagcagacaatccgccttctttaaccaaattccttattgtctgcaaaaccgtcataggtcttcttaccccattgtcttctccatccaggacctgtaacctggttttgatggtgtcaagtggcatagtgattaaagctgaaacaccactagccatggctgcacttaaaccttggactgccaccacggcccttgaatcaggcttgaaaccagatccttcaatcacaccagtttcatcttttttacccatggagcaaccaataccaccccaaatgagcttgtgagcaag

SEQ ID NO: 3884 - DNA, 312 bp, Gossypium hirsutum
  Clone ID: LIB3825-029-Q6-N6-B9
gggaaaaaccccctggggaaaaattttccccccccgggaacaaaaacccccgggccggaaaaaggggggggaaaaaacccccaaaaaaagggcccgggaaaaaaaaggaagaggggaaaaaaaggggggggaaaaaaaaaaaaagggggaaaaaaggggggggggggaaaatcaaaaaaagggggggccaaaccccacccccggggggccccggtttttttttaaaaaaaacccccaaaaaaaaaaaaagggggggaaaaaaattttaaaaaccccccgggggtcccccaaaaaaaaaaaaacccccccccc

SEQ ID NO: 3885 - DNA, 505 bp, Gossypium hirsutum
  Clone ID: LIB3825-029-Q6-N6-C1
gctccaacgtttcattttgctaaaagtatctctgtctgacatattcgataatgggggcgggaatatgggcccttcaaatacatggaaaagcttcaaaactttttaacatacttgggtcagacaaatatccgtatctgacacctaaatccaagtaacatagaccctaaaacttacgaaagaaaagagagagcagcatacctgcatatctccttatgaacccttgccattaagggacaaatgccctggtttcttttcttggcccaaaaagagaatttcttgcattctttccggccaatctgaattcaatctacgggcaaaatcttccacctccctatcaattttttccttcaatggcggatcaatctcatcatcaatatcaccggcatcaaactcgttcttattgggaaaaatatcatcttcgacatcctgtaagtttggggtagcaccaacaccgggcagaatctgaccaacttcagcacttattatggtttttaggggcttcatg

SEQ ID NO: 3886 - DNA, 580 bp, Gossypium hirsutum
  Clone ID: LIB3825-029-Q6-N6-C10
aagaaaatctaattttgatatttttaagtacaaagattaaatttcaaattttgtctgagtacagacacagacgtattttaacagactagaatttggaacacttcaaacacataataactaaaacttataatgacctaacctgaaaacgtaaacctaaaatacaaatgacccctgtagacccaatttttagcccgggcccatacatatacagaaaaataaaacaaaacaacagtccaaatctaattacaccaggccaaaaactttgcaatggcccaataattggttacacaagcccaatggcccaaatcgttttcagaaacaggaagccctagagttctatttgccttgcgccacagccactacgcatgttggcacatcaagcacgtcccccagctcgcttattgcacgccccacgtctgtgcgctccgcttcacgccttcacgatcagaatacagccttggatcggggtcgaaagactcatttctcggcgtcgttggccaccgaaagtggcgttggtgctgcgacaaccattggggcatgcgaatgaagccctagcagagaatgaagaaacctttttttt

SEQ ID NO: 3887 - DNA, 546 bp, Gossypium hirsutum
  Clone ID: LIB3825-029-Q6-N6-C12
gtacaactatgtaaatctcagtttattaattcagagatccgaattatagagcaaaataaatttcaagcaatcgaccgtcttgcttaacttactcaggccaaagtgctagcaactgagaaggtggggtatgtagtatggaaagttggaaactatacatggattttcaattcaagctactacaacaaaactaattgttgttttgctcccatggtcaacatactaatttactgctgttagtaaccgcaatttattgattacatttttttattcgtaaatggccagccacggatcatccattatatatgcaacaaagcacgaagatttaatttctaccataaaactgctttactaaaaccataacattggctacagaaatgaagttcatggcttatcatcccgatttaccctagcagctgtggccatggtatccgccactcctcctggtgtgggcattgcttcagtattgttactcagctccgcacctctcacgccatcagcatcttcgcttgtcacggctttatcgtgaggcagcttcgcactagcatc

SEQ ID NO: 3888 - DNA, 563 bp, Gossypium hirsutum
  Clone ID: LIB3825-029-Q6-N6-C2
gaagaaagatagcatgtataatagtattatttttgttgaaagcctgaaagaatgcaacaacagtggtgctataaataggaagagtaagtccaagttcacccccaagttgacaaattcttcaaaccttaaacgcacaagttgaatttatttagatgatgatactcgagcttgatgagcaaaacaggcttcccacttcagtttaccttggacttggatggtgacggaagcaactgataacaggagatgagagacgtagcaaatccaagagcccctgttacacgaggggtgactttcttaggtgccaattgaagaaggccaactgctaccactatatccagtcctgctttaacaagagctagagtcctctcatttgatttttggagcttggcacagtattcctcactcttgtacttatcactgtccttaagattcttttccaactttttcattgatttagatagccttctgagctccccaagctcaaccaaggtggtacagattgaagaacccatccaacagaaaagagatattcgtccaatcagctcagttcttcctttgttctt

SEQ ID NO: 3889 - DNA, 544 bp, Gossypium hirsutum
  Clone ID: LIB3825-029-Q6-N6-C3
aatcaaaaacaaacacaaaaatttaccattctgatagtgtcagagtttcaccaactatgacaatctcttcaacagaatatccaagtgtaagataaattgatcaactcgatgataggattatagatcataagttcataacccaacccattcccatgtatgcttttggtaccccccccccccaaatcaccaaaagaacagtagatgcaaaagatttctgtaaaggatcggcaactacctgacaatgtaaagggggagaggagaggccgaaaagcggagtatcttgaatcagttatggaatgtagcagcttcagaggaagtaatcaggcgttctacgggtaacatcaggttctcctctccttggagctggctcaaactggatgaatgactggttcttgcaatcatcaacttccaagattgatgccatgttcccacagcgataacaataatttggggcgctaaatatagtaactaccttttgttcatgcgcccagttaaatccatccataaccagttgatgagctctagcaatcaattttaagctgtt

SEQ ID NO: 3890 - DNA, 474 bp, Gossypium hirsutum
  Clone ID: LIB3825-029-Q6-N6-C6
aaaaaattgctttctattataatttgaggtaatcaatcataacactacttgatatgatattggttctaaaaaggctccatattactaccgaaatgttcacccactgcactatgattttcttacaaacacgaaacctactaatactgagaggaggaggatgataacggctgcaatgaagtagagactgggtgacttgctagttttctggctattttctttgccggtaatttccatgttcttttcttgggtagagcttgatgtcgaacagtaagggagaactacatcccaaaaagatctagtggacactctaatggcttcttcttcaggttccaatatttttgatgcatcatttggagcttccatggacatcaactcaacacaatgatcttttaaaacctcaagtgtctctgatggttggagatagtcacagatatatgtacccgccaaccatggaacaaagactctccgaggtag

SEQ ID NO: 3891 - DNA, 574 bp, Gossypium hirsutum
  Clone ID: LIB3825-029-Q6-N6-C7
gtaaaaaggagctaattaataataccttttcagaataagatgctagaaaaatcctccggatccccttggcccgagtaactcacgatgattttctggtctggggaggtgaatcttcgggtgcattttcggttcgtagcacctataaattattacaaacttctgatgaaaatcctagaacttactttttacaaaccatctataggaaattttacaaaaaactttggctcctaaatctatcaataaaaatcaagattataatctggagattttcatggaattatctgcctacaaaggtcaaaatgcagtatagaaaattagccaacaatacaagttgccctcgatgtggagaaagagctgaaacaattgatcatttatttcgtgaatgtcctgggtgtttgatcagtttacccttgtcaataccgcaatttctgctgtgcactcagggccatatgggagatagaaacacaagaatacctcgtgagttcattaaaatcaatttcgatagtgcgtatgataggaattataatcattcggctttaggtattgtggtcagaaatgaagaaggatagtgctc

SEQ ID NO: 3892 - DNA, 537 bp, Gossypium hirsutum
  Clone ID: LIB3825-029-Q6-N6-C8
caaacattccaattttcatacgataacgtacagcaaaaacaaacaaaaaccaattgcttggggatatcccaactgttccatccacgtcaaacaaaaaacagttgtcccaacgaagccaaaataaatacttgtaaacattctaaaaccataggtcttactgcggagtttggccatgtggtgtgggacctgttggcggtggaggcttaccagactgaccaccagactgcaataagcggaagcaataacatgttagtatcatatgaacttgggtattttacccaaatacagttgcctcaaatgaggctgcatgaaatgcaggagcattccagcggttatacaaccgcgcagcaaaatcaaatgtgtgtttttatgagtgctgaatatagatatgtatccaaatatgattataatagtggaatatctaacgagtatggcagcatcgcctataggaaataggatgcataaattgttttactctcaatccagacaaaatgaaaataagcacttaatcaaattggttttcaacagaagtaaaaa

SEQ ID NO: 3893 - DNA, 538 bp, Gossypium hirsutum
  Clone ID: LIB3825-029-Q6-N6-C9
catctgaagcatagtaaactatttatttactagggaaaagaaagaggtttgctaagaaggatcaaaagaaaacaaagcataaatatgtaggtgtaacataaacatggaaaattttaaactcaaccacctaaacatactgattctgagtctcccacatcctcttcaattaccgcactcttatcttccctagttaggctaatgcttgatgctgatgaccccgctatctctgagacttctttgttcagaaagatcgccttccgcttccgtctgctatgctgccatttgctcattagatcggaaacctcaacacgatcatttcttctgccgcccattactggctctctcaattcctctacgcttgcatctctttcgacacctgctgatgttgtgaatggaaagaatagctgtctaaagcaaccgacgagaagtatgaggaagaaaatgtatacatagagcgatatccatacagacaaggtccacttccaattgtggaccaactgtttagaccatggcaactgtgagttcatgatgatttccg

SEQ ID NO: 3894 - DNA, 561 bp, Gossypium hirsutum
  Clone ID: LIB3825-029-Q6-N6-D10
agatccttgaaatgtcgaggtaaaataacacaacatgctgagatgaacgcaaaaataaaaaataaagagacaaaacaccaatttaatgtgctggttgcagacaaaaccgcatacaagttccggatatgtagtgatctaaggtggctgctgctataaaataagaggggcaaaacattgaacgcaaacatttcttactgctgggcacattgcactcttggtgctgactcatcgtcatcgtcatcttcatcgtaaccttcacggtgcctatgctgtcgttgttccttccgcctctttacctcctcagcactgacatcatgcaaagtagtctcctcacagtcatcaagctccatgtctgtcaaatgcttactaggcctcatgggcaatacactctcaatcttccggcattgctcaggtgaaaataccccagattctgggaaaataacatggaactggatgactagcttgcccttcatgaaaggtctctgatggtggggcataccctcatcattgatagccttgtattgaccaggcttaacgacctcgccagggtttgatttaatt

SEQ ID NO: 3895 - DNA, 512 bp, Gossypium hirsutum
  Clone ID: LIB3825-029-Q6-N6-D11
caggaaacattagtctcgaatgcttttaaaaacaaaagtggtttcaaataaccggcagccaaaagggataaggctttaccacccagcgttttcgaacaaaaaaaaaggtccccatccgccttttttttcccttatttaaacaaaaaaaaaaggggggccgaagggctcttttaccctcttgaataacatcattaaacataaccaaaccccccaaaataaatgaacaggtctcttgctggctttgccaaccccacctaaattattttcaaaattcctcggcaaaaattaaggtatggggatttgattaggctgcggattccttggcaatcttatctgccttcgaaatcacttcctcgattcctccaaccatgtaaaacgactgctcgggcaggtcataatactttccatccaacacaccctggaagcgggggatgctttccttaaactccacatacttgccaggggcaccagggaacacttctgccacggggaaaaggctggctcaaaaacct

SEQ ID NO: 3896 - DNA, 548 bp, Gossypium hirsutum
  unsure (1)..(548): unsure at all n locations; Clone ID: LIB3825-029-Q6-N6-D12
aagtaataaatcataacatgactaggtagacttacaagccataatcaatatgagccacatctcatgaccgtatacaatagctcaaaaagggcaatacatttggccaaatcataataacaaatgtcataaaactaggtccctatacatgccactgacttgataattctaacatatgtaacaatattccaaaggtattggcttgatagtgtgatgctgcctccgacgatctcaaaccccgagtcgacctgaaaacactgggtgtttagaagaggatcgagtcaccaatgttgtatcttttgctacgcgctttgggttatcaaacggtgtattgtttccgaatggaggcctccagaaaaccaaaccatttgaataaacttagacgcggcctataaccttctacaatttagatcggcctcgggactaattgccaaagatgatagtggaaaggtcctgatctcaaaatcgtcattgaagaagaaggttgcttctctgttcgctgcggaggcttgtgtatgttctcaagcggtaaggttgggcgnacgcgtggg

SEQ ID NO: 3897 - DNA, 467 bp, Gossypium hirsutum
  Clone ID: LIB3825-029-Q6-N6-D2
ggttcgggggcgtttaccatgggctgccggaggggggcggaccaagggggggggggaaaaagcggaggtgcccgaagaaaaaaaaagagaaaaaagcaaacaaatggctaacaagaagcccccaatgcaggcaaaaaaggggggggggggaacaaaaccaagcacagaaaaaaacctaaccccagccttaaagaacaccccgggcggaaggcacacaaacaccgaaaagagttgcaaagtcggggcacgcgggggggggaagaaaggaacaaaagagcaacccggcggaaacctccggcagcgcggcaacaacgggggggggaaaacggaaggggccacacaaaggggcccaacccccccccggcccgggaagttcacaccaagaacaagcgaacgacaagcaacaaacttaacggggggcacatcaacagcgggcaccaggggggcacaaactacacggccaccaa

SEQ ID NO: 3898 - DNA, 526 bp, Gossypium hirsutum
  Clone ID: LIB3825-029-Q6-N6-D3
caagaacattatcccacacttatccaactatattccttttccccattttgggttaagtgttccaaggtattttctacaacgaatcctgtggaatatgtaaccaactatccagtctttccaaatgcaaagctggaatgagatgttaatatatccagcatacattaaataaaaataaaacaacaatggcaaaaatctgcatgtccacaaacctaaacatgctgcattccaaaataagttgcacgaggcaaaatctcttatatcaatgcacattgagcaatggccagagcagcagtagacacactacatgggggtttgcctctttcatgaaaattttgattccatcaaaaaaaccatttgaagcttgtgtcattctacaactcgactcctactccttccagtgcggctgccattgaagcaaatgcctcttcaagtgttcgcttcttttgaaccgtgttgaaggcctcaaggatatctccttcctgccattgatcataatcttccactcccataccacactccaaaccag

SEQ ID NO: 3899 - DNA, 569 bp, Gossypium hirsutum
  Clone ID: LIB3825-029-Q6-N6-D4
gcaaacaggaatctgcaagattatatttcacaaataattcatatacaatcttatatgattgaaacttgaactgtacaataaaataaacagagacattttctaccattacctttgataaacaaaaattagataagagaactccacagggcgtcaaataaggggagaaagaaaaggaaacaagcaaaaaaaggcagacacgacaagaggacaaatgatagcttattttgtggttaattttaaagagaaaatgagaactgggtatctaattagaggctaaattttaaaagcaaatagaaagacaaggaattatattgaaagctagctagagaaataaaggtgctcttattccttgttaccaaatttcttggcaatgacagggcggacatcatcaatgtcaaccagagtctctaagaagggaagtaatgaaattagtgcacaatcggatggatcatcaaaccaactcttaataggaatcccattattcacttgtaacctgtaaacctgtggtgaattatcaattatagcaacttttgcaagatcaacacctaatactgttaaatctttagtgt

SEQ ID NO: 3900 - DNA, 527 bp, Gossypium hirsutum
  Clone ID: LIB3825-029-Q6-N6-D5
gaaaaaaacaaaccgaactagtttgctgattttttattatccaaaataaatcaacaaataaaagaattacattataaaccgggtactggctaacactgattttgttgatggctgcttcaaatggttagaccaaagttgagcaagatgatgtaaaaggatcatataaagcaggaagcaagtttttccttccgttgttaccacgagcattgtagctagcgccagttgtagggtctacaagtaggtttcctgcatagcctggataagcccctttaccataaattccaggacaagccgatgaagcctccaatggggcctcagctgggccttggaagtaaccatttccgaaagggttcgtgacggtcccggcaaaaaggctagccaagtttataaccatgccatcaaaacccacgttgttgtttggtgcaatcaaaggcgcgctttggggtccgtaaattggctgggggaacggccaggcacattgaccggggcactgggtctgggagttacccacccaaatgtaagcgaac

SEQ ID NO: 3901 - DNA, 485 bp, Gossypium hirsutum
  Clone ID: LIB3825-029-Q6-N6-D8
cccaagcaaaaaaagggggccttttctttcatcccataaaaacgggaagggggggttttttttcccagttcctgggggggggggggttttttttaacccaaacccctaaaccttacgggggccggcccctacccacattcgggggggggcaaaatcataaaagggcccaatcctgggcgggggctaaaacacttccgggccttttttccgaggggggttccaggaaaccccaaattttgggtaattaaaccattgggggggaaataaaaaggggggttgggggggaccaacttgggggttggaaaccccccggggggaaaaggaaaaccagtgggggaaaagccaaaggaggccctcggaagggatatcgatggcgggggggaaaaaaaggggggcgggggggaccggccatctaaaaaagcggaccaggggccccgggttttaggccactccaaaaaaaacggccaaaaaaaggcccctggggc

SEQ ID NO: 3902 - DNA, 547 bp, Gossypium hirsutum
  Clone ID: LIB3825-029-Q6-N6-D9
attgcaaaatgataaattcacgttctaatgactagagtagaagcagtcaaaccagtaaaacagtggttcaggaatttaagaaaacgcagaacataagcctactctgagccactgtcttcaccagggcgagcagcttctttgacatcaacagtgaagctatactcctgatcacaacctaggtaagaatcacacatgaaatacaaagtgtatgccttctctgtagcttcagtgggagcagcaaattcaagtttcaccttcgctttcctctgaagagacacccttttgatagcaagcagctggttactaatggtgtcaccgacaaccagccaccacccttcatcttttgctttcgggtacctgggagcatcaaccggtccaacctctgtcttcccctctagatccctctcgagggtaacctgcaaggtgacatattccccagcccttacattgtcactatcaatcacctcgtatgataaatcgatgttggggaaacgattgcagaactttgcaatgtccagaagctgcaaatcagacatctgtaacagct

SEQ ID NO: 3903 - DNA, 588 bp, Gossypium hirsutum
  Clone ID: LIB3825-029-Q6-N6-E1
aataaagaactatcaatttcacacatatatgtcaaaatatggaacatcgtgttcagtatacaaaaacacccgagttcattatgatgctacgggcgatggaagcatgacaaaatccgggttcatgagtttgtttatgagattgtaaaccagcatgaaccaccactcaaaagttgattttttgttaactcggacaaataatttatgaatcccttcatcggagggcattaacgaaggccatcaatgaatcaacatccctcttctcagaggcatactttattggcttagctgagtgtttggggaagaaaagtatagtggggaagcttcccaactgcaactcgttcttcgagtattccttttgttcaccatcagctctgaattttgcaactttcacaccagaacctgccagcttctcagccaattcaacatacgatgcttccattgcctggcaaaaagggcaccatggagcatagagcacaacaatccatgattctttccgactctccaattttgccaaattctcaattccagtcctactcagtgtgaccaagctctggctattgaaaatgtcactttcagtggtagccccat

SEQ ID NO: 3904 - DNA, 524 bp, Gossypium hirsutum
  Clone ID: LIB3825-029-Q6-N6-E10
ccctacataaaattttcttcatctacaatttaccatttacctccctccccagtttaatataataaaggtttccgcttactctaactgtacataaacaccatataagcagtaaaaaagccaccaagcagcaactgaaggaataaaggaaaaaaattcttttaagaaaatgacactgcaatctttggtctctatctatagaccaactacagcaaagcttgatgcagaataacactggatgccaaatgcacaactagtcaattttcttctttcagaaacattataaccataattcacctcgtcagtcttaccgctcatctaatcttgagcagaattaacatttgccgctgcagcagcagccgtggccgctttcttgtttgcctttgtcttgcccttaccaggaggtttgtcatctccagggacttcagcagtgagccttcccattttcttctgtagatcagcaagcgaatcctttggaacttttgctttgggactcttcttttgattcgcaagcttcagctccagtc

SEQ ID NO: 3905 - DNA, 264 bp, Gossypium hirsutum
  Clone ID: LIB3825-029-Q6-N6-E11
atacacaatgtcttgaaatattttccattaaaaagctgtcgagagaaccaacttaatgggacatccaacaaaagaacaaaaaaaaactagcttgttctgtttcttaaatcaatacaagttgcaatcagagctcatcaatggagtgtcaaatataagagactaaaaatacaaagacgagacatttcaatgtcttcttctagcttaagacaagggggctgcaagtttgaaggccgaagggaaaattgaatctctaaggaatatgcc

SEQ ID NO: 3906 - DNA, 519 bp, Gossypium hirsutum
  Clone ID: LIB3825-029-Q6-N6-E2
aacaggaacaaataattggattggatggatttttcatttaaaattggaaaacaaagctgaaacaacttatttaactttttctttttaacccaaatccatattttggcaacctacagagcaggacccgaataaatcacattcgccggctttaaactctggggcataacaacattaaagggcccgtatttcggcatcactttccgggtggccagggcagctgcctcgttagctctaagggttccagctgccatgatagcagcaaattcacggtttatctttttttggaccttggctcgagcatccccaaaagggtctgtggcagctccactggccgatgatttctcctgggctcctggcggtttgacaaatgatgtagtcttatccgcctccgcggggtttggctgctgatcagccttcaccttactgctaacctcgtttttcttaggggtatcagaagaactgttcacactggcacttgagggctgaaatggctgaccaaaaacaaaaggcttgaattgg

SEQ ID NO: 3907 - DNA, 474 bp, Gossypium hirsutum
  Clone ID: LIB3825-029-Q6-N6-E4
gggccggaggggccccccaaattttccccccccaataaggggggaaccccccccaaaccccaaaaatggggccaaaaaaaccctggggcccccccggagggaaaaaatgggccccccaaaaaaaccccccttttaaaaaccaggaccaaaccctggggccaaaaattggggggggaaaaacccccttggcttggaaccaggaaccccccaaacccaagggggggttttccccaacccctaaaccaaggcctttttggaaaattttcccccggatccagggggggcaaacccaaggggggttttccccccaaaaaaccctttgccccccccaaaaaagccttcccctttaaaaaccccggtttaaaccgggcccccccgggaaaccccaaaacccccttggggaaaaaggcccgttttcccaaacccggttaaaacaagttggggcccctttcggaccccagggccaaatggcaa

SEQ ID NO: 3908 - DNA, 561 bp, Gossypium hirsutum
  unsure (1)..(561): unsure at all n locations; Clone ID: LIB3825-029-Q6-N6-E5
aacaaaaattcttaggtacaaaaaattagatacatngaaaattacaggtcttcctctatatactttngatctaaacactaaaaaaaaacccagaaattatggttttaaatttgtaggtttttgatttaagcaaaaataataaaaatttaaaaatattggtcttctttttaatggagaatctgggtgaagtacttatcgttttcaaaaaggtacgatttcactgcaagcgaaatcatccgaatttccgatggaatcttcaggccacgaatcccgaagcaatttaagcagcatttgagctttcctcttagccctgtccgtacaatcgctttgaaccagcagcagcagctgagtcagaacgcccgcgctcaccgcgtccttttgactctgttccgattccgaacagagtgccatcagcgcgccagcggcgtattccgtggccctgtcggagatcctcagtatcgtctttaccaaaagcgggacagtgagcgcgtgtgaggcgaaggcggagcaacccgaggggatccggcataagagttctatcgttgctagggctcgttcggc

SEQ ID NO: 3909 - DNA, 556 bp, Gossypium hirsutum
  Clone ID: LIB3825-029-Q6-N6-E6
ggcttcacaatgaagacatgatttctagaaccaaaactcacaccctagccatacttcccattatcattcaaacacccagaaatgcacattcgtcccagaattcatactgttctgtttatttagaagatatgcaacaaagaacgtacttgtattacaaaaagacaacacaaacagaagttaaaataatgaaaagcaacgcaaatattccacccctatattaagggtatgtgcagtgtgagatcacattttggttttgctggagcgatcacgaatagcgccttcctccccaacacgcccaacatcattgaatgtttcatcagatgatctcacggtagcatcaacggctcctgccggggattcttcaaccttaatcactatcgtctctgaaagcccttcacgaccttggcgtttcacatcatcatcgtaagtcttccttctaccttcatcacctctcagcttcatctcttccatcttctgtctagctgactccgtcgtttcactcaatgtttccctggtgttctgtgcagtctcggatgtcttctgcttcgtttcttcc

SEQ ID NO: 3910 - DNA, 403 bp, Gossypium hirsutum
  Clone ID: LIB3825-029-Q6-N6-E7
aaagggaataattttttttttttttttaaaaaagaaaaaaaagtttgaaatttcccaacaacccccaggggggggggggggcgaaacccgggtttcccaaggggggggggaaggaaccttttaaacggggggaaaccgggcccctttaaaaaaaaaagggccgccccggccccctaaaaaaaggggttcgtaaaccccccccaaaggggaggggggggggtaacccctttaaaaaaacccagggggggtccccccctttaaaaaaacccccccccccccccaagggggccccaagggttccccccaaaattccgggaacggtggggtagccccgaaaattcccccccgggcccggggggaaaaacatttttccctaaagggggaccctttaaccccgggggaa

SEQ ID NO: 3911 - DNA, 567 bp, Gossypium hirsutum
  unsure (1)..(567): unsure at all n locations; Clone ID: LIB3825-029-Q6-N6-E8
aactattaaataataaatattaactccattaaaataggactcccagatacctccatcgtttttttctttaaaagaaaanaatgaagagtaggggtgaatctaggcaagatgattctagcttgaagcattacaaaggccgagggttgcaatagaaatttccccgggtagctaatctgtgaatgcaacattttatccagttaaagggtaatatttaacaataatttttaacgattttaatggcgaagcatctgaagaaacttctaaaaattacacaaccaacttaagcactagtggcccattgcatcatcaaaagtctattccaaatgaagagtgggaaatgtaagcaaagatcgttccaactctgtcgcccacgggaatgtctactaggaaccaaatttattgacaatgagtaaacgtttccacaataacaataacaataacaaaaatgtttaccagtgctcagattagccacgcagcaggcaccatctcatgtctaaggtacaaggataccaatagtttatgaaacaattaactcgcttttcaactcaaaacagctccacatgatgc

SEQ ID NO: 3912 - DNA, 430 bp, Gossypium hirsutum
  Clone ID: LIB3825-029-Q6-N6-E9
aaaaaaaaaaaaaaaaaaaatttttttttgaaaccccaaaaaaaaaaaaaaaacccaattaaaaattttaaaaaaaataatttaaaaaaaaaaaaaaattaaacccaaaaaaccccggggggaaatttttaaaaaaaaaaaacctttttaaaaaaatttaagggaaaaaaaaaccttttttcttacccccaaaaaaaaataaaaaaggtttttttttccccccaacctttgggttaaaaaaattaaaaaaaaagtaaaattttttttttttttccaattaaaaaaaaaaaaaaagggttttttttcttaaaacccaaaagaaaaacggtttttttggaaaaaaaaaccccccaatttttgggaaaaagggggaaaaaaactaaaaaaattttctttgggaaggggaaaaaaaaccccccaaggaaaaccc

SEQ ID NO: 3913 - DNA, 566 bp, Gossypium hirsutum
  Clone ID: LIB3825-029-Q6-N6-F1
gactaaatagaacgaattaaataattgagtgaataatttgtttggattcaaagttggttgtattacacttctaatcttgcataaaagtagcttaaataaagaggtgagtttcaaatataattgtacgggcccaaatttgcccgggcctaacaagcccaaacaataataaacaaacccagcttctgtcgacccaataggcccaagaccttaaaccaactcagagaccctagggtttttgagcccctctttgggccgcgctgctcccccacgtgcctcgagtgcaccgcccgcgcctggcctcgaggcctgacccctctgcttgtccttgcaccaacccgtcccatcacttttgcctagaccagcaaacgaaacaggaaaatagcagagagacaagcaaagtaaagaaagaaaacagcaagcaacaaatagaagagggtagcaaaataaatagggggaaccgattgtatttgggggatttttggaagacaaaaaagatggtattttcacacgcatacgagaaatcaaaagcaaaaacaaaaaaaaaaggttgtttttggattctatgc

SEQ ID NO: 3914 - DNA, 393 bp, Gossypium hirsutum
  Clone ID: LIB3825-029-Q6-N6-F11
cagtctctataaaatattccattattaaatataaaattagcaactaattattaattaataatattccctcatcatcaaaattaaaaaaaaagggcaaccctataaagcatattatatatatttacataggaaagggttcaagagcaaactccacaactgatttcagctcatcccaatgggcctcagggaagaaatcatcgttggaaaagctagaagatgatgccgccattgatgaaggtatttgagccattgcagcactactcattctatctgtaacatgccattggctttggttctttccacttatattatgatgattcacaagcattgatggcttctcctcgtcgttatgatgatgataatctactataaatggagaaccgaaggtaatgt

SEQ ID NO: 3915 - DNA, 563 bp, Gossypium hirsutum
  Clone ID: LIB3825-029-Q6-N6-F12
agactataaaaagctttgatattgaatcgaaattcgaagctcaaaaatcaactcagataagttcgatttttaaagttcaagctcgatttaagataccaatatgtttcgagttttacttgtaactggaggttaccttcttccaaataataaacttcaagaaactgtccttccatagcaaatggatgaaatatacagatttttcagccatttatcctttacttgggtactaggaaaagcagatgtacgcaaagtttcttgcatcacatcttgtgattttctcttgggtgcactaagtatgaatgcagcttgatcctccgtagccgctgccgatgtaatccgaaaccctttttcccatcttcgatgaatcccctcgctcgggtaaaggaaatcaagttcaacaacctgaagacgatagcctgcatttcgagacataacgatgccccatttgttgcccgcagcggtcatcgaggtcacggagaagccttctttccatttcttattaatccatttgaagggaaatacatcagtaactttgtaggattactgcgtatagggggtacctt

SEQ ID NO: 3916 - DNA, 180 bp, Gossypium hirsutum
  Clone ID: LIB3825-029-Q6-N6-F2
atctatcggactcttggtttgacccctaaatcactgaccggaacctgcaagcgtaccaactacccctatcatgagaaagctcacaaactagcagcattaatgatcatagctgagacctgtgtgataattgaaatcagaccacactttcacacttgcattacgacacacacagatcgtaac

SEQ ID NO: 3917 - DNA, 525 bp, Gossypium hirsutum
  Clone ID: LIB3825-029-Q6-N6-F3
cgccccaaaattcatactgttctgtttatttagaagaaatgcaacaaaaaacgtccttgttttacaaaaagacaccccaaacagaagttaaaataatgaaaagcaacgcaaattttccacccctatattaagggtatgtgcagggggagatcacattttggttttgctggagcgatcacaaatagggccttcctccccaacacgcccaacatcattgaatgtttcatcagatgatctcacggtagcatcaacggctcctgccggggattcttcaaccttaatcactatcgtctctgaaagcccttcacgaccttggcgtttcacatcatcatcgaaagtcttccttctaccttaatcacctctaagcttaatctcttccatcttctgtctagctgactccgtcgtttcactcaatgtttccctggggttctgggcagtctcggatgtcttctgcttcgtttcttccgtcttcccagggaggaaatccatagctcttttagcagcgtctgcagctgaatctttcaa

SEQ ID NO: 3918 - DNA, 556 bp, Gossypium hirsutum
  Clone ID: LIB3825-029-Q6-N6-F4
gacagaaataagaaatatattacattgattatccatgataggagaaattacagagaaaatctggataggaaattacgtgattcataatggaagaagaaaatgaaaaagaagcaaaccgctaccccttcttcggcagagccctaataaatccttcttgtctatacaaaagttgtagttcctttttttttcctttttgccatgaacaatatcgaagaaaagaggcagtagcaccacaaaatagagacttctctgatctctctttccttctcgtctatttacaatgccaaatatccaaaccagaatatcagatacatcatcaatattcacaaaaagtcaagaagaatcaaaggccaccgatttttgtttaaattccgcaaaataaatcaaaataaatgctgattacccaacccattatgaagaactagcttcatttcaccaactcagatacccaaccaacatcaggacccgacccggttggttcaagtcggccgatagaattttctttgctcagttttgcgtacatccttgccctcaggtttctcccagactccactct

SEQ ID NO: 3919 - DNA, 573 bp, Gossypium hirsutum
  Clone ID: LIB3825-029-Q6-N6-F5
aaagaaaacaaataatgtaacacttatgagataaactttttagtatatacagaagtgtgtatcccaaaaccctcaaaatgcaaatccatcatcatggatagccaatctcctttttaaggtcttacaatagtgcctcagcacatccagaacctaggcccagccatagaaggaaccttttcaagaatatcttgataatgcttcagtccagaattcagattttcctggaagccctaagattgtactcatgcttgagaagatttgctctcagcagcattgccctcacatcccaatcaaattcattaccagtctgcaaaacccgctggaaagttgcatttctctgatcagcatgtcgtgcataaagaattttgttgtgtgaatcaatccgagcctttatcacttaatttgcaaaagcccatttccatttgaactggcttccttcactccagggaactaatgtataaacaaggattgactctacttccccgtctaactgtatctggttgtcagtaattaaggattcaagttctttctcaagtcctgcaacacttgttttaaaggcatcagccatcatta

SEQ ID NO: 3920 - DNA, 544 bp, Gossypium hirsutum
  Clone ID: LIB3825-029-Q6-N6-F6
aatccaagactagattctttcatgacaaatatctcatacaaaacctgtttgtcttgatgttcagacctagcttttgctaacaaaaatttccttcgctttacatatacaaatcattaaataaccggtctgggaattaatgattcataaacttttcttactcttgtgtattagtaagcagaggcaatgtcttagttattcttttctttctcatttttccgcctcctccattatcagtcgacttctttttttcctccacaacttcatcaatagcattcaaatggacggtgctgtttggcagccgtctttcttttctttttggcttcttttgagacaaggaacttatcttctgattcataactggttttgaggaagcagccttctcgattatactcttgtaatattgggtgaatgaagcattagcattggacttctcaaactgcagaaatgaatcaacaatttgatgatctttcggtgaaaatgccacctcatctctctttctttgcataaattcaatgttctgctccacctgatcaacaaatcgctt

SEQ ID NO: 3921 - DNA, 537 bp, Gossypium hirsutum
  Clone ID: LIB3825-029-Q6-N6-F7
aactgatgatcacatttctttatttttctctaattattcccaacttttattgatttatagaactgccctggctaaccctataacattacaacaggaccaaacttctttttatatggtacaacagtacgatcttgaaaaagaaaaagttgaagcaaacaaacaacaaacacagactcaaggcagtagcagagcacaaaaactcgctcctttcatttaataggatcgataataaggatcatcctgggtacctccgcgggtgttccttctagtcccagcattgttagacgccgcatttgggaagtcttggttccccgttgtaccgtaagcaccctctgtatctccgccaaaccccatactgctgaggtcatcttgcctgcctgtatcatacccactacctgcggtggggtacccacggttgtcatgtccaccggtaccgccatagccaccagtgtcgcctatgttgtacccagctgtggtgtagccagtgccaccaataccaccaccaccagcatggccagctgtggcgttatgatggcg

SEQ ID NO: 3922 - DNA, 566 bp, Gossypium hirsutum
  Clone ID: LIB3825-029-Q6-N6-F8
aatcaaactcaatctattaatttaaaaagaaattcacaaaccatattaacaatcccatgaaactaaaaataatgtgacttgtgtaccaattgtcactaaaagtccatatataataaaatcacaccaggtatcttgcatcttatttttcagaaagatcaaacacttacctccgtcattggcatcacaatacggaccgcactaacgatagattgcaaaaattccacgatattatcaaccgtggccggcactgagcagtccttttttatcatttatggctccccaatcacttgaactgtccactttgaatgatgccattctcattcaagtattccacgaattcatctataagatagggccatgcaccttcggcatcgtagttcgatagtgcagggtctaccgttctagcaaactccaaaagttgagaccatgtgtcccgagagatcgctttgttatgtcgagcctgtaaaaactggcaccaatggtcaaccaatggccactgcttctcagcgaacagcaactgccacataccgattgcagtatccaatgccaaagatttctgacccttt

SEQ ID NO: 3923 - DNA, 578 bp, Gossypium hirsutum
  unsure (1)..(578): unsure at all n locations; Clone ID: LIB3825-029-Q6-N6-G10
aattaacgattctgtcattttttacacaattatcagattacatggctcttctagtttctttttcttggatatcaaacaataagaaataaacgaacaaaatacaaaacgaataaagaaaattacaaagagatggtcagattccatacatacatagcatgggatttgcaacaacactacaataatatacctttaacaatgtttcatctaggaagaaaggttggacacatccttacttgatctattgtatttcatatggctcttaaccagctgacccgctgcaagagcagacatgagtgacagctcccccgcgaggacggcaccagctacaatggttgcaagcatccttgagtttgctccagctacttctttgcttgcacccttaacgccgagcaagttcaaacaggctgactgagatgcaagctgagttccaccaccaacggtgccaacctcaacagaaggcattgtgacagagatgtgaaggtcctttccatcattaacggcttccatcatagtgatgcaatgagagctctcaacattntgagccgggtcttggccagtagctatgtagattgcagtca

SEQ ID NO: 3924 - DNA, 547 bp, Gossypium hirsutum
  Clone ID: LIB3825-029-Q6-N6-G12
atgagcggaaaaacccagttggtacatcattaaattcacagataaaattccacattctccaaagaaaaaccaaagaggaacaagccaaaatagatatatgaatgcatatgccttaattatatagttttattaaagtaaattttcagagttaaaggaccccaaaaagggattattgatagcagagttgagctcagatccagctgagttgagaacttgcatgtcaaccttgtttcttgagagaaacaagaactcctctccttcaactttctcaaacccacacagctccaagaactccactccttttacagatccaactctatcctggaaagtttgattatttagtctaatttttctgaatttctcctcatcaggattcctggccacatttcctatgtatgtaagaagagtctggaatgctctcttgactttcgcatcatcatccttgtgattttgcttgagagatcgcaaacattcgcgcatatgttcagcctttgtggcaggcctaactggcaatgcgctctttttctcctccacaatggatgcagaa

SEQ ID NO: 3925 - DNA, 544 bp, Gossypium hirsutum
  Clone ID: LIB3825-029-Q6-N6-G3
aaagaaaaaccttttattttattgaactcaaatctaaaatacatgcccttatagtttgcaacatttaagtcaaaatttagcagcaacatgatcttacaaacattaagaaaccagcatgtttaagaactatttcaaacctgcaatttattggaattaaaaccttttctttttctttctggaagtacccattgacaaactttgtttcatgtcctttttgcttctaaaatcttaaatcacagcttatgaatggtttccatgtcacttacttccttcagggtccctttctcgacatgatcccaccacttgaacaagaaattatccacgacgagtctgaaccatggtgacagtttcaaaccatcttcaccagcatcagctttacgcagtaactccttcagttggtcacggttcacgtatttagcctctgctacctcatcagggtttggatgaacgttaacatctcggacaatgaataggaggtaatcaagttcatgctcgccccacttgccgtcagaaggtgccttgtacagcatgcggctcagtggga

SEQ ID NO: 3926 - DNA, 434 bp, Gossypium hirsutum
  Clone ID: LIB3825-029-Q6-N6-G4
ggccgcaaggggggatccttttaaaaaaccccccactttaaaaagggtccataaaacctttaaagggccccccccctctggggggggttccaaaaaaatcccccaatttagggccccaccaaccctaaaccccaaaaaaaagcccctaggggccgcctatttaaaaaaaaaaccccccttggggggggccaattttaggggtgggaattggttataaaattttttccccgggcttttttttttaaaaacctttttaaaagaaacaggggcccctcctttaaggggggaagggcaacaaggggaaacatttttgccccccctagtttaaaaaaaacttttttgggaaccgaacccccagactaaaagttttaaccccccctaaaaatttgccagttttttaaccacaaaaccgggcagtggcctttttttttttt

SEQ ID NO: 3927 - DNA, 503 bp, Gossypium hirsutum
  Clone ID: LIB3825-029-Q6-N6-G5
aactgtcctgttttacactgttcatttcaacaggaccaaacttttttttatttggttcatcagttcgaacttgaaaaaaaaaaactttttatgcaaacaaacaacaaacacagactcaaggcagaattcttacacaaaaaggcgctcctttcatttagtgggatcggtaataagagatcatctctgggtacctaacgcagggtgctctcttaataaacaccagacattgttaggcaccaacagcttgggtaagtttttggatttccctgtggaaccgaaaagcgagccctctggggtctaacgcacaaaccccatactgctgaggtaatattgcctgcctgtatccacccactacctgcgtggggtcccactgtaggatgtacaccggcaccgccatagccaccagggtcccctctgttgaacacacctgtggtgtagccagtaccaccaataccaccaccaccagcatggccacccgtggcgatatgatggcccacctcttg

SEQ ID NO: 3928 - DNA, 552 bp, Gossypium hirsutum
  Clone ID: LIB3825-029-Q6-N6-G6
ggcttcacaatgaagacatgatttctagaaccaaaactcacaccctagccatacttcccattatcattcaaacacccagaaatgcacattcgtcccagaattcatactgttctgtttatttagaagatatgcaacaaagaacgtacttgtattacaaaaagacaacacaaacagaagttaaaataatgaaaagcaacgcaaatattccacccctatattaagggtatgtgcagtgtgagatcacattttggttttgctggagcgatcacgaatagcgccttcctccccaacacgcccaacatcattgaatgtttcatcagatgatctcacggtagcatcaacggctcctgccggggattcttcaaccttaatcactatcgtctctgaaagcccttcacgaccttggcgtttcacatcatcatcgtaagtcttccttctaccttcatcacctctcagcttcatctcttccatcttctgtctagctgactccgtcgtttcactcaatgtttccctggtgttctgtgcagtctcggatgtcttctgcttcgtttc

SEQ ID NO: 3929 - DNA, 533 bp, Gossypium hirsutum
  Clone ID: LIB3825-029-Q6-N6-G7
aaccctccataatactataaattcttatattataaggatcaaagtgacaaatctatttccaagctattatttagaataaagataatatacatttcagagaggaacatctagaacagttaaggtgaaaaaggtgttctctaataggctcaatgtgtatctgagaaaagtgaaaatgatatctaaagatggatcggatgtcctaaaactcccccaaactgatacaaagtagtttccttctatgcacatggaagcactgttatgcttctggatctccttcctgcaggattcaatgatccaagctgcacaagctttgctctctaaatccacctctgcaacatcgctccatcaaagaataaattgactcggatgtttgaatttctctttcacacctaatattggcctacatcttttgagtaagcttctcatgtttgaccattatcgtcgccatttaaaccattttgcatgctgcagggttcaggggtcttaattgacatggtaggaggagggtgtagcccaaagacggcttggtgcct

SEQ ID NO: 3930 - DNA, 564 bp, Gossypium hirsutum
  Clone ID: LIB3825-029-Q6-N6-G8
gaaacataaagatttaatagttacttaaaaccttaaaaaatggtttatctcaatggccttcggcattgagagacaacaatcacaatttcagcgttcgacatgggaaagagaatgacacaggcactggcaataggaactcggaatattccatgatatatgttgatgctggtcatgatgatggccgatgattttatgcaaagacagggaaggacagcacaatgtacaagtgcactactcagtttctgtttttcttaagaatacaaatcaaattaccagtattggaagatgctaagcctttaatcaaaagatcatatggatccgagcagagcacgattacagtaatagcaggcagcttccatcatctacgcaccattcattgcagtatcggcatggagtccatttgcatcttccattgtcttgccattaacttcacttctccgcctccaatcagcagggtctacagaattcccattcaagagcttctggttctcttctttggtcttactatccttgtccttggtgcttaatggtagcaacagaggtaaatttccactggttctgtca

SEQ ID NO: 3931 - DNA, 522 bp, Gossypium hirsutum
  Clone ID: LIB3825-029-Q6-N6-H1
aagctcacctatgccgaattatttaccacattcttaacaaaacatatcaaacataattcacataaataaatatgccatagccgggataccaaaatcaacatatctaacacttggtcaaaagcacaaaataaataagcccttttcgcatgggtcatattaacatacccaaaatcaaacattttaactagactatacatgccataagttcaatttcaaacttagtaaaatatcgaaaacagtactcgatagggggatagacttctttgacgatcgccgagctcataaccaacttccaaatttataaaacagaaagcgattacccacagtaagctatcaaagcttagtaagtcataagcaaataaacatttaatcatttacgtaaattaagctagacaattagtaataaaccattataatttcacatataattcaatttatcaaattatatatcaaaacttatataatttggaataacttccctttttaccaaataattaattgataatataactaatcatcatt

SEQ ID NO: 3932 - DNA, 571 bp, Gossypium hirsutum
  Clone ID: LIB3825-029-Q6-N6-H10
atctgaatccgcactatccattaccatatatcaatctaaaaatgtacaagatgccacatctaaccacccattaattacaacatcaacctaaattgttgagctaccaagcttaaaagataatgcctacctagccactcatttattacaacttcaatctaaatggttaaacttcctgccttaaaaggcaatgcctgtctacgatacaaggacccttcatttttcttaaaatactcataacaccaatggataatacgtttgaacatggatatcgagatacgaaaatgattacttttgttgaatgtgcatttgtatccgacgctcattttttgactccggatgacattgataccctctttgaataaagccacaaaaatggttgattggctacaaagggtaaaaactaagaacctgggtctctaagttcatacccatgagactggaatttcttccggcgagaccgggggaagagtagttgtcggattttcttttcagctgcagcttcagacatagcccgaattttgaatggaaaacgacaagtccgtacttccacaccagagaatattcttacatc

SEQ ID NO: 3933 - DNA, 583 bp, Gossypium hirsutum
  Clone ID: LIB3825-029-Q6-N6-H12
tcgcgatctagactaggaaacattgttgtgaaaggtcgattttaagaccagaagctcgcttgtcaggccccaaaccaccaggcctgttgctgatttgaagtttcgaatgttgaacgccgcatcgaactagattgttattctcgttgaattctggaaaactagattagccataaagcaatacagaaaaggcgaaattgtttcgcagttcctctcttgaaaacccacggcattgacagaaaatataaagactattttcaacccaagaacgacaacggggacatctgtcacttgcagaaactcttctgtatctgagattagctagatgagggatgaaatcccaagagattcgccaaataattatagtgatttttgaaggaagctgtaaaccacataattttttatagaaatctgtagtttctgtttgtattaagaaattactagatctggattagccccttgtaatagtttataggcgctgcgaactgaaaattccctggacagttctcctttccagacttgaatatcttcatgacccgtctctgcaagtgggatctgtaaaattttctttgcaatttctgctgaa

SEQ ID NO: 3934 - DNA, 537 bp, Gossypium hirsutum
  Clone ID: LIB3825-029-Q6-N6-H2
cctaatcaaatttaaaacataattaaaaataagaggtggagtcaagatacaaaaccattaagttaaaagaggttgggcttttaatcaatttctaacaaaccctcaaagtcacaagttgttgaattcttgcagtagttaacaaaggtacaaggcggttgcttttcatgtgccataaacataacaaaatccttaatcttatacttctcgtccttagcttcaacaacttctcttcgtgattcgtaataaaaaacacaaactatataggtttttacagcatcagaccatcctgaattcattaaacatcaaagaaagcaaatatcctagcaacaaatcagcaaatcagagaggtgaatttattaagccctttcaccacgaatcctcctagctagttgaatgtccttgggcatgattgtaacacgcttagcatgaatggcgcacaggttggtatcttcgaacaatccaacaaggtatgcctctgccgcctcttgcaacgccaaaacagcatggctctggaaacgcagatcggtcttaaagtct

SEQ ID NO: 3935 - DNA, 568 bp, Gossypium hirsutum
  Clone ID: LIB3825-029-Q6-N6-H4
aaatgatcattgatttttttccctttttttctccttttttttttttgtgaaaacaaatgtcaagtgaaaaaagctgtgcagacaaggaaaaaaaggtacccatatcccaaaagacttcaggttctgccaagggacgtgtgcctaaaagtaagaaacaaacgccggtacctaaaatactacttaccaaactgctggctttctctgtcgggttttttttcttgtcggatcaacaatggttgcatagatgacacaccgatctaaactcgagatccttgcatcatgctgttgatgccaaactcaaccttatcacaggattctgcacagattctgaatcaacaactccgttcatggacttaagaaccacgccaaccacagtttttggcttcacaacagaaaaacaacaaacaaaaacatatagcttaggtaaagaagttgactcaacggatcaaaatatagcacgaggagggagacaataggttatttgaagcttgaactagtaagagtcgttcatctcgaggatcatgtagtgcccaacttgaagtttatatactactatggcaacaaacat

SEQ ID NO: 3936 - DNA, 442 bp, Gossypium hirsutum
  Clone ID: LIB3825-029-Q6-N6-H6
catatctatcactacttgaaatgatattggttctaaaaagctccatattactaccgaaatgttcacccactgcactatgattgtcttacaaacacgataacctactaatactgataggaggaggatgataacggctgcaatgaagtagagactgggtgactcgctagttttatggctattttctttgccggaaatttccatgttcttttcttgggtagagcttgatgtcgaacagtcagggagaactacatcccaaaaatactaaaaaacactctaatggcttcttcttcaagatccaatatttttgatgcatcatttggagcttccatggacatcaactcaacacaatgatcttttaaaacctcaagtgtctctgatggttgaagatagccacagatatatgtacccgccaaccatggaacaaagactctccgacgtagca

SEQ ID NO: 3937 - DNA, 537 bp, Gossypium hirsutum
  Clone ID: LIB3825-029-Q6-N6-H7
gctgcaacattcaaaaaattggggataaactccacctttttaattgtcagggaactgattctgaacaaataaaaaattttagagaaaacgaaaatcttcccaacacattaaaaaaacgaagaaaaagaaaactctcaaacacaatttaaagttgtaaataaatccggcaacaaaattctttaacctgaagatccagctaaagcagcaagcaaaacccatcctacctaattgggaaatctgatgaaaaaaatcttaaaaacttcacctgaaagttcaaattacaagccattgttaattctcagacatgctttcatctcttaaacccctgttaagatgcacccggaatagcagctgcagcatacatgctcggatcctgatttgatggcatagcatagccgtaaccataaccaccatatacttgcccttgataatatcctccattccactggttacccgaatcggctctccactgtttgtttacattgcgaccccaagaaagacggacagtctgcttccctatggttggcccgttcaaac

SEQ ID NO: 3938 - DNA, 534 bp, Gossypium hirsutum
  Clone ID: LIB3825-029-Q6-N6-H8
atccaagtacaacttttttattattatttaaccgaaattgcaagcggtgcttacatggtaaaacttgaaagacagagttggagtgcaaaagttcttaaccatgacatatgtaattcagacgttagtgaagcgcaggtaatccttccctgatggaaggtttttggtctcaaaacctcgagggaacatttttttggcttcctcgttgggcaccgatggcgaaatcactaccggctccccttgtttccagttcgccggtgtcgccactttgtactgcgatgtcttctgcagtgagtccactgcccgcatcacttcatccatgtttcgccctgtggttgcttgttatcagagcccacgatatgcagagctctggatgggagctcgctccctgaagagtctctttcatttgggtccaccatgttaagttgcttaatgatctctctcctgggatctgccacgattgggtatgccaccttgcacccaggcgtgtaagcttcaacatctttgatccactccttgtgtgactgcacatcgtcg

SEQ ID NO: 3939 - DNA, 581 bp, Gossypium hirsutum
  unsure (1)..(581): unsure at all n locations; Clone ID: LIB3825-030-Q6-K6-A11
ttcggtctggcagaagttggggaacgactgtgaanaaaccctccctggtactggaggaggcaaaaatccaaatgatgagcttttggtcaaattccttttcctgttacctttctgtgttctagtttgttactatcgttcttttcttcatgttagtggatacaaaattatttttctttttctaaatcaatgcatagatgagtgctgtcctgttcccaaaccatattagtctttttggtgcagacagggggctttcttttcagaacttcattatgcaatcacatcagacacctttacttcataattagatcaagtgggacagttgcctacagtggtgtatcttcatcatctaacattaatgttaataatccaaccaaggtgcctgtctacctgggtggcatttctgtttttgtatgttttatggctgctgtggtgtcccttggaatttctatcacaattgtgcctcaacaagtgatgccatggactgggaaggagaatagtgacgcaactgaccccagtttctgctgatacagatttgtttaactctgattctaaaaaagaacattgacaggcatcctcttgtg

SEQ ID NO: 3940 - DNA, 458 bp, Gossypium hirsutum
  unsure (1)..(458): unsure at all n locations; Clone ID: LIB3825-030-Q6-K6-A12
ataataattggttcataaaccaaagnaaacgccattggnaaaccttctgaagacatgcaattcatggtgatggatggtctgcatccgcaaaatgcagctttatatatggatgttcattacatgggtgatggtccttactgtttgggaccatgataatgtgcaatacaccattatatatatatgtgcttgttgtttgtttagttacactgcagtcacagtgtatgttctttcgatattacaaacatcctttttataattttgtgcattcgtcgtcattttaccagttacacaagatttgggatgtttgcttttttttgctgctcatgttcgatggtatgctgtcgtgctttgtctgcaagtagaagggcatgtaaggagctttaatcctgtaagagagatggtaattgtgtaattgaaatttcatgtctgtatgtttaagtactacctgttttaagtgt

SEQ ID NO: 3941 - DNA, 576 bp, Gossypium hirsutum
  unsure (1)..(576): unsure at all n locations; Clone ID: LIB3825-030-Q6-K6-A2
ggcagacttacgaggntttggtagctgatgttttggtgattgagtcaggaagagtcgagttgccgagttatgagggtgagttggaatcagcgagttgggttaacgagtcaggtaggagccaagtttgggttggatccaaaggaaaggaaagggaaagcgaaagaaggaaaggcgtcccttggaccgaagaagaacacagattatttttgattggacttcaaaagtatgggaaaggagattggaggagcatatcaagaaatgccgtcgtttcaagaacgccaactcaagtagcgagccatgcacagaagtactttcttcgtctcaactccgtcaatgaaaaaaacaagaaaaggtccagcattcatgatttgaaaatgggagatgataattccatggacccccaatccaagtttttcaatgaacaaggaagctcctttgtgaataatcatgggtatgaattccctttgttgtaacttgtatagttagattacttacacaaaacacgaacttaagaacttgcgtgaatacccgttcttgtaacttgtacagttttataaaacagcttgcaacttatct

SEQ ID NO: 3942 - DNA, 576 bp, Gossypium hirsutum
  Clone ID: LIB3825-030-Q6-K6-A3
ctctcccccccaaaaaaaccctaaacttgattctttcatctaatcctttcctctctcttctaatttaaacttatctttagtcgatcgagcttctgctaccgtcgaagctgtctttctcatatctcaagcctcaaacaagattgaaataaagtaggtagcagagaggggtcttctgcagtgtgcactatccttcgtgttccttaaataatttatttgcaattatgggaaaatgtgttcacctatggatgatgatgagccagcagtgagatgcatgtgaggggcttggctactttacaaatgctttgatctctctgtttctctttgtcaggactttgagatgggttcttgcttctcatccgcagccaacggaaaaagtggcaacaaaagggatgaccaagtgacagatgcatccacggctataacctgtgcttcgcccaagaagcagaagcaaaggcaggggctagggaggtggaggaagaaatctagtgggttagtgccaatgggtgaggcagagcttcatctcattccagggagaatgtttttgaatggtgccagcagtgttgcatgcttgtatac

SEQ ID NO: 3943 - DNA, 579 bp, Gossypium hirsutum
  unsure (1)..(579): unsure at all n locations; Clone ID: LIB3825-030-Q6-K6-A5
tccgctgcttctttcttctcttggtacttcattatttttcctttcacttcctttttgtgaaaaacatgaaccctttaagaccatagaagagtgtggaggtgcaatcatttccgatttcattgccgtgaacgcggtcggaagttaaccgccgaggatctttggtctgaacttgacacattctccgacctgttgggtctggattacggaaatggaaaagaccctttcactcagttcgacaacaccaaggccggttccaanagccaagaaccttgaaaaagtgacaaacgagtcgactcagaagacaagccgggggagagagaaagaagggaagactcagcgaactcgaaagaacatttacagaggaatcaggcgaaggccatgggggaaatgggcggctgagataagagatcctcacaaaggtgtccgaatctggctcggtacatacaacacggctgaagaagcggctcgagcctacgatgaagccgccaagcgcatccgcggggacaaagccaagctcaacttccctcaaactccacgcctaactcagcctcctgctaagaaaagtgtatgatggctcct

SEQ ID NO: 3944 - DNA, 584 bp, Gossypium hirsutum
  Clone ID: LIB3825-030-Q6-K6-A6
ggcacttgccaagttgttcacccatctgctgatcaaagcaataaggcttctatcttagaactatcacaggacatggtcaaggatcaaacatacttcctttcgcatctctcacagttccagctcaaacaacttattttcccacttggatgtctctcaaaggatgaagttcgccaactagctgctaaatttgacttgcctaacaaaggtaggaaggattcacaaggaatttgctttcttgggaagataaggttcagtgattttgttgcaaggcatattggggagatggaaggaatcatattagaagccgagacaggagacttccttgggaaacatagagggttttggttctacacaattggtcaacgccaaggcctacgtctccctgggggaccttggtatgtggttcagaaggatgtaaaaaataatgttgtatttgtgtcaagaaattatttctcgttggacaaaagaaggcgtgtgtttcgtgttggctctttgaagtggtttagtgggtcacctcctaaccatattgatcagctccaatgcaaggtcagacatggtcctggcttttataactgcaattttaa

SEQ ID NO: 3945 - DNA, 574 bp, Gossypium hirsutum
  Clone ID: LIB3825-030-Q6-K6-A7
gtccagctgtatagagcctttgtgcctcaatccatcctttcaagtaccatgcttcactcctaggcttctatcgcttgcttccagatcaaggaagataaaatctgatctagccactcagattagccccatgccacagcttgtagtggagccaaccagtgcccggtcaaactcatttgtcggaactcatgaataccttgctccagaaatcatcaaaggtgagggtcatgggaatgccgttgattggtggacgtttggaatctttctgtttgagcttttgtatggtaaaacacccttcaagggttcaggaaacgatgaaacactatccaatgtggtgtcacacagccttaggtttcctagcagccctatagttagttttcatgcaagagatctgataagagggcttttagttaaggaacctgagaaccggttaggatcagtgaaaggagctacggagatcaaacaacaccctttctttgaaggcctaaattgggctttgatacgatgtgcaataccacccgagatgcctaggttctgtgactcgagcatctgtttgccaactgcagctttgcagaaa

SEQ ID NO: 3946 - DNA, 583 bp, Gossypium hirsutum
  unsure (1)..(583): unsure at all n locations; Clone ID: LIB3825-030-Q6-K6-A8
tccgataatggacatcagaaggaaagggaaggaaaatctccaagaaagatcttctntcacagggtggaaaatcgaatcacgaagctatgggcaatgaatggctgcaaaacgggaactgtccgattgcaaagtcgtatagggcggtcagcggtgttttgccactagttgcgaaggttttgcagccgccaccggggatgaaatacaggtgcccacctgcagttgttgcagcccgggcagcactagcacaaaccgcatttgccaagaatctccgcccacaatccttacccacaaaagtactggtgatcggggtgttaggcatggcggcaaatgttccgttagggatatggcgggaacacactgaaaaattctcaccatcttggtttgtggctatccatgcagctgttccattcatagccatgctccggaaatcagtgttgatgccaaagacagctatggcatttaccattgcagcgtctgtattaggacaggttatcggatctagggccgaacgatatcgattgaaagcagtagcagcaaagcgattaggtatggaggaatcatcggtttctgtgggtggtgcgaa

SEQ ID NO: 3947 - DNA, 579 bp, Gossypium hirsutum
  Clone ID: LIB3825-030-Q6-K6-A9
gcaaattaccctaaaacctttcataaaaattgaagagcagtcaatgaaggatgctgctgcctctgctaagccggatggagaagccaagcctccatgcagaaaggtggaccaaatgaagacaagggaccctaatgagaaagagatggcgagggaaaggaaagaagagagacaagaagatgcagagctgaggaaacaagaggcccgccatcataacgccacggctggccatgctggtggtggtggtattggtggtactggctacaccacagctgggtacaacagaggggatactggtggctatggcggtaccggtggacatgacaaccgtgggtaccccaccgcaggtagtgggtatgatacaggcaggcaagatgacctcagcagtatggggtttggcggagatacagggggtgcttacggtacaacgggaaaccaagacttcccaagtgcggcgcctaacaatgctgggactagaaggagcacccgcggaggtacccaggatgatccttattatcgatcctattaaatgaaaggagcgactttttgtgctctgctactgccttgagtctgtgtttgttg

SEQ ID NO: 3948 - DNA, 588 bp, Gossypium hirsutum
  Clone ID: LIB3825-030-Q6-K6-B10
cacactcaagccaaggcttcctctctcatagcgccgcctctttgcgtctcttcgcttcttcatcttcttcctcttcctccgccgccgctagactttctctccgttccacttccctttctttctcttcttctctcaaatccctcgctttctctactctttctcgccacaagaggggatcggctgtcagtgtgtcgagtaccggagggtttagctctgtagccagtccgaaatgcgctgcttcggatcctgatcagttgaagagtgctagagaagatatcaaggagcttctcaaatccaaattctgccatcctattctggttcgtctagggtggcacgatgctggtacctacaacaagaacattgaggaatggccacgaaggggtggtgccaatggaagtcttaggtttgaagtcgagctgaaacatgcagcaaatgctggtcttgtcaatgcattgaatcttcttcagcatatcaaggacaagtactctggtgtaacttatgcggatttgttccagttggctagtgcgactgctattgaggaggctgggggacccaaaattccaatgaaatatggaagagttgatgtct

SEQ ID NO: 3949 - DNA, 510 bp, Gossypium hirsutum
  Clone ID: LIB3825-030-Q6-K6-B2
aatttgctcctaaaacccattcctatagattgagtacacccacaacgtaagatgctattgcctataataatgcccttatggactaatgtcaatgtcttctgacgagaaaagctagccatatgaaaacactgtaccctaatgtagaaaaaactgtaaagggtataggaaagtataaaaacaataacatgcattactgatgaaacacgcagacctccatcataacacccaaattgtaccatgctggtggtgatccaattgtctggactgtctaccccacagttgagtacaacaaatgcaatactatgggctataactcaaccgaggggacatgacaaccttaaacaccccaacaaccctgtgaaaatgatacaggcattcttttattacctgcatagtatgacgacaagtcggactaccaacagcgcttaccgaccaacaagaaacctatattacaaaaaccgcgcctgaacaatgttggctactaggaagagcacccaacagggtacccat

SEQ ID NO: 3950 - DNA, 584 bp, Gossypium hirsutum
  unsure (1)..(584): unsure at all n locations; Clone ID: LIB3825-030-Q6-K6-B4
cggncgcgtgggtttttttttttattaaaatatcataatttatataaatataaaataacttcaacacagattgtaacatgataaagtacatgaacatgatacaagtacacagaaggtctaagtctctacttcagagcaaggaataaatagttggtagagttttgctcagcatcaaactaaagaatattatacgttttgacatctgcatgatcgatgagaacatgattaataatcaagaagcaggcaactaacctacgacccaaaattctgctgagctgaacacgccacccaatgccggccgttcactgggagcaaaaacagtcagatatttatctacaacatcaagtcaggagctttaactttgcaggtgtacaccaacaattccagcatctttcactagctgctctgtcaaagctgaaagcttggctactcctgttttaacctcagtgaaactttcatcgttcttcatcatgctaatcattggatcagaaccactttgcaggaagatactggtatcagaatcagactcaatactagtgctagctttaatcaaaagttcatggctcatttcagccagtttttga

SEQ ID NO: 3951 - DNA, 390 bp, Gossypium hirsutum
  Clone ID: LIB3825-030-Q6-K6-B5
tccgttttttatcgcaagacgttaaaagggtccttgcgatcttgtgctaccatcctggaaaacatttggcatgtaagaggtagatctgtctcaagttgcctttggtagccgatcatgtatcaccgtatcattatatcaaacaggccctcaatggtcattcaaaatatctgttataggacctgatcgacgcatactttcgtcctgctctgccattttcattttcctttactgcagatacctagctatatggttatcgccggattgcacacagtttaattatttagatgctctatgaaagtggttattttgctggattgtataaaacctttacatatttgatctttcttcatatttttaatcaaatagaatggtttattgtcaactgaacct

SEQ ID NO: 3952 - DNA, 64 bp, Gossypium hirsutum
  Clone ID: LIB3825-030-Q6-K6-B6
ccccgcgtccggttctagaacgcgggcggccgccctttttattaaatacttctattcttttctt

SEQ ID NO: 3953 - DNA, 589 bp, Gossypium hirsutum
  Clone ID: LIB3825-030-Q6-K6-B7
acgggtttgatggaactaatgattcaggtgtaaggttattacagaaattatgaatcatgctagagatatccttagtgacgaacttcagaaggtgaaattcctgtctttcgttcagagtacattgagcaagaaagaaccaggtttctcaaagcagcttcgataacaatgagctaccaattgttccaaaaatttctcaggttttggaggaaagaactagtaaactacaaacaataatggcagcacctactcccagtgaaactgttccacttttaaacaaagaaaatatcatgaatgtgaacctcagcaaggattactcgagaaaatcgtgtggatttgctaccatgagattgaggtcccatgcggctgtactcataattgctgctactgctatttgcttaggcatgtgtgcagtcattttccaccccaacagagttggtgagtttgcagtaacaatgcgcaggtgtttgttcgacagggtataagggggtatatggacaaaacaattagtgcatgcgaacagggacgaggcatgcttggaccattgcttcgttaggatgtaaatatatgtatgttagtgtttgatgaaatc

SEQ ID NO: 3954 - DNA, 567 bp, Gossypium hirsutum
  unsure (1)..(567): unsure at all n locations; Clone ID: LIB3825-030-Q6-K6-B8
aaccttcaactctgggnatttggttcgctatgaagattgtgtcgcgtgcacaatgctgcactgagtgctcaaccagccttggttgagaatgagaagaagctcttggaaaaaataatattctatgcttaatggagattatcttcagccgcccttctgatgatcgaactattcctttaaagttattgctgagagaacaaaattgtcaattgaggatgttgagtatcttctcatgaagagcctgtctgttcgtctgattgagggcataattgatcaagttgagggaacaattcatgtctcttgggtgcagccaagagttttggggattccacagatcaaatccttgcgtgaccggttggataattggatgggcaaagtacataacgcttggttatcaattgaggctgaaacacctgatcttgttgcatcatgaatttttttctccagttcctttctgccattgtaacaatttcgttatttgaaaagggcaagaaaaagggaaagtgaaatgatgagcaatgaggatagagataagcgttagtcatttgcgggtagagccatctttgtatg

SEQ ID NO: 3955 - DNA, 576 bp, Gossypium hirsutum
  Clone ID: LIB3825-030-Q6-K6-B9
tttgaacttcagtgccaaaatctaggatttgcgggtggagaagacgagagcccatctctctgcttcaaagctcctgtccaggtagaattctcttcttcccttgcgttgtgttctttcctgttcaatcgccatggcttcaaagcggattttgaaagaactcaaggatttgcagaaagatccacccacttcttgcagtgctggtccagtagctgaagacatgtttcattggcaagcaacaatcatgggaccctcagatagcccttatgctggaggtgtgtttttagttactatccatttccctccagattatcctttcaagcctcctaaggttgcatttaggaccaaggtcttccatcccaacatcaacagcaatggaagcatttgtcttgatatcctcaaagaacaatggagccctgcactaaccatttccaaggttctgctctcaatctgctcactgctgaccgatccaaaccctgatgaccctcttgttccggagattgctcacatgtataagaccgatcgggccaagtatgaagccactgctcgtagctggacccagaagtatgcgatgggatg

SEQ ID NO: 3956 - DNA, 203 bp, Gossypium hirsutum
  unsure (1)..(203): unsure at all n locations; Clone ID: LIB3825-030-Q6-K6-C1
gttgatcagnaacaaattacccggnacctctctggnaaaaacttcagatgtaacagatatggacaaagggctataagagttgatattccagatattgtttctgtatcagcatgtgctgatctgactttaccaccaggtgcaggtctctgtatcgataccacctctggtccagttttcttggttgctgactcgtgggaatcact

SEQ ID NO: 3957 - DNA, 549 bp, Gossypium hirsutum
  unsure (1)..(549): unsure at all n locations; Clone ID: LIB3825-030-Q6-K6-C10
tccgcaacgcagnattgggcttcatggcggtgaaattcttgatagcgttaatcttagtaattgcagcatctctttgctgggtatcgtcggctgattcgtctgaagctgctttcgtcaaaaagaccatctctgcccacaagatcgtcatcttctcaaagtcctattgcccgtactgtaggaaggcaaaatctgtgttcaaggagttgaaagaagttccattcgttgtggagcttgatgagcgagatgatggatggaatattcaggatgccttgagtgagattgttggtaggcgtactgtaccacaggttttcattaatggaaaacacatcggaggctcagacgatactgttgaagcatatcagagtggaaaattggctaagctgttgggtattgaggtagagaacaaggatgatctctgagtccataaacaaaattgaatgtttgttgccagagtaaattttgattttattgcttttaaggtacttctttattgtacttcaactttgaactgtgaaccttatgttccataaagcaactttccgatgtcct

SEQ ID NO: 3958 - DNA, 407 bp, Gossypium hirsutum
  unsure (1)..(407): unsure at all n locations; Clone ID: LIB3825-030-Q6-K6-C11
gtttttgcnataaacaaggccgtggttccctctagctcaaaacgtacaatggaacacttcatggcctttagtgaaacgtgacgatggtaatgaagcggtggtttggagacatgctgtaaagcgtcaccctatactagcattcaacctttgaacaaggcgtagacttcacttcgtaactgatctgatctgttttttgaacaagaattagaaattattcatgtgccttaaagactcgtatcttatggtctctgtatgtctaactttacggaagggtatgttttttccatgtccgcattctactaactctaacggtcaattaacttatccactgtgtattgataaggtgaaggctactctattattgcctaacctactgtttaccctagtaccatcaggaggattaaaaa

SEQ ID NO: 3959 - DNA, 540 bp, Gossypium hirsutum
  unsure (1)..(540): unsure at all n locations; Clone ID: LIB3825-030-Q6-K6-C12
ntcgcaaaaaaaaaaaggggtaaaaaaatagaatgaagaaaaaacaccaaaccgacaaaaacaaaaaagggtactacaaaacgacataaaatattgctcaaatcctccagcagaacttagagaagaagaagcacaaactcaagcgtctagtccagactcccaattccttcttcatggatgtgaaatgtcaaggctgcttcaacataacaactgtgtttagccactctcaaactgtggtggtgtgtggcaattgccagactgttctttgccagcctacaggaggtaaagctagactcaccgagggatgctctttcaggaaaaaggtgattgatatggtttttgtcaaagagagtttcacaatgggtcaatttggctcatccttttgttttgatcatcatatatagagatagatagatagatagatagatacaagtgagttttgttggtatgttttaaggatttgattcggatgttgttgcttgatggttttaaatcatcaagtatggatttttattgctgcaagtaatggttttgagttga

SEQ ID NO: 3960 - DNA, 562 bp, Gossypium hirsutum
  Clone ID: LIB3825-030-Q6-K6-C2
tccggccagcttggcaagctgcaactggtggttttgatgccaaggcagcggaaggattcaacaatcgtatcataactggcaccatttttatgcgattatgtggattaaattaacaatatgatctgaaattacctgctggaacgacccttggttggctactttcgatgctggagaacctgttgctttaatggctggaatcacgtgtattcatgcagctagttatatcagtctggtatcggtgagacaaactcaagacccctgctatgaaataatccggccaagctgagttgttacaccaaggtacatttttgtttgctgagtaggatttttcaagagaatatggtatctgaagtttataaatacaccatttccagaatctgtaacatgataatttatacgatagtttcatgtactttctaaggttgtaccataaaaaaaattaagtggtgtatacgtgagctttacattcatggaatagaaattcttttattgtaaacctattctctcatatagtttcctataagatgtatatagactttaaccttaaactcggatgtgagtg

SEQ ID NO: 3961 - DNA, 585 bp, Gossypium hirsutum
  unsure (1)..(585): unsure at all n locations; Clone ID: LIB3825-030-Q6-K6-C3
cggccgcgtggggacagnaagtgcncttgattttggttggtttttcatgttctacttgctccaccttggattttgcatttttgctgcaattgctcctcctattgtcttccatgggaagtcgttaactggtatcctggcagcaattgatgttatctctgatcatatgttggcgggggtattcttctttgttggttttgggctattttgcttggagtcactgctgagcttgtgggttattcaggttagtttattgtattttattgaaaaaagaatatgtggcaatgtcatctgatttctctcttttaagatctgaactctaattagcattcttggtaagaaatgtttctttactcactctacatttaataatacatatcgtttcctaataaataatgttgcacgtgaatctgcataataagtgcttttttaagtttcattgaacatgtgaaaatggagatctatatgctagatttcttcgaatcagtgtcataatataataaattcatttattatgtagccgctttgcgttgatatttaattgcttttgacggagtgttttacctctgtgtgttggttggtatgtgc

SEQ ID NO: 3962 - DNA, 597 bp, Gossypium hirsutum
  Clone ID: LIB3825-030-Q6-K6-C4
gtccgaggcaggcaacgaaaactgggatgacactgtgctaacaaaagagaaagagaagcagaatgcagagaaaagtggaggcagtcatcaagagagaaagagccatggcctatgcatattccaaccagctatggaaatctactccgggatccggcattcgctctggcggatttccatggtggtggaactggttagatcatccactaccgcccgtcaatgctcctggaagccaaggcacaaagagtttccaacttaccccaccaaggccaaattcccaactgaagcctagttcaaggccgcagtcaagcagcagcaggcaaaggcaattcacctatgacaacatcatggaaactcctacaccaaaatccacaaggtccaccattctccatgccaaaagacggatgcgaacaccgccttcaagttcaagaccaagggctagaggagctgcttcaccattcgacttgcacgtaaaggacgatgatagccttatgagttgcccaccattttctgttccaaactacatgaatccaacagtttcaaccaaagccaaaaccagagctaacagtaatccaaaggagaggcatgttggtactcccc

SEQ ID NO: 3963 - DNA, 597 bp, Gossypium hirsutum
  unsure (1)..(597): unsure at all n locations; Clone ID: LIB3825-030-Q6-K6-C6
atcaaaanaggcggcaaaaaccatgatctctctagcaanaaagctaagatggatgcttcaccaaaaggggtggaggaacttcgtcggggaaatccagggtagtgccacaaagtctggtcgcaaaacaaaggaagatgctaaagtggatgggaaatccaaagatggttccaagagtgttagtaaatctggcaatgacagtgttgctaagtccaaggatcatagcacccccaaaactggcagtaaaccagttgacaatgcttcaaaagtagacaagaagtccaagaatgaggagagtggtgaaacaccaaagtctgcgaaatccaaggatgatggaagtgccacaccaaaagcttcctcaaagttaaagcaagacatctcaaagacggccaattccaagcaggaaacccccaaaatttcgtcccaatctaagggtaagtctcttaagagtgggggcaaatccaattctaatggcactggtaagtcaaaatctggttcgtcaaaggtgaaaggaagtgaaagcgtgaaggagagctcaactgattcagcaaaagttgtgggaaagtgtgaagcggaaagcaccaagtttgttgaaggcgc

SEQ ID NO: 3964 - DNA, 591 bp, Gossypium hirsutum
  Clone ID: LIB3825-030-Q6-K6-C7
cggccgcgtgggctcaaatgttttgcattttagtgtgtgatgcagcagcgaggaaggatccaaaacagcagatcaaggtcgttttcaagaactcgtcttgccgttgagggattttaaatctttttcactctcttttttctttaaaagaaaaaaaaaagtcgaactctgaaagcttactggcgatctttctccggtaaccatggcggctaacggtgaacgtgaggttcaaaagaactactggatggagcactccattgatttaacagaggatggtacgatacttgattccaaggacgcagatctcgacaaagaagaccgactcgaagtgctctccctgctcccgccatatgaagagaaatctattttggagttaggagctggcattggtcgatttaccggtgaattagctcagaaggctgatagtgttatagctttagacttcattgaggatgttatcaagaagaatgaaagcatcaatggacactataagaacatcaaattcctttgtgcagatgcgacttccccagatttggatatttcagaaggatcaatggacttgatattctcaaatttgctgctgatgtatctctc

SEQ ID NO: 3965 - DNA, 558 bp, Gossypium hirsutum
  unsure (1)..(558): unsure at all n locations; Clone ID: LIB3825-030-Q6-K6-C8
caaaagaagaatgcgacaatgtctcatatatgacacccccngagccgatgcaaagctcatcgggttggagtacatgatatcggagaatttgtttttgacgttgccggacgaagagaagccgctttggcattcgcatttgtacgaagtgaagagcggggtgttgtttatgccgcgagttccggggccgatcgagaggcatggtctggacaaagtttgcaagacttatgggaagaccatccatttttggcaagtcgataaaggtgataatctccctcttgggttacctcaattgatgatggctctcactagagatggtcagctcgatgaagaactcggtcgagatgtggagaagcgatttggggtatcatttgagaaagaaagggcgaagagagctgagttgacgggtccaacacatgggattcatccattggcaaatggtggtgggaaagggctgatccctaaactcagggaggtggattgtaagcctgctgattcagttccccgggtcttcgtttgaatcatcgtatcttttgagtatacgtttcttaacagcaatta

SEQ ID NO: 3966 - DNA, 598 bp, Gossypium hirsutum
  unsure (1)..(598): unsure at all n locations; Clone ID: LIB3825-030-Q6-K6-C9
ccccgcgtccgctttttcaaccctagtcctccttgaactgccgatttcccttcccttcgcagcagccaacagatttagggttggagagaacgcctttcagccttttagtctcctcctagcttcgattttaacaaagcaagaggagatccatggcatgcttttgaggtaactcttcctttcccccttttttacatttgaatgcaaataaagaaaaaaaaaagaaaaaaaaatgcagaaagaaaaagtcgagaagaagaaacccgaaaattttaatctcaaatcaccttttttttgctattgccttgtattcaatatgcgagtattgtggctgtattgtgtgttcgtattctctctcagcgtaaccttttacaaagactcaaactctggctttatagccgaaaggaaagaggaaaaattaacgaaaaacaaaaaatacaatgttttttctttttgtttttctttgctgttgttgcttgtttgtctccttgcaggtgcgggtgtgctggcgctcgggtacaagtggtgcgtgaaggctgtacggaggtgcgcnagggggtcgtacggaggcgtgctggaggctagggctgcggtgttcctt

SEQ ID NO: 3967 - DNA, 576 bp, Gossypium hirsutum
  Clone ID: LIB3825-030-Q6-K6-D2
cccagcgtccgtaaaacctttcctaaaaatgaagatgcagtcaatgaaggatgctgctgcctctgctaaggccggcatggagaaggccaaggcctccatgcaggcaaaagggtggtaccaagatgaagacagagggacccctaatgagaaaagagatggcgagggaaaggaaagaagagaacaagaagatgcagagctgaggaaacaagaggcccgccatcataacgccacggctggccatgctggtggtggtggtattggtggtactggctacaccacagctgggtacaacagaggggatactggtggctatggcggtaccggtggacatgacaaccgtgggtaccccaccgcaggtagtgggtatgatacaggcaggcaagatgacctcagcagtatggggtttggcggagatacagggggtgcttacggtacaacgggaaaccaagacttcccaagtgcggcgcctaacaatgctgggactagaaggagcacccgcggaggtacccaggatgatccttattatcgatcctattaaatgaaaggagcgactttttgtgctctgctactgccttg

SEQ ID NO: 3968 - DNA, 578 bp, Gossypium hirsutum
  unsure (1)..(578): unsure at all n locations; Clone ID: LIB3825-030-Q6-K6-D3
atcctctanaatagccagttttgatcaggagctccgggctgtagtgcaggagagcatggagcaacgcaagttggagctacggggccgacctacattaaacatgatgataccaatgaatgtatttgagggttctatcaaagatcatcatggaagggtagtgggaggggaaagtggtgatgaagcattggatgaagaggctggaggaagccgggaagtacaggtgaaagttctcgtgaagcgggggaacaaacaacagacgaaacaaatgtatattccccgtgattgtacgctagtccaaagcacgaaacagaaagaagccgcggagtttgaagagaaacaagacattaagaggctggtcttggagtataatgacagggtagaggaagagaataatggactcggaacacagacattgaattggccaagtggaaatagcagagcttatggccgtggaaactcatgggaaggatccagcggcaggggtggaggatcacgtcatcgccatcatagtcattcaggaagtggatcttattatggcagaaaaaatgagattcatggtagaataatggaaaattctg

SEQ ID NO: 3969 - DNA, 547 bp, Gossypium hirsutum
  unsure (1)..(547): unsure at all n locations; Clone ID: LIB3825-030-Q6-K6-D4
ctgcacattcttgctcaagtgctgttcatggagcaatggcagggtacaccggcttcacaagcggccttgtcaatggcaggcagacatacataccattctatagaattatagagaaacgaaacagcgttgtgattacggataggatgtgggcaagactgctgtcttcaacgaatcaaccaagctttttgtgcctcaaagactccattgaagacacaggcgatgaagaacaatcaaatcaattgttggcgaatggacattgtggcgaagaggaagaacaatcaaatcaattgttggcgaatggacattgtggcgaagaggattctctcatttcaaagatatgatcaactgaggtgataatgtggcggtgaatgctttctgcaggcaggcgaggctttaggttaacacagtattgtagtattaggattggtccaagggaacttttgcttggacttttgttatttaggaggaaagaattggacttttatatgtatcagatttattaattattaaataatagtattgtgaaaaaaaaaaaaannnnaaannn

SEQ ID NO: 3970 - DNA, 518 bp, Gossypium hirsutum
  unsure (1)..(518): unsure at all n locations; Clone ID: LIB3825-030-Q6-K6-D5
ggnatacagcgagggcaacaattcccccagcttgatctctcgtgagaagttgggagaggtggcaacctgggtcagcgccactgtggtctccgcctttttctcctctctcgagcgcttctcctgcgttaacctctccaccaacgaccctgacgatgacgacaatcccgacgaggccaaggaccgccctctcacctactcctgaatatctctctcggtacttgccacgtcatagactctcttgctttctcttgatttagggtctttgtatacagaaccaagaaaaaagtattaaggaaactttaaatgctctctatatgtgttggtcctcctgattgaaaagggaactcttgtgtaataaaggccttttttttttttggatatttaatcatctaagtctgttggtgctgtgttttctcaaaaaaaaaaaaaaaaaaaaaaaaaaaaaaaaaaaaaaaaaaaaaaanaaaaaaaaaaaaaaaaaaaaaaaanaaaaaaaaaaaaaagggggcggccgtttt

SEQ ID NO: 3971 - DNA, 466 bp, Gossypium hirsutum
  Clone ID: LIB3825-030-Q6-K6-D6
gagtgaatcacttctacttaatttaattaagtaaacatacatgtacataatatttggagtatagataatgacaaaaatttattctcatatcatattacattcatagcttgtcaaatacatcacacactattaccatcatacaccaaatacaacccctttttttacttttttttttcattttttccgcatataaaaataaagatgatacaaatattttgacaagccttcacattcattccatgcacccgatactataagggagaggaatagtaagacgatgatggaagatctaatcactgtcgctgctgctgctgctttcatggccatcttcatgcttcttcttctccttcttctttttcttttcgccctcgtgaccatgttcatgacctccctcgccgtggatcttgtccttgatcttatccataaacccttccttttgctgctcgccgtgaccgtgaccgtgacc

SEQ ID NO: 3972 - DNA, 590 bp, Gossypium hirsutum
  Clone ID: LIB3825-030-Q6-K6-D7
ctgcgctatgctttcatttcaatagccttttccggctctccatcgcccccctcccatagctctagagattattcctttcttctttctttctcaaacatttattattttctcataatacatataaaaaatcatccttcttttatactcttatctttgtcttatataatctcagggtgctagagcaacaaaaatacgaccatatatcaaagggaaaaaaaaagagattcaagggataatacgatgaccaagttaccttctttgtttctggttttgactttggtttctgtttttgtttgtgggtttggaaaaaggataccaattctgtcatttgatgaagggtatagtcagttgtttggagatgataatctagttctccatagagatggtaaagctgttcacttgtctttgaatgagagaacagggtctggatttgtgtctcaagacctttacttgcatggttacttcagtgcctcaataaagttacctgctgattatactgctggagttgtggttgctttctatatgtcaaatggtgatatgttcgagaagaaccacgatgaaatagattttgagttcttgggtaacatcag

SEQ ID NO: 3973 - DNA, 571 bp, Gossypium hirsutum
  Clone ID: LIB3825-030-Q6-K6-D9
ggaaataaaagcgtagctcttaattaattattttattttttatttttacaaggctcaacggcaggagtaagcagaatcctgcaatcaaattccatccatagaatctggagtcgggactgtaaattatgagaacagttgacattcaattgtattggtgaagaccggaaggaacgtgtaattaattagagagtaaacaagacagagatgttctcactcttttatggactttataagtacctatttagcaagacagagtttcatgtactcattcttggaatcgacaaggctgggaaaacaactttgttggagaaattgaaatccgtatactcaaacttggaaggtctaccacctgatcgaattgttccaactgttgggcttaatattggtcgcgtcgaagttctaaatacaaaacttgtgttctgggacttgggaggccaggtaagtggatgctgaatcaaaagccttgggtctattcactcgttttgctgcaatgtgttcgatataacttctcagagcactctgcgcggtttttattgaaatgtagataagggagatagactggaaatatgta

SEQ ID NO: 3974 - DNA, 589 bp, Gossypium hirsutum
  unsure (1)..(589): unsure at all n locations; Clone ID: LIB3825-030-Q6-K6-E1
gnaaaagtcagctgagaatcagcttgtatttgatcagctaactgacgatgccattaagttaatggagaatggcgactacaatgtgtaccatgagaagcaagaggttttccagcgcgaggcagagggatatgagaagttagctctggccagggacaaaagcttatctgctaatgctgggctggacaattcttatcccatcttgggaaatgacgtactcacagatgcaaataatcatggagcaacgtcctctgtacttactgacttggctgtgggtacttcaaattcagatctaacttctgcagaagcttcaaacaatgctgccgaaagttacgatatgtttgcagatgatgaagatgacgaaaaaccatcatctgagcctaattccactgcagccgttcaatcatcatcagaagctgtaaacacttcctccgagactggagatgtccaaaatgattatgtctatgacgagtcttcagggtactactacagtagcactttgggatattattatgacccatctactggattattttgctcagcagcaacagggcaatggtattcttttaatgagacaactggaacatatgat

SEQ ID NO: 3975 - DNA, 570 bp, Gossypium hirsutum
  unsure (1)..(570): unsure at all n locations; Clone ID: LIB3825-030-Q6-K6-E11
gngnaggcagtcttgatttggcatcaaattgcttcattcttgatttggtttccagttaaactctgagatagaaaagaggcagtgaaccagacggcggcgttgaaggtggggttgtgtctattgggcttctgctatccggctacatagtggttccacctctgtattggcatttcatggaaggatttagccttcagccacacttgcaacacttgcccaccttgcctttgtgattgctcttctcagcctcttctcacaatccctgaagttatgcagctcaaaacattgtgacttctgattgtcaattaagatttcaaaatagagcaccccttgctggtactggtttgcttgtgacatcagagaacgtgaatggaaatagggctatttgtgaattttgccagtcctctaaaatctctgagggcacctcaagtgtattttgttggtgacaatgttaagaaccttaaaccagaactggcaaagggtgcaaagctaaagtgctgcacttggctgttatgtgaagtcttgccgcagaagctatcatttcccttgtgcaaaaaagattccaaaatgtcg

SEQ ID NO: 3976 - DNA, 578 bp, Gossypium hirsutum
  Clone ID: LIB3825-030-Q6-K6-E12
atgtaagaaaactttccttaggagctaaaagaagttaagaactggctgttgatgctgaaattgagctcccaaccattgagttccgttcatcggatttgaagcgaggaaccgaaggtggaaccgtttgtgcaagagggttcgagaggcttgtgagactttcggttggttggagggggtgtacaaaaagatatcaacaaaaattcgagaggatgcatttgaattgttgaaagaactagttgaggtcccagtggagaggaaacagaagaacactagtcccttgccttaccatggttgggttggaccatgcgagcaggtttctgtgttgtatgaaggcttcggagtcggagatgcctccaactatgactctgttaaaagctttgctcaacttatgtggcctaatggtcacccacgctttactgagaccatacataccctaacaacgcaaatggaggagctgaacaagttaatttggttaatgctaactgatagttacggattacgggaggattcactgaaaatgaactacacaacgttggtgcggatgatgaaatacctggcccctccaccaggggaatatg

SEQ ID NO: 3977 - DNA, 486 bp, Gossypium hirsutum
  Clone ID: LIB3825-030-Q6-K6-E2
tccgcttgaacataaaaacttgacccgatttaggcgtggtccgcttttggctatacatacattttcacaaataaactgcctaaagagaaagatatcaaatatctggagtttctttttgtatattatatggatgattcgatccgcaaggaccatgattgggaattgtttgatcgtctttctccgagtaagaggcgaaacataatcaacttgaactcgggacagctatttgaaatcaattggattctagaattattcctcaaaggatagacaagagctgtcttatagccattagattccatatacctaattttaccccccccccttttttcctaatcattttttttatcgttttttatgcttttggccaaaggaaaatattataagtaaatggatttataattttgcatgaattgttgattttaaatgtaatgggggaacaggaccagaacatacgcagttgaataagataaagagacatttgtcttc

SEQ ID NO: 3978 - DNA, 592 bp, Gossypium hirsutum
  unsure (1)..(592): unsure at all n locations; Clone ID: LIB3825-030-Q6-K6-E3
gtttgtgacaaanagagggctgagctgagtgaagctaatatctcaaggactgctcaatctttgctgtcagctgcagggcatgttnactgagaagcaattacgtttagaagttcttggagctatatcctctctatctgagaacacaaatgaaaaattgttttcaatgaagtgttgactgctgctgcaagggatattgtcacgaaagatatatctaggctacgtggtggctggtcaatgcaagatgcattccatgcattttcacaacatatagtgctgtcagttctgttcctggagcatctgatctctgtacttaatcagactcgtgtcactaaaagtgatccaggaaaaggagaaaactctattcttctttctgaaactcagttagcagatgaaattctgcaagctgctatttttgctctcaccgccttcttcaggggtggcggtaaagttggaaagagagctgttgaacagaggtactcttcagttcttgctgcacttatactgcaatttggaaagtgtcatggtctagctaattctggtcaacatgagccactacgtgcacttttaactgcatttcaggccttttgtgaat

SEQ ID NO: 3979 - DNA, 567 bp, Gossypium hirsutum
  unsure (1)..(567): unsure at all n locations; Clone ID: LIB3825-030-Q6-K6-E5
cggccgcgtgggcttcacatgcacttttacgagacttgcccctatctcaagttcgctcatttcaccgctaaccaagctattctcgaagcttttgagggcanaaaaaanagtccatgttatcgatttctcaatgaaccaaggcatgcaatggcctgctttgatgcaagctttagcgttaagagttggtggtccgccagcttttaggttaactgggttcggacctcctagccacgacaactcagatcacttgcaggaagttggttgtaagttggctcagtttgccaaaaagattcacgtggagttcgagtatcgtgggttcgtggctaattcgttggccgatttggatgcttcaatgcttgatctcaggccgagtgaagttgaagccgtggccgttaactcggttttcgagttacataaattgttggctcggcctggtgccatcgacaaagtcttttctgtggtgaaacaaatgaagcctgaacttgttaccatcgttgagcaagaagcgaaccacaacggtcctgttttcttagaccggttcactgagtcattacatttttactcgac

SEQ ID NO: 3980 - DNA, 599 bp, Gossypium hirsutum
  unsure (1)..(599): unsure at all n locations; Clone ID: LIB3825-030-Q6-K6-E6
ctagnananaagcgagngtttcttcttcttcttcttcttcttcttcgctcctgtagaaagtttatttgctcttcanacaataaaaaaaataaaaaaagctttcctacagcagcgctcaagtttttatcaatccagagtttgaatttgaattgaacaaatcaatattaagataagagaaatggctcgctctctctccaacgctaagcttttctctacttttgttgtcgatggaatctctaacgttatctccagacgaggatatgcggcggcatcacaaggaattgtgtcgagtggaataagaggaggagcgggaaggagcgctgctacggtggccaagaaaacaggggaagagatgtctcgcggagctaaagagaaggtttcgtgggttcccgaccctgttaccggatgctacagacccgagaactgtcccaatgagatcgacgtggccgagctcagatccatgctcttgaagaagcactaaataaacaagggtgacctggttgcttgctcctcttttcttttggtcgacgaaatagattttaagatttgatgatgtaatattaataataaataatagtacttaacatttttaatcaaaa

SEQ ID NO: 3981 - DNA, 588 bp, Gossypium hirsutum
  Clone ID: LIB3825-030-Q6-K6-E7
ataattttagcaaaaaccatcatcagcttagtgcttttacggtgttgagtaagggggttgcaagtagggctctttgttttggggttgatgaatgtgtagagtagtgacttcagtctgatatgaatttattatgaactttatgctaagaagaacattgtggggttacatacagtgatgatagatgtttgccatgcctgtatgatttttcactttgcttttgttcatgctagtatgtgtgcttgcttacctgttgtcagtggaagtgttcaaactgacgcaactatgttatgtttaaagcattgcaatttgttttatcatgatatgagaacctagagcttaataaggttatgattgccacaaattgaaatatgagcttgggattgtttgtttttcttatatgtattttttcttgcagtatacaggaaacctgaagatatgaattaccactcagtttgcctgcatgttcttgcagattccgttcgcagtgcaggtttgatattggcatcctggtttctctctcttggcgttaataatgctgaagttctgtgcttgggactagtttcggtggcagtctttatgcttgtcatg

SEQ ID NO: 3982 - DNA, 562 bp, Gossypium hirsutum
  unsure (1)..(562): unsure at all n locations; Clone ID: LIB3825-030-Q6-K6-E8
ggagtttgtgagggttgtngaaagcaagcgagcaagttgtggcggggacgcttcaccatttgacggtggaagctgtcgacgccggcaaaaagaagctttatgaagccaagtttgggttaaaccttggatgaattttaaagaattgcaggagtttaaacatgctggtgatgctgatagttccgcttcttttaccgcttgtgatcttggtgccaagaaagagtccatggaccaatgctgcaagcggtggccacaaatgatcccgtagttcaggatgctgcggatcatgctgtgaagaccatacaacagagatccaattcccttctgccctacgaacttaaagaaatagttcatgccaacgctgaggtattggaagattttgcaaaactcaacatggttcttaaagtgaagagaggagacaaggaagagaagttcaaggtggaggtacaccataagaacgaagggacttaccatgtgaaccacatggagcaagaccagtcttgaaagctaacggtatggtaaaactgttaaaaagagtttgaatcttaatatgatgatatgacta

SEQ ID NO: 3983 - DNA, 588 bp, Gossypium hirsutum
  unsure (1)..(588): unsure at all n locations; Clone ID: LIB3825-030-Q6-K6-E9
ctcaaacttacttgtngaatccacatacacatcagctgaaatttgtgattttgggagtgctaaaatgctggtaaagggagagccgaatgtttcttacatctgctcgagatattatcgtgctcctgaactcatatttggtgctactgagtacacaactgctatagatatatggtccactggttgtgtgatggctgagttgcttcttggacagccactgtttcctggtgagagcggggtcgaccaattagttgaaatcattaaggttttggggactccaacaagggaggagatcaagtgcatgaacccaaactacaccgaattcaagtttccccagataaaaccacatccatggcacaaggtcttccaaaagcgtttacctccagaagcagtagaccttgtctgtaggttttttcagtactctcctaatttgcgatgcactgctttggaggcttgcattcaccctttctttgatgaattgagggacccaaatgttcgccttcccaacggccgtccgctaccaccactcttcaatttcaagcctcaagagctctctggtatccctcctgaagttgtcaagaaacttattcc

SEQ ID NO: 3984 - DNA, 580 bp, Gossypium hirsutum
  Clone ID: LIB3825-030-Q6-K6-F10
gttggctaactttttccagcaaacatcactcatattagtaccaggatagcaggaacaactggttatttggccccgagatatgctttgggtggtcagttaaccatgaaggctgacgtttatagtttcggtgtacttgtgctcgaaataattagtggacgaagtagctcaaagacaaactggggaggcacgatgaagttacttttggaatgggcatggcagctccatgaagaaggcaagctcatagaaatcgtggatcctgagctcggagaattcccggaggaagaagtccttaggtacataaaaatagcctttttctgcacgcaagcagcagccaatcgaaggcctttaatgagtcaggttattgaaatgctgggaagaaacgttcggctgaatgagaaagaactcatggcaccaggattctttcaagatggagaggcatcttcgagtaaaaagtcgcttgaatcatctgccgcgaccagctatcagatgagttctgttccagtcactattactgaggtgattcccaggtgaaagattcaagtgctatttttaattgttattttctggttatgaaggcttg

SEQ ID NO: 3985 - DNA, 590 bp, Gossypium hirsutum
  unsure (1)..(590): unsure at all n locations; Clone ID: LIB3825-030-Q6-K6-F12
gtttgtttttgtcagggccgactggcttttcaagctctcttctccanagaagtactaccacaaagcttttcttcctcctcatgacagaaagaataaggagaagcaaaagggaagtgtaggtgcagatgagcaaaatccagatcagaataatggagagacatcaattttacacttctccagcgaggcatgccaatcttgttctgaccatcaaggagtcgagaaaaaagtgttgtcaaaagctaagaacattgtggacgagagcttgctgacgattgggctaggacatgaaaagcttaaggcccgtcaaacaggatttaaaccttacaaaaggtgttctgtggaggccaaggaaagcagagtgatgaacacaggcagtcaaggtgaagagaaagatcccaagaggatacgcttggaaggggaagcactgacttgaattacactattgcatccaatcaacaaaggaaaattctgtttgctgcttgtgttctctaattttccccgtgtctgatttactatcatgtttaattttaagacttgcagctcacgagaccttatgtcaaagtgtgtgtactatatgtctatattggctt

SEQ ID NO: 3986 - DNA, 585 bp, Gossypium hirsutum
  unsure (1)..(585): unsure at all n locations; Clone ID: LIB3825-030-Q6-K6-F6
ttcnaagccacaacgaaaccttcccagcggcagtaatctgtttcgttatcaccccaacctgctacacccccaagctcttccttaatggctaacaatgtagcttggtcattgagctgagcctccccaagaaagatttcgatagaaaccaaacaagcaaaaatgacaagtacaaatatgccattatatgagctttatctttttatcaaatgaaaattcaacaacaaatacaatcacttgctgattagaacccacattacgttttcccttcaattttggctccaaatctcaaattttagacgaagaagcagtgaggttggagctaaagacagcaactttcttatggattaaaaacatcacagcttagaaaaagaatggagataaagctggagattgaaaacccagaaaaaagatgaaaggttttttgcaggaaatcccagtagagatagtatcagaatccaaggagaggagcccatagttttaggaaaagaaagggttgaatgagagagaaagggaaagaaacaaaagagagaagagggtacatgggcatgttggttatagaaggaagaagaagatggtttgtaatat

SEQ ID NO: 3987 - DNA, 581 bp, Gossypium hirsutum
  unsure (1)..(581): unsure at all n locations; Clone ID: LIB3825-030-Q6-K6-F7
tacttttccgtaattgaagcagnaaccagcaagcccaaactgcgattacaaacttctgtgggggaaaacatggcgggagcagctgaaccacaaaaacgccagagcgggagaccgttcccaccatcggcgagaggtccgcctcctcctcctcgccctcgctttgaacctgttgatcgcgaaaagattgtcctctattgcttcgcgttttcactaagattggtggtcatcattctaaagaagattttgcagtgagaggcaaggaacccaaggatgaggttcagatttatacatggaaggatgctacgcttcgtgagttgactgatctggtgaaagaggtagctccagcagcaaggagaagagatgcaaggctgtcctttgcatttgtatatcctgacaagaatggacgttttgtggtgagagaggtgggaaagaccttttcttacagtaatgtgaggcgattagatgacagcaaaaccttgggtgaacttagctttgagattggagattacttggatgtggctattatgtcatcggagctttcttctgtccgataagtgacttggatcgggaggtgctgcaat

SEQ ID NO: 3988 - DNA, 567 bp, Gossypium hirsutum
  unsure (1)..(567): unsure at all n locations; Clone ID: LIB3825-030-Q6-K6-F8
tttaanaaacatttccttagnacataaaagaaagttacgaacatgccgggtgtcaatcctgaaattgagttcccagccattgagtttcgtttatcggatttgaagcgaggaactgaaggatggaaccgtttgtgcaagagggttcaagaggcttgtgagactttcggttgtttcgaggtggtatatgaaaaggtatcgactaaactccgagaggatgcgtttgggttgatgaaagaaatggttgagctcccagtggagacgaaacagaagaataatagtcccatgccttaccatggttgggttggaccatgcaagcaggtttctgtgttgtatgaaggctttggagttggagatgcctccaactatgactctgttaaaagttttgctcaacttatgtggcctaatggtcacccacacttttctgacactattcataccctagggacgcaaatggaggagttgaacaagttaatttggttaatgttaattgatagttatggattaggggatgactcattgaagatgaactacacaacgttggtgcggatgatgaaatatatggcccct

SEQ ID NO: 3989 - DNA, 598 bp, Gossypium hirsutum
  Clone ID: LIB3825-030-Q6-K6-F9
gcttgtacgcacacaagcgttctagggagccaattctcgcaccacttgcctgcgagaagggagactgtatttcaactcctgctatataaagtaacactgttccctggcataccacgaaagagctgaaaaaacgctgctcgaacccaacggtaatcaggcttgacagaacgattccgctccagtaagagtaattgtcttgatgctagacgacactgtacctgacacgaggctacacgcaactaagtagctgcacgccctgaatggcagaatgacacacaccgtgaaaagggtcatatatcgcgtagatggttgtgggtccgctcaacaacacctctactcttgctaacccattccacaggtccttatactactacaaccattgattgctactgcacgagtcgagtttatccacgatactgtctaaaacaggctcgtccctcatgttttgactccaactgcataacggcctctattgcccaaaaagcttgattagctccctttagtaacgtgtagatccatctccaatctatacggtggtcaggacttccacagttgatgccacggaactaataaaggtatctaaatccaaactggaaca

SEQ ID NO: 3990 - DNA, 588 bp, Gossypium hirsutum
  Clone ID: LIB3825-030-Q6-K6-G1
tccgcccgataatatcaactgcagctgacatcctcaacttggtggtggtgggccttcaaggagttcccaatttgatcatcttcttcctccatcaatgggttcttcttcatcatcatcgtttcgccctcaacaacaggccatgggtttcgtcatggaagaatctaatcagattttcaaccaagaacatcaatcccagcatgggttgttgggaaacagcaaaccgttccaaggattaatgcagtttcctcccgacaacaacaacaacaacaacaacaacgccgcaagcaacgcttcttcggctgccaatctcttcaaccttagcttcctttccaacagcggcaacaatggcggtgctggcgattataatttaacatcttcgggtttgctcatttctgataatttcaacaatgaaaacggcggcaatggtggaaccaacaacgcctccaacctcttctccaacaacttaatgagtgatcaaatgacttccaacatcccttctctctttagctcatcggttcaaaacaataacatggtgccccaaatgtcagccaccgcattgcttcaaaaggctgctcaaatgggctctac

SEQ ID NO: 3991 - DNA, 560 bp, Gossypium hirsutum
  unsure (1)..(560): unsure at all n locations; Clone ID: LIB3825-030-Q6-K6-G10
agccttcttcgaatttcctcattcaaaatgcaaattttcgtcaaaaccctcaccggnaaaaaccatcacattggaggtggagagttctgatactattgacaatgtaaaggccaagattcaggacaaggaaggcatccccccagaccagcaaagttgatcttcgctggtaagcaacttgaggatggccgcacgttggctgattacaacatccagaaggagtccacactccacttagtgcttcgcctccgtggaggaatgcaaatttttgttaagactttgactgggaagaccattacattggaggtagagagttcagataccattgataatgttaaggcaaaaattcaggacaaggagggaattcccccagaccaacagaggctgatttttgctggtaagcaactggaggatggccgtaccctggctgactataacatccagaaggagtccaccctccacttggtgctccgtcttcgtggtggtatgcagatttttgtgaagacacttactgggaagaccatcaccctggaagttgagagctctgacacaatcgataatgt

SEQ ID NO: 3992 - DNA, 524 bp, Gossypium hirsutum
  Clone ID: LIB3825-030-Q6-K6-G12
cgggagcatgaagccgacacctgtgagccgctcggtatgactcgggaaccgagaggtgagcagagcgccccatatgaaccttgtgaagacccggacctgatgcagatcatgccagagctcacgaggcccggcgttacatgatctatgttaatgctctaaatgatgatggaagatgatgaatacataataattgggtatggcaacatcaaccagcgaaacatggatggtgctagagactctgaaatagggcatggaagcctatacaaccatatcatttatcattaagggaaccatgacgaggtgaggagcatggtttccgtttgtcactgcggtatgagcaccttgaaatgcttgatgacacatttctcgcaccagaaagagaagagtgtgtcaagaaggtgaatcaaggtgctgacaaatgttgggatctctattaaagtgagtaacttgagcgagacttgtctggacacctacttcgttaccacatctgtgaatgtagtgatggatatgtcactgaattgcct

SEQ ID NO: 3993 - DNA, 572 bp, Gossypium hirsutum
  unsure (1)..(572): unsure at all n locations; Clone ID: LIB3825-030-Q6-K6-G2
ggnaggactaatggaaaaaatgcaaagggtaatggtgttgctcctgctacaaggtctccaatggctttaatggggtcatctatgaaatgaaaaccaagaagtgaataccagcatgagaactgccgagaccatgctgcggttggtgcctatggctttaggggttgctgcacttgttgtcatgctcaaaaactcacagtccaatgactttggctccgtttcatactcagatcttggtgctttcaggtacttggtgcatgctaatggtatttgtgcaggctattcccttctttcagctattatagcagctgtgcctagtccttctactatgcctagagcttggactttcttcctactcgatcagattctaacatacgtaatcttgggagctgctgctgtttcaaccgaggtgctttacttagcaaacaaaggagactcagccatcacttggagtgcagcttgtgggacatttgctggtttctgtcataaagccacaatagccgtggtgatcacgtttgttgcagtcatttgttatgcggtgctatcactggtctcttcttatagacttttcacca

SEQ ID NO: 3994 - DNA, 555 bp, Gossypium hirsutum
  Clone ID: LIB3825-030-Q6-K6-G3
tccgtggcctgctggactaaacatctgagtctctttctaaagttatctgtcagtgatacctgtattttgaaactccttatggttatggcggtgcatttctgttgttgatacttcaggttgtttctaactgcgaaagccctagtcattctgcctttgcctgtgcacatgtcatcgtccttgtaacatcacagttcccacaagcgatggatcttgttcttgctgagatacatagagcttgcatttacactgtcccaaagcatatttcatacaccaaggtaacatttttatatcttatgtaagcctatctagatgaataacaagctagcactcaaactcactgtgtttctcaagtgtttgcatttgttaaacatgtagctatgcttttttgatatgtgaaatcactcaacttgctctagaaaagccaaacatggataaacggaatcatgctagtgtgcctttgttccttttgctgatatatggcttctgagttgtaatttgctattccagtcagcatttgaatccaaagaagcttattggaaggttattggatacaaa

SEQ ID NO: 3995 - DNA, 574 bp, Gossypium hirsutum
  unsure (1)..(574): unsure at all n locations; Clone ID: LIB3825-030-Q6-K6-G5
cctgcgacccaatttgctcccaaattgtaactcaaatcatcaactaaaaaaaaatcaaattcaacatttttttaattaaaaaaaatggaggtaactgccagagctccnagggaagatcattctcgccggtgaacatgctgtggttcatgggtatactgccgttgcttcctccattgatctctacactgttttctctattcgtcttcgttctgaagacgacgatacagtaaaacttaagctcaatgacatcggattagacttttcatggtcagtcagaagaatcaaggaagtgctatctcacttaggttctccattttcttcgacacccacatcatgctcattggagaccattaaatctctcgccactcttgttgatgagcaaagtttccctgagacaaagattggacttgcttctggggtttatgcgtttctttggttgtacacctctattttagggtttaagccggctacagtcaccgtttcttctgagcttcctgtgggtgcgggtctgggttcatcggctgcatattgtgtttcactctcagcagctctattagctctttcagattccgtg

SEQ ID NO: 3996 - DNA, 319 bp, Gossypium hirsutum
  unsure (1)..(319): unsure at all n locations; Clone ID: LIB3825-030-Q6-K6-G6
cccagccgtccgtgaagatgggaggataaggaagaaggaaaggagattacacagcaatngggaaaatgactgggatgatgatgatgttactgacgatttctctttacaactgaggagggaacttgagaataacactgagaacaacaactaagctggacttatgcattcctctgcactgaactcgtctgaatcggggtttttttttttttcgtttgattttcttttccatgcaaagcgaatgaaggaatgagctgtaactctttatgcttggatgtactggtagaaacttaaaatgcagaaactggtttgatggttctct

SEQ ID NO: 3997 - DNA, 581 bp, Gossypium hirsutum
  unsure (1)..(581): unsure at all n locations; Clone ID: LIB3825-030-Q6-K6-G8
gctgcttaccaatttggnaaaaaaccaanatcctatgaggttttgactaagaggtttataggagatgataatggaaatgtgaaaggacttgaggtggttcgtgtgcgttgggagaaggatgccagtgggaggttccaattcaaggaagttgagggctcagaggaaataatcgaggctgaccttgtcctgctagccatggggttccttggccctgagtcgacactggcgngaaaaattaggtgtggagcaagacaatcgatcaaacttaaaggcagagtatggccgcttcacgaccaatgtggatggagtctttgcagctggagattgtcgacgcggtcagtcgttagtcgtgtgggcaatctcagaaggaaggcaagctgctgcacaagtcgacaaatacctgactaaggaagataaggacacaagtgtagagggtgagaaccaagattccgtcaagcggcaccaagaccttccccaaaagcagcaaactgtcatgaaatagatgatccatcagattgttattgtttgcgacattgggctgaaatggaacccgaatccaatacattccgaaggaaattggt

SEQ ID NO: 3998 - DNA, 500 bp, Gossypium hirsutum
  Clone ID: LIB3825-030-Q6-K6-H10
acagacaaatgggctctcctgacttgcatgctaatccactgctagtctccaagcgtctgcctcagctagcaacgcatcattgtttctgaagtggtccacgccaattctctcgactgcagtgttaaacttcccaccaccactcttttcggtctcaaactcactaccccacgctcccgacgagtcctttccacaacgctttaaccggagtctgctagtccggtcctctgccgaaaagacaatcgggactcctgcctagacttacttataggaaaaatcaggcatcacgatcagattcttacctatagatgctggccaaaaggctaattacgctcaccctgggttacccatgggttgagctccggagggtcacattttatacgatgaaatcctgaggtctaatcctaagaacccttattggaccaaccgtgagcgtttcgtcttgactcgtgcccatgggtgcatgatgcaatatgctccgctgtaccttgctggctatgata

SEQ ID NO: 3999 - DNA, 175 bp, Gossypium hirsutum
  Clone ID: LIB3825-030-Q6-K6-H11
gcgttcgcccacgcgtccggggtgacattttgtatttacgcaaaaaaggatttgtgttgtttagttgctgaattgctgtgttttgcttttatgttctttttgaaaccgtctctttgatccattaaaaaacgaactctctaatcttttgtagtttattaaaaaaaaaatagaaaac

SEQ ID NO: 4000 - DNA, 586 bp, Gossypium hirsutum
  unsure (1)..(586): unsure at all n locations; Clone ID: LIB3825-030-Q6-K6-H12
gctnctgngccgtttaaaancgttttgccgagattagnagaatgagtagtgtagttaggaatcaaggaagctgcgttgccatccgctctctctctccttcctcttccattaaccgttgctctcacgcctctgcttcttcagatggtgcaacgtgtggaaggccagcttggattggtaagcgcctaactggggtttgtttcaagcgaaagggagtttatgaagggatctactttaacatcacacccaaacaggcaagtaccatgataatttttactcatcacctattttatcccgacattttttttaaagaacctctgcgttttcaacatattcgaatatgagtatagatccagactacgattttaaattcttcatataacgtaccttagatggttacattcacctctgagtttgggtaacatagttcatgctaatctagaacaaaaaaataagtttcaaaggctacgttgccattttttctttcttttctgttaggttcaataccgtagaactgaatacattacatgtttaaaccgattgagaaagaagcaatatctatacatgtattatattaagctaatttttc

SEQ ID NO: 4001 - DNA, 580 bp, Gossypium hirsutum
  unsure (1)..(580): unsure at all n locations; Clone ID: LIB3825-030-Q6-K6-H2
cggcaaanaccncggcaacgaaacagnaaagaacgggtctacgtttgcccagaaacgagctgcgtacaccataacccggctcgcgccttgggcgatcttaccggcataaagaacactattgcagaaagcactgtgagaagaaatggaggtgcgagcggtgctctaaaacgtacgccgttaagtccgattggacggcccatataaagagttgcggcaccaaagaatataaatgcaattgtggcactgttttttcgaggagggatagtttctatacgcatagaacattttgtgatgcgttggctgaggaaaatgccagggctcaagcggcgacttcttcaccgccgccgttaacaccgtcgactacgactatggtttcgccgggattgtcaactcagagttcaggtcaaatttttgttatcttattttatatgcgtattttaatcattacatgcagggtttctactaacgcatacatcgaaattgagataacaggttgggttaatatatcatttggtatttgaattcagttttattgtttaatttggtacttaaatttttttttaatttggtatttaagttt

SEQ ID NO: 4002 - DNA, 580 bp, Gossypium hirsutum
  unsure (1)..(580): unsure at all n locations; Clone ID: LIB3825-030-Q6-K6-H3
cggncgcgtgggttctccctctgttttgagtttctattttttagatctgggtgtgtgcatgttagtaaatgaccagataagattaaaaaagagaaacgattcgattacctttngaaaaacgagattcgccttttatttctctgtttcaaaaggattacaatggttcgtgctattctattaggtaaatccctataccttcttttttgtttctctttgcttctaaaaactctctttttttgattccctattattcttctctctgcttttgtgtgggtgtatttctgctatcgagtctctccctccgtgtgtgtccttttttacagaataaaaagaaggctttatagcctcgactactacaatttttggaaagaaatctttgatttctttccgtatttgcttcgcatgtctgctgtgattttctttccttttcttgcaggtacttgcaaaaaaatctggcaatagcaaaggcttgacgatggtccactggtggcgttgatctcagcgtgagttggggcctagaatcatggccttgatggggtagcaggagttgaagagtcatgaggcttggcttctggaacct

SEQ ID NO: 4003 - DNA, 585 bp, Gossypium hirsutum
  Clone ID: LIB3825-030-Q6-K6-H4
cttcctgttggtggcatcctcctcttgcttgctggtttgagccttattggatccctcataggtcttgctattgccgccccacttttccttattttcagccctgttttggtacctgctgcttttctcattgcgggttccatagccggattcttgacctccggagcatttgggatcactggactgtcatcgctgtcgtggattgctacttatattcgtggaagcaggggctctatgtctcaggggctagacccagtgaagtggcccttgccggacacggcagtgagtatggagcagaagatccagaataggagccaaggaggaggaaggatctctgagggaggcagagaacaggaaggtggcaagagtaagacacaagaaggtggcaagagtaagacacaagaaggtggcaagagtaagacacaagaaggtggaaacaagactgtgggttgaagtttcctattgtagcagtcggctgatatgctagaaagtaatctatcaattttgttgctctgttctgcttctatgcttatgtccttgtgctgctctatgtggttgtatattgtaacttgtaagcagctctctgta

SEQ ID NO: 4004 - DNA, 426 bp, Gossypium hirsutum
  unsure (1)..(426): unsure at all n locations; Clone ID: LIB3825-030-Q6-K6-H5
cggncgcgtgggggggttttccccttttcccttcgcagggcatagatcgcccatcgtcgcggctccaccttccccaaacgcacaccgcggtggccgacgagccagatatctcggaggcgtgggagcgtggcatggagtagcgcacgattcggaagcttggcgcgtcgtacgctgcttggactcgaagcttgcggcgccgatttccttctgctgctggggctttgggttggctttatgttttgtgtattgggttgagagatgtgggttaggttttgggtaatctgttgggctttaactctgttttgtattgggttttaataggtgtttttatatttgggtttagtttttttatttaattttgtatatgtgtgggcctgggcataaattgggctcaacaatagttataatgatattttataattttat

SEQ ID NO: 4005 - DNA, 111 bp, Gossypium hirsutum
  Clone ID: LIB3825-030-Q6-K6-H6
tttaggtcgcgggcgggcgctctggtggcacacaagcttgacggccgcgtgcgtgctacgggatgactattctctctgggactgtaacacgaaccgactgtccgcgggggg

SEQ ID NO: 4006 - DNA, 581 bp, Gossypium hirsutum
  unsure (1)..(581): unsure at all n locations; Clone ID: LIB3825-030-Q6-K6-H8
cggncgcgtgggttggaaagactttgatgagcaaggtgttgatatggatgactttgattatgcattgaagaaaagtcgatacacccaagctacttctaattacaagtttggtggtcgatttcaagaaccggcaagatgccttctagaattaggccctctacaagcccagagtccttatgattcaagggggatgggatggatgagtgtttgtatctactaatgtatcacgctaaaattactgcnagaagaaacaagtgcaaaattgatccaagggagattgttatttatggtccggaaaagggaatgttcaagattagctagctgatctctcatccaaaacctggagcggagtgcagagcaaagaatgttggatatatgaagtttttgaaggtattgtcagcttcttgtttattcagagtattactatgattgtaaaaattcaatcaacggatagcttagatttctttcttttgtcgctttgaaattgttctttcttatacgagctccttactacccgatgaaatgtcttttttgcggcccactattgggtgtgagaagctgctaaatgtaatacttatttg

SEQ ID NO: 4007 - DNA, 582 bp, Gossypium hirsutum
  Clone ID: LIB3825-030-Q6-K6-H9
ctcttcttaactttccacactagggttttttcttcaccttctctttctgcctcttactttctctctctaaatctacacccttgatctttggttatggccactcctgatcgtatccttgctaactttactcctctggaagttgcagattcacttgagaacttgtctttggattctcaatccaagaccacaaaagctcctgagcctgtcaagaaggatttttacggtgacaatggctcttacatgtacccgcaaacttatggttacatgtcatatgcgccgtattctattcccagtccacctcttcctgctatgggacatgatggtcagctacatgccttgcaagagtactactatccaagcccttattaccaaccacctctgcaaactagtcaagccaatgctcctcaagttgatgtttcgagtttcggtgcaactgatcaatcttccttatctgttgatacaaataaaggaaattcaaatggtataacaagtggtggatcagggtcattaaaaccaaccttgaagagttcctctctaaatcctaatgctttttataaaggaggaggcttgccaactggtaat

SEQ ID NO: 4008 - DNA, 456 bp, Gossypium hirsutum
  Clone ID: LIB3825-030-Q6-N6-A10
caaaattaacgtattctactgtttggattgagatggggccccattttgcagagaaccttccaactttaactagaagtgctttttactcaacataacatggacaggagcctaatataactggcaagggcggaatattcctcttggcttctctggagctggaatatggaccagcttgcaagacgaaatcttataccacgtgcctgccactatggtcccgatgttcagctggcgagttttttcactactgtttcggcccgatgcttgaatatagggagtgcccaatcctgctggactatgccaagaccatctttttcatcactaaggctatttgttggatcaaagcccaatccacccatttgcatcattcgatgagtgtcatgcatcagcattctgctgttgcataatcagactatatactacccctcacaccacacaaatgtggaagatgccatgagc

SEQ ID NO: 4009 - DNA, 553 bp, Gossypium hirsutum
  Clone ID: LIB3825-030-Q6-N6-A11
agaaaattgtttttataatttgacaattttctgcaatattctacaaattaattgttgtgattgtatgttaaataaaatgcaagattaaaaggaaaaatgcagtggtggtaatcaccatgaacaattttgaagccttctatcaacataagaaacattccctcgattgcgtggtgtcccggtcttcacaacctttcaagaatgacctacttgcgagatgctcggaagcatatgtcataaaagatgctaatataatccctccgactaccattagacccaacctcaagaacagagtggtgatcccgaaaatacatggcaaggatggggccacaatagccagaaaggccatccctaacccgtagtaccaagaaacaatatcacaagaggatgcctgtcgatgatcttttttagaatcagagttaaacaaatctgtatcagcagaaactggggtcagttgcgtcactattctccttcccagtccatggcatcacttgttgaggcacaattgtgatagaaattccaagggacaccacagcagccataaaacatacaaaaa

SEQ ID NO: 4010 - DNA, 458 bp, Gossypium hirsutum
  Clone ID: LIB3825-030-Q6-N6-A12
acacttaaaacaggtagtacttaaacatacagacatgaaatttcaattacacaattaccatctctcttacaggattaaagctccttacatgcccttctacttgcagacaaagcacgacagcataccatcgaacatgagcagcaaaaaaaagcaaacatcccaaatcttgtgtaactggtaaaatgacgacgaatgcacaaaattataaaaaggatgtttgtaatatcgaaagaacatacactgtgactgcagtgtaactaaacaaacaacaagcacatatatatataatggtgtattgcacattatcatggtcccaaacagtaaggaccatcacccatgtaatgaacatccatatataaagctgcattttgcggatgcagaccatccatcaccatgaattgcatgtcttcagaaggtttccaatggcgtttcctttggtttatgaaccaattattaat

SEQ ID NO: 4011 - DNA, 559 bp, Gossypium hirsutum
  Clone ID: LIB3825-030-Q6-N6-A2
agataagttgcaagctgttttataaaactgtacaagttacaagaacgggtattcacgcaagttcttaagttcgtgttttgtgtaagtaatctaactatacaagttacaacaaagggaattcatacccatgattattcacaaaggagcttccttgttcattgaaaaacttggattgggggtccatggaattatcatctcccattttcaaatcatgaatgctggaccttttcttgtttttttcattgacggagttgagacgaagaaagtacttctgtgcatggctcgctacttgagttggcgttcttgaaacgacggcatttcttgatatgctcctccaatctcctttcccatacttttgaagtccaatcaaaaataatctgtgttcttcttcggtccaagggacgcctttccttctttcgctttccctttcctttcctttggatccaacccaaacttggctcctacctgactcgttaacccaactcgctgattccaactcaccctcataactcggcaactcgactcttcctgactcaatctccaaaacatcatgctccaa

SEQ ID NO: 4012 - DNA, 553 bp, Gossypium hirsutum
  Clone ID: LIB3825-030-Q6-N6-A3
gaacaacaaatatcataattcattaatgtgagatcatccaaaacatgtttattttgctaaatgacttctgtgtcagttctcataaccattttcttctcgaactagttgatcttttatgactatatagaaacctcggaaggcttaataagctattaaccctagtaataccttctaaggctgaccactcttcatcatcggcaactgagatgcactcagcaagactcctcttagactggcctgggaaattcgaagacaacatttcttctgtcagttcagttacaggaactatctccgtagaaccatgaaatgcatcagattgaccaagacttgaagtgtgagaatatcccttattttcatcaatagccaccataggttctctgcattccttaggaatccttgttaagtcattctcttctgcagttccattacttgcaggcaaatattccagaaagaggcatacgacagcacaatcatcattcttagaagtagggtacttaagcctccatgctcgagtagcacaatctacaagagctctggcagctgttgagcgact

SEQ ID NO: 4013 - DNA, 564 bp, Gossypium hirsutum
  Clone ID: LIB3825-030-Q6-N6-A6
ccaaacaatggcaacaagacttgctccataaattacttaatagcagtgatatacaacaatatgggtgaaataagtttaattgaaggagctaatccataaaaagagctctccatgaagaaatatggacgaaacataaacccccacctccagagtccattaaaatttcccagcattaggaggccacatatgtaacctcaagtagatgcaaccaaattatcaactaaaactctgctcattgcatgctctgcagttgcatgttcccttttatctgagacagaaattcagcaaccaatcgagcttggggagggttcagtgtagtcattgacaacagatatttatgcaagagttcctggttttgtcatgatcttaactggtttcccaagttctgatttatcttccattcttgcaatctcaagagcctttgcacaaacgggaaatccccgatcatcccaggactccagtatcacaccagaacctatgcaggtttgtccctcatagaaggctgcaaactgcccagcggcaagaccttgatcatcctcatataactggacaaccgcaatatcg

SEQ ID NO: 4014 - DNA, 567 bp, Gossypium hirsutum
  Clone ID: LIB3825-030-Q6-N6-A7
acactatacacatgctatatgtatgagtatatatatatgatcagttacaacaggatcgtaaaacaaactcactgttaaaaagagaagctaaaatatcttcctttttgcacattggataaaacctaagctaaaacatatcaaactcaacatggtctccagtacccggcaactcgtcgcctctggagctgtcttttttctgcaaagctgcagttggcaaacagatgctcgagtcacagaacctaggcatctcgggtggtattgcacatcgtatcaaagcccaatttaggccttcaaagaaagggtgttgtttgatctccgtagctcctttcactgatcctaaccggttctcaggttccttaactaaaagccctcttatcagatctcttgcatgaaaactaactatagggctgctaggaaacctaaggctgtgtgacaccacattggatagtgtttcatcgtttcctgaacccttgaagggtgttttaccatacaaaagctcaaacagaaagattccaaacgtccaccaatcaacggcattcccatgaccctcacctttgatgatttctg

SEQ ID NO: 4015 - DNA, 451 bp, Gossypium hirsutum
  Clone ID: LIB3825-030-Q6-N6-A8
ggaaaaaaaggggggttccccccttttttaaaaaccccaggttttgcccaaaaaaaaaaacagggggggggggggcaaaaaggggccccccccaaaaaaaaaaaaaaaccaccgggcccccccttggggcctttttggtaaaaccccaaggggggtccctttttttggaaaaacggggggttttttaaaaatttttttaaaaaaaccccctggggggaaaaaaaggcccttcccttaaaccccggggggaaaaggggcccccttccccccaaatttttcgggaaaaacgggttttaaacggaaaaaggcccaaagggggccccccccccccaaaaaccggggggccccccacccccaaaaccttggggggccccggttaaaaaaaaaaagggggggccccaaaacccaaaacccggccaaaaaaaaacccggggggggggaaacccccccc

SEQ ID NO: 4016 - DNA, 552 bp, Gossypium hirsutum
  Clone ID: LIB3825-030-Q6-N6-A9
gacacaccaaaatgaatggagatttccattaccatcaaaaataaaattacagggttaaagtttcatgttccattaacagcctcataacagaatttgactatctaaagattttccaatctcaccaagacactaacggaaactaatagtctacactagtgacaaattacaaccaatatacaacacaaattctatcagattttaatcctctaaatgctgcaatgcaagtagtctcactgtgataatttggagttacttcaccttgtctgcactcaattaagtacttgtcatgttgcaatcacaaaagaatcaaagcaaaacatgggcttgatacccgcttgacagaagccatcagaatgaagagtcataaagcccaaaatggttttcgaactgcatccgcactgttcttattatttagtgattcatcactgctctcctcggaatcatcatcttcgtccccatatgacattaactgcatcaaggtgtcagggacagcatcaagtttagctttactggtaactttgatcttgtcatgcaatttcctaggtgatgtgg

SEQ ID NO: 4017 - DNA, 575 bp, Gossypium hirsutum
  Clone ID: LIB3825-030-Q6-N6-B10
aaataaacctgggagaaataacattagatgctcatgaaccaatttcaacaaacgtccaaatagatattagacaagcagcatgagagcaaaaaaggaaattaaaaacaaaatgctcctaccaccattaaatgagttcagtttcaaacactgctgacaatgataataagaagcaagaagaaatgtctatgataaccaatagttggtaggtagagcctcatcggggcttccaccaaatgcttcctctactactccaatcttctgcttccctctcttcaattcaaaagcactcgaattgaattttattttctctttcctctttcagttttggactttgaaaaaagttgtaacatgtgaccttgtattattataacacacgaccccacttcaataaccaagaaacttgtctttctttttaatcctctggagggttaaatttggccccaaggttgctaagtttggcatgagcttctgcataatccttgaagaatgtctcttgatcttcagcatatttctcagcatataccttgaaagagggatcttcaaaaagaacagcatcagttggcaacacaagcagc

SEQ ID NO: 4018 - DNA, 535 bp, Gossypium hirsutum
  Clone ID: LIB3825-030-Q6-N6-B12
atgaaatgtaccttggctctattttgtttaactttgattcggaaagcgtatttatttgacagaataccacctaaaatagacaatgcttctttaacaaacatcacgaactcaaatcatatgggaacattacaaaaatgaaagcttgctttccaaaagtggaatgatcttgagcaatggataaagatgagcgtatgggaccactggcagagatactcacagacagcttataattctcatggttatgatggaggaggtgaagatggcggcttcagatccgggtactacatagaaaagagggagagtttcaggaaaattaattcatgtattaaggcaaaagattaaacatgtaaattagtcttcgaatcggacctcaaatgaatatattcattcctttcctatgtattcaagggatcgctaaaaggtcatatcggactatggtaaggagaagagagaatacgtgagcgtccaacatgaatatgttcatatttttaaaagttctttccgtactcgtattcgaatatgcaaagaaaaataa

SEQ ID NO: 4019 - DNA, 518 bp, Gossypium hirsutum
  Clone ID: LIB3825-030-Q6-N6-B2
gctcaccagctttcatcgttttatttatccgacctggctctcactggccatggcacctggaccaaacacttggtttataggggacaacattacgcgctctgtcctgaaaaaaaaaaaaagcaagccaacgaacaaaccctaacgtcactggcctttcagacctcacagtggcaatccttgaattaaatagcgaaccgtttacccggatcatcctgggtacctccgcgtatgctcctatatactgccaaaattgataggcgcccaactagtgaagatttgtttgacccatgatccaaacgcaccctgtgcatctcacgactacccctttcagcctttgaaagctggcctgcctgcctaatacctactacctgcggtgggaaacccacggttatcctgtatcaccgtttccgtcacagacaccgaaaatgcactgagtggtacccccctgagttgaatcctgtacccccaggaccacgacctccccatacatcaaacacatttttctgattgtgaacctc

SEQ ID NO: 4020 - DNA, 379 bp, Gossypium hirsutum
  unsure (1)..(379): unsure at all n locations; Clone ID: LIB3825-030-Q6-N6-B4
tcgcgacaaaagagctgaagaaagagaaatttcacttcagctggctatccaggatgcctcttttcttcgaaagcagttagggaagaagcatactgaatttgttgaaatgaacaatgttctgcaaaataaagaagtagacctggtggaggctaaactcgaaatccagcatctgaaatctgagagagcttctcttcagcttatattggaggagaaagaccaggaactctctgatgccaaaaagaatttagagcaattaaaccaagagattgcagagctgaagatgcttatgagcagtaaagaaaatcagctcattcaagctactgctntattaaaggagaaagatgaatatgctctgaaagtacaaagatgagtgaatgat

SEQ ID NO: 4021 - DNA, 387 bp, Gossypium hirsutum
  Clone ID: LIB3825-030-Q6-N6-B5
ataagaaacccttatatttgattgaaaatatgagaaaatcaaatattaaaggtttttacattccaacgaaattacaactttttagaacatgaacactaatttgatcggcagcgcaatccaacaaaaaccacatcccttggcaaccgcagtcaaggaaaatgaaactggccgcaccaggacggaagtctgccactatcagggcctataacagatattttcgaatgaccatcgagggcctgtttgatatactgatacggggactacatgatacggctaccaaaggcagacttgagagaaatcatcctcttacatgccaaagtctttcacaggatggtggctcaagatcgcaatggaacctttttaatctatcttgacagatgagaaaag

SEQ ID NO: 4022 - DNA, 64 bp, Gossypium hirsutum
  Clone ID: LIB3825-030-Q6-N6-B6
aaaaaaagaatagaatatttaataaaaagggcggccgcccgcgatctaaaaccggacgcgtggg

SEQ ID NO: 4023 - DNA, 555 bp, Gossypium hirsutum
  Clone ID: LIB3825-030-Q6-N6-B7
acacctaaacctgcttaacaattgtagtttatatgatttacaatgattaaaaaaaaaaaaagtccctcttacatgattcaacaaccttcatgttcccatctaccgtacttggactctataccatctctgaattattgttctgataaacttcaaggaatatgaaaagtcaattacctttctacacctacattgccacttggattcaggcaacaacgtcaaatccttttaaacccatctcaaaactggaggatgttttcggacaccctgatttcatcaaacactaacatacatatatttacatcctaacgaagcaatggtccaagcatgcctcgtccctgttcgcatgcactaattgttttgtccatatacccccttataccctgtcgaacaaacacctgcgcattgttactgcaaactcaccaactctgttggggtggaaaatgactgcacacatgcctaagcaaatagcagtagcagcaattatgagtacagccgcatgggacctcaatctcatggtagcaaatccacacgattttctcgagtaatccttgctga

SEQ ID NO: 4024 - DNA, 569 bp, Gossypium hirsutum
  Clone ID: LIB3825-030-Q6-N6-B8
gaagccaaacaatatatagatcatgcagaaaaaatatctaatctgaaatgaaaatgcactttcatccacataaaagtggatcatatctgattgtatctaatgaataatcccaatacaaaatgaaagataaggatgatgtttgcggttttaaccgtatcctcaggcattccagtgccattgtagatccaacaaatgccaaaaagtgaaaagtttagtacatgagccgctcctttcagaacaaagatttaaggatcaagcaatacctactaaaggaatcatacaaagatggctctacccgcaaatgactaacgcttatctctatcctcattgctcatcatttcactttccctttttcttgcccttttcaaataacgaaattgttacaatggcagaaaggaactggagaaaaaaattcatgatgcaacaagatcaggtgtttcagcctcaattgataaccaagcgttatgtactttgcccatccaattatccaaccggtcacgcaaggatttgatctgtggaatccccaaaactcttggctgcacccaaaagacatgaattgttccctcaac

SEQ ID NO: 4025 - DNA, 519 bp, Gossypium hirsutum
  Clone ID: LIB3825-030-Q6-N6-B9
agaaccaaaaacctttttgttacattgaacgaaacaaagggtttcacagcgacttcgagaacgaaacaagggtttcacacaagttataaagcgcggaataaataaaaagaatgtacatatcttcccatatccaaagcacaatgacaaattccttttaagaaaaaacaccccctcccttccccaaaaaaaaacataaaatggttcgacacagttgacaacataagaaagccgatacgtattacacaccaccaactgtcatcccatcgcatacttctgggtccagctacgagcagtggcttcatacttggcccgatcggtcttatacatgtgagcaatctccggaacaagagggtcatcagggtttggatcggtcagcagtgagcagattgagagcagaaccttggaaatggttagtgcagggctccattgttctttgaggatatcaagacaaatgcttccattgctgttgatgttgggatggaagaccttggtcctaaatgcaaccttaggaggcttgaa

SEQ ID NO: 4026 - DNA, 399 bp, Gossypium hirsutum
  Clone ID: LIB3825-030-Q6-N6-C1
attccaaaaattttgataataacaggagtaaaattagatccgaggaaatctgaaagtaatgcaaataaactaaaaaaaaaaatgaaaggtccttacataaagcaacaattagcccgtaatgatacccgccagaatatcagtcttacctcgtgcataaattgtgtaaactaagcggatggcgtcaagccatccgtctagtgattcccacgagtcagcaaccaagaaaactggaccagaggtggtatcgatacagagacctgcacctggtggtaaagtcagatcagcacatgctgatacagaaacaatatctggaatatcaactcttatagcccttttgtccatatctgttacatctgaagttcttccagagaggctccgggtaatttgtctctgatcaac

SEQ ID NO: 4027 - DNA, 343 bp, Gossypium hirsutum
  Clone ID: LIB3825-030-Q6-N6-C10
aggacatcggaaagttgctttttggaacataagggtcacagttcaaaggtgaagtccaataaagaagtcccttaaaagccataaaatcaaaattttctttggcaacaaacattcaattttgtttatggactcaaagaacatccttgttctttaccccaatacccaacagcttaaccaattttccactttgatatgcttcaacagtatcggctgagcctccgatgtgttttccattaatgaaaacctggggtacagtacccctaccaacaatttcactcaagggatcctgaatattccatccataatttggctcattaagctccacaacgaatggaactttttt

SEQ ID NO: 4028 - DNA, 564 bp, Gossypium hirsutum
  Clone ID: LIB3825-030-Q6-N6-C11
agcttggaggaggaggcttttttttattcgggtttcattttaccttaaaaacttacaaacatctctaattacatcgtttctcgcatcagtttttttcccatttcacaacattcacaacttcggcatttacagaaactactcggctaagctctcagccatggagctcctcatcttaacacacacacataacccctcaaagcttaaaccccacaactcccaatcttcattcataatatcggcctctttgttgccttggtccagggaaaaagaactcctcatcttggttaccaaagatcctatccacctcttcttccttgctcttgaatgccagttcctttgcttccttctcgaattgctgaacataattcccctcccctgcaagaaggtacctaacgttgttttctatgttgacctcaaagcatagaatctctagattattgtttcttgaagcaactgtaacgaaaggatgccctgctggaacaacaaacaccgtgtcggatctcaaacgtgagcttatcttttgataacgagacccactctttcttactgctgaatcctcctgac

SEQ ID NO: 4029 - DNA, 417 bp, Gossypium hirsutum
  Clone ID: LIB3825-030-Q6-N6-C12
gggtcggggcccgggggggggcccgggggcccgggggcggggcccaggagggggcgggggccccggggggggggggggggccgggggggggggggggcgggggccgggggggggggggggaaaaagggggacccggaaaggaaaacccccgggggcaaaaagaaaaaaaaaagggaaaaaaaaggagggagaaaaaagggaggaaaaaaaaaagaaaaaccgggcgccccaggggcagaaaacaaacggaaaacccgcgaggaaaggggccccggggaaaggggcaaagggcgggaaaaggccgcccccgggggaggggccaaagcggatgggccagaaaacccggacccgggcaaaaggggaggggcccccccacccggggccgggccaaaccgcaaaaaacggggcggggggggg

SEQ ID NO: 4030 - DNA, 570 bp, Gossypium hirsutum
  Clone ID: LIB3825-030-Q6-N6-C2
gagcatctaaagtacttatattcaagatccaagaacgtaacgctttaaagactccaaatacatgaaaaggcttttaagaaaattaaatatattcgagataaacagatatcttatctcacactcacatccgagtttaaggttaaagtctatatacatcttataggaaactatatgagagaataggtttacaataaaagaatttctattccatgaatgtaaagctcacgtatacaccacttaaattttttttatggtacaaccttagaaagtacatgaaactatcgtataaattatcatgttacagattctggaaatggtgtatttataaacttcagataccatattctcttgaaaaatcctactcagcaaacaaaaatgtaccttggtgtaacaactcagcttggccggattatttcatagcaggggtcttgagtttgtctcccgatccagctgaatactagctgataatacagtgattccagcattaaagcaacaggttctccagcatcgaaagtagccaaccaagggtcgttccagcaggtaatttcagatcatattgttaatttaatc

SEQ ID NO: 4031 - DNA, 564 bp, Gossypium hirsutum
  Clone ID: LIB3825-030-Q6-N6-C3
acttacttgaacacttccctcttaaactctaaatgccagtaagaactaattccctagaatctacctcagttgtaatgcatacaaacccattatatcaaaatccattagacaatatcataaaatgagaaacacaatcataaggtgtaaaatatatataataccccatagatagggcgtggcaccatcaacattcatccacatacgaccacagcataccctcgctttatatctcttgtgccccaaaagtaatcatagcacagcctgacttcatatctcttacttgtgtcccctaaagtacaagtaaattttctgcacataccaaccaacacacagaggtaaaacactccgtcaaaagcaattaaatatcaacgcaaagcggctacataataaatgaatttattatattatgacactgattcgaagaaatctagcatatagatctccattttcacatgttcaatgaaacttaaaaaagcacttattatgcagattcacgtgcaacattatttattaggaaacgatatgtattattaaatgtagagtgagtaaagaaacatttcttac

SEQ ID NO: 4032 - DNA, 511 bp, Gossypium hirsutum
  Clone ID: LIB3825-030-Q6-N6-C4
attcaaaccacaatttcctaatatcgtagtttacagcatatataaccatacacatacgctcaatcaagaaaaacacacccacaataaataataaataagtaatgaagtgttaaatcagagaaaaagaaaaataaataaataaatcacacaaatctgttaaatggctttcttccaccagtgatggtagcaggcgtagatggtgttgaatcaacactcatattgcctacagaccctttgttcgacctgtatgaaccaatcccttgtgttaatgggtacgaaagcctccgatttgactcgctttggggagtaccaacatgcctctcctttggattactgttagctctggttttggctttggttgaaactgttggattcatgtagtttggaacagaaaatggtgggcaactcataaggctatcatcgtcctttacgtgcaagtcgaatggtgaagcagctcctctagcccttggtcttgaacttgaaggcggtgttcgcatccgtcttttggcat

SEQ ID NO: 4033 - DNA, 559 bp, Gossypium hirsutum
  Clone ID: LIB3825-030-Q6-N6-C6
ctcgaatcgaatctattacgttaatctatagaagcaactctttagtacaaaggcagaaactctaaacccaatggtgatcctattggcctggcatcaataattaaagggaaatgggaaaaaaactatatctatataaaaaggtatcttaaccctacaaagtacaaccactataaactgcattaactacgaatatttgctagccacaaacctaagaactacgtaaaatacccaaatgctacaataaatactacaattcacccaagttccacattggagaagaaccaacccttggcaatgacaatgcagtaggtgcgactttcaactcatctttgccgcttttttccagacttcgaatcacttccctgcgccttcaacaaacttggtgctttccgcttcacacttcccacaacttttgctgaatcagttgagctctccttcacgctttcacttcctttcacctttgacgaaccagattttgacttaccagtgccattagaattggatttgcccccactcttaagagacttacccttagattgggacgaaattttgggggttt

SEQ ID NO: 4034 - DNA, 339 bp, Gossypium hirsutum
  Clone ID: LIB3825-030-Q6-N6-C7
aaaccccccggcaaaaaggggggaatttttccaggggaaagggggggtaaaggccaaacccccggaagcccccggccccagggaaaaaccccaaaggggaagcccccccctttccccaggaaaccttttttggaaaaaggggaaaggccccttggaaaaaaagcgggccctatttttggggggaaaaaaaaaaaccccccccgggccccccaaaagggggccaaaaaaggggggcccccccccccccaaaaaaatcgggggagcccccccgaaaaaaggcggggaaaaagggaccccgggccccccaaaccgggggaaatcccccccgcaaaaccggga

SEQ ID NO: 4035 - DNA, 544 bp, Gossypium hirsutum
  Clone ID: LIB3825-030-Q6-N6-C8
gaaaaaaaaaaaaatatgttatttatatccagtacatcacacaaatatcaaaattacaacaacataaacatgagggacaatggtagattctgttctttgatcacatcagtttcacctcgtaattgctgttaagaaacgtatactcaaaagatacgatgattcaaacgaagacccggggaactgaatcagcaggcttacaatccacctccctgagtttagggatcagccctttcccaccaccatttgccaatggatgaatcccatgtgttggacccgtcaactcagctctcttcgccctttctttctcaaatgataccccaaatcgcttctccacatctcgaccgagttcttcatcgagctgaccatctctagtgagagccatcatcaattgaggtaacccaagagggagattatcacctttatcgacttgccaaaaatggatggtcttcccataagtcttgcaaactttgtccagaccatgcctctcgatcggccccggaactcgcggcataaacaacaccccgctcttcacttcgtacaaatg

SEQ ID NO: 4036 - DNA, 554 bp, Gossypium hirsutum
  Clone ID: LIB3825-030-Q6-N6-C9
aacacaaaaccaaaatgaataaaaatacattaacagtccaaaaaaagtccatttagttaatgtcctattacaagcccaaaacagtccctctagcccaaatctagtggcccaatacccaattaacccaagtggcccaaggtttgaaaacagggcagaaccctagcagcaaggaacaccgcagccctagcctccagcacgcctccgtacgaccccctgcgcacctccgtacagccttcacgcaccacttgtacccgagcgccagcacacccgcacctgcaaggagacaaacaagcaacaacagcaaagaaaaacaaaaagaaaaaacattgtattttttgtttttcgttaatttttcctctttcctttcggctataaagccagagtttgagtctttgtaaaaggttacgctgagagagaatacgaacacacaatacagccacaatactcgcatattgaatacaaggcaatagcaaaaaaaaggtgatttgagattaaaattttcgggtttcttcttctcgactttttctttctgcatttttttttctttttttttt

SEQ ID NO: 4037 - DNA, 71 bp, Gossypium hirsutum
  Clone ID: LIB3825-030-Q6-N6-D1
ttttttttttttttttttttttttttttttttttttttttttttttttttttttttttttttttttttttt

SEQ ID NO: 4038 - DNA, 536 bp, Gossypium hirsutum
  unsure (1)..(536): unsure at all n locations; Clone ID: LIB3825-030-Q6-N6-D2
aaaaggttctctaattattcccaacttttattgatttatagaactgccctggctnaacactgacattacaacaggaccaaacttttctttatatggtacaacagtacgaacttgaaaaagaaaaaagtagaagcaaacaaacaacaaacacagactcaaggcagtagcagagcacaaaaagtcgctcctttcatttaataggatcgataataaggatcatcctgggtacctccgcgggtgctccttctagtcccagcattgttaggcgccgcacttgggaagtcttggtttcccgttgtaccgtaagcaccccctgtatctccgccaaaccccatactgctgaggtcatcttgcctgcctgtatcatacccactacctgcggtggggtacccacggttgtcatgtccaccggtaccgccatagccaccagtatcccctctgttgtacccagctgtggtgtagccagtaccaccaataccaccaccaccagcatggccagccgtggcgttatgatggcgggcctcttgtttcctcac

SEQ ID NO: 4039 - DNA, 529 bp, Gossypium hirsutum
  Clone ID: LIB3825-030-Q6-N6-D3
ctatatcaaacagaatttacttagaaaaccttcacttagggtaataaaaccatgttttaatcaaatccacttcttcccttttaccagataatacaacagtaaagatgggaatgccaatcatttccggactctgtaaagcttattttcagctcttcgtcacacatcggaatccattgtacgtactcctaattaaagattaacatctagtaaaagcagcaggttagatgtattacgtaccttgcctatatgagaaaatcgatgcaacattagccatactgcaggaaggcgtgattgcggatttgcagttacagggcaatgtaacatcaaatttccatttcaaatcagaccagaaagagatcattcaatcatctggcggtgctctgagagcccaagccaatgtttttctcaaactttctctaatgtgttgaaatggaggctcaatatgatgcccagtcttcagaattttccattattctaccatgaatctcacttttttctgccataataagatccacttcctgaatgacta

SEQ ID NO: 4040 - DNA, 526 bp, Gossypium hirsutum
  Clone ID: LIB3825-030-Q6-N6-D4
cacaatactattatttaataattaataaatctgatacatataaaagtccaattctttcctcctaaataacaaaagtccaagcaaaagttcccttggaccaatcctaatactacaatactgtgttaacctaaagcctcgcctgcctgcagaaagcattcaccgccacattatcacctcagttgatcatatctttgaaatgagagaatcctcttcgccacaatgtccattcgccaacaattgatttgattgttcttcctcttcgccacaatgtccattcgccaacaattgatttgattgttcttcatcgcctgtgtcttcaatggagtctttgaggcacaaaaagcttggttgattcgttgaagacagcagtcttgcccacatcctatccgtaatcacaacgctgtttcgtttctctataattctatagaatggtatgtatgtctgcctgccattgacaaggccgcttgtgaagccggtgtaccctgccattgctccatgaacagcactttgagcaagaagtgtgcag

SEQ ID NO: 4041 - DNA, 425 bp, Gossypium hirsutum
  Clone ID: LIB3825-030-Q6-N6-D5
ggggaaacccagcccccacaggcttagggggttaaattcccaaaaaaaaaaaggccttttttacacaaggagttcccttttcaatcggggggccccacccatttggggggcctttaagggtcccttaatacttttttttggggtctggatccaaagcccctaaatcaaaaaaaagcaagagagtttttgacggggcaagtccccagagagattttcaggagtaggggaaagggcggcccttggccccgtggggattggcgccatccccagggcccttgggggagaggttaacccaggaaaagcccccgaaaaaggaaaaaagggggaaaccacaggggcgctgacccaggttgccacctttcccaatttttaacaaaaaatacaagctgggggaattggggccctcgctgttatcccggccccgg

SEQ ID NO: 4042 - DNA, 467 bp, Gossypium hirsutum
  unsure (1)..(467): unsure at all n locations; Clone ID: LIB3825-030-Q6-N6-D6
ggtcacggtcacggtcacggcgagcagcaaaaggaagggtttatggataagatcaaggacaagatccacggcgagggaggtcatgaacatggtcacgagggcgnaaaagaaaaagaagaaggagaagaagaagcatgaagatggccatgaaagcagcagcagcagcgacagtgattagatcttccatcatcgtcttactattcctctcccttatagtatcgggtgcatggaatgaatgtgaaggcttgtcaaaatatttgtatcatctttatttttatatgcggaaaaaatgaaaaaaaaaagtaaaaaaaggggttgtatttggtgtatgatggtaatagtgtgtgatgtatttgacaagctatgaatgtaatatgatatgagaataaatttttgtcattatctatactccaaatattatgtacatgtatgtttacttaattaaattaagtagaagtgattcactc

SEQ ID NO: 4043 - DNA, 585 bp, Gossypium hirsutum
  Clone ID: LIB3825-030-Q6-N6-D7
ggataacagtcatcaccaaattcaatctttgtaaaaaaacagagagacaaacatcaatgataaaaatggaactatacacatcacacacccacatcatcaaacatatattatgataagaaacaactctatcaccttctttgagataaatatttgttgctctcctgctcctcctctctctctatacacaaaactgacccccaactattttataaatcaaaccgagaggaaaataatgccccaacaagtaatgaaatcaaatctaccaatggcctattattttttagatggtatcagcttcggaccggcttgctctgctgcggtggtgtcgcttcccatggtgacgcctgcctccaaacgtgactggatcgaaccttttcagtctttcggcttcacggggattgatcacacactctacaggtggaactttgtatctggtctggtcatagcagtaagaatatgtcatgtgcttcctcctaaagctatccattttgcttctttgtgatggggtgatagtggcagaaagttccaaactttgagaggtggtgtcacacttcttcgacgaaaattcaatgggatccactgcgc

SEQ ID NO: 4044 - DNA, 546 bp, Gossypium hirsutum
  Clone ID: LIB3825-030-Q6-N6-D9
caactgttaatcaatatgaaaatcttatgtgaaaaaccctgaatttatttacagcagagctacaaaagcagggtaaaagcaactttaacaaggtatctttcctccctttagggtctaagtaggaccggtcatacctgcacgatttctcaacatttctgttctcttgcttctctccattacctccactaaccactccgcgccttctttaatccccgttctgcggtaaaagtagactttaatgtttatatcttctctaaatttaagtcaaggagacaagatttttatgaataaacagaacttacccatcaaaagcagaaacagcctcaaacatgtaaaccctttcatccaattttttaaggtctagatatcgggcgagttcttcagctgttacagcttcagaaagatcctgcatcaaagccacaaatattgacctcactgtttatcataaagaacaaaaggaaaacatttaacagttactaagctcaaaaaaatgaaaatcatattaatttaccattacatcctttgtaaattaagaagattttaaaa

SEQ ID NO: 4045 - DNA, 515 bp, Gossypium hirsutum
  Clone ID: LIB3825-030-Q6-N6-E1
aaccacataagcatctgcaattgcaaaagcttctttctgaatggctgaatgttagagaatacaacttacaaactcgtagaagactagaagagaaaaaaggaaaattgtcaaaacactcagataaatttcccatgagtctaagaactcaaaaactaattcaaaggagttcctaagtgataaaatatgattgttttcgggtacacgagaagctgcaacctctaagaatgacctcgaaaactagctagactaggcctcaagttcgaactcataataactacaacagcattgtaactattaaggttagagacatcaaaaggcaataaaaggtaaggagcctaacgtatggaacatacttaaaagatgagagtttcacacattggacttactcgatagcctgtacgacatcttccaccgcaagagcaactcaggatcaaatttatactaagatgcaacttccttaacttcatcatatgttccaggtgtctcattaaaagaaaccattgccctgttgctgc

SEQ ID NO: 4046 - DNA, 566 bp, Gossypium hirsutum
  Clone ID: LIB3825-030-Q6-N6-E11
atcaaattaaattttctattaaaattttaactaaaaatattaaaataaaaataaaaatttagaatcaaaactaaaataaataataaaaattagattaaatataaagatatcaacgaaataaggacctaaatcataaccatgttaaatataagatattattatcaagatttacattctcatcttgctcaaattttggtggcttgtaccctttcttgaaccattcatcttgtagaatttcaggaatagttatacgggtaagaaggtttggatcaagaataagcttaatcaaattcctagcaccagatgaaaaccatgatggacagctgaaagaagcctcccaaattttcttatacaagcctataaggcttggctcatcaaaaggcaaataaccagccatgagaacaaagagaataactccgcaagaccaaatatcagatgatgtaccatcataacctttatctttgagcacctccggagcaacataatttggagttccgcaagcagtgtgaagcaacccatcctccttatgtctgcgcattagatttggcgaccttttctctccaccc

SEQ ID NO: 4047 - DNA, 549 bp, Gossypium hirsutum
  Clone ID: LIB3825-030-Q6-N6-E12
attaataaaactttctttaatgagaaaaaaccctataacatggtaatacattacaaaaatggaaatctcaagtataggactccatttattatttgtaatattattttaatactaaaactgggcttttacttgtcgatatcggtatgcatttaatgggaaaccggtggtgaaagagaagcataggagtagagcagttggccgttgtcgatgtgctttgctgggtcagaaaaggcataaaggaagaagtccatgaaatcgaattccttgaaaagctgaggatgttggtcatctataagttctttgggtgccttgattatagtaccctcatttggaatgacaaaggctgctatagaatatcgatctttgtctccgctcatcatcactctgtgattcactgatttcaatctcccattactccatgccttgagaggatctccaaccataaaaacaaaggaagaaggagataaattagtcaacttgatccattggccatcactgacctcaatttccaaccctgaaattttgtcctcacaaataagtgtgctaact

SEQ ID NO: 4048 - DNA, 485 bp, Gossypium hirsutum
  Clone ID: LIB3825-030-Q6-N6-E2
gaagacaaatgtctctttatcttattcaactgcgtatgttctggtcctgttcccccattacatttaaaatcaacaattcatgcaaaattataaatccatttacttataatattttcctttggccaaaagcataaaaaacgataaaaaaaatgattaggaaaaaaggggggggggtaaaattaggtatatggaatctaatggctataagacagctcttgtctatcctttgaggaataattctagaatccaattgatttcaaatagctgtcccgagttcaagttgattatgtttcgcctcttactcggagaaagacgatcaaacaattcccaatcatggtccttgcggatcgaatcatccatataatatacaaaaagaaactccagatatttgatatctttctctttaggcagtttatttgtgaaaatgtatgtatagccaaaagcggaccacgcctaaaatcgggtcaagtttttattgttcaagc

SEQ ID NO: 4049 - DNA, 240 bp, Gossypium hirsutum
  unsure (1)..(240): unsure at all n locations; Clone ID: LIB3825-030-Q6-N6-E3
ttttgcttttgcccgcctgcgtgcttcgtaatggctcttttctcgtgtcgcctcgtttctttctctggccgccgctgttcttgctttttttggntttttnntgttcctcctttgttggggggggcgtttttttttcccntcctctgttccttctgtccttccctgtgcctgtccttncttccttcttttgctttgcgctccctgtccgcttttctgtcgttctgttctccgcttctgctc

SEQ ID NO: 4050 - DNA, 553 bp, Gossypium hirsutum
  Clone ID: LIB3825-030-Q6-N6-E4
atagcaagaaattaatataaattgcaaagaatggtttgagcaagtgaaattcaggggcttagagcccctggatagactcaagactgtattgtttaggagctgaagtatcaagctctggactatcctctggttttggcttcttcatggcatcaagagtctgcaagtaggtgtaggaagctgtccgatcaaatgaactgccggggttgcttattctgctagataggaaccgacggataagacccttaaggaatggtgctatgctatctggttcatattctaggtagtacatgattcctcccatgcatgcacaaaataacgccacctcggcatttttaacatcaggaagaaggtgccgatttactgaaatataccacaacgattctgtggctcgtggaagaacatatagagcaagttcgctgcgtctagattttttcaccagcaatacagaaagagcagataaagcaccagccacccaatatactagcttgtggtctttggatgcaatctttctgtgcatacaaataactccctgaaagattccaacaaatgcagc

SEQ ID NO: 4051 - DNA, 552 bp, Gossypium hirsutum
  Clone ID: LIB3825-030-Q6-N6-E5
caactaaacccctctgcaatttcttttttatttttcagcaacgctatataacatatttataataaatacattaacccttttagtgattcaccctggaaaatacaaaaagatttccccaagaaaaaaaattaacctaaacagaaagagagctgaaaattagaaaaatgataaaaagcgagtggcaaactggaaaggcaaccagttcagaagccaacattgacagaaattaaagataagggtttcgtactagggagggaccagactgagttgggattcttcttagactcattgagtcgactcattaaaaataaataaattttactggcttatggcggtggttttgttggtgagcttccaagctgaagttgtaatgagtgggcggttgtgccatcccagcatcaaacacccgttgttctcttccaccccatacccatctccgcctgcaaaaaggccaacaacatactagcttgcttgaacgcgttcgaacccaaatgaaccggtgaaaaccccgccgtactcaaccggtttctccactgagtcagcgactcgtgc

SEQ ID NO: 4052 - DNA, 542 bp, Gossypium hirsutum
  Clone ID: LIB3825-030-Q6-N6-E6
gattaaaaatgttaagtactattatttattattaatattacatcatcaaatcttaaaatctatttcgtcgaccaaaagaaaagagagcaagcaaccaggtcacccttgtttatttagtgcttcttcaagagcatggatctgagctcggccacgtcgatctcattgggacagttctcgggtctgtagcatccggtaacagggtcgggaacccacgaaaccttctctttagctccgcgagacatctcttcccctgttttcttggccaccgtagcagcgctccttcccgctcctcctcttattccactcgacacaattccttgtgatgccgccgcatatcctcgtctggagataacgttagagattccatcgacaacaaaagtagagaaaagcttagcgttggagagagagcgagccatttctcttatcttaatattgatttgttcaattcaaattcaaactctggattgataaaaacttgagcgctgctgtaggaaagctttttttattttttttattggtgaagagcaaataaactttctaca

SEQ ID NO: 4053 - DNA, 526 bp, Gossypium hirsutum
  Clone ID: LIB3825-030-Q6-N6-E7
agagaaataatataaattaatatgaaatattactttttgaacggtcaatttgacccaaaaagatccccccccctagtcataatctatccatttgggatgacaaaatgactacaatacaaggttcttttcccatcaccaatctcataaatacaatgaaaaaacgagcgtaaagggggatgaagttcatgcataatcagtttgcactgtcaaatcatgtattcccaattcatggtacaaattatgcacatactctagtatccgccgatcatccatctctttcttcacctgaagtgaaagggatccaacaacatgaccaggcactagttcccaaaaccgagcttgagaaacttctataacatcttcatgagacttaatctgccaccagcatttggccaaggctgaagatgaaatattgggtggtgccatctgaagcaagacaccgccactagctttaaatagaggcatgacaagcataaagactgccaccgaaactagtcccaagcacagaacttcagcattattaacg

SEQ ID NO: 4054 - DNA, 567 bp, Gossypium hirsutum
  Clone ID: LIB3825-030-Q6-N6-E8
aattccaaaggtctgcactgtattccaagaggttaacacataatacaaagacatgttattcgtgtatgttctccgaacattcttacaaacataggttttacaacaggagtaaagatgaacacatgatacaaggttcacacttttttatagtcatatcatcatattaagattcaaactctttttaacagttttaccataccgttagctttcaagactggtcttgctccatgtggttcacatggtaagtcccttcgttcttatggtgtacctccaccttgaacttctcttccttgtctcctctcttcactttaagaaccatgttgagttttgcaaaatcttccaatacctcagcgttggcatgaactatttctttaagttcgtagggcagaagggaattggatctctgttgtatggtcttcacagcatgatccgcagcatcctgaactacgggatcatttgtggccaccgcttgcagcattggtccatggacatctttcttggcaccaagatcacaagcggtaaaagaagcggaactatcagcatcaccagcatgtttaaactcctgca

SEQ ID NO: 4055 - DNA, 522 bp, Gossypium hirsutum
  Clone ID: LIB3825-030-Q6-N6-E9
aatccataagccaaacttggatcttactggaagaaaaaagctgagatacaggacgaaaacttaccagcagatggtaaaatacatatatagcttctcaccattctaatattactatggatcaccaatgcatatacattaagaacacaagttgatactacttataataattgcatccacaaaatgaacagcaaaacagcttcaccagcattcaaagccttgcctctcctcccttctactcacttgttctctaacacttctttcactacatcgatgctgcaagtcgggtcagggatcttttgcttatgttgatacagatcaaatggcctcagatttgctagtaggaacccaagaaacttggaatggttgctaagtgtgcagtgccatgaataaattctgcttgcaagcatgctccggaataagtttcttgacaacttcaggagggataccagagagctcttgaggcttgaaattgaagagtggtggtagcggacggccgttgggaaggcgaacatttgggtccct

SEQ ID NO: 4056 - DNA, 552 bp, Gossypium hirsutum
  Clone ID: LIB3825-030-Q6-N6-F10
ctcaatatatataattttcacccttttataacaaaaaagatagaaccctgccaataaaaattcctgtattctgtattaatttaataataatcattaacaaagtataacaaaaaaaattgcaaaactagtctaaaactaatgggatatattgcaccaccatcaggcccttcaacttcgttaaaactaatgggatatattgcgccaacatcaggcccttcaacgtcatttttcaatgtcaaaaaagggggaagaaaacagagtaaactttatgctctcttgttatgctctcaagccttcataaccagaaaataacaattaaaaatagcacttgaatctttcacctgggaatcacctcagtaatagtgactggaacagaactcatctgatagctggtcgcggcagatgattcaagcgactttttactcgaagatgcctctccatcttgaaagaatcctggtgccatgagttctttctcattcagccgaacgtttcttcccagcatttcaataacctgactcattaaaggccttcaattggctgctgcttgcgtgc

SEQ ID NO: 4057 - DNA, 549 bp, Gossypium hirsutum
  unsure (1)..(549): unsure at all n locations; Clone ID: LIB3825-030-Q6-N6-F12
caatacttaaagcttcttatctaagtctatttcaaaggagtttttaactacaactgcattgtccaggaaagtgattaagccaatatagacatatagtacacacactttgacataaggtctcgtgagctgcaagtcttaaaattaaacatgatagtaaatcagacacgggngaaaattagagaacacaagcagcaaacagaattttcctttgttgattggatgcaatagtgtaattcaagtcagtgcttccccttccaagcgtatcctcttgggatctttctcttcaccttgactgcctgtgttcatcactctgctttccttggcctccacagaacaccttttgtaaggtttaaatcctgtttgacgggccttaagcttttcatgtcctagcccaatcgtcagcaagctctcgtccacaatgttcttagcttttgacaacacttttttctcgactccttgatggtcagaacaagattggcatgcctcgctggagaagtgtaaaattgatgtctctccattattctgatctggattttgctcatctgcacc

SEQ ID NO: 4058 - DNA, 526 bp, Gossypium hirsutum
  Clone ID: LIB3825-030-Q6-N6-F6
ctcagacacctctccttccctctcttttgtttctgcgcaacaatattacaaaccatcttcttcttccttctataaccaacatgcccatgtaccctcttctctcttttgtttctttccctttctctctcattcaaccctttcttttcctaaaactatgggctcctctccttggattctgatactatctctactgggatttcctgcaaaaaacctttcatcttttttctgggttttcaatctccagctttatctccattctttttctaagctgtgatgtttttaatccataagaaagttgctgtctttagctccaacctcactgcttcttcgtctaaaatttgagatttggagccaaaattgaagggaaaacgtaatgtgggttctaatcagcaagtgattgtatttgttgttgaattttcatttgataaaaagataaagctcatataatggcatatttgtacttgtcatttttgcttgtttggtttctatcgaaatcatttcttggggaggctcagctcaatgacca

SEQ ID NO: 4059 - DNA, 449 bp, Gossypium hirsutum
  Clone ID: LIB3825-030-Q6-N6-F7
ccccaaaaatctcaagctacattactggaccccttttccaaagggttaacaaggcaagggccattggggggtccctacaggggacactaccttccaaaccttttacaaaggtaaatcccccaaaactgggattttttgggggatttccttacatagggggaaaaactcaggggaaatgcgttggagcccctcccgatccaaggcactttttggacaaaaaaaagcccccatgacataatacccccctccaagtaatctccaatttcaaagctaagttcacccaagggtttggtggcatctaatccccccacattactggaaaaaaagggttttcccaccttttttaccaaaaaacgtccatttttgggaggatatacaaatgcaaaggacagccttgcattttttttccttggggggggagccacctttttcaccagaacagtcaaccc

SEQ ID NO: 4060 - DNA, 544 bp, Gossypium hirsutum
  Clone ID: LIB3825-030-Q6-N6-F8
gaagttcaatgagtaggcgtcttgttcagtccatgaactgcaatcttattgatttcataaaaccaacattactcaacatagtagatttagtagtacacaattataacaaaatataacatggtaatacagttcgagaacgtagatctcgagtataggactcaatttattatttgtaacattaatttaaaaccaaaaccaaacttttacttgtctatatgagcatgattttaattggaaactggtggtgagaggccagcaaagacatggagcaactccccgttgtcgatgtgccttgcaggatcggaaaaggcataaaggaagaactccatgaaatctaagtccttgaaaagccgaggatgttggtcatctataaactctttgggtgtcttgattatagtaccctcatttggaatgacgaaagctgctatagagtatcgatctttgtctccgctcatcatcactctgtgattcactgatttcaatctcccattgctccaagctggtttatcagtatgagcaaagagtcctctttcatactctcctg

SEQ ID NO: 4061 - DNA, 581 bp, Gossypium hirsutum
  unsure (1)..(581): unsure at all n locations; Clone ID: LIB3825-030-Q6-N6-G1
ctatgaaaaaagaggttgcttgattaacagttgaagagaaaaaaaaggaagcaggttttggtacaaatctataagagagaggttgatatcattagctgcatttttgttgattttgattagctttccaaaactcaactccccttttctccatggacttgtacttgacccaccttgccatccatcaatatctttgtactttcttcatatcttttctctttttactctttttgggatttccttcgtcactggaaattcccacgttctccgaaagattgctggcttgtcggcgccgttatgttactatttctctctgaactcagcctgcttatcccaattccttgtcgttgttgtgccgctcctccgctcatgtttctaactatatgcccaaccccaaggaagtcccgagtcaatctatccgacccgcctccgctaacattcatactttgcggcggtggcggcggtggttgttcttgtcccatgctacttctatttgtgtaagggctttcttgaccatgtacagcgtcatagccgcttccgaaatgggggaatttccactggcaatggagntcattagttcatgt

SEQ ID NO: 4062 - DNA, 487 bp, Gossypium hirsutum
  Clone ID: LIB3825-030-Q6-N6-G10
gcaaaaacatatttattcaatgccatagaaccttgaaacctaaagaacaactaaaagcgttgataaaagcaattatttttactcgtaagcttccccagcctagtggccagctcacattagcatacgacccacacacatacaaacttaacacatcaacaataactggacaggtgttcggcaccacacttaaaagccaccgcggaggcgaaggaccaggtgcaaaggggattccttctggatgttgtaatctgcaagggtcctcccattttcaagttgcttcccagcaaaaatcagcctctgctggtctggggggattccttccttatcctggatcttggccttaacattatcaatcgtgtctgagctctcaacttccagggtgatggtctttccagtcagggtcttcacgaaaatttgcatcccgccgcggaggcgaaggaccaggtggagggtggactccttctggatgttgtaatctgcaagggtc

SEQ ID NO: 4063 - DNA, 541 bp, Gossypium hirsutum
  Clone ID: LIB3825-030-Q6-N6-G2
agcaccaaaggcaacacctcttatttaatcatataacataaaacacaactggtaaggcagacctcttgttgtattatttattgacaagccagtaacatggaaaatataaggtaaattaatttcagtaataacataaatcaaccatgggaaaacagtagcttctatggccttactggggtagttcactggggcatcaaacttggtgaaaagtctataagaagagaccagtgatagcaccgcataacaaatgactgcaacaaacgtgatcaccacggctattgtggctttatgacagaaaccagcaaatgtcccacaagctgcactccaagggatggctgagtctcctttgtttgctaagtaaagcacctcggttgaaacagcagcagctcccaagattacgtatgttagaatctgatcgagtaggaagaaagtccaagctctaggcatagtagaaggactaggcacagctgctataatagctgaaagaagggaatagcctgcacaaataccattagcatgcaccaagtacctgaaagcacca

SEQ ID NO: 4064 - DNA, 532 bp, Gossypium hirsutum
  Clone ID: LIB3825-030-Q6-N6-G3
ggaaatgaattataaatattatacgaatatgacaaactttatactattgtatagaatttgttatgtaagcataaatcttaaacttttttcttccccaaaacatttgtgtatataatgaaaagaataaatgaggagaagagattagcttcgtactcgtttgtgcttctgagcaactctttacaaatggtttctctattcgattggtttagtagaaatgcctactttgttgatgatacggaccatggtaatccgactctggcgccatgttatttgataacaaagaactctgcaaagttcttccctctggttcttgaaggaataacttgtcttccaagtaacattgaatcttggacgtaatcggcctcaggtccggatcatcttgggacctcaaggcatttagaaagttctctgagatgaagttcagcattttcatgaactgggatctgtattttccaaagagagcaaagcctgccatttgcaggaatgcgtacaaagccacagcggtatacatattggcagggagtgcatttag

SEQ ID NO: 4065 - DNA, 478 bp, Gossypium hirsutum
  Clone ID: LIB3825-030-Q6-N6-G5
aagttaaaacctcattgacttttaactttcaacagcaaagacaacacaaattggtgcagtaaactaatgtacaaaggaaaatagaaacagctacaacattgttttctgtagcagtagtttttcttcgttccagtttaactagaaaacggctaatccgaaaatgaagtgtacagaaaacgaaagggaagggaaataactataacatcgatataatgggcttcatgttgttattcgaaaagagtcttattaccactaaaatatggggacggaaaattaggaagaatgatcaaaggaaatttggacacctttaccaccaattccggctgtgaaactctggaaaccgaatgatccgagctcttcaactagtttatcgatgacttctcctgatatatctgattcatgttatcaaggcaacaagtgacagaaagcagcaaactattgatgaaactataaacaaaaacggatcaaagtcaaaata

SEQ ID NO: 4066 - DNA, 321 bp, Gossypium hirsutum
  Clone ID: LIB3825-030-Q6-N6-G6
agagaaccatcaaaccagtttctgcattttaagtttctaccagtacatccaagcataaagagttacagctcattccttcattcgctttgcatgggaaaagaaaatcaaacgaaaaaaaaaaaaaccccgattcagacgagttcagtgcagaggaatgcataagtccagcttagttgttgttctcagtgttattctcaagttccctcctcagttgtaaagagaaatcgtcagtaacatcatcatcatcccagtcatcttcccattgctgtgtaatctcctttccttcttccttatcctcccactcttcatcggacgcgtggg

SEQ ID NO: 4067 - DNA, 518 bp, Gossypium hirsutum
  Clone ID: LIB3825-030-Q6-N6-G8
aaaaaacaaaactatacattattgtacctttcaagaaaaccatgagagctgaaccttacaaacaaagctgaataaaaacaataaataaagataaccagacatgagaaaaagacaaaatatccctaaatctactaaatatcagctcagccccatgaatgtttattgatttttgcttataggttctttaatgggagattaaagcatatatcccccttgctggtttaaccacaaaagattcatgctttaattcccactctggtcatccatgtaaataccaatttccttcggaatgtattggattcgggttccatttcagcccaatgtcgcaaacaataacaatctgatggatcatctatttcatgacagtttgctgcttttggggaaggtcttggtgccgcttgacggaatcttggttctcaccctctacacttgtgtccttatcttccttagtcaggtatttgtcgacttgtgcagcagcttgccttccttctgagattgcccacacgactaacgactga

SEQ ID NO: 4068 - DNA, 423 bp, Gossypium hirsutum
  Clone ID: LIB3825-030-Q6-N6-H10
aaaaaataaggatgattccttttattattaaaatcaaaaaaagacccaaaaggcaccataataatgccagcaaagttcctttgctgctgcaacaacagcactatggggttaaaccgaattctttgtataacctaccaactggagcacttgccccaaaccggatcgatgtccgattgccttccctttcaatacccacaatctctttcccacccaaaagattgtatcccgactcaatcacttacctctaatactccaccacctggtacaaacactttctttgtaggcccctgattgattatccaagacttgccaacaatacaagggaaactacccgaacaggtttttcagccttgcttaacacatcggcatgtttaaccaccatatacaactcatagccaattgcaatcatgattatgaaagctt

SEQ ID NO: 4069 - DNA, 149 bp, Gossypium hirsutum
  Clone ID: LIB3825-030-Q6-N6-H11
aataaactacaaaagtttagagagttcgttttttaatggatcaaagaacggtttcaaaaagacataaaagcaaaacacagcaattcagcaactaaacaacacaaatcccttttttgcgtaaatacaaaatgtcaccccggacgcgtggg

SEQ ID NO: 4070 - DNA, 561 bp, Gossypium hirsutum
  Clone ID: LIB3825-030-Q6-N6-H12
aaagagaacaatgacgagcttttcaattaatttaccaaaaagaaaaaagaagtaggacagaagacagagcgcaacattgaaaaggttaaaaaatacacctaatggggctgaacctaagctagtaattttgggggctcctctttcactaataataataataatagagttggttaagttggctaacagagaagggtaaaagaaggcatgtcttcaatccgcaacacatcatccattagaagttctctttccagctgagtccttgtcgatttcaatacttcattgaactccatgtacgtggcatttttctccagccattgcttgtccattaccacgaatgccacgcagtatagcaagtcgaatgcccattcattttctgttgcaaaccaaacacaaaatccattcaattggtaaatcccattgctttgttgttttactaacatcagttgcaggctcttacctgataacatctgtaagaaaactgatcggataaatgtcctaggtttcaaggcatcaaggtcaagcatttgcatgatcatgaatgtgatatttacgccagcaaca

SEQ ID NO: 4071 - DNA, 544 bp, Gossypium hirsutum
  Clone ID: LIB3825-030-Q6-N6-H2
cattaatattttattcttaatattaatataaaaaaaagttgataaaagaacaaaaatatattaaaattaatttaaaatatcaaaattttgtagaatgcatattaatgcaaactgatattgaaaccgtacggatctccgaaatcttttaaaaattaaaattgtacctctaaagcaaagctgagctattgggtgcaccatacgacgtcgtagcacctggttcaccattgaagccacctccaaattgagtgaacaaagcagataatccatttgaagttccaccgcgacctccgcctccgccgccgcaaatgccaagccctagaagatcaagcgtcgacgtaggcttgtgtccggtagagggtgttgtggatgatgatgatggtactgcaaagcttagaccacgaagtagtgaagggctcgatgtcgccgccgcacccatttgggatgccttttgtagcaacgcggtggcggacatggctggttgaagtgacggtgcagtgaagatggaggagaagctgttgttggagaggtagagaggggaggaaag

SEQ ID NO: 4072 - DNA, 552 bp, Gossypium hirsutum
  Clone ID: LIB3825-030-Q6-N6-H3
acaaagcctaaatacacaaacccaacagccaaattttactagactagcccagcctaaactaagtcccaaacagttgcaatggacccgttacagactggtagcccaaaacacctctacccattacaaacccaaaatttccagaggcccaattggcccaaacatctgcagacccaggcaagaaaccctagggtttctgccctctttctcttcgcgccgcaaacagaaggttccagaagccaagcctcatgactcttcaactcctgctaccccatcaaggccatgattctaggccccaactcacgctgagatcaacgccaccagtggaccatcgtcaagcctttgctattgccagatttttttgcaagtacctgcaagaaaaggaaagaaaatcacagcagacatgcgaagcaaatacggaaagaaatcaaagatttctttccaaaaattgtagtagtcgaggctataaagccttctttttattctgtaaaaaaggacacacacggagggagagactcgatagcagaaatacacccacacaaaagcagagagaag

SEQ ID NO: 4073 - DNA, 539 bp, Gossypium hirsutum
  Clone ID: LIB3825-030-Q6-N6-H4
aaaaaaaaatgaccaggaatttatttgaatacagagagctgcttacaagttacaatatacaaccacatagagcagcacaaggacataagcatagaagcagaacagagcaacaaaattgatagattactttctagcatatcagccgactgctacaataggaaacttcaacccacagtcttgtttccacctttttgggtcttactcttgccaccttcttgggtcttactcttgccaccttcttgggtcttactcttgccaccttcctgttctttgcctccctcaaagatccttcctcctccttggctcctattctggatcttctgctccatactcactgccgggtccggcaagggccacttcactgggtctagcccctgagacataaagcccctgcttccacgaatataagtagcaatccacgacagcgatgacagtccagtgatcccaaatgctccggaggtcaagaatccggctatggaacccgcaatgagaaaagcagcaggtaccaaaacagggctgaaaataaggaaaagtggggc

SEQ ID NO: 4074 - DNA, 427 bp, Gossypium hirsutum
  Clone ID: LIB3825-030-Q6-N6-H5
ataaaattataaaatatcattataactattgttgagcccaatttatgcccaggcccacacatatacaaaattaaataaaaaaactaaacccaaatataaaaacacctattaaaacccaatacaaaacagagttaaagcccaacagattacccaaaacctaacccacatctctcaacccaatacacaaaacataaagccaacccaaagccccagcagcagaaggaaatcggcgccgcaagcttcgagtccaagcagcgtacgacgcgccaagcttccgaatcgtgcgctactccatgccacgctcccacgcctccgagatatctggctcgtcggccaccgcggtgtgcgtttggggaaggtggagccgcgacgatgggcgatctatgcccttgcgaagggaaaaggggaaaacccccccacgcgtccg

SEQ ID NO: 4075 - DNA, 345 bp, Gossypium hirsutum
  Clone ID: LIB3825-030-Q6-N6-H7
aaaagaaaggggggaggggttaaaaaaaaaagaatggggttttaacaagaaaaaggccccaaaaaaaaaaaaattaaaaacccaaaaccccccaaaagagattccccaaccgggggattaaccctagggtccaaaaaaaaagggggaaaaacttctcccatgggggaaccccaaaccccccaaagggggccccttccccccccccaaaaggggggggggcaaaaattaaaaagaggcgcccccggcaaaaaggccgggcaacccggggggttttcaaaaatcataaaaacaacgggcaaacccccggggaccctttaaataaaaaaaggcggcccccggggcccc

SEQ ID NO: 4076 - DNA, 534 bp, Gossypium hirsutum
  Clone ID: LIB3825-030-Q6-N6-H8
gatgaaatgattgttattaaaccagggggtagcagtagatcagcatacatcattcccccttttaaattgtaaacatcattttaatttgggccaaacctaacaaataagtattacatttagcagcttctcacacccaatagggggccgcaaaaaaaacatttcatcgggtagtaaggagctcgtataagaaagaacaatttcaaagcgacaaaagaaagaaatctaagctatccgttgattgaatttttacaatcatagtaatactctgaataaacaagaagctgacaataccttcaaaaacttcatatatccaacattctttgctctgcactccgctccaggttttggatgagagatcagctagctaatcttgaacattcccttttccggaccataaataacaatctcccttggatcaattttgcacttgtttcttctgcagtaattttacgtgatacattagtagatacaaacactcatccatcccatcccccttgaatcataaggactctgggcttgtagagggcctaattc

SEQ ID NO: 4077 - DNA, 541 bp, Gossypium hirsutum
  unsure (1)..(541): unsure at all n locations; Clone ID: LIB3825-030-Q6-N6-H9
ccttgtcaactctttctcattaataaaaacaaagaaaaataaaaacagataaaaatgacaaaaagaaaagaaaaaaacttataaagactaatgagcagtcacattctgcccgtagcgaaatggtttttaacactgtaaaaggtgcttttacctattcctacattctaaggaataagctataagaccagtcccaatacctgataccaatttatctaacttcttcataacaaacccgaagtacaaccctgttccaaatctaccaatccaatttagcaagcactggctgcacacaccggtttcacggggccatcttcggttacaacaactgatccattctcttctatatgtttaacatctccattcgccttcgctacctccgccgtcgatgcagacgttgatttttccgaagcctcctttgctatggctgcattttgtttgctatcagttacagcatcatcattaggctccccattcgaaacctgtttctgtaaaagccgatgcttagcctttttctcttggattatcttttgacgagntctcg

SEQ ID NO: 4078 - DNA, 308 bp, Gossypium hirsutum
  unsure (1)..(308): unsure at all n locations; Clone ID: LIB3825-031-Q6-K6-A10
ggnagttngaagcctactgcagttctcaaagttttggcgaaatcttattaatgctgtttgatccttcaaaggagagaaggacggagataagtttgatttcagccaaacactgctccgtgatggttaccggagaagtcgattttgtttgtatatcatgtattttatttatatttattctgcagttattttgagttttatgagatttttttttgttgtaattggttaaattgtagaatttggcttgataagcgaacagaactcaaattgttattttgaatcaatccaatcatctacaactattatatttt

SEQ ID NO: 4079 - DNA, 580 bp, Gossypium hirsutum
  Clone ID: LIB3825-031-Q6-K6-A11
atttctactgcttttcttctcttccaagcctactttctcttctgtgtctttcgtcgcttttgcagtcatggttctcgaggctactatgatatgcattgataactcagaatggatgcgaaacggcgattattctccgtctcgatttcaagcccaagctgatgctgttagtcttatctgtggagctaaaacccagtctaatccggagaatacggtggggatattgactatggcgggcaaaggagtacgtgtattggctactcctactagtgatcttggaaaaatcttgtcttgcatgcacggtcttgaaatggggggtgagatgaacctagcagctggaattcagattgctcagttggctctaaagcaccgccaaaacaaaaatcagcagcaaaggattatagtttttgctggaagtcctattaagcatgaaaaaaaggcattggagatgattgggaagaagctgaaaaagaatagcgtagctcttgatattgtcaattttggtgaggacgaagatggaaagccagaaaaatggaggctcttctcgcatctgttaataataatgatactagtcacatagttc

SEQ ID NO: 4080 - DNA, 598 bp, Gossypium hirsutum
  unsure (1)..(598): unsure at all n locations; Clone ID: LIB3825-031-Q6-K6-A12
ggtcattcgagaacaannaaattatgtaaatgctacatcgcgtatagagcaggtcgcgaaacatgggggggaagtgtctaccggtgaacttcgggatgtaaatactacttctcagtatccagcattgtcttcgatggcaaacacgaccccgaatgctggctcttctttccgttccacgtccctgcaaagtgatcatacagtatctaagagtaattctttgatggttgctaaacaggggaagaaaaagatgagatgtgaaatgccaccaaaaacagtaactacgatagatgagatgaaccgtatattactacggcatcgtaggtcgtcacgtgcaatgagaccacgtcattcttctatacgtgaccaagaaatctttgccgcaaaatctcggattgagaatggtcctgtcataacaaacgatcaagatctttatgctcccgtttttaggaatgtttcattgtttaaaaggagctacgaacttatggaacgaatactcaaagtttacgtctataaagatgggaaaaaacccatttttcatttaccaatacttaagggattatatgcgtcggagggatggtttatgaaattgatgcaaggg

SEQ ID NO: 4081 - DNA, 597 bp, Gossypium hirsutum
  Clone ID: LIB3825-031-Q6-K6-A5
accctttcattttccgatttccttcaggatctctaaggccaagcctccacagagagaaatacaaatggagtcttcaggaccttcaaggaggacttgtttcatccaagaagatgatggattggcttccattgtagatatggaggctggatattcaggaagccattaccaaaaggttaaccaaaatgggtttctttcaagacctctttgttactctagaaggagtagtttgaggaatctatcttctttttcttcgtcatcttcttctggttcagtttcttctccgaggcctgctcgcttttatgatgccagatttgaagacgttcatcaaccctatttcttggatgtttgctttctttgcaagaagcctcttgggtgtaaccgtgacatcttcatgtacagaggggacacacctttctgcagtgaagactgcagacaagaacaaatcgagatagatgaagctaaagaaaaggacatgaacctttcttcctcagtgaaagctatgagaaagaagagccaaagggagtctacatctccgaatgaagctcaaggttactctattcgaactagcacagttgcagctgcttaaatcacaccaca

SEQ ID NO: 4082 - DNA, 618 bp, Gossypium hirsutum
  Clone ID: LIB3825-031-Q6-K6-A6
cggccgcgtgggcggccgcgtgggggatgagctcagcatagtatatggggatgaatctctaccccgtctctatgaaaattctaggatttcaacagatcagctccctggccagtcaggcattgttaggcgggctgttgcccttgggcgttatcttcaaaatccattagcgatggttgccacattgtgtggcccagggaaggagatactctcttggaagcttaatccaatggagaacttcctcacggcagatgagaagtatggcatgattgaacaggttttggttgatgtcacaaatcaggtgggccttgatgctaatttggctgctagtcatgaatggttgtttgctcctttgcaattcatttctggtcttggacctagaaaggcggcatcactgcagagatcattggtcagagttggaacaatttttactaggaaagactttttgtcagcccatggacttgataagaaggtgtttgttaatgcggtagcctttctgcgcgtcagacggagtgggcttgctgccaacagcagccagttcattgatttgctggatgacactagaatacatccagaatcttatcttgttgcccaagagttggccaaagatgtttatgatga

SEQ ID NO: 4083 - DNA, 593 bp, Gossypium hirsutum
  Clone ID: LIB3825-031-Q6-K6-A7
caaaccctccaaaaaaaatttgtacggaatgtcgcagttgttggagaaggcgaaggacttcgtggtggataaggtggccaacataaagaagccggaggctagtgtctcggacgttgatctgaaacatgtgagccgtgagtgcgtcgagtatggcgctaaggtctctgtctccaacccctacagccattccatccccatttgtgagatctcttacaatttcaaaagtgctggaagagggatagcatcagggacaataccagacccggggtcattgaaagccggcgacacaacgatgctggacgtgccagtgaaggtgccgtataacatcttagtaagcttggcaaaggatattggtgcagattgggacattgactatgaattggaattgggtctcaccattgatcttcctatcatggggaacttcactatccctctctctcagaaaggagagatcaagcttcctactctcagtgacatcttttagatttatcattattatgtctctctcatactcataaaacttgtgtgtcgctgtaacatgaagaatatatcgaaccatactaggttgttttttttttaatatgatacatctt

SEQ ID NO: 4084 - DNA, 591 bp, Gossypium hirsutum
  unsure (1)..(591): unsure at all n locations; Clone ID: LIB3825-031-Q6-K6-A9
tgaagactgttggctatttttcacaggcatttgctaatccaccagaggagctgaatagtccagcttctcataaantaccaagagcctaacagcctgaagaaaccctaaatgatttcctatctcatcaccctcacaacactttctccatgagctttggcaacgctgctgttttggcttatgtccgccatgaacgtgctgcttcagttcatcagaggttgttttgtgggtttgatgacatatactgcctcttcttagggagcttgaacaatctatttatgctgaatagacaatatggtctttccaaagggagcaatgaggcgatgtttgtgattgaagcatataggacgctgagggataggggtccataccctgctgatcaggttgttaaggatcttgaaggaagctttgcctttgtgatctatgacagcaagactggaaccgtgtttgctgcactggggtctgatggtggggtgaagctgtattggggaattgcagctgatggctctgtggtcatatctgatgatttagatgtcattaaagaagggtgtgccaaatcctttgctcctttcccaactggattcatgttccaca

SEQ ID NO: 4085 - DNA, 591 bp, Gossypium hirsutum
  unsure (1)..(591): unsure at all n locations; Clone ID: LIB3825-031-Q6-K6-B10
tccggctggnaaaacctatttacacactttcatttgtttttggtgtcttgaaaagatcttgcccgaggaaaagttcagtcagtgcaaggtctgacccttaccgctgatggaatgggtgcagtttttgatgttgcagaagatgatgtggaagcatttcttactggtgctngaaaatgcagctaatgttaacttagaggtgttgaagaatgcgttgccacccttgcaacagagggacatgtcaagaggaagatttggtggtggacggggtggttttggtgatagaaatggtggtggtagcaggttctctggcggcagaggtggtggccgaggtgggttttccgatagaaggaatggaggtgggcgaggtcattataatagtaagagatggtgagtgaactctttgacttcagccaatgtaataagagtactcgagggaagtggcaccacctgaagatgaagaagaagatatgaacccttgcaacattttatctacttgtgttaatctgtatttttttatttttatttttcgtttttaaattgtatgataatccctgggggttttgccttcctccccagttttatttcttatgt

SEQ ID NO: 4086 - DNA, 543 bp, Gossypium hirsutum
  unsure (1)..(543): unsure at all n locations; Clone ID: LIB3825-031-Q6-K6-B11
gcgtttcttggncgcgtgggnttccaacaccatttcatttgcaccaatcggccttcttgacatgttcaacagcagcggtgccgtggagaagttcgaagtacaaatgacatccaatgagaaactgcagttctttgatggcgaggtttcctcggagttgacaacttcactcagcaacaaccggaatccaacaggggcgatcagtctcaaagtccggggttgtgggaggtttggtgcatactcatctcagcatccgttgaagtgttgtgtggacaatgccgacactcacttcaactatgactcagccaccggattggtgacacttacattgccagtgccatcggaggagatgtacagatggcacgtagaaattcaagtctaagtttagcttcaggttattttattaggccatcatattaaaagtcattattgtattgagggagatttcatggctttctagtctagtctagtctagtggtaatacgtaattggggtcctctaccgtgctgtagctactttctcttaaataaaattgcctctctctcg

SEQ ID NO: 4087 - DNA, 511 bp, Gossypium hirsutum
  unsure (1)..(511): unsure at all n locations; Clone ID: LIB3825-031-Q6-K6-B12
gctgcacgaccgcgnatggtattggagggcatatctaccggaggggaagatagagaccatccagcttgtaatccatttggtccccggggtcgaacctcgaaggcttaagttccccaaagtcttgttgtcgtggccggtttggacctcattcaagattggcaattggcatatgttgaagggcttaaaaaatccggccaagaggtgaaccttctcttcctagagaaagctacgatcgggttctacttcttgccgaacaacaatcacttctattgcctcatggaggagataaagaacttcgtcaaccctaactgttaatagtctccacttaaccgtaactacagtcagcgtatacataaatcctaaatataaagattttgctccatgtccaaacattgtttctgggtttcagacaagcaaatccttttgtctgttaggcatggcaatggtgaagtacttggaactatagtgttgtaaggacagtgattctttaatgtttcttcatattataacc

SEQ ID NO: 4088 - DNA, 624 bp, Gossypium hirsutum
  unsure (1)..(624): unsure at all n locations; Clone ID: LIB3825-031-Q6-K6-B6
agtcacanatacaaatggccaacgttgctccggngaatgccggcggtcacttcggagattttccggcgtttcatacctacggcggtcaatttattcagtacagtatttttggaaacttatttgagatcacgtctaaatatcggcctcccatcacgccaatcggtcgtggagcctacggcatcgtctgctcggtgttgaattcggagacgaatgaaatggtagcggtaaagaaaatagccaacgctttcgataatcacatggacgctaagcgtacgcttcgtgaaattaagcttctccgacatttggatcacgagaatgttatcgcaattagagatgtcattcctccgcctttgcggagagattttaatgatgtctacattgccttggagctcatggataccgatcttcaccaaataattcgctccaatcagagtttatctgaggagcattgtcagtatttcttatatcagcttcttcgaggactcaagtacattcattctgcaaatgtgattcatagagatttgaaacccagcaacctcttgctgaatgctaattgtgatcttaagatttgtgactttggtctcgctcgacctgcctccgagaatgagtttatgacggaatatg

SEQ ID NO: 4089 - DNA, 590 bp, Gossypium hirsutum
  Clone ID: LIB3825-031-Q6-K6-B7
aaaaactcctttctccggccggaacttcatttggttctcatttctcactcagatctgacaggtgccgtttctttaccttatcagctcagatctagctgatttgaatccgacgcttgttatcgtcgccggcacacatcttaaaaaagaaaaagaaaaatggataatttgatttctctggtgaacaagattcaaagagcttgcactgctcttggtgatcatggagaggcaagcgccttgcctactctttgggattccttaccggcgatcgccgtcgttggtggtcagagttcagggaaatcttcggtgttggaaagcgttgtcggcaaggattttttacctcgtggatccggtattgttactcgtagacctctggtgttacagcttcataaaagtgatgaaggaaccagagaatatgctgagtttcttcaccttcctagaaaaagaattaccgattttgctgctgttaggaaggagattcaagatgagacggatagagaaactgggcgaactaaacaaatatctagtgttccaattcatcttagtatattttctcccaacgttgtcaatttgactctggttgaccttcctgg

SEQ ID NO: 4090 - DNA, 586 bp, Gossypium hirsutum
  unsure (1)..(586): unsure at all n locations; Clone ID: LIB3825-031-Q6-K6-B8
gngngnacaaaaaaattaaaaaattcgcacagaaaaattattcatccaagttggaaacgtcggccacaaatctccgctccgtttaccggtgacgacgctctctctaaatatctgaaaaatgtccggccaaagccagcgcttgaatgtggttccaactgttacaatgcttggaatcatgaaagctcggcttgtgggcgctacaagaggtcacgcacttctcaagaagaagagtgatgccctaaccgtacaatttcgtcagattcttaagaagatagtgtctacgaaagagtcaatgggagagattatgaaaacctcctcattttccctaacagaggctaagtatgttgctggtgagaacatcaaacacgtcgtgcttgaaagtgttcaaactgcttctcttaaagttcgatcgcgacaagagaatgttgctggagtgaagcttccaaagtttgagtattttactgaaggtgagaccaaaaatgatttgactggtttggcccgaggtggacaacaggtccaacagtgccgtgctgcttacgtgaaagcaattgaggttctagttgagcttgcttctcttcagacttca

SEQ ID NO: 4091 - DNA, 593 bp, Gossypium hirsutum
  unsure (1)..(593): unsure at all n locations; Clone ID: LIB3825-031-Q6-K6-B9
ccttgnattgaaagcttcactctcctgntatacagctgaaagagagtcagcctttgctttggggaggacacgcacaatcaagctggtattgcacatatgggtggtttggtgcctttgttgaagcttctagattcaaagaatggatctttgcaacacaatgctgcatttgctctttatggtcttgcagataatgaggataatgtatccgactttattagggtgggtggtgtccaacggctgcaagatggagaatttattgttcaagcgacaaaagactgtgtagccaagacattgaaaagactagaggagaagattcatgggcgagttttgaaccatttgctgtatctgatgcgtgtagccgagaagcctgtccaaagacgagtggcttttgctctagctcatctttgttctcctgatgatcagagaactatattcattgataataatggacttgagttgcttcttgggcttcttggttctacgaaccctaaacagcaacttgatggtgctgtagctctgtacaagttggccaacaaagctatgacgctttctcctatggatgcagctcccccttctccaacaccacaggtcta

SEQ ID NO: 4092 - DNA, 586 bp, Gossypium hirsutum
  Clone ID: LIB3825-031-Q6-K6-C10
tgatttgataaaggaagctggtgttgctccggcaaagtgaatccgagtagaaagcttcgaggaaaggaagggaggaaggtggaaagtgcttcaggggatactacatttcaagctctaaagacttatggccgtgatcttgttgagcaagcaggaaaacttgatccggtgataggccgagatgaggaaatccgaagggttattcggattctatcaaggagaacgaagaacaatccggttctcataggagaaccgggtgtcggtaaaactgcagtcgtagagggcttggctcaaaggattgttagaggggatgttcctagtaatcttgctgatgtgagagttatcgcgttggacatgggtgcgttagttgctggagcaaaatatcgaggtgaattcgaggaaagattgaaggctgtattgaaagaagttgaggaagccgaagggaaagtgattctctttatcgatgaaatacatttggtacttggggctggtcgaaccgagggctccatggatgcagctaacctctttaagcctatgcttgctcgaggtcaacttcgatgtattggtgcaacgacactggaggaatata

SEQ ID NO: 4093 - DNA, 573 bp, Gossypium hirsutum
  unsure (1)..(573): unsure at all n locations; Clone ID: LIB3825-031-Q6-K6-C11
cggncgcgtgggttttagcaaaacagaaaaaactctcattctcccaactctcccttcctctccagacgccggcctagctccggccaagggtaccggtggggttccggcgccgtcgccatcgtcgtgaccccttttcaaccgttttaaccccgggtaaccccgatctaccctaaaaactggctaaaaaccgtcaaggatcaatagaagaccgaaaaactcttcggtttccttccctccggccaccaacaaggtaagacctcctcttttcttttattatttaatatgtaatcttatatatatgtgctaaataaaacaacaaagaaaataaataaataaataaatcaagagacagaatgaagaagaagaaagaagaacaacatttcttcaaattttcgattttttattgattcatccacatttttttaaaaaaaaatcctccctttgattacatttcattaggctcttatagccgtttacatatttgctttttgctattgtttgtttctgttatcttcgcctttttcttgcttctgtttttgtctgttttttttgcaggcaagatgaagtcaacga

SEQ ID NO: 4094 - DNA, 596 bp, Gossypium hirsutum
  Clone ID: LIB3825-031-Q6-K6-C12
ccaggctgcagcccttgaccttggccttgttccagaatctagcaacagcattgagtcagcgaagttcttgtatctaatgggtgctgatgatgtgaatttggacaaagttccagcagatgcttttgtggtgtatcaggggcaccatggggaccgaagcgtctatcgtgccaatgtaattctaccttcagcagcatacagcgagaaggagggtacatatgaaaatacagaaggccgcactcaacaaacattgcccgccgtacctacagttggcgatgctagggatgattggaagatcattcgagcactctctgaggtttctagaatttgtttaccttatgatacactaggatccttacgctccaggatgaggaccgtagcaccaaacctactgaacgtggatgagatagagccagctacatttggaccttcgttgagtatagactgtacccaagagataaacttgacaccattcaaagcagctatcgagaatttttacatgactaattctgttaccagggcatcaaaaataatggcacaatgcagcgcaatgctattaaaggagtgagtggtgggttactaatcttgatgaacttttg

SEQ ID NO: 4095 - DNA, 605 bp, Gossypium hirsutum
  Clone ID: LIB3825-031-Q6-K6-C4
cccagcgtccgaaatattcaaggactgctttaatctcccatggaggagagattcgccgccttggaagagattgattgcccgtgactgactcacaaggaggccgaaacgacagaaataactgattctgtccttaacaggatattgacatctcggggattgcgtggagagcaaactgcagttgtgtcccttgatgatgttgacttgagacctagcagcacaaatggtactgatgttatgtcctcccgagttcattctttgttccgtcaaagacaatcacaattatgaagagttgcaagatttacttctctgtcatctggattgaattcaacagaaaggatagttgaagcatatctccgtagcaacctgatgggaagaaaccaggagcagccaccccaggtggatgatagagattcgttctcaagcattgctgctgtaataaactcagagaatcaaatggacacggctgttgaaatagactccgaagtatcactttcggcttcatcttccagaaggagaaatgatagtttcagagtttcagatgttgacagcggtgactctcgagcacattagaagagacgactgaagtaggaccatgtttagttcac

SEQ ID NO: 4096 - DNA, 593 bp, Gossypium hirsutum
  unsure (1)..(593): unsure at all n locations; Clone ID: LIB3825-031-Q6-K6-C5
ctcgtctctcttcacacatccctgccgccnatttgaaaccctaaattaacttactcgtgaggttgagttgtctgctctctgcctcttcatcactctgctatatttgattctgttttggatcctaccgctatttgaaaccctaggcgaagccattagaatgggcggaaaaagaaagacgaacgaaaacgaagggatggaaggagaggaggatagcaaacacaacattaaaaagatgaagaaggagaagagtgagatacttccttcctccattaaaaacaaggagaagagatctgctgtacacgccaaactcaagcaccaaaagaagctcgacaaacgcaagaagcttaaagctcgcgacgccgccgctaaacgcgctctcgagctcggagaagagcctccaccgaagcaaattcctcgcactattgaaaatacgagagaggctgacgagacagtttgcatgcctgatgatgaagagctgtttgctggtaatgacgctgatgagttcagtgcggttctaaagcaagatcgtaccccgaagatattaatcacaacttggccgtttcaattccacttaggggaccggcttttatcac

SEQ ID NO: 4097 - DNA, 617 bp, Gossypium hirsutum
  unsure (1)..(617): unsure at all n locations; Clone ID: LIB3825-031-Q6-K6-C6
gtccttctttttngagacttcaaagcgaagattgcagattttaacctctcaaaccaggctcccgcatggctgctcgtcttcattctactcgtgttttgggaaccttcggctatcatgcacctgagtatgcaatgaccgggcagttgacacagaagagtgatgtttacagtttcggggttgtccttttagagcttcttacggggaggaaacctgttgaccacacaatgcctcgtggacagcagagtctcgttacctgggctactccaagactgagcgaagataaagtcaaacaatgcgtagatccaaaactgaagggagagtatcctcccaaagcagttgctaagttggcagctgtggcggcattatgcgtgcagtatgaatctgagttccgtccaaacatgagcatcgtcgtcaaggctctccaaccgctgttgaaggctccagtgccagcaccagcaccagcaccggagacttaaaacagcagacgagatgaatccaaggttcttcgccatttattgaaatttcgatgacttatgatagtttggtttcgtaatcaaaatacagattttcatctgatcactaaatattaattatatacgtttttctattccttccta

SEQ ID NO: 4098 - DNA, 585 bp, Gossypium hirsutum
  Clone ID: LIB3825-031-Q6-K6-C8
gctctctctctccctcctccctcttctcatttggctaaggtaatatacccatcatcgccgaaccaccgctcctccaccgtagacggtggtcggggagacgcaaaatggtccccttagcctcgtttgaaacgcctttgaagtctaggctaccaaaactcaaagaatcgaaggaggccctcaacccccccttttgggtccgatgtcggcgatggaaaagtgttctccgacgcgcgaccacgagatccaggtgagcccctcccttttcttttttattctttgttttttatgcttaaaatagatatctaaaaaatgaaataaaatgaaaaaacgagaagataaaagaaacaaaaaatattaaaacaacgacctttctaatttttattttgcgttttgctttctaatctccgtaaaaaaaagaaagggattgatttcagctttttatagccgagttacactgatttgttctttgttttttcattttgtttgattcctttcgtttttttttttgcttgttgttttctctttgttcgtttctctgctgttggtatttgcttgcgtgtggaccttcattttgcaggtcgtgtc

SEQ ID NO: 4099 - DNA, 533 bp, Gossypium hirsutum
  unsure (1)..(533): unsure at all n locations; Clone ID: LIB3825-031-Q6-K6-C9
caggcacaaanagctcgtggnaagttaatccaagnaagtgaaaaaaaacttcaatgttgatgcattcanttggaaatgcaacggattgggagcgagtatgcatcggaaatctcgtaggtttgccagtaattgttgttccgactggcttcaaaaacatacctaatccacctccaactggtactcggagacgaaccacagtcaacacgggcatatacgctcctcctaaccatgatcacatcgcattagccttagcaatggcttaccagtctgcaacaaatcatcataagcagcggccccccatagatgatctgggaccaaacgacacaatacccaatcaccctaccgttcctacccctcctagacgcttgcatatgtaacagagtttgtaagaaaccttttagtgccttaccaattgtcaaagcctgctccagactgtaacctgtacctaagaacaatatcatcgttcaaaatggcaagatttgatggataccccgtttaaaaaaaaaaaaaaaaaaaaaaannaaaannaaaaa

SEQ ID NO: 4100 - DNA, 591 bp, Gossypium hirsutum
  unsure (1)..(591): unsure at all n locations; Clone ID: LIB3825-031-Q6-K6-D11
gncctgggtggtgggacgttcgatgtcagtatcttgacaattgacaatggtgttttcgaggttctttcaacaaatggagacactcacttgggaggtgaggattttgaccagaggattatggaatacttcattaanattgatcaagaaaaagcatgngaaaggatatcagcaaggacaacagagctcttgggaagcttaggagggaagctgagcgtgccaagagagctctcagcagccagcaccaggtccgtgtggagattgaatcactttttgacggtgttgatttctccgagccactgaccagagctcgctttgaggaattgaacaatgacctgttcagaaagaccatgggacctgtgaagaaggcgatggaagatgctggtttgcagaagagccaaattgatgagatcgttcttgttggtggaagcactagaattccaaaggttcaacaactcctcaaggactactttgatggaaaggagcccaacaagggtgttaacccagatgaagctgttgcttatggtgctgcagtacaaggaggcatcctgagtggagagggtggtgatgaaacgaaagatattcttctccttg

SEQ ID NO: 4101 - DNA, 621 bp, Gossypium hirsutum
  unsure (1)..(621): unsure at all n locations; Clone ID: LIB3825-031-Q6-K6-D6
gggnatttgagtgagtggcaggtgcngatatgttctatttttatatctacggttataaatattttagagaaaacgaagagtcccgataaaatagactgagttgtaaaaaagagctgtggatttcaattctttgttctttatttctacaactggggagaatgggttgaggggtgagtaaagggtagatttataaaagaattttattacactgacaaaaatagtgggtgattttgcaggtaatgtaatgtatggtaatgtaatatgatagaatcgcattcttattattcttattataacatagaattccaagaactagctccatcttgcttgctattatcattgtggtggacaagttatcttcatgctttaatttttctttttaataatattatctgttcactctaatgtttatatcttttgtgatcgtaaaagtattccgtttttttatgagttagattgtatttttgttttatttgcttaaaaaaaagtaaattagttctcttatattagattaaagagtaaactgatttttctgtttaaaattttatctatttttactattaaaaatctttcttcgtggttatttcattagtgatgtcaactttggatggaatttttaat

SEQ ID NO: 4102 - DNA, 583 bp, Gossypium hirsutum
  unsure (1)..(583): unsure at all n locations; Clone ID: LIB3825-031-Q6-K6-D7
cggncgcgtgggattcatatgcaggagaccaataattctcgagtcaaccaacgaattgcaacaatctcggctcatctcaacccacccagcttttcccacatggagggtagttcgggtttgggtcgagctgactgccgagccaaaggtgggttaactggtttcaaggtggcgattttgggagcggcaggtgggatagggcaaccgttatcattgttgatgaagatgaatcctttggtttctgttcttcatctttatgatgtggttaacactcctggtgttactgctgatattagccacatggatactggagctgtggtacgtggatttctggggcaacagcaattggaggaggctctaacaggaatggaccttgtaattattccagctggagttcctaggaaacctggaatgacaagggatgatcttttcaacatcaatgctggaattgttaagacactgtgcgagggaatagctaagtgctgtcccaaagctattgtcaatttgattagtaatcctgttaattccactgttccgatcgctgcagaagttttcaagaaagctggcacctttgatccaaacagac

SEQ ID NO: 4103 - DNA, 604 bp, Gossypium hirsutum
  unsure (1)..(604): unsure at all n locations; Clone ID: LIB3825-031-Q6-K6-D9
cggncgcgtgggcggacgcgtgggttttcaaagcctctcgtctcctctccataaatctctctctcaacgcagagcgaataggcggagacttccaagaatctatcgcatcagctaatcacgctccaaagaatggatcaggttcaacacccatctgtcatgcagaaggtagcaggccagctccttcgttctagccattctcaagattttcaaggttataatgggtctttcaggagtcctgctctataccaaaggcgtgctgcatatggcaattactccaatgctgcactgcagtatcctgtccgggcttgtggagacctgtctatggttccatcaacagcttcagctatttgcgttcaagcccctgctgagaaaggatttgccagctttgccattgatttcctcatgggtggagtttctgctgctgtatcaaaaacagctgctgcaccaattgagcgtgttaagcttttgattcagaaccaagatgaaatgatcaaaagtggaaggctctctgaaccttacaagggtattggtgattgtttcaagcgaacaatcaaggatgaaggatttggttctttgtggagaggaaacactgccaatgttattc

SEQ ID NO: 4104 - DNA, 605 bp, Gossypium hirsutum
  Clone ID: LIB3825-031-Q6-K6-E10
agctatagcatatgcagccatgtttgtctttcatcagcttgcaagggaaggtaaaggataatgtatttgtcaatgttgttgcatctattcaataccgggcactggcagataaggcaagtgatgccttctacaaactcaccgacacaaggaagcagattcaatcctatgtttttgatgttattagggcaagcgttccaaagctaaatctagatgatgtttttgaacaaaaaactgaaattgctaaagctgttgaagaagaacttgagaaggctatgtctgcgtatgggtatgaaattgctcaaacacttattgtggacatagaacctgatgtgcatgtgaagcgcgcaatgaatgaaatcaatgctgccgcaaggatgagggtggcagctaacgagaaggcagaggcagagaaaattcagcaaatcaaacgagctgaaggtgaggccgaatctaagtacttgtcagggctgggtattgctcgccagcgacaagctattgttgatgggttacgagatagtgtgcttggattctctgttaacgtacctgggactactgcaaaggatgtcatggacatggtcctggtcacccagtactttgacaccatg

SEQ ID NO: 4105 - DNA, 527 bp, Gossypium hirsutum
  Clone ID: LIB3825-031-Q6-K6-E11
taaaaaaaaaaaaaaaaaaaaaaaaaaaaaaaaaaaaaaaaaaaaaaaaaaaaaaaaaaaaaaaaaaaaaaaaaaaaaaaaaaaaaaaaaaaaaaaaaaaaaaaaaaaaaaaagggggcgggccgttttaagagagaacccaagtttacttccgcgggcttgcaaacgtaataagtttttttttggggccccctaaaattaaattaacgggcccgccttttaaaaacgtcgggacgggaaaaaccctggggtacccaaattaaatcgcttggaaaaaaatccccttttccccagttggggtaatagcaaaaaggcccgccccgatcgcctttccaaaaatttgcccaccctaaatggcaaagggacccccccctttaccggcccattaaccgcggggggggggggggttacccccagggggaccgttacatttgccagcgccttagcccccgctcttttcgtttttttcctttcttttttcgccactttggccggttttccccgtaaagttttaaatggggggctcc

SEQ ID NO: 4106 - DNA, 582 bp, Gossypium hirsutum
  unsure (1)..(582): unsure at all n locations; Clone ID: LIB3825-031-Q6-K6-E12
tcgtttcaacacatccacnagctccagctcaatctccgccaaaaacccacaatttgaaccgactcgaagcccaacgcaacgagctcaattctcgagttagaatgcttagagaggaactgcagctgcttcaggagcctggatcctatgttggtgaggttgtgaaagttatgggtaaaaacaggggttgagtcaaggtccatccanaagaaaatatgttgtcgatattgacaagaatattgatatcacaaaaatcacaccatcaacaagagttgctctgcgtaatgacagctatgttctccatctgatcttacctagcaaagtagaccctttggttaaccttatgaaagttgaaaaagttccagattctacgttcgatatgattggtggtcttgatcaacaaattaaagagataaaagaggttatcgaacttccaattaaacatcccgaattgtttgaaagccttggaatagcccagccaaagggtgtcctgctttatggaccacctggtacaggaaaaacactattggctagagctgtggcccatcatactgattgtacctttatcagggtttctggttctga

SEQ ID NO: 4107 - DNA, 636 bp, Gossypium hirsutum
  unsure (1)..(636): unsure at all n locations; Clone ID: LIB3825-031-Q6-K6-E4
caaaatagggttcatattcacgccaaatcgatcagaatggggggaggcaatgcccaaaagtccaagacggcgcggngaaagaaacctcgagaaggctaaagccggcgctaaaggaagccagctcgaatctaacaagaaagctatgtcgattcagtgcaaggtatgcatgcaggaatttatgtgcacaacatccgaggtgaagtgccgggaacatgcagaagcaaagcatccaaaatccgatgtgtatgcatgtttccctcatctaaagaagtgatgtagttggagcaagaaaattctactgttagatatagacatttgtttggatattagttaatgtaaagcctcaaccgtgatttatagatactatgggactatttgtgcctgccccaagagtgaggaaccaattgatcctcaaacccttacaaatggacaaattgnagatcggttcattcctgcttcaatggtaaagtgaacattgttgnttattttagcattgtctcttggaaaaagctgctgtgaattggtttcttttagcgttgntccgtttgtatgtcatttgctggttccattctcttgaacattaaccgtcttaagtagtaattaatttgtaatgtggggactccaataacctttggt

SEQ ID NO: 4108 - DNA, 598 bp, Gossypium hirsutum
  unsure (1)..(598): unsure at all n locations; Clone ID: LIB3825-031-Q6-K6-E5
cgtcggccaagctcctgcagaaaggtggccaatgaanacagagaccctatgagaaagagaggcgagggaaaggaaagaagagagacaagaagatgcangagctgaggaaacaagaggcccgccatcataacgccacagctggccatgctggtggtggtggtattggtggcactggctacaccacagctgggtacaacataggcgacactggtggctatggcggtaccggtggacatgacaaccgtgggtaccccaccgcaggtagtgggtatgatacaggcaggcaagatgacctcagcagtatggggtttggcggagatacagagggtgcttacggtacaacggggaaccaagacttcccaaatgcggcgtctaacaatgctgggactagaaggaacacccgcggaggtacccaggatgatccttattatcgatcctattaaatgaaaggagcgagtttttgtgctctgctactgccttgagtctgtgtttgttgtttgtttgcttctacttttttctttttcaagatcgtactgttgtaccatataaaaagaagtttggtcctgttgtaatgttatagggttagccagggcagttt

SEQ ID NO: 4109 - DNA, 496 bp, Gossypium hirsutum
  unsure (1)..(496): unsure at all n locations; Clone ID: LIB3825-031-Q6-K6-E6
ccccgcgtccggcctgntgtaaactcaggcatacaagtttgtgtttgctttcatttagacattcatattcctgcaacttgtgggaaacctgtttgctgtaagacaaatctcaatttgacctcgaaaggttctgggaaatatgtatgttcccagcacgacaatgtttgtgtcttttggttttagttaaattaactttatgcaaaaaaaaaaaaaaaaaaaaaaaaaaaaaaaaaaaaaaaaaaaaaaaaaaaaaaaaaaaaaaaaaaaaaaaaaaaaaaaaaaaaaaaaaaaaaaaaaaaaaaaaaaaaaaaaaaaaaaaaaaaaaaaaaaaaaaaaaaaaaaaaaaaaaaaaaaaaaaaaaaaaaangggggggggggtttaaaaaaaaaaaaaatttataagggggggtttaaaaaaaataaatttttttttttgggggaaaaaaaaaaaaaaaaaagggggggggtttttaaaaaaggggggaggggggaaaaa

SEQ ID NO: 4110 - DNA, 608 bp, Gossypium hirsutum
  unsure (1)..(608): unsure at all n locations; Clone ID: LIB3825-031-Q6-K6-E7
aaaataacaacacccaanaaagtaaccaaaaagttgaatcaaagccaacgccacaaaaagttgaaacagtctcgacgattcaaacataccttctgctctctcaatctttctcgacaagtaagcttcgttaatattctgtttgaaactccgcagtttctctgtaagaggggaaaattagacaacatgtccaagatgagatacgatcgtaagcctccgcttgctaaatcgcctatccgcgtacgaccccgtcgtgtcctccgttccaactcaacctccctgcaaaccccgccaggttctttgacgaaatcccaaaagccggttcgtgcttggacaggcgaagaatcagtgattcgacccgaatatcggtccatttcttgcgagttacaggctttggctacgatggttaaatgtgaagttgggaatggggaaaaggaaaacgctggttttggtgagaccagtatcggcgccaagtcgactagtctgtttgagagaggcaggttctacgaggagtactcggcgaggagaaacgagaggcttaagagaaggaaaggcgaaaccgggacggagtcaaagagtgggcaccatcatggacttggtgtaaacattga

SEQ ID NO: 4111 - DNA, 577 bp, Gossypium hirsutum
  unsure (1)..(577): unsure at all n locations; Clone ID: LIB3825-031-Q6-K6-E8
gntttgccaaactagnaggtttgtctgtctccatcgatttggccagttttgagaggttcggaattttagagaacctcttctaagttactgaagtcgggagatatcgacctctgctttgccaacgaggatgaagcaacagaactactaaggggtgaagcaaatgctagtcctgaagctgcactggaatacctgtccaaatattgccgatgggctgtggttacattaggggccaacggatgcatcgcaaaacacgcaccagaggttgtccgagttccggctataggggagacaaaagtggttgatgccacaggagctggggacctcttcgctggtggtttcttatatggattggtcaagggattatcacttgaggaatgttgcaaagtgggctcatgtagtggtggtgcagtgattcgttcacttgggggtgaggtaacacctgagaactggcaatggatgtataagcagatgcagataaagggcctaccacttcctgatattcggaattgatgtctccacgatcaaacaagcattgattttcacttctattgctgctatttaataattttttttcctg

SEQ ID NO: 4112 - DNA, 582 bp, Gossypium hirsutum
  Clone ID: LIB3825-031-Q6-K6-E9
gttgggccacctgggaagattttggctctgccagaccaagacctttccttgaagaagtgaggcatttcattctcgatgaatgtgacaagatgctggaatcacttgacatgaggagagatgtgcaggagattttcaagatgacccctcatgataagcaagttatgatgttttcagccacactcagcaaagaatacgcccggtttgcaagaaattcatgcaagatcctatggaaatttacgttgacgacgaggccaagttgacccttcatggtcttgtgcagcactacatcaaattgagtgaactggagaaaaaccgaaagttgaatgacctccttgatgcattggacttcaatcaagttgttatctttgtcaaaagtgtgagccgagcagctgagttgaacaagttacttgtggagtgcaattttccttccatatgcatccactctggcatgtctcaggaagaaagattaactcgctacaagggtttcaaggaggggcataaaagaattcttgtggcaacagatttggttggaaggggaatcgacattgaacgagttaacattgtcatcaactatgacatgcc

SEQ ID NO: 4113 - DNA, 602 bp, Gossypium hirsutum
  unsure (1)..(602): unsure at all n locations; Clone ID: LIB3825-031-Q6-K6-F10
ccgtccggcccttttccttctgtccttggnaaactaaggttatggcttctccctcgttcttttttgctacctttctgttgcttctctctacggttcacccaaagcccccaaagttgcaatttggacttagttgattgctgtggagcaactttcagacgtcaagcttaactctcggatccttcaggattcaattgtaaaacaagtaaatcaaaaccccaaggctggatgggaagctgcactgaatcctagattttctaattacaccattggtgagtttaagcaccttcttggagtaaaaccaacacctaagaaagaacttctgggcgttcctattttaagtcatgacaaatccttgaaattgccaacttcttttgatgctagaacagcttggccacaatgtacctcaattggaagaattctcgatcagctgagcttatgctttggggtcactgtggttcttgctgggcttttggagctgttgaatcactatctgatcggttctgtatccattttgacatgaacatatctctgtctgttaatgatcttcttgcatgctgtggctttctatgtggagatggttgtgatggagggtatccaatctc

SEQ ID NO: 4114 - DNA, 588 bp, Gossypium hirsutum
  unsure (1)..(588): unsure at all n locations; Clone ID: LIB3825-031-Q6-K6-F11
ggnatgagttaaatattggattcatcacacggacataagcaattggttcaaatatcagagctcaattgcagctatggcagcaacaaagttgtatgtagtgtattactcgttgtaccgtcatgtcgagatcatggcaagggaggtgcaaaggggggctaattcagttcaagatgttgaggcaacactttggcaggtacctgagacgctatccaatacaatactgcaaaagatgaacaccccagctaaagcagctgatgtaccagagattaggccagaacagcttttggaagctgatggttttctcttcgggtttccttctcgtttcggtgtgatggcagctcagtttaaggccttctttgatgctactaacgacctgtgggaacgccaagcacttgctggcaagcctgctggtatcttctggagtactggtttccatgggggaggacaggagctcactgcattaactgctataacacagttagcacatcatggtatgatatttgtgcctcttggatacacttttggcagtggcatgtttgagatgaatgaggtcaaaggtggctcctcttatggtgctggcacttatgc

SEQ ID NO: 4115 - DNA, 570 bp, Gossypium hirsutum
  Clone ID: LIB3825-031-Q6-K6-F12
tcgtgttgcagtatccatgggcaatgtgctataattatgtttgacgttactgcccgtttgacatacaagaatgttcctacctggcaccgtgatctttgcaggtgtgttgaagttgtcttattgtttatggtttcgtttttggcttttgtggatgaacttcacgttaactatgttgtgtcaaatgcagggtgtgcgagaatattcctattgttctatgtggtaacaaggttgatgttaagaacaggcaggttaaggcaaagcaggttacattccacaggaagaagaatctgcaatactatgaaatctcagccaagagcaactacaattttgagaagcctttcttgtaccttgcccggaagcttgcaggtgatcctaatcttcactttgtggagtcacctgctcttgctcctcctgaagtacacatcgacttggctgcacagcaacaacatgaagctgagcttgcagcagcagctagccaacctcttccagatgatgatgatgatgcatttgagtagagaagagaataacaatattagctttttcactgccactgcctgaagtttggggtct

SEQ ID NO: 4116 - DNA, 547 bp, Gossypium hirsutum
  unsure (1)..(547): unsure at all n locations; Clone ID: LIB3825-031-Q6-K6-F4
ctcccctcaacgaacataacagaagaggaagagaataaaagnaaaaagaaaaaaaaacacataaacatcattctacaacgttaatcaatcaggctttgtttttgcctgtttctcgttatagtttctttacttttttttggaagacacgctgcacttgaagaagaacaaaaaaaaaaaaaaaagagggctctctttctctttagttgttattcgaccagggaactcagatctcactctccactaaaagtttttgcctttattcaactttttaccggtggaatagaattccaataatgatggagagggcagagtcatgccaaaagctatatacaagactgcggttatgggaatttcctgatgagtatgtgattgaacccaccgatggctcttctgcttcgtctttgaaaattaatcgtgctgatgcctcaatgaagctcattgatgctattccagaatgcagctctgttcgtgttcctaagattcagacaatttttggagtagttggaatgctaaagcttgttgcaggatcatatttaattgntataac

SEQ ID NO: 4117 - DNA, 355 bp, Gossypium hirsutum
  unsure (1)..(355): unsure at all n locations; Clone ID: LIB3825-031-Q6-K6-F5
cgtctcgtaaaatcccanaatctgaggnaaaaataaaattaccaaccattttcttttctcattcgtttccagaaaatggttgatttagattggaaagcgaagatggtctcttccgatatcccaaacaaatccccaaaactttctaataagcttcaggtttcgattcctacgccgtttcgcttctccaatatttcatctccactttcgacttcagcttcggcttcctccacttacgattattatctccggctaccggagttgaggaagttatggngagacaaaggagtttccagcttggcaaaacgagcgcgttttgaagcccgctttgcatgctctcgagatcacattcaggttt

SEQ ID NO: 4118 - DNA, 622 bp, Gossypium hirsutum
  unsure (1)..(622): unsure at all n locations; Clone ID: LIB3825-031-Q6-K6-F6
ggnanactttctattcacatcagnatctgtaaacgagggacaccccgacaagctttgcgaccaggtctctgatgctgtgctcgatgcctgccttgcccaggaccctgacagcaaggttgcctgtgaaacatgcaccaagactaacatggtcatggtctttggagagattaccaccaaagccaacgtagactatgagaagattgttcgtgatacatgccgctccattggatttgtttctgatgatgttggtcttgatgctgacaattgcaaggtcttggttaacattgagcagcagagccctgatattgcccaaggtgtccacggacactttacaaagcgtccggaagagattggagccggtgaccagggtcatatgtttggttatgccactgatgaaacccctgaattcatgcctcttagccatgtccttgcaactaagctcggtgcacgtcttactgatgttaggaagaatggcacctgcccctggctaaggcctgatggtaaaacccaggtcactgttgagtactacaatgacagtggtgccatggttccagttcgtgtgcacactgtccttatctccacccaacatgatgagactgttacaaacgatgaaatcgctgct

SEQ ID NO: 4119 - DNA, 586 bp, Gossypium hirsutum
  Clone ID: LIB3825-031-Q6-K6-F9
cccagcgtccgcttctccccctgtctacttagtcctcttgacctgagccccaagtctctgacaagttcacaggtcttcaggaatattgcaagacgtatggtgaaaattattgtttggggcagctagttttttggtataaccagaccagtgttgatccagattccagcctgtttagagcaagtaggggttgcttatcattacctgacattggttgcttctacgccaaggttcagaagccatcaaggcatcgtgtttatggcccaaagactgtcaaatttatgctgtcatggatggagaagcaagctcagagaccatggccgaaggaccgaatatggacattcaaaggtagtccgagaatctttgggagtccaatgctagatgcagttttgaacaatagttcactggacagagagatggtgcaatggttgaagcatagacctgcgaaattccaggcaatgtgggatagatgaggacattgttgtaggggttgagtttagtggggagcagtaggatattattagccaaatgcggttgtaaatgtttttggaatgatttgtcaattttagtttggcagctaccctttggg

SEQ ID NO: 4120 - DNA, 598 bp, Gossypium hirsutum
  unsure (1)..(598): unsure at all n locations; Clone ID: LIB3825-031-Q6-K6-G10
naaactgggnaatttcaccaaatgcaacgcgggattcagcttcaccaatgcagacctcattgcttctttggctctgaatgaaagggtgattcagttaacgcatcttactaccatattgtgaatccatcaaccaacactgctgttggtgctgaggtgactcatagcttctctaccaatgtgaacaccatcaccgtgggtacacaacatgcattggatccattaaccacaatcaaggcacgggtgaacaatgctggcaaggcaagtgcactcatccagcacgagtggcgcccgaaatcgctctttaccatttctggagaggtggataccaagtccatcgataagagccccaaggtcggacttgctttggcactcaagccttgagagcttaaaaaaaaaaaatgagctccttttggtaagggtatggtagacttgaaaagagttttgaagttttagtctgttattgacattcatggtgttgccatcttacctttcatgtcaatggtttttcatttaaaaaaagaattaagtgaaaaaaatgtgataactgtttttagtcattccttgtttaattgagggtgaagtacctttgatttgcccc

SEQ ID NO: 4121 - DNA, 472 bp, Gossypium hirsutum
  Clone ID: LIB3825-031-Q6-K6-G11
cttttttatcttacaaaacttcattagctgattcttattttattttattaccttttcaattacattttcgttatttggttcataaaatgtttacatgggttctgttggcgtaatccttagtcatttgcaaggcatgtttactcggacaattcggcttcttgaagctgggcttaaacctgtctatgtttttgatgggtagcctccaaatttgaaaaaacaagagcttgctaaccgttactcaaagaaggcagatgctgttgaggatttgcaagaagccatggagatcatcggatacaagttgtcgattggattggctttggagatcactctatccgaaaacttgatcaataaccatctgttaactttattctggttataagtggcaagtaaataggattttggtatatatatgtcataagtattatggatatgttttgtgttaattgaagtaggagatgtgtttattgatatg

SEQ ID NO: 4122 - DNA, 603 bp, Gossypium hirsutum
  Clone ID: LIB3825-031-Q6-K6-G12
cataaacctgcgtggttgccctcatttggcttctcttcctgatttatcaggacacaaaaacctgcagaagattgttctcgcgtattgtgtaaaactgataaacattgacaagtcagttggtactttaatttccttgcaccacttggatatgacaggctgtttaaaccttgttgaatttccaagtgatgtctcagggatgaaaaaccttcaaacccttgtccttaccgattgctccaatttgaaggaattacccgaggacataggcagcatgaggtcactcaaagaactatatgttaatcgaacttgcatcgagaagctgccagaatctatttaccgtctcgagaaacttgaaaaactgagcctaaatcattgcatacatatcaaacagttgccaagatgtgtaggaaagctagcttctctgaaggaacttcatcttgatggatctggattacaagaattgcctgattctgttggatctttggagaacctggagaaattaagtttaatatcttgcgaatcattgactgcaattcctgatactgttggcaatctcaactcattgaaaagattgttcataaagggtaaagcaatcacagagttgcc

SEQ ID NO: 4123 - DNA, 581 bp, Gossypium hirsutum
  Clone ID: LIB3825-031-Q6-K6-G5
tccgggaccggggcggacgcgtggggaacactggtgggagcgaggcgaggcgagctagctaagcggaaaacttcgttctcctaaagaacgttaaaagtgaaagcaagcgagatagagagggcaaagcaaagatgcagagagtgaaggctgtattaaaagctaggcattcatttcaaagacttgggatcctctctcatcaaagatgtctctctgctcagcccaactatgctctatatgatgatttcgaggaccaggttttagtggaaggaagagctaaatcaagagcagcaattctcaacagaccttctgctctcaatgcacttaccgcctcgatggcagctcggctgaagagattgtatgaatcatgggaagaaaaccctgatattggttttgtcttaatgaagggcaatggcagggctttctgttctggggttgatactgttgctctccatcgcttacttaatgaagggaaagtttatgaatgtaaaaggttttttgagacgctatataagtttgtatacctacaaggaacatatttgaagccgcatgtggcaatcttggatggtataacaatggggtgt

SEQ ID NO: 4124 - DNA, 621 bp, Gossypium hirsutum
  Clone ID: LIB3825-031-Q6-K6-G6
ggttatatatgtagaagcttgtgagagtggcagtatctttgaaggcataatgccagaagatctcaacatttatgtaacaacagcgtcaaatgcgcaagagagtagttggggtacgtattgtcctgggatggaaccttctccacctccggagttcatcacttgtttaggagatttgtatagtgtggcctggatggaggacagtgaaactcacaatctgaagagagaaaccatagagcaacagtataaaacagtaagggaacgaacttccaatttcaactcatacacatccggtggatcgcatgtgatggaatacggtagcacaagcattaaagctgaaaagatttatttgtatcaaggttttgatcctgcttccgtaaactttcctccaaatgaattaagccatgacacgcaaatggaagctattaaccaaagagatgcagatattctctttttatggcatatgtacaaaaattcggaagatggatcgaagaagaaagaaatactgaaacagatttctgagactatgaggcatagaatccacttggatggcagcattgacttgattggaacagtgttgtatggaccagcaaaaggctctgtcatcctcaataccatcaggga

SEQ ID NO: 4125 - DNA, 542 bp, Gossypium hirsutum
  unsure (1)..(542): unsure at all n locations; Clone ID: LIB3825-031-Q6-K6-G7
ctttgtgcaaaaccgnatagctctgaatgaaagtttgccaagcttgtctcgtggtacgacaatgaatggggctacagcacccgtgttgttgaccttatcattcatgtggatgctgtttcgaaagctaagtaagttggtcggctggattgtctcggcagctgtatgtaatttcacggatctatccttaccttgttccgtatctatggtggaggccatgagtttaaagaaataaagccttgtttagagtcttgtgtcaatagttttttcctctttatctgtttaaatgaaacgataactgagtttctcctacgtttaatcgtttcgttgtcgaggaaattcgattctccatgctctttgtaattctccaggtataatcttgctatactagtttgaataatatttttccttttgaaactccaaaaaaaaaaaaaaaaaaaaaaaaaaaaaaaaaaaaananaaaaaanaaaaaaaaaaaaaaaaaanaaaaaaaaaaaaaaaaaaaaaaaaaaaaaaaaaaaaaaaaaaaanaaaaagggggggg

SEQ ID NO: 4126 - DNA, 571 bp, Gossypium hirsutum
  unsure (1)..(571): unsure at all n locations; Clone ID: LIB3825-031-Q6-K6-G8
gggnaaagcctctagtatcgggtgctgcgctaggattggaagggcagctgacagtatacaattacaaaggaggtccgtgttatcgatgcttatttccgactccacctcctacaactgcttgtcaaagatgctcagatagtggggttcttggagttgttcctggaattatcggctgtcttcaagctctggaagccattaaaatagccagcgatattggtgaaccactttcaggacggatgcttctttttgatgcattatcagctaggattcgaattgtcaaaataagaggcaggtctttacaatgcgaagtttgtggagaaaatacgacatttaaccaacagcaattcaaagaacttgattatgagaagttcactcaatcgccattgtcaacctctccgccaaagttgaaactactcgccccggattctagaataaccagtaaggagtacaaagagaggatcataagtggggagccacatgttttggtggatgttcgaccagaacttcactacaagatagtttctatgcccaactcattgaacattccgctcgcgagcttggagactcgact

SEQ ID NO: 4127 - DNA, 430 bp, Gossypium hirsutum
  Clone ID: LIB3825-031-Q6-K6-G9
ttagttttgaaacggttaatacttcccatcttgctgtgtagttattacgtgggagaatagccactctattcagattatatagatatgatatttttttttcaaaaaaaaaaattaataataaaaaaaaaaaaaaaaaaaacaaaaaaaaaaaaaaaaaaaaaaaaaaaaaaaaaaaaaaaaaaggggaaaaaaaaaaaaaaaaaaaaaaaaaaggaaaaaaaaaaaagaaaaaaaaaaaaaaaaaaaaaagggacacaaaaaaaaaaataaaatgaaaagaaaaaaaaaaacaaaaaaaaataggaaaaacttttaaaaaaaccaaaattggtaaaacttggggggtttccccaatttaatccggttggcttaataggccaaaattcccaacggggggcccttccaaaaagtcccccattttgaatggcca

SEQ ID NO: 4128 - DNA, 554 bp, Gossypium hirsutum
  unsure (1)..(554): unsure at all n locations; Clone ID: LIB3825-031-Q6-K6-H10
cattgaatgaagagatgatgatgaagagatttggatgatgtggaccaggnagaggagctgaacacacaacatctagttttggctcaatttgacaaggtgactcgtacaaagagcagatggaagtgcacacttaaggatggcatcatgcatataaacaataaagacattctctttaataaggcaacaggcgaatttgatttctgattttgttagataaaactgtagtcgccatcgtattgcagcagttgccttaaaagagcaagtcaaggggtgttattctgtgtttcgtaatttgtcttttaattattattagagtgaaaggttgattgaggggcatgggatatgctttattttaatgtcttccttaagacttgggttcgatggttgtcgtattgtacataaaggaagagagcattttcggccttagaatggatgactacttgagacagcttcttgcagttctaaaaacttctgcaatggaatatgtaatttcatttataccatatacttagacattttggttaaatttaattacgagtccctttgttttcttt

SEQ ID NO: 4129 - DNA, 518 bp, Gossypium hirsutum
  unsure (1)..(518): unsure at all n locations; Clone ID: LIB3825-031-Q6-K6-H11
tgactgtcgaggacaaggnacaaggnagnaaaattgctcgattacgtcgagaagaagcatcctctctcggattggatatgcttttcttgttgacaactcgcactgctgactggtttgttaggcgcggctttactgaatgtacgatcaacatgataccggaagaaaggaggaaaaagataaacctatcccgtaaatccaagtattacatgaagaaactcataccagatcgaagtggaataacagctgataaagcatttaagtaaagcttacagccgatggaccggagctacggagaagacgatgctacctcattggtccgatttggcttagagaaaccatttacttccaagttaaatgtttagcagggattggatttgattttctatgcatctggtttttgttacgaactgtaattttattattaccacaaaaatagtagtagttgacataattttttaggcgaattgtaattatgtagtagtgcttcaaaatatggtaaataaatttcctttaggagt

SEQ ID NO: 4130 - DNA, 588 bp, Gossypium hirsutum
  Clone ID: LIB3825-031-Q6-K6-H12
cggtcgcgtgggctgggatatcaactcggttgatccttgtacatggaacatggcggcttgttctgctgaaggtttcgttatctcactagaaatggccagcacagggttatcaggtctgctttcacccagcattgggaatttgagtcacctaaggacaatgttgttgcaaaacaatcagttatcaggtcccatcccggatgagatagggaaactctcggagcttcaaactctggatctttccggtaaccactttgttggagcaattccaagtactttgggctctctaactcatctaagttatctgaggcttagcaagaacaatttatctggacctattcctagacacgttgcgaatctcaccggtctttcgttcttggacttatcatataataatctcagtggtcctactccgaaaatactagcaaaaggttatagtattacgggaaacaactttctttgtgcttcttctgaacatatatgcacagatgtttcttatccattaaatgtggcaggctcagtttcgtcttctcgagtcagtggaaaccatcattggctgctttctgttgccataggaattggttttgcatt

SEQ ID NO: 4131 - DNA, 608 bp, Gossypium hirsutum
  unsure (1)..(608): unsure at all n locations; Clone ID: LIB3825-031-Q6-K6-H5
cggcgaggnaggtgngaggagcaggggagtatgctggtaaaaaacaatggagcttgctgccaagccaataagggcggccaaggaagctgcttcagctgctggcgagactctgaaagatatacagccaggaaaaagaagaggcagcgagagaattagaagctaagagagctactgaaacacagggtgatagttaccgagaagaagaaacccaagaaagatcgagcgagagccaacaacaaatggaggatttggccagaaaacccaaagagaaattcgaggaaactgcaaagccaattggaaatgccccgaagaaaacctttcaggggtcatcagagcctaacaaaaccggtgaattaacacaggaaactgagaagagaagccaggtggaagaagagagaatcaaaaaagtgccgatggagggcgtagagagaagaatggagagtggggtagagagaacagttgagggttcaggcgttagagaagaggaggaggaggaaaaccaaacaggtgtattgngagccattgctgaaaccatagtggaaattgcccaaaacaccaaggaccttgttatcggacccgacgaccaaacccaatactcagagcgccaa

SEQ ID NO: 4132 - DNA, 572 bp, Gossypium hirsutum
  Clone ID: LIB3825-031-Q6-K6-H6
taatttgtagtttcatgttgataccgggaatacaagacatcagcttcacgttggatgtggggccaggaaggtctgaatttagttttcattcaaagagttattgacttaattttaaataggcaaaaaactcgggtgtgttataatgtgctctgcttattcatatgattagaatttcatgttctcacatattctataagcatctaagcatcttgataacctgaatacatgtagttccattgaagggagaacacaagttggtgttcgacaggtattagcgatattggatgcttagtactcaaaattggaccttacgttttgagtatatcttagatatattagagtaatggaaacgtgagtatagattttgattctctattattctaccggcaaatttgctatttctgatatagatccgaccattgtggagacattacttccaaaacacacaacgacttattttttgtggttgatagcaaccatcgcagatcgtgtgagctgacagctcgagatgcattgcacaggcatgttgaatgtatgtacttgggcatacaagcctattattaatgggcaac

SEQ ID NO: 4133 - DNA, 583 bp, Gossypium hirsutum
  Clone ID: LIB3825-031-Q6-K6-H7
taaccttggtcgtcttttctatcaaattaacaagtagaattccaaatgggaagcaccgccgtcgagaaccagcagaagagcttcagcgagagattgatgagcttcatcgccagcaacgcgagattacagagaggctgagagatcctcgaggactccgaagaggaggactgtcaggcatcggtcctcgtaacttcgccgccaatggttctcgccagcgtggctttcttcgacatgcggataggattgatggagaagatcaacctccggctaagaggcgattgtcatcagctgttgtcaaggttgaagatggagagattgttgatgatgaagtagcaaaggatgccagtgacatggctgtcgaaggatctggtgcagtacatgagagtgatagaaagctttcgactcagcagcaaagtggttggtctagaagggatgtaaatcaaacaccactgaagaaggatgccgaagttccggttgctgagcatgttccaaggattttgcccaaggatgaggacccaagcttgattaataggaataaaagaatgttgggtcaacttttagggactttggagagattcaggaa

SEQ ID NO: 4134 - DNA, 589 bp, Gossypium hirsutum
  Clone ID: LIB3825-031-Q6-K6-H9
cggcggtgggttgtcgagagatgggagctaatgctggagccaaggagcttaatctcattaagaagatactatcacttgatgccaaaattatcatgcctggtcacataggcagtgggtgcttcaggcattaggtggctgggaagatgaacttgattattgtcagcaacttctcgaagaagatatctttaataattctgcttggaaccagagatattttgttgtaacaagatctcctttcttgggaggcctgaaagccatgagagcatctgaagtaagatacactgtggaagccattctggccaacccaaacaatgagtgtccatggagatacctccgaggtctttacaaagacgatattaaagctttggttaatgatcctgagatctcatcagtatgtttgaaggttataaacacgaaaaacaactacgtttttgcgctgaaaatgcttctcgatcttctttgtcatggttttcagccatgccatgagttcagagattctgtagtcgctcttcggacttcagacactgacccactagatccggacctgtcaatggcaatttgtgacatcttggaacatgtggattctttg

SEQ ID NO: 4135 - DNA, 590 bp, Gossypium hirsutum
  Clone ID: LIB3825-032-Q6-K6-A10
ctttccttcatcgaaaaaagaagagttgccttcatttcttgattggtttggctggtgcacctgggatgctttctacactgatgtcactgcagagggtgttaaggaaggcctcaaaagtctatcggagggagggactccacctcgatttttgatcgtagatgatggttggcagcagattgaaagtaagcccaaggagagtgattgtgttgtacaagaaggggcgcagtttgcgagtaggttgactgggattaaagagaatgcaaagttcaaaaagaatgaccaaaacaatgaacagatctctggcctaaaacatgttgtagacgaggccaagcagcgtcataatgtgaagaatgtgtatgtgtggcatgctttggctggctattggggtggagtcaaacctgcagctgctggtatggaacattatgatacagcattggcatatcctgttcagtccccaggtgtgatgggcaaccagccggatatagttatggacagccttgctgttcatggccttggtttggtgcatccgaagaagttttcaacttctacaatgagcttcatgcctacctggcttcatgtggagttgatgg

SEQ ID NO: 4136 - DNA, 577 bp, Gossypium hirsutum
  Clone ID: LIB3825-032-Q6-K6-A11
cttttatttagggtttttgattccttcatctttatcttcgatcaatcaaccatgactggcaaagccaagccaaagaacacacagccaagaaaagcggcgaagatcgacgccgccacaaccaatagaggcggcggcaaggccggatttgctgaccgttcgggtgtggagaaaggtggacatgctaagtacgagtgtcctcattgcaaaataacagctccagatttgaagtcgatgcagattcatcatgatgccaagcaccccaaggttccctttgaagagtcaaagcttgtgaatctacatgctgttcatgtggttgagacttccaagcctcgtcctggtgttaggggcagccttaaaaagtgataaaaaaccccaaaaaatgtgtttttcgtcaagctttggtgttttgtgatgtttcgaaatatgggtttggttcctttttcatcttttaattgtttgtcacgcttgcagtagagatgggaatgagaaaggggttggggtgaaaaaagttggattattcttgtaagggtcccccttgatttgatgtcgatgatgaatggtgttgttatagcttcct

SEQ ID NO: 4137 - DNA, 593 bp, Gossypium hirsutum
  Clone ID: LIB3825-032-Q6-K6-A12
cggccgcgtgggggaagctatgaagcgaacttctccctatgctcggaattctcccttctgatcagttctccgttttggtttccctctcgaaacctcctcttcatcgtctcctcttctcatccatcatcacagggtataccttgtggaacgcggagtatagggtttcattgatgagaaatctggaaagagcggcaccggcggaggacctagtgaaggagacggaggagggcgctagtcaccggcacggagaggtggtgaagaataatattgaggagggagagggtggaaatggtgaatatgaagaactagagaagataagtccgagggtttttgaggatttgtcgccggaggctttgaagtatattgagaagctgcaagctgagttatctgatatggaggaggaactgagtgctcaaaagaaggaaaatgtgcgaatggagtgtggcagggaaaacatgaatggtttgttagagtatttacgatccttggatgctgacatggtgacagaattatcccaaccatcatcggtacaagtggaggaaatgatccatcagcttgttcagaatatattgcaaaggttcttcaaggatgcc

SEQ ID NO: 4138 - DNA, 591 bp, Gossypium hirsutum
  unsure (1)..(591): unsure at all n locations; Clone ID: LIB3825-032-Q6-K6-A5
ccgntctcctgcacttttcctttccagttcaatggaagttgatgatgacaacggtccatcaacttcagctgcagttccggatggcgaaaccacggtgcctacagctaatagcacaccggttcagcctccagcggtcccacctgcagttgtacctccaactattgctccactaccggcagttgtgccacctattgctccaatacctgcagttcgccctcccgtctttaaaccacctgtgcctcaaaatggtgaggtgaaagctgttgattcagactctgaccatgaggttgatgggcgagctacagctggtgaatatgagatctcagaagagagtagactggttcgagagcggcaggaaaaggcaatgcaagaacttttgatgaaacgtcgtgctgctgcactggcagttcctactaatgacatggctgtccggactcgacttcgccgacttggtgaacccataacactttttggagaaagagagatggaaagacgggaaaggctgcgaatgattatggcaaagctggattctgaggggcaactggagaaattgatgaaagctcacgaggaggaagaggctgcaatttctgc

SEQ ID NO: 4139 - DNA, 581 bp, Gossypium hirsutum
  Clone ID: LIB3825-032-Q6-K6-A6
cggccgcgtgggaaatgctagtactactattgttattccttttaatgctttttcgtatattttgaagggcttttttgagggtcataccttcataaagtacattggacacaaatatctaatatggacatttcaagatggatatttaaaatatatatatataaataaaaagtggagcaataatgtggttgatgatttgcatgtgtattattacttgataggtagcttgacacatcagagctcaacatcacaagttggatgccattgctgatgtttaaggtatcagtttcattgtttcggggattaaaatgtcataataaaagcagtgggtagagcagatgaaaagttatgctgggaatggaaaacggatttactcgttttttctaaagtaattaaatacaatccctgttcatgatcttacataatttttattcacaagcaattctagtctcaaagctgctgaggcagatagcaaaggcttggaatgccgagatcggataccgataatccatggtaaataaatccttacccactttcccaaactggaggatgatcttctcatgttctggtcctgccggttcgtt

SEQ ID NO: 4140 - DNA, 578 bp, Gossypium hirsutum
  Clone ID: LIB3825-032-Q6-K6-A7
gtttctttctcttctctctcgcactcaccaggtttctttggagaaaaaaaaaatgtctcgagtttacgtgggtaaccttgacccacgagtttcggagcgagatcttgaagacgagtttcgtgtctttggagttattcgaagtgtgtgggttgctagaaggccaccaggttacgctttggttgactttgatgatcacagagacgccgaggatgcaattcgtgaattagatggcaagaatggctggagagttgagctttctcataattctagaggcagaggaggacgtggaggcggaggcggaggtggaggtggtcggggacggtcgggtggttctgatttgaagtgctacgagtgtggtgaggctggtcattttgctcgagaatgtcgtacacgtggtggttccggaagacgtcgcagccgcagccctagatatcgtaggagcccaagctatgggcgcagaagttacagtcctcgtggacgatcccctaggcgtcgcagtccctctcctcgtggtcgtagctacagcaggtctccaccataccgtggtcgtgaggaattgccatatgctaatggaaatg

SEQ ID NO: 4141 - DNA, 575 bp, Gossypium hirsutum
  unsure (1)..(575): unsure at all n locations; Clone ID: LIB3825-032-Q6-K6-A8
gnatttacgaggtgctgcaaattttatccctcccaatcttttcgatctcgtagggtttatttcagcatgaggaaaatggattactgtttgtccccaaggccaggctcaaaatgcgcaagccaaatgttctctgaccctaacatggctatggacatgatgaagaaaaacctctctatgattatacctcagactctcacttttgcctgggtcaactttttcttctctggatttgttgcagccaaaatacccttcccattaactcagaggttcagatcaatgttgcagaatggaattgaccttagcacagttgatgtgagctatgttagtagccgctcatggtatttcctcaatttgtttggtttgaggggtttatttagtctgattctgggagaggaaaatgcaatggatgatacacagcgaatgatgcagatgggtgggtttggctttgatccatcaaagagcctgactgctgagaaagatggtcttgacatagtccaacatgaatgggcactccctaaatttgagcatcgggccgaagcagtattgaaaaaactcgtcagctgaacatcgggagc

SEQ ID NO: 4142 - DNA, 580 bp, Gossypium hirsutum
  unsure (1)..(580): unsure at all n locations; Clone ID: LIB3825-032-Q6-K6-B10
cggncgcgtgggtttgtgatatctagggacttagataaggtttcagcccctgctatgctggtgcttgaggttgaacgtgttcttactcctggtgggatagggtccatgcttgttggtcgtagtggtagcttgatcaggtctgtaactccagtttcttccttattgaaagcttccagtgttgttcatgttgattatgtgaatggcttcgcattgattgtattcaagaagaaactcaaaaacggcacttacttcgagcaatatcggctaccagccgattgtcggtctatggcaaacaccaaacctatgttggataacattgagcctcttttggagaagaggccagttggatttgagaaaactattgcttatttgcctgaatttgttaaacatttctcataagcaacgtttggtgtatattgatgttggggcaagtgagcatttgaactctaacgttacagattggttcttgccatcttatcccgtggatcgaaaagcattccatgtttatttcatcgatcacaatacttcagtgatgctatcctatgtcaacaagcctggtatcaactntgtttattatcct

SEQ ID NO: 4143 - DNA, 581 bp, Gossypium hirsutum
  Clone ID: LIB3825-032-Q6-K6-B11
ccgggtcgcccacctccgggcgcgtgggtgaattcctttctggctgtctgaacccacgggaaattgtcattgaagatgtgcataagattggaggaacacctgctgttattcgttatcttttggagtttgggtatctagatggggattgcatgactgtgactgggaggacattggcagaaaacgcaaaagttatccttgtttacccgaggggcaggatatcctaaaaccggtgtcaaatcctatcaagaaaacggggcacatccaaatattaagagggaatcttgcaccagagggttctgtagcaaaaattacaggaaaagaaggactatatttctctggtcctgcacttgtctttgaaggagaggaagctatgctagcagctatctcagagaatcctatgagttttaagggaaaagtagtagtcattagaggggagggacccaaggggggcccaggcatgcctgaaatgttgacaccaactagtgcaataatgggagcaggtctcggaaaggatgttgcattgctcactgatggtagattttccggaggttcacatggattcgttgtaggccatgtttgcc

SEQ ID NO: 4144 - DNA, 55 bp, Gossypium hirsutum
  Clone ID: LIB3825-032-Q6-K6-B12
ccccgcgtccgccccgcgtccgccccgcgtccgcccacgcgtccgtctagatcgc

SEQ ID NO: 4145 - DNA, 629 bp, Gossypium hirsutum
  unsure (1)..(629): unsure at all n locations; Clone ID: LIB3825-032-Q6-K6-B6
cttntttcttctctctccattaatcttagttgaaagagaacatctttgctttcgcccatgaccactgtttatgacccttcacaccatctcacctccaaaaaatgtgtttcaaggaccttgaaatccctccaaggnaaaaagcaactccattgttgccacaacgccgccgccatggaacttccccaccacgaagctaggctccacaaataccttccttccaatgaagacaatgacggcaccgatgatccatacggcaccgaccatttccgcatgtacgagttcaaggtaagaaggtgtacaaggagccgtagccatgactggactgactgtccttttgctcatccaggtgaaaaagcccgccgtcgtgaccctactcggtaccaatactcctccaccatctgttctgacttccgccggggcggtggttgtcctcgcggcgatgactgtgagttcgctcatggagtgttcgaatgttggcttcaccctacacgttacagaaccgaagcgtgtaaagatggtaagaactgtaagcgtaaggtttgtttctttgctcattcgtcacgtgagcttcgtctcttgccggatcacaaccgccatacaaaaactncgacaagaactataaccattgc

SEQ ID NO: 4146 - DNA, 217 bp, Gossypium hirsutum
  unsure (1)..(217): unsure at all n locations; Clone ID: LIB3825-032-Q6-K6-B7
gnatcatatgataaaatatatgatcttcaagtgtatatattttatgtgtgattgggtttaaacaagattgctgatctgattattgttattaaatattttattattgcaaaccaagttgatttcagtttgtaagttctttgaagggatctaatatgatccttttacttgtgtacttttttaacttctgaatattgataaagtcaacctttttattcct

SEQ ID NO: 4147 - DNA, 589 bp, Gossypium hirsutum
  unsure (1)..(589): unsure at all n locations; Clone ID: LIB3825-032-Q6-K6-C10
caaagcttcatattatcttttttagttccgcaaagaaacgaaaaaatagaagaatacaatcgttttctttttgaagtcgggttttagtttttggggagaaaaaaatgttgggagtatttagcagtgcgatagtgtctccgccggacgagctggtggcggccggttgccgaactccatcacctaagataacggcggatgctctggtgaaacggttccttgagacgaactcctccggcgtgtccatgcagatcggagaccatgtccaattcgcttattctcaccataaagagtctcctttacggcccagatcatttgctgtgaaagatgaaatcttctgcttgtttgagggagcccttgataacttggggagtttaaagcagcaatatggtctggcaaagtcggcaaatgaagtgattttggtcattgaagcttacaaggcccttcgtgaccgagcaccttatcctccaaaccatgtggttggccatctaattgggagctttgctttcattgtctttgacaaatccacctccactttgtttgtggcttctgatcaatttggtaaggttcctctctattgnggaatcaccgc

SEQ ID NO: 4148 - DNA, 575 bp, Gossypium hirsutum
  Clone ID: LIB3825-032-Q6-K6-C12
cttctctcctctctcaaactccgcggcgcagatccgaggagtttgggaaaccctatctctctctaaaatcaaccgaaaaagctctcaaaaaactaccctttcttccccccccctctctctctctcactttctctcattctctttctttccagcctttctacactctttttttccccatcgctcctactgttttcatctgcttcaagtcatggcaggtttggcaccggaaggatcccaatttgatgctcgccaatatgatcagaaaatgactgagttgctccaaactgatggagatgattttttcacgagttatgatgaagtttatgacagttttgatgcaatgggacttcaagagaatcttctgaggggtatctatgcgtatggttttgagaagccttctgcaattcaacaacgaggtattgttccattttgcaagggtcttgatgttattcagcaagcacagtccggaactgggaagacagcaactttctgctctggaattctacaacaacttgattatgctatggtccaatgccaggctctggttttggcacccaccagggagttggcacaac

SEQ ID NO: 4149 - DNA, 617 bp, Gossypium hirsutum
  unsure (1)..(617): unsure at all n locations; Clone ID: LIB3825-032-Q6-K6-C4
cttcatgtcatgctaactttttgngattttatgaggcacttcttggctttgtcaattttcaactttatcattctataaatgtgaagtatcctcctattttggatccccggttggaggctctggcagcagatctctatgcattatcaaggtattttgatgctaaccacagagctgctattcaagaacctcaagttgctggttcatctagatcggagcaagagcaggaggagtctgacttacgacttgctcaacttcagcatcaactgcctgccaacgaacctggtgcactaatgcaccttgttcaagatgcatccagtgaaattgaggaagacgaaactacaaggaactgtaaaaatctttttcaaaataagaaaattttcttgagtcgtgaggttccaagagaatccctgctttttgtcattcctgcttttggaggtattgtttcttgggaaggagatggagctccattcgccgaatctgatgatagcatcactcatcagattgtggacagaccaacccagggacatgtatatctttcaagaaaatatgttcaacctcagtgggtttatgactgtataaatgcacggatcatcttgccaactgagccatatatggtt

SEQ ID NO: 4150 - DNA, 623 bp, Gossypium hirsutum
  unsure (1)..(623): unsure at all n locations; Clone ID: LIB3825-032-Q6-K6-C5
tccgggaaaaaaagnacacnaaaatgtttgctttgtttctttgggggaaaaatcgggcatggctgagactgagagccaagcaaaacgacatggagggaaagcaatacgacaattcagaaggggaggaggaggaagaagaagaagaagaagaagtggacgagttagaggatgaagaggaagaggaagaggaaggagtgagtagagttaatgagtcgcacggggctggaacggcgccgtcgagtgatgctgaggtgagagactcgcaattggaaaccctaacaaatgatgatcgttgtgagaggttgcgggaaaatcctacttcggaattgaaggaaggagctgaatctaaggagcaagttaagatagcccaccagaaagttttgcctagtttggttgtccagcgtgcagaagctccaaaacaacatctgctccagtcatctgtttctccaacttcttcatcacaaccatcaccaacttctattacacaagatatttcatctcctcccactccaactctaccagcacaaagtcattcagatcagaaggttaatggcgcatctcctcctgtagcaaaccagcaaaacccttctaatcttaaaatgctatcctttgttcccgttgtg

SEQ ID NO: 4151 - DNA, 613 bp, Gossypium hirsutum
  Clone ID: LIB3825-032-Q6-K6-C6
gtagcattcaaccatagtgcagtgtgtgaaagcttcatcgcttacctccagttacactgactaaagagcagcaagctatccatcataaaagtaggtccagcacataccagtggcaagagaccaacaattttccttaaagagggggattcaattccttctgatgttgaccctgatacaatcagatggattaccgcaaaccatccttttgcgaccactgctaatgacattgatgaatacttggcacaaaataatgtgttccacaaacatggtgttccattacgaattcaagctgagcatgatgcactccagagaaaacttgaagcactgcaaacggaggacaatttgaacaatctgattatcgacagtagaaatgctaaacatttccagagaccattcacattaaatgacaggtcagataaacctgttgatcaaggccccaataacaattccagagttgaaactaagcccacaaaaccagagcatgccttcgattcaattgaaagcaacttgtattcataggataatgcacaaccctgaaatatttcctggacttggaatcaaatgtatcgaatgctagtgttacttgccaatgaactcctaattttgtagtata

SEQ ID NO: 4152 - DNA, 596 bp, Gossypium hirsutum
  unsure (1)..(596): unsure at all n locations; Clone ID: LIB3825-032-Q6-K6-C8
gtcggnagggaanaagnatatgggaagcgagtcatacgagnaagccattgcagctttgtcgaagcttctcagtgacaaagctgatctcgggagtgtcgccgccgcaaaaatcaagcagataacagccgagttagaggcagctgccgattccactcagttcgacccggtcaagcggctcgagaccggtttccttcacttcaagaaagaaaaatttgagtacgccactgcactctctcttttttttttttccctttcatatcgcgtgcctagttgtctctccaatttaacaaggcgtttttaatggctttccaaaaaaaaaaagagaattgttattactatttttgtttttaaatataataaagcaagtggatttggaaaaggtaacagcaaatgaattattaattgcagaaaagggaaaaagatatggttgaatttgaatgttggcaggcttcagattcccgtggacctttttattttgcataataattagcttaactttaatctgtttgtcttgttttcttttctcttttttttttctgcctccaattttttccagcaaaaatcctgatctgtacggtgcacttgccaaagggcaa

SEQ ID NO: 4153 - DNA, 593 bp, Gossypium hirsutum
  Clone ID: LIB3825-032-Q6-K6-D10
ctggttttgtatctcaagacctcgacttgcatggttacattcagagctacactaacgtgaccatgctgtattatacttgcttgggaggtgacggttagcttcactatgagtaggccatctctatacaagattaatacttgtaagaccccctttttacccaacaaaaattcctggcagaacgttccttaacaggcttattacaagctaaataatatggccgctgctaaaaaactaaaaaccactttttctttcaattatgggaaatgattacacccgctatgaatttgcctttagcgccttcactatcttgaacactccatcttgaaaacatgcatttggcattaacgtatcaccttttcaagttaaaaaaaaaacatattttcttttcgggaatctgatccaaacccatatgagcaactaagctaaagtctcctttttatttttgctaccaatgcttttcaaagattaacacacacaatagattaaaattaataccgtatacgtatacgctttaatatgcctaagagaccggtcattttccttttactgagtgcagacgccaaatggagatatgactctagaagaaccactga

SEQ ID NO: 4154 - DNA, 605 bp, Gossypium hirsutum
  unsure (1)..(605): unsure at all n locations; Clone ID: LIB3825-032-Q6-K6-D11
gnaactgctctctctgtcttaacgctataatcatagaagaaaaagggtttgaaggaggaattcgaggagtatgcggagaaagctaagacccttcccgagaacactaccaacgacgacaaactcattctctatggactcttcaagcaagctactgttggaccagtgaacaccagccgtcctggaatgttcaacatgaaggaaaagtacaagtgggatgcatggaaggctgttgaagggaaaccgaaggaggaagcaatgaacgattatatcactaaggtaaaacagcagccgcaagcatgcgtaggcggagaaccacaagtggtgcagcctcaggaggggctgctgggaccatgcttcaattttacacggatgatgcaccaggtctgaagatctcgccgaatgttgtgcttgtcatgagtattggtttcattgcttttgttgccgttctacatgttatgggcaagctctattttgttcatagagagggttgaaaggaatttgttggccagaaaaaaaaataacagaatttatttaggagtctgagttgcaaagcaaaactgtttttttttttttgattaaaaacaagtctagtgtcaaaggtgcaa

SEQ ID NO: 4155 - DNA, 599 bp, Gossypium hirsutum
  unsure (1)..(599): unsure at all n locations; Clone ID: LIB3825-032-Q6-K6-D12
gnttctttcaagtttctctggtttttcctggtcaaaaaaggggaaaaagacttcttttttcctagttaatatggcggaagctcctacccagacccaacaacctcgtcctgtagtttacgttgttttccagatcggtggcgttggagccgtcagcgataataaacctgggccggcgccggcttctaaagcttccatagaagcaatgcaaaggatagaagtggaagagagtggcaaagattgttgtatttgtttggaagagtttgaagttgaagaagaagcaagggagatgccatgtaagcatgtgtttcattcgggttgtattgagaagtggttgttgatccatgggttatgcccggtttgtcgcttcatgatgccgcctgagacggctgaaatagaaggtggtgagggtgatggtggccggcgaagaatggagggtggagagatcaatggtttggaattttcacaatcggtttttgcatttgctagcttggctagcatgatgggtatgatgggttcgggtcgggcttcccgtcaacctaatttcggtcgagttgatgatgatacgccttcccatcaaaacacnagattgcattgacacc

SEQ ID NO: 4156 - DNA, 600 bp, Gossypium hirsutum
  Clone ID: LIB3825-032-Q6-K6-D4
aagtttgtagattaaaattgtagaggcttgaaagaattgtttataaacttgctaacaaataaatccgaactatttggctgtctttgccctctagcccttgatattctcacccttatatagagtatgataccattgatgcatctaggaaggtggaagaagtgatacaactttcggtctctcaccctttttactttaatttattgctgcaattttattaaatgctttcctttagcttaaagcttaaatcctgccatagctgtatgatgctatttaggcagtgacttcgtgttgatgttaaaaaagtagttggatgatataaactagagaattgaagaaaagataccatggaatgacagttaaaaatggcatatgcattaaattgtcatggaccacatggtgatgctgttgcctttataatgcccaatggtgattcagaactaactaatttatcttttatatttttgggcaaactaatttatcatttctaaaggttcttggattggagcggttgaaatctgaactacagtcacgtgggctaaaatgtgggggtactttgcaagagcgagctgctcgtctgtttctgctaaaatctaccccttt

SEQ ID NO: 4157 - DNA, 562 bp, Gossypium hirsutum
  unsure (1)..(562): unsure at all n locations; Clone ID: LIB3825-032-Q6-K6-D5
attttgtttttttagctgacctttagccaaacatttggccctcacccccatcgtccccaaccacaggcgtattttcgccttttgaagtccattttcgacctcaagattcctcctccaccttcgacttcgacgaggcaaggaagaaccaatagtagatttgcgaggtacgggtgcgcgttcgtgtatgggggtcctgttggcgcttggcgtgaggagtacagaggcgaaggcatagggaggttgctgttgcggcgcaggagaaagaaaggaaccctagggtttctaaaatttctgggccatttgggctcatttcgggttttgggtcagtccttgggccgtggggttttagttattgggtctagggcatgtattgggccaaagtctgtaaatagacatttaatggactatatattattttttgttttgggattattctttggttgttgggcccgagcggatttggcccattacaatgttaatttgagtgagggattaaatcataaactatgaaaagtattgtggcctnnanaaaaaannnnaaaaaaannnaaaaaaaaaanaa

SEQ ID NO: 4158 - DNA, 620 bp, Gossypium hirsutum
  unsure (1)..(620): unsure at all n locations; Clone ID: LIB3825-032-Q6-K6-D7
cccgggtcgnacccaacgcgtccggggnaactgcacanaattcacacggttccaatggttttgaaaagaacccaagatgacggagccggaacgaaagttcggaccatttatcggacaaggtagccatagagacagatagtagtacaccgggtctttacagtgacaaggaaaagctaagatcgaagaaattgaagatgaaaacaatggagaataagaagaagaaaggaggaaaaaggatgagtatagagaaataggggagagtatccgaatactagctgaagtagtattaaaatcagaagaatcaaggatggaaacactaagggaaatagagaaaatgaggattgaagctgagactaaaaggggggaaatggagcttaaaagaacagagatcatagccaatacacaattggaaattgctaagctctttgctggatcaagtaataaagggatcgatccttcgttgaggataggaagaagttgacatacatatgcgcgaatgtgtatgtatgtgtaggtttagggtattgacaatgaaacaatgtgggaaggtattttaacttgtaataatagggtagtgggttgttgatctaaattatgtaaccggtacaatgcagtgtgaa

SEQ ID NO: 4159 - DNA, 602 bp, Gossypium hirsutum
  Clone ID: LIB3825-032-Q6-K6-D8
actttatttcaataaatttaccaagtttctcaattacttagatcgaaactcgaacgagagagaaaaaaagtagcgttcttttctcaacagaaggaaaaagaatggagtcaaattcatggaggtttcgattttccaattcttcttcgtcttcctcaaggcgtcatcaatctcgatctgatccgtttctgggtggaggatatgaagaatttgatggagacgaggatttcaaggcggagtttttatgtccgttttgcgctgaggatttcgatattgttgggctttgttgtcacatcgatgaggaacatcctgttgaagtaaaaaatggggtttgcccggtttgcgcgaagagggtcgggatggatatagttagccacattaccatgcagcatgggaattttcttaagatatccttttttttatgttgattttgtctcggcttatttagttttgatgtcaaagctagttaaataatatctatctatctatctactttaaaaaggctaaacactttaatctgatttgatcttcaccatggtgcttgacgatctttgccatgcattagggatatgggaatttggttttcatttttgtatagtgatcta

SEQ ID NO: 4160 - DNA, 593 bp, Gossypium hirsutum
  unsure (1)..(593): unsure at all n locations; Clone ID: LIB3825-032-Q6-K6-D9
cggncgcgtgggccggtttatgcataagtgaggaaatctgtaatggctcgcaggcagaatttatcatcagtgatccatcaccatcctctggctccacagtttctgatatgcatgatccagccagtgataggatcatgaacagtgttaatgactctcaaaactcccagactgaatcttcttctgtgcattcagttgggttctggacaaatggtggccttttgggacttcagccatcaaaacctcctgattttgctgtatcaactgtaggtcagggttctgcagctacaactagtgaagtatttggtcctccaaatcaaatacttatgtctttgcaagatggactcaaaggaaatgcaggcactgtggttgagaatgctaatttagatgcaaaccttggaagacctgttaattctcattttaatgataatcttgataatttaaatggtgttggctctatcctaaatacctcattgccacatggaaacaagaacccagtcaatcctaacatcaaagctacatctattgattctgatgaggagggatgatgacagtcatcaaggatgtttggacttggccataaattacttgtaaat

SEQ ID NO: 4161 - DNA, 595 bp, Gossypium hirsutum
  unsure (1)..(595): unsure at all n locations; Clone ID: LIB3825-032-Q6-K6-E10
ggnaaacctgagggtttttacctactatgacaaggttgattcacaggcatgnggaagagactttcactctcttctctagggactcaatatggggcactgaatgcgaactgccggagaggtgtgggaactttggactctgtgaggagaaccaatgcgttgcttgcccgtcaacaaacggattactcggttggagccagaattgtcagccgaagaaggtgaattgtaggccgaatggtttcagctactacaagctagaaggagttgaccatttcatgagccagtacaacgaaggagaagggataaaggagagtgattgtgggaggaaatgcacctctgattgcaagtgtttggggtacttttaccacagggaaacatccaaatgttggatcgctaatgagttgaaaacccttgctaaaacctctaactcttcccatgttggttatataaaggcacccaacaagtgacgggaatcctattaagtatttgtactttttcctctgtattttccagtttctttattgtaagctaataagtatttgtaagtttgaattacaaattaaagttttatttaaaaaaaaaaaaaaaaaaggcggcc

SEQ ID NO: 4162 - DNA, 605 bp, Gossypium hirsutum
  Clone ID: LIB3825-032-Q6-K6-E11
cgccacccccgtgtctcggagcggccagtctcgtcgtccctttgcccgtcgggtggggtgagatgccgggatcaacctcttcgaggcaaagcgaacaaacccccggcgcgaatcgcgccaaggaatcgaaacgaaagaaggggcacgtcttctgtcgccgcaccgttcgcggtgtcgatgcttcagtgatgttgttctcttgtcgcaaaatatacagaacgactctcggcaacggatatctcggctctcgcatcgatgaagaacgtagcgaaatgcgatacttggtgtgaattgcagaatcccgtgaaccatcgagtctttgaacgcaagttgcgccccaagccattaggccgagggcacgtctgcctgggtgtcacgcatcgtcgcccccatccaaccatgagccctcgagcctcggttggaccgcgggcggaaattggcctcccgtgcgctcacagccagcggttggcctaaattcgagtcctcgacgacatcatcgtcgcgacgatcggtggtaatgctgcaagcaacctcgttcggagtcgtgcgcgtccgtcgatcgagacccttgaaccctttcggcatcgcaaggacggtgctcgcat

SEQ ID NO: 4163 - DNA, 556 bp, Gossypium hirsutum
  unsure (1)..(556): unsure at all n locations; Clone ID: LIB3825-032-Q6-K6-E12
ctgtgatttgngatgggaaanaacaggagacagttgaggacgttccttgtggtaatacagttgccatggttggtttggatcagttcatcaccaagaatgctacattgaccaatgagaaggaagttgatgcccacccaattcgtgccatgaagttttctgtctcccctgttgtccgtgttgctgttcagtgcaaggttgcatcagatcttcccaaacttgttgaagggttgaagcgtttggccaagtctgatcctatggttgtctgtaccattgaagagtctggtgaacacattgttgctggtgctggagagctccaccttgagatctgtctcaaggatttacaagaagatttcatgggtggtgctgagatcgtcaagtcagacccggttgtgtccttccgtgagactgtccttgagaggtcttgcaggactgtgatgagcaagtctcctaacaagcacaaccgtctgtacatggaagctcgacccttggaggaaggtcttgctgaggccattgatgaaggtcgtattggtccaagagatgatcccaaggttcgttc

SEQ ID NO: 4164 - DNA, 604 bp, Gossypium hirsutum
  unsure (1)..(604): unsure at all n locations; Clone ID: LIB3825-032-Q6-K6-E4
ttcaattttaattttgngatgaagccacacaccgaggaatgagaacaccgatgtgttacaatcccttgcaaaatgcaaacagctcgaaagtggtgctttcaggaactctttatcaaaatcatgtcaaagaggtatttaacatattgaaccttgttcgaccgaagtttcttaggttggatacttanaaatcagtaattaagcggataatgagcaaggtgcatatagctggggtgaagaagcagttaaaagctggagcagatgcagctttttatgatttggtggagcacacactgcagaaagatgaaaattttgagagaaaagtctcagtcatccatgatctgcgtgagatgaccagcaaagttcttcattactatnaaggtgatttcttggatgagcttcctggacttgttgatttcactgttgtgctgagtcttggtcctagacagaaggatgaagttcacaagttaagaaggtttcaaaggaaattcaagatttcatctgttggtagtgctgtttatctccatccaaaactgaattctttctctgagaattctgacacaacagatgataagatggatgagttgttaaacacattagatgttag

SEQ ID NO: 4165 - DNA, 630 bp, Gossypium hirsutum
  Clone ID: LIB3825-032-Q6-K6-E5
gtttaaagctttctcggtttttacttattttgatttggaattactcatgggttcaaaaaccctttcgtatgaatataaaagagggtttttttagttggattagtagctataagtcatttattgtttcagtcctttttgcttccatatggtaatgctcttagatctttattattgcctggtattgatgattcaattgagggtaattatggaaatgttgtttctccggttcgatcgggttcaaaatcggttgtggttcgtaatactcttactataaatggttctgattttagtactagggatgttattttgtttaatgatggtaatggtggtggaggtgttggaatcagtggtcgaaaaatcggggattgggtggaaaagggtgtgagtaacgtcattttcgatggaaatgttgacgatgattatgcgttcgagaatggtgaggatttaaacgagaatgccatgttggaagaggtcattcgagatcaagataattatgtaaatgctacgtcgcgtatagagcaggttgcgaaacacggccgggaagtttcgatcggtgaacttcgggatgtaaatactacttctcagtatccagcattgtcttcgatggcaaacccgaccccgaatgctggc

SEQ ID NO: 4166 - DNA, 600 bp, Gossypium hirsutum
  unsure (1)..(600): unsure at all n locations; Clone ID: LIB3825-032-Q6-K6-E6
gggnaacatccccactcataaattcgcaaacaaaaggaaagaaagggtgtacgattcatttccttttttcttctcatctctgacaggtaatcggaaaagcaaacagttcgaataaagaaaaggcgttgaatttggcgcatcagattggttctctagccgggacacaaattgcagctgaagtcaccaccggagaacaatcatcctcagcgacggctaatgtgtcgggagttcggaaagttccattggcgaatctccgatgcaacgccccaggagaagctctgtcccctccaatattaactccaccgttgacgccgcgaagcgcggaaaacaggccggctatgatgagtccgtctctgtccgccgcttgccaggctttcgggacgttatcaccgctggagacggctgaggagtcatcggcgtctgtggcgtggaaggagggagggaagaaagaggagaagaaaggggttccggtttacgtgatgatgccgttggatagcgtgacgaacgggaatacggtgaatagaaagaaggcgatgaatgcgagtctccacgcgctgaaaacgcgggagtggaggggataatgattgacgtttggtgggg

SEQ ID NO: 4167 - DNA, 609 bp, Gossypium hirsutum
  unsure (1)..(609): unsure at all n locations; Clone ID: LIB3825-032-Q6-K6-E8
cggcaaccccagnaccaccaccgccggcgggtcaccctgtttacatgatcccagctccagttccaggatcggctccggccaacctctatcacgcacctccaccagttccagctccagcacctgcacctgcatcagcatcagcagcaccacaaatggttcgaccagtaaccggacaagccggtcaaggctactacaccaacgtgcagagaatgcctcatgaagtttaccgggagcaacccgtttacaacatggtggcccaacctcaacctccgcccactcaacaccagccgatatcaacgatggcacaacaggtggtaaggccgccgagcagcggtgtaacagatgctggatatggacacgtggcagcgtacgacagacaggcttactatactgcacaggggggtgtcgtgccttctcagtatcaaggcgttggtgtggcagttagtggtgacaaaagaggcaacgtcgatggcaaagtggtatataaagtttcacaaggttcagtttaatttctaaaattatgaaagattttacgatatatctgttagttttaattggtattattacgtattactatatatatcaagtataaatcaaaatcttagcact

SEQ ID NO: 4168 - DNA, 611 bp, Gossypium hirsutum
  Clone ID: LIB3825-032-Q6-K6-F11
caattcttaaggtttcaacacagcaaattttagggttttcccatccccccatttgaccattcgactgccccattccaccattgaaattgatggacggtggctccccatagagtcgtttcattctcctctctaagcctcacctcgaaggtaagatttttagcccgaaaacccatctcaagcttcgatttcgacaaagaagagatggtccccgatggctcgtttgaaggtatgcttccttttttattatattatgcagaaaacatatgaaacacgaaaggaaaatgaaacagatgcgaaaaaaaaaagaaagagcacaaggcgttcgaaaaaaatcaccttctttgctttgtattgtttttgtattctctttttcgtattcgttttttgttgccttcgtcagtaaccattacaaagattgaatcattggatttatagccggaaagaaaacccaaaagagaaaaatacaaaataatttcctattagctgccattctcgttgctgtcttttgtttcttttcgcaggtacagatgcgtggcatgtgtacgaagctgtactggcgtgcaagggctgttgacatggaggcatgagcggcgttggggctgtacggcgac

SEQ ID NO: 4169 - DNA, 632 bp, Gossypium hirsutum
  unsure (1)..(632): unsure at all n locations; Clone ID: LIB3825-032-Q6-K6-F5
ggggatttctgttcttttccctcttcaccgtttagctattcatgaagaaccctattctaccctaaccaaaatttcnacctcaaaaacaatctcaatcggcagccatttcacgtacccttcgacttcgacattcctccccttcatccaaggtcagagccttgaagaagtagagtatcttgacgttctcgttctcactaaaaccagtaaaaaaatcggcgtttccaagcccagggtaggagaggcacccttccctcaaattcctgcaaaattcctaaggataaataatggctcgtctgcctttaatagtacaaagtgtgaggcgtaaaagaattggtcttgcattgacaatatggttgcaattatgtacagttgcgagttggttcttaattacattaggtgccactgggaaagatgctcaaactgctgttgatattattgaagaaatagatgctgaggatgcagctactacaaatactcatgaagaaagaaacgatttccatggatgcgaagctgatgtttctttggatgacgtggatctttcagacacacaacagcaaccagctataaaccaagaaaagacaagactgttggcgttgaaatcagtcggagtattgcctctgaggtgctaattc

SEQ ID NO: 4170 - DNA, 618 bp, Gossypium hirsutum
  Clone ID: LIB3825-032-Q6-K6-F6
cggccgcgtgggttcttctccaaaaaattagaaaaaaaaaagcacccaaatcccaaatattttgatcttgttgctaacccatccttcatccacccaaattcaatcattttcaattttgttcatatataaattcttttatggctgctctttactcaacttcctcttgcttttgtggtagtttgggttcttacccagttcataaatcagtaaaattgggtcatggcaaggttagagattctgggttttattttcctcatcgttttcagtgtgctactcctaaattacatgtccaagcaaaagccctttctgttgatgggttacctgaaataatggattcttcacttgtggtttgtttcggggaaatgctgatagattttgtcccgacgatcagtggtctttctttggcagaagcccctgcatttaagaaggcccctgggggtgctcctgctaatgtagctgtcggcatagctcgtcttggtggttcatctgcttttatcgggaaggttggtgaagatgaattcgggtacatgcttgctgacatattaaaggaaaataatgtcaacaatgaagggatgcgttttgatcctggtgcacgaactgctttagcattcgtaacat

SEQ ID NO: 4171 - DNA, 511 bp, Gossypium hirsutum
  unsure (1)..(511): unsure at all n locations; Clone ID: LIB3825-032-Q6-K6-F7
cccggngtcgacccacgccgtccgccggtattttgtagtgcacagctcccgctctagaatcgattatgtagaaacaagttggttgaggttgttataattcaatgacacgacctggttcctaagacaagaagcaatcgaggaaattgtagaatgtctgccttaaaacaggtcaccaattgaagtcatgcaggtactgatcttacaccgtatgcctttgactcagttccataaagagcttttattgtctccacaatatgcatcctttgtaggtgatgaaggctgcttggatgtcaaacaccatacccaaatgttggagggtgtaaagtgatctgagttctgtgtgaagagcaaattagttgtaaataccataattttgagtttgcaggtattctttccaagcatgttattcatgttttatccaagaataactgtttgcatattccagacccatacctgcccaggcgatgaacgtttgtgataaatcctcttctctaaacccattaatcaatgc

SEQ ID NO: 4172 - DNA, 612 bp, Gossypium hirsutum
  Clone ID: LIB3825-032-Q6-K6-F8
cggccgcgtgggcgacgccgtactcctcttatcctcctctgcctctaccagatatttccttggcattatcccccccttcctcttccccaaaagctccgctcctccctgaaccactcttatcaatcgccgatcaactaataacctttccttcccttcttcttcttcttgttgttattattaaccgactcgtttaactcagtgattcgtccaagaagccactgagtccggtgatgtggtcctgagttctttctttgaagggggtagaatcagaaactgaaaaaaagagagacaaaaatggatcgagcagacttgacggtcggaccggctatggatatgccgattatgcacgacagtgaccgttacgatttcgttagagatatcggatctggtaatttcggagttgctcgacttatgagagataaggttaccaaggagctcgtcgctgtcaagtacatcgaaagaggccgtaagatagatgaaaatgttcaaagagaaattattaatcatagatcattgaggcatccgaatattgttagatttaaagaggttattttaacacctactcatcttgccattgcaatggagtatgcctccggaggtgagcttttcgag

SEQ ID NO: 4173 - DNA, 593 bp, Gossypium hirsutum
  unsure (1)..(593): unsure at all n locations; Clone ID: LIB3825-032-Q6-K6-F9
aattacgtgagtcatgatggagaggtggatcaagcgatattcaacaggcgataagctcatcgtcatcattacttgagtctgctgcggtggatttatccttaagtagaaaaagaaaagagatggagatgattatgagagtgtaagtgatcgtaataatggatcatcagtggaactgaaatggatgtcttctanagatgagattaacgaaaaagatgatgatgaactccaattgcagtggtcctcctccattaccacataataaagcagcagtgaatgacagtaaatatcaatatccgattcaggatagcgatgaaaaaaattatttcagtaaaactaataacaccattagagtctgctccgactgcaacacaaccacgacgcctctttggagaagtgggcctcgaggtcccaagtctctttgcaatgcttgtgggattcggcaaaggaaggcaagacgagccctggaagcagcggcggcaaatggagagactgttgcagcatcgatgaagattagggtacaccacaacaagaaggaaataaagaaatcacgtactgttggacaatataagaaagagttgaagagtaaatcaggc

SEQ ID NO: 4174 - DNA, 540 bp, Gossypium hirsutum
  unsure (1)..(540): unsure at all n locations; Clone ID: LIB3825-032-Q6-K6-G12
gcgttcggcagccactacaagctctggnaggaggagtaccacgtcgggnaaaaaaacctagaggacgtccagcgggatccaagaacaagccgaaatcacccataatcgttgctcgcgacagtccgaactcgttgagatcccacgtgctcgaaatctcttccggttcagacatagttgactcggtgtggggctacgcacggcggcgcggccgtggcgtttgtgtactcagcgggaccggtgccgtcacgaatgtcacgttaaggcaaccggctgctccacctggaagtgtcgtaacactacacggtcggttcgagattttatctttaaccgggacttctctcccaccgccagcaccgcctggagctggtggattgacggtttatctcgccggcgttcaaggtcaagtagtcggaggaagcgtggtgggaccgttaatggcttcaggtccagtcgtattaatggctgcatcgttcgccaatgcagtttacgataggttacctcttgaagaagaagacccaccaaccgttcacgaacaacaac

SEQ ID NO: 4175 - DNA, 620 bp, Gossypium hirsutum
  unsure (1)..(620): unsure at all n locations; Clone ID: LIB3825-032-Q6-K6-G4
ttcattttttgaaatcaaacccgattgaggctacctttgcatattacagtgacatctgtgtcggatcaattgcttgccggctgngaaaagaaggaaggtggggctatccatttgtacatcatgacattggggttatccatttgccagcatattaccctagacttctgtgatgagttaaatggatttaactcaattgaataatgattaattcacttgttttaagtgttttttttttcattttatattttttatataaaaattatatatacttaaatcacaaaatgataactaaactatacttattttgccaaattgatatttaaacttttttgttgtcataagtggtacttaaactataccacttacccattttatctctgttgttaaagaaattcccttaaccaatcattttgtggcatgatataatttttaaccaatctttttgcaccggttgagtatgcaatgaagctacgcaagcctatgatctatggtgctaccaggagcacgctactgctgccctccagtatttccttggaatcagaagtaaaacagcattgcattctcttttgcactgaatatgcagctaccaaattttattcaccaaagtctgcaagcaatca

SEQ ID NO: 4176 - DNA, 483 bp, Gossypium hirsutum
  Clone ID: LIB3825-032-Q6-K6-G5
tatcagaacggagcgtctcatagtacagatccaaccttcccgaccctgccatgcgatagcatatctatagtgtaacgtaacctaaattcaatggactgggcgtcacaacacaacgactggactgacaaaaccgtgacccaacccaattgaattgccttgcatcacattctcgtctggtgaggtggtatcaaagaggacaggaccgaaccgactgcccaacagaacagcagcccaaacggaaaggggaacgcgacctgcactggagcattaaattaagcgcggggggtggggacgctacgcgcaaccggtccactagactgggcagtaccgtacggtcctttcgttttgtttccttcctttcttttcacgccacgcgggtctgctcttcaagctataaattaaaggctcggtttactgttaggattcaatgcattactgtaccgcaactccaacaaaaaaaactagagtgaggggatacgtaac

SEQ ID NO: 4177 - DNA, 611 bp, Gossypium hirsutum
  unsure (1)..(611): unsure at all n locations; Clone ID: LIB3825-032-Q6-K6-G6
aaatgttcatcttctccttctttctttttttacccttttcacttgcatcgaatccatttgtctttcatcatgcacctattttccatcttagctaagacgattgtgtctgagtcacaaaaaanctacctgcagaagataaaagtggtgctggtatcagaattcatgataacaatggaggagaggaatctgcggctgtgcgatttgaaggggaagtgtcactgggagatttaatatggctcaaactccttgggaagacatggtggcctgcagtggttgttgatgagagaagtgttagtaagagcagtaaacctggaaaaaaatcaaagggggaggtgctcgtgcgtctatacgggagccatgagtactcatatgcagaccctatgaaatatcgttccgagtttaaaacgattctagagcagaataacggtagttattatgacattcttgaaaaaggtttggagcagttccgctctcgcctgaaatctagtaaaccaaagggccaaggatctaaggctacagcaaacacaagagctgaagagaaagagaccgcaaaaaagaaaaatcaccagcgaaaaggatcgaatgtcgaggagaaagctagtaagaagctc

SEQ ID NO: 4178 - DNA, 597 bp, Gossypium hirsutum
  unsure (1)..(597): unsure at all n locations; Clone ID: LIB3825-032-Q6-K6-G7
ctgaatagaaaaaatanagctgatagcaaaaagcaaatgaagggatctgtgngaaatggatattcagaaaaggagcaaccagtagggccagtgagtgaactgcgaatgatgatagcattacaaaggggcttacagtcgaaattgctgcatcgattgtaggacaagcaaaagatgaaaacattgtagatccaagctatcaactgaataaggagaagaaagatgtggttttttccaatgaagatgaaagagagatcagtgaggaacaagggcttgacctttcagaaaatttaagttcagttagtctgcaggggtcccctcaagaagtgaacactgaagaaagttggccttcatctagttactcacttcaccaagacgcttctgattcttcagatcttcctgtttctacaaaagctcaggaagcagataacactaaaattcctgtagaaaatgccacggatgccccatccaatgaggcaatacactgtgaggagaagatttgggaacaaatgaatgctctgagaacaatagtggggtataaagccgcccgaagagagacatgcatagaagaattgaaagctctgtatgtgttcactggaa

SEQ ID NO: 4179 - DNA, 579 bp, Gossypium hirsutum
  unsure (1)..(579): unsure at all n locations; Clone ID: LIB3825-032-Q6-K6-G8
gccagactcacactaaanaacaggacatcagacatacttaaaatgggtatgggtcgagatcgccaggaaacagctctttattgatgggcatctattgggtgaaacagtaaagtcggtctttctacaagacgtatcttgggggctcaacgtgactcatcttgacattgaaacaatggatcctgattatgacggaaacctaatgaggatgcctcgccaatgatatctctgaggctctggccctcactttgagcgttgccgctgaagaggagaagctgtttttgtatggaaaggacacaggggactggctatgaactgattcctgaaggatctaacatttaaggtactgacgagaattaacaccactatgttcgactgggttggggatcatagaatatacgacagctacttctccttaactagatccattatttggaaggattccgtgaattaaatcctaagaaatctattggtgagcataatgacaatgagcttgagatactgataagagatacttctgatgttcatctggatgacatgagggcaaatactgagtactctgggtatagagcatcattacct

SEQ ID NO: 4180 - DNA, 602 bp, Gossypium hirsutum
  Clone ID: LIB3825-032-Q6-K6-H11
atcctcaatttcctcaatgtacgggcagtctcagcccatgaacatccctgcctcgatcgccgacaacgatgtttctgcctcagcaccggccgatagcgttagttacgatgctcatcctcttgacgacggcgtcggagtcgatgacgtctccgccgatcccctctatgtcacttccaccccctctgacttagccatcgttcaacgtgtcgacggtgccagccaactcactctttcctttcgtggccaggtctatgttttcgatgctattactcccgagaagttccatgcggtgttattacttttgggtggaagtgaactgacttcaggtccccatggtgttgaaatgtcagctcagaaccaaagggttgttttggactttccgagaggatctaaccaaccgcatagagcagcctctttagatagatttcgtcagaagagaaaagagcgatgctttgataagaaagtccggtatagtgttcgtcaagaagttgctcttaggatgcagcgtaataagggtcaatttacatctgccaagaagtccgaaggagctcacagctggggttcttcccaggaggatgataacctagctgatggcatatgta

SEQ ID NO: 4181 - DNA, 588 bp, Gossypium hirsutum
  unsure (1)..(588): unsure at all n locations; Clone ID: LIB3825-032-Q6-K6-H12
tggtcgnagtgctatnnttgggtcgctttttctgacaagnntgagtgcttnncggctgggaagggcggaaagaactctgtagtgaatctctgtgcatgttaggaggacaaaaccttcgctatttctgactactatcccgaaagccgattgtcagatgcgctcattatatgctccgtcaaagtttattttgactatttgaccagagcatttctctccccccatatggcacataacgtacaacaaaacagtctgcaaagggaagttggctggtcaacgaggatcctggacaatcccaaaagaggtggtccattgtttctgctccttcaccacaacaaggacatgttggactatttactagtttcctacaagacatatttacccgagtaggcaaatagttccaagaaattttccagcatgtaattataatttttttttttggtagatctaggctccatagttttttgtagaaagctttgtagtcaggatgtaaagcataaattctaggttccatactttgtaatagtttataggctcttcaaactgaggatttgcagctctaaaccctaaaatcagcgtgaggtttatttt

SEQ ID NO: 4182 - DNA, 592 bp, Gossypium hirsutum
  unsure (1)..(592): unsure at all n locations; Clone ID: LIB3825-032-Q6-K6-H4
aaaaaaattaagctcagcgtttattggaagccatcatcatttgatgtgtttgttttattttctcantaaacaccgtgaacagtggtagaacaaaagagaaaagcaaaaattacagaaactgtcagnaattagggaaaaagaattcctttttcttgactatcatactctgttttattttgctgttaattcatttcaatttcgtgttcttcgcggtgatctcgagggataatctaatctaatcatcaggccatggctgttgttgagaatgcttcgaatcaagacacggcggctgcaacagtgacgtcaaacgaccaagatcagtcaaagcttcggtcaacaaccgatctgagcttacacgacaacgaccaagggttgtacaacaagatcggtggaaccaacggtggtggtggtaaagatgagcttggggatagtttcaaaagagatatgagagagttacaagaactgttctctaagcttaaccccatggctgaagagtttgtacctcactcgcttgttaacaatggactcaatggtgggtttcacattaacaatattgctttacaaaacaacaataacaacatctcaaggaatg

SEQ ID NO: 4183 - DNA, 585 bp, Gossypium hirsutum
  unsure (1)..(585): unsure at all n locations; Clone ID: LIB3825-032-Q6-K6-H7
cggncgcgtggggtcgatgtgaaggacaaggccgtcgtagctggatggagtgcggcacactatacgactgagaaagcagtggaaggaacaaagtggcggcgaagatggtggagggagcagcggagtatgctggtanaaaaatcaatggagcttgctgccaagccaataagggcggccaagggatgctgcttcagctgctggcgagactctgaaagagtataccgccaggaaaaaggaagaggcagcgagagaattagaagctaagagagctanctgaaacacagggtgatatcagtagttaccgagaagaagaaacccaagaaagatcgagcgagagccaacaacaaatggaggatttggccataaaacccaaagagaaattcgagaaaactgcaaagccaattggaaatgccctgacgcaaacctttcaggggtcatcagagcctaacaaaaccggtgaattaacacaggaaactgagaagagaagccaggtggaagaagagagaatcaaaaaagtgccgatggagggcgtagagagaagaatggagagtggggcagagaaaacattgagggttcaggcgttag

SEQ ID NO: 4184 - DNA, 604 bp, Gossypium hirsutum
  unsure (1)..(604): unsure at all n locations; Clone ID: LIB3825-032-Q6-K6-H8
cggccgcgtgggnaaactttattatgacaatttagtgttttatttccagaattttctagccttttctagcctaattaattacttagatattaagtttttgcttaggtcatttggctacctagctgaacattataaatagtttacttgtttattgtaaaaggttacagaatttgatgaattaaacttaatagaagttttgttcttgtgaggttacctcctctcttcttttgttcgagtctcgaagcgacttatctagcttgctagtggcgtcaatccgaactccattggacttatcacctaaccggtgtggtgttcaaccatattattatacctttggttcttacctccatataggtaacgggtcaaggtccgcttctatccttcatcataattcaccttaagcaacataagactcggggcaatactttttagtattgaaacattcttgaagcttgagttcaacttccattccattttatctatcaacttaaaaattatttctttgttaaaccgaacgtatcaaccatcaaaccaagcccatcttttgaacccaaactgcctgtttccgcttatacatctccataactcaattttcataagacac

SEQ ID NO: 4185 - DNA, 473 bp, Gossypium hirsutum
  Clone ID: LIB3825-032-Q6-K6-H9
gccaccttgctacttatatgcttcctgttacaaccggtatctagctgaaggatatatctgtcaaggcgggaagcctatgtatcggtcaataaaaggtcgcggtttggatcaagagagaagatttacccataggatgatgtgggtagggtccacgactaattaccccatgggcttaccaggtgtgtggcggaattagttcaatagggacaaattgttgcattttctacacaaaccattaccttgggcagagatacacaagacattgctctattatggaaaagctcttacaaaccctttttgaatgcggatgtaataggggtacatacttgacaattatacaaagcattttttgtcgggcaatattagaatgcttgttcttacttataaaaacgagagagggtatataggggtggagtattatggaaaaactgataccatcaaaagactccctatagagatacacatgggtcaac

SEQ ID NO: 4186 - DNA, 596 bp, Gossypium hirsutum
  unsure (1)..(596): unsure at all n locations; Clone ID: LIB3825-033-Q6-K6-A10
atgagcttgcgtttngagattgaatcgaggttgaatatttagccatggcgacgaggcaagagaaggagcgaagagcggaggcggcggctagacaagccgcggatgatcttagggatattaacagtggaagagaatatgaagagagagttgtttatcaggaggaattggatcgatcgtcacagcaacaacaacaaaggttgcctgaagaaagttttgcgtataaagaggaatggggaagggaaacttcaccccagcaacagcaacagaggcctggagttattggaaccgtgttgagggctgtgcaaggtacttacgagcatgcaaaagaagctgtggtcggtaagagccatgagagggaaggagtttacggaggtggagggaagacatgggggactactgatgaaggtgataatgcgaaggagtttgctgagagggcaaaggacactaccatggaaaaggctggtgagtacaaagactatgcatctgagaaagcataccagagtgctgataaggccaaacagatgaaggatactacgaaggaaaaggctgctgaatatacagattacgccgctcagaaagcaaaggagacgaaaaac

SEQ ID NO: 4187 - DNA, 198 bp, Gossypium hirsutum
  unsure (1)..(198): unsure at all n locations; Clone ID: LIB3825-033-Q6-K6-A11
nttgnagcagnaaaacagcaggcccagtcaggttgctatcacttagaggttgctatcacaccctttccttcgaaacaatcaaactcagatcttttcataaatgatgtgtgtttttttagtattacttaaacatgtgacaagtttgatcttgtatcacaaggctagcatagttaaataactagtttatatccttttacc

SEQ ID NO: 4188 - DNA, 326 bp, Gossypium hirsutum
  unsure (1)..(326): unsure at all n locations; Clone ID: LIB3825-033-Q6-K6-A4
ctctatcgcctgctttgctggttcttacttttagggtgaatctattcttaagtggaggcattaaaggattacaatatccacggagacagatgatataacttcactgaactttgtagcattctactaaaggttttatattttgttngggctttttggaatgtttaaagcggcgtgggggtggggtgagctttgggcagtcatccggtacaccagatccggatccgttgtctgctcttgcacccaaatcattgtttttgagtaggccttccatgatgcaatacacgtttactctgnatgagctgttggtanctgcatgggatgtgatt

SEQ ID NO: 4189 - DNA, 588 bp, Gossypium hirsutum
  unsure (1)..(588): unsure at all n locations; Clone ID: LIB3825-033-Q6-K6-A5
cccacgcgtccggtccagnatacttcaaattcgaaagagcaaatagtgaacagcagacagttgttggatcttcaaatgtgctgtgaacacttgacgggcctgcataatttcaaactggaagtggtgggacgcgcagaggtcgaggacgtctgctgcttaaagatttattcaacttagaggggtatcgagcgtgtcaaagtaaatagaaacagtcatggtcagcctgttggatctgaagctcgacttttagcatgctatttgggcattatatcacgaaatgccaatatgttgcccatcaactacgaatcatgacatcacatgcttgatagcaacaaaaatcaaactctctataatattaaggagatatttgctttagaggtctccaatgactatatcaagaaggcattgggtaaaaattggagagaccataaaagcactttgaaaaaactatatttgaagaaagacataagccttgaagaaaaaattgagaaatgtcctgccgggaatgttgaggtaccaatgggaagatgcggttagattctgcacttcgaagaaagagatgaccatgagcgagttggaacaagcagc

SEQ ID NO: 4190 - DNA, 555 bp, Gossypium hirsutum
  Clone ID: LIB3825-033-Q6-K6-A8
ttggagcaaacatgggggatccagttactgccaaccaggatgaaaacaggatgtgtggccctagttttatgtctaactatcagtgttgatccacccgatgtaataaaaattctccttgcgcaagaatggagtgctggactggtttggcttactcaatgtcatcgattccatgctctagttgttgttggaagattccttgatatgggaccatgggctgtagatctggccccttctgttggaatatttccttatgttctgaagctgttgcaaacaaccactccagaactgcgtcaaatccttgtcttcatttggacaaaaattttgccactccatctgaacgagcaattaatcaggctttgtgtacccacagacactctactgtgggaagatagttttcgtgagagggagaaacccataagtttttctctgccggatctgtttgttgtgatgttgaaatcgcctgcttcatgggtgaatcatttcataactaacgtttcaatcagatcgagtttcgggtttggtgagcgtcaaacgcgccgtcgattcagctcccaa

SEQ ID NO: 4191 - DNA, 593 bp, Gossypium hirsutum
  Clone ID: LIB3825-033-Q6-K6-A9
tatatcagcaacagtacaatggaggtgcttcgggctgatgaatttgctcatgatgaggcaagtagagatcttgtggaaggttttccgtggacctgaccattgggccaatgaatttggtgctgaaagattgcaacaagagtctgtcgatgatcaatgggtcaatgaattctcaaagttgcatgttgatgactgggcagaagaatttgatagtcaagttggtgagggggctttgggagatagttcatctgataactgggaaaattcatacgatgagtaagtgtggtagccttgaagaagttcactttgtaacctctcttaattctacatgattgttttggttgtgagaacttgtaggttcctcagcgattggacgcttcaagggttttctatgtattttctgatatgaatccatatgttggtcatcaaaatcctttaaaagaaggtcaagagctattgagcaaaggacttttgagtgaagcagtgcttgccctagaggctgaaattatgaaaaatcctgagaatgctgaaggttggagattgctaggaataacccatgctgaaaatgatgatgaccagcaggtaatccactttgc

SEQ ID NO: 4192 - DNA, 305 bp, Gossypium hirsutum
  unsure (1)..(305): unsure at all n locations; Clone ID: LIB3825-033-Q6-K6-B10
cggccgcgtgggtgccgatttatcagnagccatttatgagaggtaaactgtacattcagttcactgttgacttccctgactcgttgaccccggaccagtgcaaggcactagaggctgtgcttcctcccaggcatcggttcagctgactgacatggagctggatgagtgcgaggaaacaaccctgcatgatgttaacattgaggaagtgatgcgtaggaaacagactcaagctcaacaagaagcttatgatgaagatgaggacatgcatggtggtgcgcagagagtacaatgcgctcagcaatgat

SEQ ID NO: 4193 - DNA, 574 bp, Gossypium hirsutum
  Clone ID: LIB3825-033-Q6-K6-B11
cttgtctttcaaagtccctaatcctatgtagagaggcttcttggacctgtaatggtgtctcggattggaagtgtcttagccatacctctcttgcaaagttatcctttgacagccatgttatctggcttcactcttaccttggtaataaactgtgcatcagtcctcaagaatgttctatcagtaagtgaaatatcaatatctatatgttagccttaagaaatcagatcagccttgattaacaagtaatagtcaatggttaacaatatatacataacaagtttttagaaatgatcatttaactgttaggcttcactggtgctttaaatttcttcaaaacttgtatttttggacttatatgccttctaactataaagttttcgacacaattaggtatcaatcataaccggattattcattctgcaaaatcgagctgtggaccagcaccaaagaggagctgctaatggcattgccatgactggaatgtctcttttcaaagcagttggtcctgcaggaggtggtgcattgttttcttggtcggaaaagcgcctagacgcttcatttctgccaggtactc

SEQ ID NO: 4194 - DNA, 579 bp, Gossypium hirsutum
  unsure (1)..(579): unsure at all n locations; Clone ID: LIB3825-033-Q6-K6-B12
tccttatctcttcanatttctctagattctcttcaatctaggtttctcaaccatctctcctctcgttcactttgaagacgagtgaaatctgctgcctctaggcatttttcttctctctttcttaaagcttctgttgcaagttcatgggcataaccgtttcctaatctttgaacaaacatgaagttgatttattggaagtaatgtttcttcctttgaatatctcggatgatcgcccctaaagctgacttgtctgttgctattgagttgcatttttttatgactgtttttgaatcccctaatatatctactgattgaaaacccattgaaatccctaacttcactgcttgtaaccctgcatgtgcctctaccatgaacggagacgatattgcagagtggaatactgtttttgatgctaaaaactcacccactccccccacaccaccagacccgaggccaatcttaagtgtttactgttgaatgctgcatcaaaaaaatatttactctcgcatttctttcaatcagtctctgtcttctatcatcgcctaagattatccatgcggcacagcaaaaaagtcgaaa

SEQ ID NO: 4195 - DNA, 625 bp, Gossypium hirsutum
  unsure (1)..(625): unsure at all n locations; Clone ID: LIB3825-033-Q6-K6-B4
ctcggtatcaaggctagnaccttaccgggnagcctaccacattctacagctataatcctctgtaaatcaaaaataaagttacgttttcgaattcgatccaacagcgaggggaaagaacgaaatggaagacgaagccgaaatttacgatggaatcagagctcagttccctcttgcttttggtaagcagcaaaaatcccaaacctctcttgaagccattcacaacgccactcgccgttccaccgccggagccgctgcctccaccgctagtaccaccgctagtaatagtaataataaaaccaatgaagcccttccgtctctttcttcctattccaaagcttggctcgattcccttcgcaattctaagtctcccaaccctaaccctaatgactccgtgattggcccgcctcgtccgccacctggtccagttcctgatgaggatgacgaagacgtcatggtaggacctcctccgcctcctccaggttccggtgaggatgacgataacgatgtcatgattgggccgccacgcccgccagttgggccgatttctgactcggaggaagatgaggaggaggagaaccgttatcgaattccattaagcaatgagattgttctcaaagggcatact

SEQ ID NO: 4196 - DNA, 599 bp, Gossypium hirsutum
  Clone ID: LIB3825-033-Q6-K6-B5
cggccgcgtgggtaactttattgccaagattgcacgctacaacaaggtggtcaacattcccaacagcatgacaatcttggatgaacttctgcctatttctatcgagatggctaaaaggaacttgaagggtatctggaactttacaaaccctggggttgtaagccacaatgagatcctggagatgtataagacttacattgacccaaagtttcagtgggtgaacttcacattggaagaacaagccaaggttatagttgcccctcgaagcaataatgagatggacgcatccaagttgaagaacgagttccccgatctgctaccaatcaaggagtcactgattaagtatgtctttgaacccaacaagagaacctgagccttttgagcagcagtttacaggaatagaattcggtattatcctatgttttttcttcattgagttattgcctggaatatctttgcagtttaattcatttgttataatcttgtcttccacctcattaattttcactagataactcttaaggtattactattagatttaaaccattcattgttactagctgcaccaagctgtatcctagtttgtccgtccattcttg

SEQ ID NO: 4197 - DNA, 611 bp, Gossypium hirsutum
  unsure (1)..(611): unsure at all n locations; Clone ID: LIB3825-033-Q6-K6-B6
gnaaaacagtgattcctcctgcgtttattgatgaaagattgtaatactgtgattgaagaccaaaaacaggagattacaaggcgctttacgtgtaacaagtttcgaaagaaccatgaattcctttggggtgagaagggttgcattggcagcggtggcagcaggggtgggttcatgtcggccaccggactcggaatccacctctggagttgcatttgatagaaaattactgcattccaatgaacactccggagctgaagaatgtgaagcaatcattgctattttaagaagtctgagaattgaaagacatgaaaggacgagaacaagcaaaggcagtagttttttcccatggaatttcatccttctagctgttccgccatgttcggggcttgaacctgagcctccgccattacagaacagaaccgaagggccaatctgaaaggcaccgccatgagagacttgtggaggcattttcttctttttttcccagcaccttacaggcgatactatcacgtttccttgccaggggaattatggggttttagaaaaattcacaatcaaacacttttacgtgggctacattgatttattgttatggaaccaatcatgttgag

SEQ ID NO: 4198 - DNA, 598 bp, Gossypium hirsutum
  unsure (1)..(598): unsure at all n locations; Clone ID: LIB3825-033-Q6-K6-B7
cggncgcgtgggcggccgcgtgggcggacgcgtgggttcagccactggcagatgcagcaaagctatttcttgctgcaaaatacaaggatgtaaccaagttccaggatgaggtactcaacttgcctcttgctggtatagaggcagttttttccagtgatgatctccaggtagcttcagaggatgctgtttatgactttttgctgaagtgggctcggactcattacccaaaactggaggaaaggcgtggagtttttgctacacgccttggccgactaatccgttttccgcatatgacttgcagaaagcttaaaaaagttttaacctgcaatgactttgatgcagaaattgcacccaagattgtgctcgaagccctctttttcaaggctgagacaccacagaaacagcgtgctcttgcatcggaggaggcaaatgccccttttcgccactttcttgaacgggcttacaagtaccgcccagtcaaggttctagagtttgaaaagccaaaacaacagtgcgttgtgtacctggacctgaagcgcgaggaatgcgcgcatctgtttccaggtggtaaagtttattcacaagcattccatcttgg

SEQ ID NO: 4199 - DNA, 586 bp, Gossypium hirsutum
  Clone ID: LIB3825-033-Q6-K6-B9
gcgcgctttagtatatcttttctctctcctgtgtcgcgcgtcgtcaaaaatctcattataaatggagatatagagtagcagcaatttgccatttctttgttgctaaaacgatacaatacatggacgtctggatggattacttccccctcgggaagagcttcaactcgactgacgatgatgagagaagatcaatgggatccaggatctttaatgtccttggcacaaaatcaatctagaatcagcaatgagattttcctaagccagactaatggaagcacggtccaagcctctcaatccccaaacacttccaatgctcctgttttgagaaaaagccattctactttatctcaagctgaacgagctcagaggaaaaggatgaccgatcaggcatatcgaggaagagttaagttacacaaagagcaaatgaaatcaaatttggagacccttactggagaaaacgaatcactaaagaaagagaatcaatccttaaaagcggctaatgcttccatgaaccaaaccttgactgatcaagcaaaagagattgatcagttgaggagtgatcttttgcagctgaagaaagaccatg

SEQ ID NO: 4200 - DNA, 574 bp, Gossypium hirsutum
  Clone ID: LIB3825-033-Q6-K6-C10
tagtttttcaccccccttttatttgtcacagatttaacatccaaacacaaacaccaccacagaagcaccatcaccaagaaaaagaaagaagaatgcttttgagaagttcttcaacaccagttcttggatctctggtatcttccatagctgctgatagtcctagcaacaacaatcattactatgaaaccagcagcccctttaggcattacccatcgagctcttttcatggtcacacccaccataacaggctctcgtttcattcttctccaggctccgtccacctatctactgtagtttcttgtggctcttccccggtatctccttctgttgatcagttttctgattttgagcttacagggtttcgtcgggctcaatctgaagggaacttggaagggctcgcccatgctgcttgcgatggcaatgatgaattctacaagcggaaccaacctaagaagttttctgcaaggcacaacaagaagtgcttgatgttgcaaaccatcccttccttttcgttttataaatcgggcgcaaggtgtgaggaagaagatgatgaagaagaaggagtgatttcgag

SEQ ID NO: 4201 - DNA, 547 bp, Gossypium hirsutum
  unsure (1)..(547): unsure at all n locations; Clone ID: LIB3825-033-Q6-K6-C11
gctggcctcaatgaacacagtggcagnaacacttcctttgcaaanaggcttaatgcaaatggattcaaggtctatggaatggattgggttggtaagttttcatgaacagactactaaaatcacattctacttgaccagaaagcacgtctgcttaatgcacactttagcccctcaagtataccgcttttcccactttggtccttaaaagtttttttcagcccacttcagtccctaatattatgagatgttcccagtttatagtgcatgatcacctttactgctgttatcatttttaagtttatttgctccttgaattctgtaggacatggtggaactgatgggctacatgcatatgttcattctcttgatgatgctgttgttgatttgaaaatattccttgataaggttttagccgagaatcccggccttccatgcttttgctttggtcattcaacgggtggcgcgattgtccttaaagccgtgcttgatcccaaggttgaagcacaagtagcaggcattataatgacttcaccagcggtagccatcc

SEQ ID NO: 4202 - DNA, 598 bp, Gossypium hirsutum
  Clone ID: LIB3825-033-Q6-K6-C12
ggttaattagctgccttaatcaaaaaggtcccatccaaataatcctgtctgccattccactatagcagcaaaacagctggttcaaaacatccaacaattttcatcaacatactctttacatgcagatttcatctttgggttctaattttgtgaattttaatctttctacttttttagattcattctttaactagctagaatactgcaaaaagggtgtttaaaggaaaagcactggacaaaagatgactgaaaaacgaaaatggaggtccatgtgaaaagaaaataaaataaaaggtgaaagaaaaagggccatttcttcccattgtaatcacaagcatgccatagtttaccaaaaggagacttaagcaggttacaggagggtttatagaaggtctttaagtgaggaagactatgaaggagttgatttggggtcaaggatttcattcgacattcctgaccatgtacctaatatgtgtaatgaatgtaagaagcctaatggcaattgtggtgttgggttgaagtgcatttgtcatgctaacgattgcaaagacaggtcctttcagctgccacatcactcgacactggtataagtttccta

SEQ ID NO: 4203 - DNA, 585 bp, Gossypium hirsutum
  Clone ID: LIB3825-033-Q6-K6-C5
cccagcgtccggtccagaatactccaaattcgaaggaagcaaatagtgaacagcagacagttgttggatcttcgatgtgctggagacacttgacgggcctgcagatttcaaactgaagtggtgggacgcgcagaggtcgaggacgtatgctgcttaaagatttattcaacttaaatcttatcgagcgtgtcaaagtaaatagaaacagtcatggtcagcctgttggatctgaagctcgacttttagcaggctatttgggcattatatcacgaaatgccaatatgttgcccatcaactacgaatcatgacatcacatgcttgatagcaacaaaaatcaaactctctataatattaaggagatatttgctttagaggtctccaatgactatatcaagaaggcattgggtaaaaattggagagaccataaaagcactttgaaaaaactatatttgaagaaagacataagccttgaagaaaaaattgagaaatgtcctgccgggaatgttgaggtaccaatgggaagatgcggttagattctgcaattcgaagaaaggagatgaccatgagcgagttggaacaagcagc

SEQ ID NO: 4204 - DNA, 609 bp, Gossypium hirsutum
  Clone ID: LIB3825-033-Q6-K6-C7
cggccgcgtgggcaacattgtgaaatgctgtgcttagagaattgttggatgtggttcgaataatgaagatgatgaaatgtagagtttagttgaattatcttctagtagaggtttaatactgagtttcaagtaaaagtgcatgcgtagaaataatgttttgtatcatttattacttagcttccggattaatgaaattattgtagatttgcaattcgtaactttatgatccgtttgttttcttgcaaatcgtataataaggtattttaaattcgaagctatgatgagattgacttgactttaattggagatatacttaatgaatttgtaacctagatggaagggaactaaggaaatagaatggaatcaacattgtaaaatgcatcttccagagaaatgttgcatgtggattgaatagtgaagatgatgaaatgtagaatgtagttgaattgtgttttgttataacagaggtttaatactgaattttaagtaaaagtgcacgcgtagatatgaggttttgtttcctttgtgaaggtttgtgctttaccaccttgattggtctgttgttatacaagaactcaaatattgcattaagggattgctgtatttggt

SEQ ID NO: 4205 - DNA, 567 bp, Gossypium hirsutum
  Clone ID: LIB3825-033-Q6-K6-C8
tcctttccactaaggcttggatctgttctctcgatatgtgcatttggatcgggaaatacactgtcagcggccaaaacgaagcggcacccaggaagccgaggattccattgaagaacggtagaagcatcgccagcacgatggtcagtatcacgtaacctgttcgccacacaaccctgagagcactgaaactgtaaaccccaaacaatggaagcttaattggtggactttctttgatgaaactgctgtttggccatcggttgaagcacctgtcttccacctgtttgaaaattggctgacagaatacctatgaagaaaaccatcatgattttgctgaagatatggggatattttattgtgtgttgtttgtaggtgatggtaatgggggtgtttttacctggtaagctcctataagatgtacaatgatgaatacattagccatgtcgataagccagtacggttcgtaaaagccaaaccctgttaggaaattgcctggtgtgttgttgcctaatgctgcgtaacccagagcaccacatgaaacgtagaatatggtggtgaccgagacgccca

SEQ ID NO: 4206 - DNA, 594 bp, Gossypium hirsutum
  Clone ID: LIB3825-033-Q6-K6-C9
gtgcagttgttgctaatagggtccaaggcatgttatcgaggatgtatacaagattaaattacccaaacccaagccatatgaatcacagtcacggccacctcaggcctcagagtttctgagagcttattgtgcttcgcatgggtatgttgcctctagtgggctacctgatgaaactagggcaggtcgccaaattttaaaggatttcattgatggaaagctgcctcactacgaaatgccacctggtatgtctgctgaagatggggaggaagatgatgggaacccgagcctgtctgaagttctcaagtcagatgcatctgatgttgaagattctttggaaaatggaactgaaactacacctgtgttcgagcatgtactagatgatcttagctcctttgaccttgccaatggacttgtttccaagaaggcaacagttaagaagtcgaatgaatcccgtaagcaccacaaaaagccccagcggaagaaggatcggtcatggagagttgggaatgatgatgaggacggaatgccagtaacccgagtcttccagaagccagtgaattcgggtcctcttaatgtttaatgaagcatcaactg

SEQ ID NO: 4207 - DNA, 597 bp, Gossypium hirsutum
  unsure (1)..(597): unsure at all n locations; Clone ID: LIB3825-033-Q6-K6-D10
cagnatttcaccagtttgaagattctgcgaaacccanaaatccaatgcttcaatgaacaacatgggtcagacctcagcaatatctgaatattacctgggaggcgaaggtgatctattcaaagctccggagcctatcattgaagaaccaattgtggaccttaatcccatgactgcagccatctcattaagcctttgtggtgaagatgttattacttcacaaggatttaaagctgctgatattgaatcaattcaaaacgagcagtttttagaggttctttatgagtgcgagaaggatctgatggcacgagcagtcatagaaacaccactatccgaggtcctggatgtaaagattcctttgaagacggatgaaaaccaaaatcatgaaaatgaagtgctctgtgatgtacagttccagaaaagtgtcagctcggattgtttaagctcaatggaagggatgcaaggggctgcaatgaagcctaattttctggatttccctggaatagattttggttctgcttatggaatgaggagagcatttagtgaaggagatatgaagactcttggcaatggtaatgtgagtgtcatccattctcctct

SEQ ID NO: 4208 - DNA, 605 bp, Gossypium hirsutum
  unsure (1)..(605): unsure at all n locations; Clone ID: LIB3825-033-Q6-K6-D12
ccaanataggatttatgatgtgggaatgaaaaagagggtgtggatgagttccctttctgtgttcacttggtctcttgggagaaggaaaatgtctctagtgaagctctggaagctgctcgtattgcttgcaacaagtatatggccaagtatgctgggaaggatgccttccacctgcgagtccgtgttcacccattccatgtcttgcgtatcaacaaaatgctttcatgtgctggagctgataggctccaaactggtatgcgaggtgcttttggcaagcctcagggaacatgtgctagagtagccattggtcaggtcctcctttcagttcgttgcaaggacagcaacagtcatcatgctcaagaggccctccgacgtgctaagttcaagttccctggtcgccaaaagattattgtcagcaggaagtggggtttcacaaagttcagccgaactgattatttgaaatataagtcagagaatcacattgtccctgatggtgttaatgctaagcttcttggatgtcatggacctctagctaatcgggagccaggaagagcattcctccatgctgccgtttaagatctgacgatactctaaatcctcaacta

SEQ ID NO: 4209 - DNA, 614 bp, Gossypium hirsutum
  unsure (1)..(614): unsure at all n locations; Clone ID: LIB3825-033-Q6-K6-D5
aaagaatgggagtggcttacctgggttttcaanagaagtaacagtggtcagtgtctgctcttctgttacgccttatggctgttatggtactccaaaaaccagttggtacacgagagaaaaaacacaacaggaagggagttagcacaaaatattcaaagacactgggcaggatttgaaggtttcaaaaacttgaaaaagaataaaagtataaacagaagccaaagaacacagaaagtcataccgagaacgagaatttattttgatgcagtgtttgacagtagaaccttcatatcagcgacaagtttagtaggatgggatctgaggggaaacttaatggcgttaaagacggttatccatagaaatatcccctctccttttgcagcagaagcatatgcatgcctagaaggtgcaaaattaggtagctcacttagagcatgtttggttgagtgtattggattagccactacacccctaatccatggccccactgattaccctgtttggttggttgtattgccctaatacgggcctattacgcaacacaccgattccccattttcccttatgcagtgccgatttataatccctttcaaaagaaggattacctaatcggt

SEQ ID NO: 4210 - DNA, 637 bp, Gossypium hirsutum
  unsure (1)..(637): unsure at all n locations; Clone ID: LIB3825-033-Q6-K6-D6
caacgctgcatcgggnatggctgtgcatgatgattgcaagttgaagttcttggagctcaagacaaaaagaacccaccgcttcatttttcaaaatcgaggagaagcaaaagcaagttattgtggagaagcttggtgaaccaaccgaaagctacgaggattttactaaatgtctccccgctgatgaatgtcgatatgctgtgtacgattttgattttctaacggccgagaacgtcccgaagagcagaatctttttcatcgcatggtctcccgacacgtcaaggatcaggagcaagatgatttacgccagctccaaagacagattcaagcgagaactggacggaattcaggtggaattgcaagcaacagatccaactgagatgggtctcgatgtgttcaaaagccgtgctaactgaatacggttcttttaggcatctgcaaccgggaagcttccttccttcctacctacagtatgtctttacttaagtgaaatgtttataggtttcgaaacggcaaactcgggatttccgagttatgccataagacttttatcagtctcgatgatgataaacccgtagtttcgggtatatgtgatttgttatctatagaacctatgtgttgagtgcctntgtgtagtctt

SEQ ID NO: 4211 - DNA, 595 bp, Gossypium hirsutum
  Clone ID: LIB3825-033-Q6-K6-D7
caaatctgtcacaaagcatagccgagcagctgattttaacattcaagctttcctcacgtttccattagatcagtgttcggaggtagtctgaagggctttttaaggataaggctgcgtttggattcgatttttttttattccttccaaaaagaacgtcccggaaacactcatcaattacagatctagtcatctccaaaaaccattcaatccccgatcaaactatcaacagtcatggccactcctggggttcttcaaagagaaaccgaccttctcttatcatctcccttgattgagcttcgtaaaggttacaaaccgacgttctagaagatggttaaatgatagattgttgatggaacttgttcctcgcttgaatgcagaagaagtaagaggcctttttgctccaccaccatggggctaatattattggcgccttaaataattcatctatgaagaagaaatttcatgctgacgctgataaggcagctttcttgagtgcatggcgaagagttgattgccgaacaagagaagcacttcgccgtagctttctttcagatcttattgcgagctatgaggactgcatacggaccttcatcca

SEQ ID NO: 4212 - DNA, 509 bp, Gossypium hirsutum
  unsure (1)..(509): unsure at all n locations; Clone ID: LIB3825-033-Q6-K6-D8
cggncgcgtgggcggncgcgtgggtaaaaaaaaaaaaaaaaaaaaaaaaaaaaaaaaaaaaaaaaaaaaaaaaaaaaaaaaaaaaaaaaaaaaaattaaaaaaaaaaatatataaaaaaaaatattttttttatatggtataacattttttataattttttttttcgagtttttttaattttcttttattggggcggggttttttttttcccaaacttttgtgttattcctggcattttctcaatattaaacaggttttggtaaatattaaatttgtctccaactttatgtctttttcaaaagttccgcatttattaatttttaaaaaaatttgtttttttttaattgcattatggtacgcctctttttgtggttccttaaaccttgtgttttttttttttacccccattatgaccggttcttttgcattggcccttttttttttttcctccttttttttctcttccttttaggctttttttctgggttttttttttggggtttttttt

SEQ ID NO: 4213 - DNA, 590 bp, Gossypium hirsutum
  unsure (1)..(590): unsure at all n locations; Clone ID: LIB3825-033-Q6-K6-E10
catacatctctttctctcaatagnaataatataaaagaaaaacagtttcttcctaaaagctagaggttgcagtttgctaaggcttatttaaaacaagagctgtctgtcatctgctccatgtcttgcaatggaatggctttcttcccagcaaatttcatgctccaaacgcctcatcatgatcacgaagatcatcaacgctccactaactctatcaatcaaatcctcccttcttgcacggcgccccaggagtttcatggtgttgcatcatttctggggaagagatcaatgtcttcatattcaggtatagatcatgtgtgtgaagaagcaaatggagaggatgatatatcggacgatgggtcacaggcaggtgaaaagaagaggaggcttaacatggaacaggtaaagacactagagaagaactttgagttaggcaacaagctggaacccgagcgaaaaatgcagctggctcgagctcttggactgcaaccaagacagattgctatttggtttcaaaacagacgagctagatggaaaaccaagcaacttgagnaagactatgatctcctcaagagacagtacgagctcatcaa

SEQ ID NO: 4214 - DNA, 398 bp, Gossypium hirsutum
  Clone ID: LIB3825-033-Q6-K6-E12
tgattaaaaaataaaaaaaaaaaaaataaggggggtaaatataaataaaaaaaaaaaaaaaaaaaaaaaaaaaaaaaaaaaaaaaaataaaaaaataaaaaaaaaaatgataaaaatataacaaaaaaaataaattctttaaattaaagtgaataaatatgtatataaaaggataataaaaaccttttttttttgggggggggtgttttcaaccctcggaagacgttcaaacttttgttttttctggtggctcctattttgaaggaattgcgcgggggctttgactgcttttggtgagtgaaagaactgtattttcctctatcttgcattcgtaagataacacagtttttttaccgggttgtgtaacttgaagatctgagctttattgattgtttgca

SEQ ID NO: 4215 - DNA, 564 bp, Gossypium hirsutum
  unsure (1)..(564): unsure at all n locations; Clone ID: LIB3825-033-Q6-K6-E4
ctccgggaagcgaggtgaccggngcgacccaaacccnaccccgccacaaactccgtggggtgaattagacgaagacgacggcgaggatttggatttcttgttgccgccaaagcaagtaatcggacccgacgagaacgggatcaagaaagtgatagagtacaagttcaacgatgagggaaacaaggtcaaaattacgacgacgacccgggtccgaaaactcgctaatgcccggcttagtaaacaggcggtggagcgaaggtcttggcccaagtttggggatgctgtaagggaagatgttggtagccgactcactatggtttccactgaagaaatcctccttgaacgccctagagcccctggtagcaaagcagaagaacagaaggctgccggagatcccttggctcaactaggaaaaggaggtgctgtccttatggtgtgtaagacttgtggtaagaagggtgatcactggacatctcggtgcccatacaaagacctcgctctgccggctgagtcattcgtcgataagcctgcagtacctgaaactgcaactgctgctgctggatc

SEQ ID NO: 4216 - DNA, 609 bp, Gossypium hirsutum
  unsure (1)..(609): unsure at all n locations; Clone ID: LIB3825-033-Q6-K6-E5
caccggccaatgctagcttcatcttttctggaccaactggtgtaggaaagtcagaactagcaaaggctctagctgcttactatttcggctctgaagaagctatgatccgacttgatatgagtgagttcatgngaaaggcacacagtgtccaagctcattggttcacctcctgggtatgttggttacactgagggtggtcagctaactgaggctgttagaagacgtccgtacactgtagtactttttgatgaaattgagaaggcccatcctgatgtcttcaacatgatgcttcagatactcgaggatggaaggttgacagacagtaaaggacgaactgtggatttcaagaatacccttctgataatgacatctaatgttggaagcagtgtaattgagaagggtggccgacggataggctttgatcttgattatgatgagaaagacagcagttacaatagaataaagagcctggtgacagaagagctgaaacaatatttccggcctgagttcttgaatagattggacgaaatgattgttttcaggcagctcaccaagttggaggtgaaggagatcgcagatataatgcttaagnaggtgtttgacaggctt

SEQ ID NO: 4217 - DNA, 588 bp, Gossypium hirsutum
  unsure (1)..(588): unsure at all n locations; Clone ID: LIB3825-033-Q6-K6-E7
cggccgcgtgggcggncgcgtgggngaatcacaatggcagtatctgcaattggatttgagggttatgaaaaaggcttgaaatttccttttttgagcctggcatctttgctgacctgaagaaaggtcttcgggcacttaccaaagcccagttggatgagattctaggtccagctgaatgcaccattgtttcttcattatctaacaagcaagtggactcctatgtcctttctgagtctagcctctttgtctatccatacaagattataatcaaaacctgtgggacaactaagttgcttcttgctatcccacccatcttgaaattggctggcagtctatcccttgctgtaaaatctgttaggtatactcgtgggagttttatattccctggtgctcagccatttcctcaccgaaacttctctgaagaggttgctgttcttgataactatttcgggaagcttggcgctggtagcaaggcttgtgtaatgggtgggctggataaacagaaatggcatgtgtactctgcatctgcagaacctgtgaccgccactggcccggtttacactctagaaatgtgcttgactggtttgg

SEQ ID NO: 4218 - DNA, 584 bp, Gossypium hirsutum
  Clone ID: LIB3825-033-Q6-K6-F10
ccccgcgtccgctcctctcctctctctatcactagggtttttcgtctgctcatttgcagatatcctagttttcacaaaaagagaaaaaaactcaaaagagttattgtttcttggcttcttgctacaatgggagatgcagaaaatgcccttccaccttcaaagaagagggctgctggaagagaaatttctcgggataaccctggactcgatgatgaggaagattcttctgaacaagagactggaacttttaagagggctagtgaagaagtgttggcaaatagaagaattgtcaaagttcggagaaatcaaaccacttcaactgcctcagcgaatcccttctctgggattcgcttggtcccccttactgaaccaactgctactcctgctgcacctagttcagcccctgaatctggcacaatcaccactcaggttacagctgatgcaccaatttctagtgagaaagaaatttcagaagatgggaaaaataatgttaacgaatctgaaaagagtgaggaaggaaatgacctggagccagagaaaaatagcgatgaaactgagcctgataatgcaaagagtgaaagtga

SEQ ID NO: 4219 - DNA, 560 bp, Gossypium hirsutum
  unsure (1)..(560): unsure at all n locations; Clone ID: LIB3825-033-Q6-K6-F4
natgttttcaatcttttcctgttgcatttctatgttcaaattccttcctttttttttatctattccacattttcatgaataccaacaaagctttgtccacttgtatcaaaagtaaagtaatcgaatgaaggaaaaaaataacagcttgcaatagcatgtctctatgtgacttcaatacatacaagaaaccaacctggtaattttcacaaggcagggaattcattctcacctggaattggaaagtccctggattcccatttgtttttcatcatattgcttcaagctttttctcttttccatttgtatcaataaacagaaacttaaatacaagaattgaaggagaccatggccattaaagaggacatagagagaggtaacgacactgttcttgaaagcgcagctgtatctctcttgcaagaagagaatgatatgggccgataaggaagatggatacactgatcaaacaagcagcaaagcaagtctgtggatggtttacttcagtacctttgttgctgtgngcggttcatttgagtttggatcttgtgcaggctattcatcgc

SEQ ID NO: 4220 - DNA, 635 bp, Gossypium hirsutum
  unsure (1)..(635): unsure at all n locations; Clone ID: LIB3825-033-Q6-K6-F5
tcggggnagccaggnaataaatatcgaggaggagccattgttaaggttcatagttatgggcagaaagagacttccagatccaggcaagaagtcccaaactttctggggttttgttgaattagtgaccacaaaggtagaagatgtaaaagatgctttaaaaggaggtcaccgatatcaacctcctgcaagagcagtgggagaaggtgtttaccgtattgtgaggcacaattcaagtaagaacaagatgcacactcatttgatatataaacttgaattcccaccaccaaaagaagagaatgaaccccaagaatcacttaacatcgagccagaaggctcctttttgatacaaatcaagaacccatcacaagctagcaattcccagtttaggggagttggaaacaaacgaaaggcagccttccctgctcacctgcaaggccagttggggaaaacccgataccatccggctgatccacccgactttttgaactacgaaggatgtgagtttctactcatatcggcatccgatgctattgataaagaactggggttggaactggagactgaaggggaagcagatccttcttgttcagatttggtgaggacttttggggacactgcatctactactacacttt

SEQ ID NO: 4221 - DNA, 643 bp, Gossypium hirsutum
  Clone ID: LIB3825-033-Q6-K6-F6
cttatccatacgttttgactgaaaatttccagtcacaacacatcatcaagcgttagattcacatcaagacaaaccagatcgacggttaaagtccatccttagaccttcaaaaaaccaacaaagaaagagaaagataaaagaagcaacttttgcttaaaaacgcttcattttcatattcggtattttaatctccgttcgggaataaagcttagagtttcaattttgaatctgaatttctgtttttgttgttagaaaaaaaatatagaaatattaagcatggctgaagttttggggaagtcaaatctgtttacagcttgtaactatagtcagaagaagcatcaagaaggtggcgttcctttgttttccaggagaatctctgtgttttgtttgagaaagaatagttttccttctttgaggttggaacctcaagctttgaggagtggttttaatggtcaaagagtgttttttttagagaaaagaagtctaaatgagagaaggttctgtcgagttcccattaaagcacagatgcaaactgggcttattggtaaaactcaaaagtggtgggagaaggggaatcaaccaaatatgaaagaagtgacatctgcacaagacctggtggactcacttttgaatgctggggata

SEQ ID NO: 4222 - DNA, 464 bp, Gossypium hirsutum
  unsure (1)..(464): unsure at all n locations; Clone ID: LIB3825-033-Q6-K6-F7
gtccactttgnagggaagctattcatgtatttagctaatatgaacattaaagttaatgcttgtttaaaaacactangagaaaataaatggatggtcataaggtcccagtatttcattaacaggtgatgtgagctacagagggcacggtatatacggcctaccaaaattaactcaagaatgctcctctttttgttttcttttacaatgaattgaagatggcaagtgagaacaataagggtctatattcggattattgagatgtatattaatacagaattaattgcaatgaatcaactgatatctgtttctttggaaagtcactagtgtaattataaacaacgatgatatgtttgggtaacaattataattggtgggttttatcacattttttaatttttagggtaatagcagttaaatctaattgtaaaaaattatatttatacgaattataaaaattatattgt

SEQ ID NO: 4223 - DNA, 367 bp, Gossypium hirsutum
  unsure (1)..(367): unsure at all n locations; Clone ID: LIB3825-033-Q6-K6-F8
naaaaaaaaaaaaaaaaaaaaaaaaaaaaaaaaaaaaaaaaaaaaaaaaaaaaaaaaaaaaaaaaaaaaaaaaaaaaaaaaaaaaaaaaaaaaaaaaaaaaaaaaaaaaaaagggggggccgttttaaaaggacccaactttacttccccggtgcttgcgaaggtaataactttttttttggggccccctaaaattaaattaactgggccgtcttttaaaaacgtcgggactgggaaaaaccctggggttcccaaatttaatcgctttgcaaaaaatccccttttccccagttggcgtaaaagcaaaaaggcccgcaccaatcgcctttccaaacagttgcccaccctaaatggcaaatggaacccc

SEQ ID NO: 4224 - DNA, 549 bp, Gossypium hirsutum
  Clone ID: LIB3825-033-Q6-K6-F9
agcgtattgcctttctctccaaaaccccctttgcattccatttcattggctttttatagccgaataaaaagaataataataataataatacaagaaattttcccttagatctatttgctgtcaatctgttgcgggttgttagtctgttattttcttcttgcaagttcgattgtacggaggagaacgctcgtggggatgacgtggaggaggcttggggctctgtggcgctgaagacccttgctgaggaggctgcaatgttggtcctagggttttagtccctgaaaccgaatattgggccatctgggtcgagtttcaattgggttaaatatttgggctaagattaatgctttgggtctttgtatttatggattgtggactatattttatttttatttggtttatttatttgtttgtaaataaatttaaaggcccgggcaaaatgggccttctacacatagtgttattagtaggctcaaattgacaataccattagttgttgacccgtgtattatttttaaaactaggggcgaagccaaaattgttgataag

SEQ ID NO: 4225 - DNA, 187 bp, Gossypium hirsutum
  Clone ID: LIB3825-033-Q6-K6-G10
cggccgcgtgggcaccaagcttctaagtttgtcaaatttccttccatcgtgtgatttgcagcgcttcttctatggcacgtatatcatatagtaggtatagatatgttgttcatctataatgcaagacagagagcaactattttcgcaaaagggttgatataaatatatactatgatgggattgtatt

SEQ ID NO: 4226 - DNA, 596 bp, Gossypium hirsutum
  unsure (1)..(596): unsure at all n locations; Clone ID: LIB3825-033-Q6-K6-G11
ggttaatgccganaagaacaccgtaagctcgaactctgtcgccatgggtcgtatgcatagccgaggtaagggtatttccgcatctgctcttccgtacaaaagaactccacctagttggctcaagatctcctctcaagatgtggaggagaacatttgcaagtttgtgaagaagggtttgaccccatctcaaattggtgtcattctccgtgattcacatgggattgctcaggtgaagagtgttacgggcagcaagattttgcggatactgaaagcccatggtctcgctcctgaaattcccgaagatttgtaccacctgattaagaaagctgttgccatcagaaagcatcttgagaggaaccgcaaagacaaggattccaagttccggttgatcctggttgagagcagaatccatcgccttgcccgctattataagaagacaaagaagcttccacccgtctggaaatacgagtcgactactgccagcacacttgtggcctaagggaagacactgttggaaccagcttcttgcgctttgattgatggacccctggatatgggttggagtagtaaagttttaattacatgctatatttatg

SEQ ID NO: 4227 - DNA, 600 bp, Gossypium hirsutum
  unsure (1)..(600): unsure at all n locations; Clone ID: LIB3825-033-Q6-K6-G4
ccggctttgacccaactctcccaaactaaatcccgtcttaaagttaagtttgatcccaacttctccaaaaacccagatcgaaatcccaccatgacatataatgcactaaaagcggtaagtttaactcatgtaaggtatcaaagaggtgaccaactaggccatttcttagcctgggtttctttagttcccgttttcatttcccttggtggcttcgtttctcatttcatcttccgtagagagcttcaaagcatgttctttgcattaggcctagtaatatcacagttcattaatgaattcatcaaaaaatccgttcaacaagcccgccctgaaacctgtgctcttttagaaatgtgtgattctcacggctggccttcaagtctctctcaatacatgttctttttcgctgtttatttcacccttttgacatgcaaagggatcggtgggatttggaatgttagaaccaagtgggctgctttgtttttaccttggtctttggctgtcttgactatgtattctagggtttatttaggttaccatacggtggcccaggttcttgctggagcttattggngattttgcttggtgggctcctgttttggg

SEQ ID NO: 4228 - DNA, 631 bp, Gossypium hirsutum
  unsure (1)..(631): unsure at all n locations; Clone ID: LIB3825-033-Q6-K6-G5
gnaaccttcgccgcttcttctttctctcttttattgttgtccgttgacaccgcaaatagaagagaagagtaatggccggcaaaggagaaggtccagcgattgggattgatctcggaacaacttattcttgcgttggcgtttggcaacatgatcgtgttgagatcatcgccaacgatcaaggtaacaggaccacgccgtcttatgttggctttactgataccgagcgtttgatcggtgatgcggcaaagaaccaggtcgccatgaaccccttgaacaccgtctttgatgcaaagaggttgattggtcgtagattcagcgatgccgctgttcagagtgatattaaattgtggccattcaaggtcataccaggatctggtgataaaccgatgattgtagtttcttacaaaggtgaggagaagcaatttgccgctgaggagatctcgtctatggtcctcataaagatgcgtgagattgccgaggcttaccttggctttacggttaagaatgccgtggttactgtccctgcatactttaatgactctcagcgtcaggctacaaaggatgctggtgtcattgctggtcttaatgtcatgcgtattattaatgagcccactgctgctgccattgctta

SEQ ID NO: 4229 - DNA, 503 bp, Gossypium hirsutum
  unsure (1)..(503): unsure at all n locations; Clone ID: LIB3825-033-Q6-K6-G6
cgngnacgccgtgggntnngcatgtgnaaccatgcacnnactcatgttgtnngtcctcttnnggcaaaaacctgaaaagttcaaggtcaatggtcaatggcatacatggattgactatngaaaagtttcatgacctggtggctttaggaagaccttttgacagtgaggattatatggctctcactccgtcatgggccgtctatggagctgaggaaggtggatttgatcctgatcagtctcggtacaagaaggagcgacatcacaagtcaaagcgctgagcagtttgtattgatatgagcaaatatatccattttacttgggaaagatggttaatcatttaaacagttttggtttagttggctataatatctgatttaaatgatagtgggcttttttttggtcgggcgaggagttgggggggtggggggataaaatagttaaatgatagtgtactgcctttatctttgttgtattcatattatcttaaaaacaattttgatttc

SEQ ID NO: 4230 - DNA, 568 bp, Gossypium hirsutum
  Clone ID: LIB3825-033-Q6-K6-G7
cccagcgtccgggcaagctgtgaattctatttgtcagggatccgctgctgacataatcaaaatagcaatgataaaattgcattccgtcatcgttgaaggggttgacagcctagaatctggttcttcaattttgaccaagtttcacatgcttaaaggccgctgccgaatccttttgcaggtgcatgatgaattagtgctggaagttgatccttcagtgatagatgaagctgcatcgctgctgcgaatgagcatggaaaatgccgtctcccttctagttcctttgcgtgttaagctgaatgttggaaagacatggggctctttgaagcctttccaggctgatcaacaaatggaggaagctatatcaaatgtttagatcagtaggagatatcctgttctctacttcaaaatgcagttatatcaaatatgaatggaatatgatcaagattttaacttgctggagatcttctgattccgatgtcttcgattagaggtttaaggaaaatatctcttaaaagggaattttggttgagtgggggtgcaaatggcatataggaatggttactggctc

SEQ ID NO: 4231 - DNA, 589 bp, Gossypium hirsutum
  unsure (1)..(589): unsure at all n locations; Clone ID: LIB3825-033-Q6-K6-G9
gtggtcccanatccaaaagtccccggctagctcacttactggattaagtagtgctagttccttttctacttttcataggggtgcatggtgtacaccaccacggctgttcctcgaagatcagttcgatgttgttcctcccgatactggatctgtgagttcatatgggaaaaaatggtaggagaggaacctatcaagaagaagaatccgggagcagttaagatcagtccgtggacattggcacggttaaatgcagaagatgtttcaaaagctgcagctgaagcaaggaaaaagtccaaaatcctgcagcctgttgtgagacgggaaacctcttccgggctagaagcagaaagtagctttggaagcagtggccgacaagtgttctcaagagctgatagcagaagacgagcatctaagcgagtgcgtctcccagctgacctacccatggatcccttaatgaccatttctgctaaagacacatcaagtagtttggcacctcttcaactggaagcacgaagcgctttccaaaccagtcgagcaatgtcaagctatgctgggattgttgcctcttctcctgagagcagtttagact

SEQ ID NO: 4232 - DNA, 575 bp, Gossypium hirsutum
  Clone ID: LIB3825-033-Q6-K6-H10
gtcctagggttctaattttttcactcattttcctctttcccttgtttaaggctgtcgaattaagtaaaaagcggaagatggctgcaagcttagcttccagatgctccagggtgggacgttcattgatggatggccttcgaaacaacttctctaatttaccaatcacatcaagagagacaacatttggcagtttcctgtatcagcaacaaaggactttcatacagatgagaactgttctcaaagtagtggacaactcaggggcaaaaaagtaatgtgtatacaagcattgaaggggaagaaaggggcaagattgggagacaccataattgcatctgtaaaggaagccatgcctaatggaaaggtgaagaaaggaaaggtggtatatggtgtggttgtgcgtgctgccatgcagcggggtcgttgtgacgggagtgaggtcaagttcgatgacaatgcagttgttcttgttgacaagcaaggccaaccaatagggaccagagtttttgggccagttccgcatgagctgaggcagaaaaagctgtcaagatcctcactttggcagggcacattgcctg

SEQ ID NO: 4233 - DNA, 556 bp, Gossypium hirsutum
  unsure (1)..(556): unsure at all n locations; Clone ID: LIB3825-033-Q6-K6-H11
tctggnagacttgactcggntgttagtgatgatgatcttagacaacccttttcccagtttggtgagatcatctctgtgaaaataccgcctggaaaagatgtgggtttgtgctatttgcaaacaggaaggacgctgaggaagcaatccagagcttgaacggaacaaccataggcaagcagaccgtgcgactttcttggggtcgaagtattggaaacaaacagcggagagctgattctggaaaccagtggaatggaggttattatcgacggcaaggctatggtggttatggttacggttacggtgcaactccaccaagtccgggtcctagcatgtacgctgctgcagctgccgttcctagtgcttcttaagagtggtgaggtatggaagttttaacaagttattcattatttaagtaggattggttttgattgctgctttagcttgatattcagattacataagttttgtagctggattttgtttttgtatcttttggacttgtttttacaactttattaatatgttattttacaatttacnannnnaaaaatgaaat

SEQ ID NO: 4234 - DNA, 604 bp, Gossypium hirsutum
  unsure (1)..(604): unsure at all n locations; Clone ID: LIB3825-033-Q6-K6-H4
natggcctctttctcacgcagtcccctcttccggcctggggttccttcggcgatcggctatgccgccgtcgactagctaccgacgacacaaagagatgcgcttttcagccacgtttagaaacgctcgaaggccaggccttcctgacctgaaggccgaagaaagggaacccgtgcgccgcttgtgacccgaatccgatgataagaaagagatctccggcggcggcctacggggcgattccaggtacgatttttttttttccgtttcttatccttttattatttattaaactaatttttaaaagatttggacaaataaataaaataaaaaatgaaaagaaacggaaaacagagagaaaaaaaaaagatggttcaaccttttcgaatctttgttctgttttcgattaactggtgtgcgtaaaaaaatacaaggatctgatctaggcctttatagccgatttgaacaactctctattctactatttttgtttgtttctgttgtgtgcttgngcttggcttcttggttgttgcgtgttcacctttccttgcaggtagcagtggtagaggcggctgaggtgtcagacgcagtggcagaggcgtgcgttgg

SEQ ID NO: 4235 - DNA, 620 bp, Gossypium hirsutum
  Clone ID: LIB3825-033-Q6-K6-H5
ctgtatcttctcttcctctctacttttccttctttaagctaatttcttagtttcttgctagctaagcatggcaaaggaaggagagaacagcactttccatgccagggattatgttgaccctccaccagcaccattgattgatgcttcagagcttaagaaatggtcattttacagagcattgatagctgagttcattgcaactatgctcttcctttacatcacagtcttgactgtgattggtcacaagagccaagttgccacctcccctgacgcatgttctggtgttggccttcttggtattgcttgggcctttggtggcatgatcttcatccttgtttactgcactgctggtatttctgggggtcatattaacccagcagtgacatttgggctgtttttggctcgtaaggtctcattgatccgagccattgcatacatggtggctcagtcgttgggagccatatgtggggttgggctggttaaggcattccaatcagcatactacaacaggtatggaggtggagccaacactctagcagatggttacagcacaggaactggtttgggtgcagaaattattggaacctttgtgttggtttacactgttttttctgctactg

SEQ ID NO: 4236 - DNA, 588 bp, Gossypium hirsutum
  Clone ID: LIB3825-033-Q6-K6-H6
cgccttttaagcgctcggctttctctctcttttcatggatgggatcatctgctttccttctccttcatgaaggattagattagcaagactgtatttgatttccattagcatgcgaattaggcctttgcgatataatccatcgcctgaaatatctgttatcgaatacgcttctactttgtgtcgtttcctgattttgattctagtgcataacaactgcaaattttgaatgcttgagctgtaatatgggatatttgaattcggttttgcaatcttcaagtcaggttcatgttgaatatggaccggccagcggcggaggccttatccagaatggaaagattagctactgctatgcaagctctcctggaaagaggtcttcaatggaagatttttatgaaacaaggattgacagtgttgatggatagacagttcgtctttttggagtttttgatggtcatggaggtgcaccggcagctgaatatgtgaagcaaaaccttttcagtaattcgatcaggcatccaaagttcatatctgataccaaatctgctatagccgatgcatacaaccatacagattctgaatttttgaaat

SEQ ID NO: 4237 - DNA, 575 bp, Gossypium hirsutum
  unsure (1)..(575): unsure at all n locations; Clone ID: LIB3825-033-Q6-K6-H7
aaagaaacaaaacaaaaaaaaggagcttaaacctggcttatcagctctggtcactggcggtgcttccgggattggtaaagctttgtgcttagctctggctgcgaaagggatatttgtgacaattgtagatttctcggaagagaaagggaaggaagttgcttctttagttgagatagagaattccaaattccatcaaaatttaggctttccttctgctatttttgttaaatgcgacgttactagcttaagagatttaaatttagcatttgagaagcatgtctcaacatatggaggactggatatatgcatcaataatgctggcattgctaatacagcacttttctggaaggatcaaactgatggcactaagacatgngaaacatactattaatgtcaatcttgttgcagttattgattgtactcgcctcgcgattaagagtatgcaagctctgcaaaagcctggggtgataatcaatatggggtcctctgcaggtctttacccaatgtacattgatcccatctactctgccacaaaaggcggtgttgtcatgtttactagatcactagctccctac

SEQ ID NO: 4238 - DNA, 608 bp, Gossypium hirsutum
  unsure (1)..(608): unsure at all n locations; Clone ID: LIB3825-033-Q6-K6-H8
tccggntttttctcgtgggggtactgggattgcatttagttcaagtgcagctgaatcttgttcaatttctaggtgcaacaatgtctggtctgaggcagcctcctcagaatctgttgaaatgctattaaagtctgtaggacaggacgaaactattcctgttcagactattagtaagaattcagatgcctgtgatgaactgggctgcataataaatcagatggagcctactttgaaacatggagatagtggtcttcctaaagtaggggatgacttacagcctgcattacagtcaggagagtgtccaggtaaacttcctgggttgaaagatgatataggaggagatcatctgctggttgaagatgtttctcaaacgcatgaatttggcacatctgttgatagcacattggacgatctaaatactagaaatactgatttgcctgtgactaagagagatgattctaaagagcatactgttaacgaaagtctagtggaagcttctgttgatcaatctgtggatgacagggagcaggaagataaatgtactggttcacaagtcgatgctgtgattcactccgtgcagaacgcttatgcaagtaatgctttgatag

SEQ ID NO: 4239 - DNA, 566 bp, Gossypium hirsutum
  unsure (1)..(566): unsure at all n locations; Clone ID: LIB3825-033-Q6-K6-H9
aagnanattattattgaaccgtgaccggtactattaatatcttttccttctcttcttttcatttatttcatggctaaacaccacagctttcccgagaacaaacatggggtacctgggaggagcttttactcgcctgcgccgttcatcgttacggtaacaacagttgggactccgttgctatggaactacagaagcgaacttctacgttccaacacctcttctttactcccctttcttgtcaacagaagtttcaagaccttaaacgccgtttcgctgaaaacggcgacgacggcgaaactactaataacaacatctccaccagcaccgttccttggcttgatgagctccggagactccgcgtcgccgaactacgccgcgaagttcaacaatatgatctctccatcgtgtccttacaaatgaaggtgcagaaattaaaagaagaaagagaacagagcttgacagagaacggaaaggaaactgaaaaatcggatctggagcgagaaaagggaagtgaaaaaaaggaagacaacgaaacggagaacattacccgacggcccgttaatagc

SEQ ID NO: 4240 - DNA, 598 bp, Gossypium hirsutum
  Clone ID: LIB3825-034-Q6-K6-A10
ggtaactggtgaccgactcctacattctgctaagatgggacaaggccaagaacacaagaccagagatgacccccaacttgagattcaggaaagaggggaaatattcttcttctataggcctaaagtaaacaaggaggaagttcacagtgttgatgatgtgcagcgcttgtacattgtattgcgtccagagtccggtgagagaggtgttgaagagaagcaagatccccactctggcaaggaaggtgccaaatcaagatcaagtgatcaacctcaaactggctcctccatgaataaaactgaaggtggacaggggagccaggaagtaaatatcgaggaggagccattgttaaggttcatagttatgggcagaaagagacttccagatccaggcaagaagtcccaaactttctggggttttgttgaattagtgaccacaaaggtagaagatgtaaaagatgctttaaaaggagaggaatatgatacatcatcaagaggtcaccgatatcaacctcctgcaagagcagtgggagaaggtgtttaccgtattgtgaggcacaattcaagtaagaacaagatgcacactcatttgatatataaa

SEQ ID NO: 4241 - DNA, 604 bp, Gossypium hirsutum
  Clone ID: LIB3825-034-Q6-K6-A12
aggtcacagaaaagagctccaggtgttataaagagttcgggatatcaatgtggctgtcagacatgcaatttttctaaggtgatcaatgcatatgaatttgagcgacatgctggttgcaaaacaaagcatccaaataatcacatatactttgagaatgggaagaccatttatgggattgtccaagagcttagaagcacacctcagaatatgttgttcgatgttattcagacaataactggctcgcctattaaccagaagtgcttccggatttggaaagagtcgtttttagctgccactcttgaacttcagcgtatatatgggaaggatgaaatgaaacaattgtcataaaacaaccattttcatttgcaaggtagggttaatctctgttttgtgaatatgaaggaagtgactttttacgagactttatgcttgttaatggtgacagcttgttaatggtgacagcgccgggcgtgggtttttttttttttttaatttacgggagtagggactatgttaaaaagtagggagttaatgcctgaaagaagatacttgttatttgtgtatttgcttgtatctctgcaaacatgtagtcggatattaattc

SEQ ID NO: 4242 - DNA, 559 bp, Gossypium hirsutum
  Clone ID: LIB3825-034-Q6-K6-A6
gtcacaacatctgatctcttcttgactatgctttgacgtatgtacaaggcctaagaatgaatgatagcaacgagccgtctatcttgacatgaactgatagactttagctactccagcacacatgatctactaatttgacaccacaccatcccaatcctaaatggcaatatgctttcatattagactacacgaccggattgcacctgcttatgcactgatacaaccctaactgacaaaccaaatgttgatttccatgtacacccaataaccaaatcaagggccatgaccctatcatcaatgagctgcttgaagccatcttagctcattattgacatccaagtgcaatgttgaacaatttacaattcctgtaccaaactaccatcagattataggcctggctcattgcatcattgggagaggacgtcaagttttggggcaaccacatcaacttctatctcagcaacatcatcttatcactgctgctctaaccttgattatagctcaattgatatctactgatagtagtctacttccatgtgctaagcatgatacactttgt

SEQ ID NO: 4243 - DNA, 597 bp, Gossypium hirsutum
  unsure (1)..(597): unsure at all n locations; Clone ID: LIB3825-034-Q6-K6-A7
gnacggcaccgagatcctacggcaccggccatttccgcatgtacgagttcaaggtaagaaggtgtacaaggagccgtagccatgactggactgactgtccttttgctcnatccaggtgaaaaagcccgccgtcgtgaccctactcggtaccaatactcctccaccatctgttctgacttccgccggggcggtggttgtcctcgcggcgatgactgtgagttcgctcatggagtgttcgaatgttggcttcaccctacacgttacagaaccgaagcgtgtaaagatggtaagaactgtaagcgtaaggtttgtttctttgctcattcgtcacgtgagcttcgtctcttgccggaatcacaaccgccatacaaaaactccgacaagaactataaccattgctgcttgttttgccggtcggttacatcgtcgtcgtcgttgtccccaacaagtactctcttgggtttatctcaattttcgagatccccatccctgtcaccgcctctatctcccttaaaacaccagcaaccaacaccaaggtacggcggggatcgtattattaaatttggaacccaaatgacaaccagttacgatgatgtt

SEQ ID NO: 4244 - DNA, 573 bp, Gossypium hirsutum
  Clone ID: LIB3825-034-Q6-K6-A8
cggccgcgtgggcgaacgcgtgggctggttttggtggaggtttcctttttgtcccttgtttatttgatatttccccctcatggccgccgctgatgtcgagttccggtgcttcgtcggagggctcgcatgggccaccgacgaccgggccctcgaagaagccttcagtgcgtttggtgaaggcggggaatcgaagatcattaatgatcgtgagactggaagatcccgaggctttggattcgttactttccgtgacgagaaagctatgagggacgcgatcgaaggaatgaacggtcaaaatcttgatggaaggaacatcaccgtcaacgaagcccaatcgcgcagaagtggaggcggtggcggaggatttggaggaggaaacggtggttacagccgcggtggaggcggcggcggatatggtggtcgccaaggaggatatggtggcggacgccgtgaaggtggatacggaaatggtggagggtatggtggtggtgggtacggaggtggacgccgtgaaggaggatatggtgacggcggatctcgttactcaaaaggcggcggtgcatctgaaggcag

SEQ ID NO: 4245 - DNA, 415 bp, Gossypium hirsutum
  Clone ID: LIB3825-034-Q6-K6-A9
aaatgaagctgccaaaaagggtctaggaacgggctggtaaaagcacatgaagggggtggatccggatgcgcctgcagaagaagaaaatgaggttgatgatgcagatgcagaacaagaagaggccgagcttctgtaggatttgtagtcatgtgttcagtaaatattggatgactctcgagcataatcgatatttacgagaagaaaaaccgatgatgaaccaagttgagaatccatactctgccatctgaatctgaaattatatgcagcaaatttataatgaggatgccagtaaatcaacatgcagtggaaatttgaagttaaagtttgaaatcattgtttgatatttgacaatgtatatttgaaactgattattcactggttcaattttgcatggaaatatacttacagttaagac

SEQ ID NO: 4246 - DNA, 540 bp, Gossypium hirsutum
  unsure (1)..(540): unsure at all n locations; Clone ID: LIB3825-034-Q6-K6-B10
cggccgcgtgggcggccgcgtggngagtgtttttgtgataatttggctggctgtggggagatcatcagcgaacacgaacatatcacagcgatcttaaatggactaccatctgagtacgaggcaattgtttctatcattgtcgccagtccaacgcgtacagcctttagagtgtcatgactatgctgattgatgctgagtctcaacaacaagctctaatggttgaggctcccagctctgccaatctagtttcacagcagtctgttgactctcctactgagaggtccacaccggtttatcggccatctacctctcgtggtcgtgggcgtggccgttcttctagcatgcgatttcaatgtcaattatatggtaaaataggacatcttgtggaccgttgctactaccggtttgattcgtcctacaaaagcactaactacaggcctcatccacaagctaatgtctgtatggctgctcctcctatggttccatactctaactggacatatcaagtgactcatccttctagctggccaaattcttttg

SEQ ID NO: 4247 - DNA, 564 bp, Gossypium hirsutum
  Clone ID: LIB3825-034-Q6-K6-B11
caggtcttgtctatttgcaccatgaaaacatgtaatacatggtcacataaagccgtctaatctactggtaaaccgaatggagaagtgaagattgctgattttggtcttagtacattggtagctagctcaatggaccagacagatacatttgttgggactgataacaactacatgtcgccagagagaattagtgggagcacttatgattatagcagcggtatttggagtttaggcatggtagcgctcgagtgcgccatcggacgttacccgtataagcaatcggaagatccgcaaacttggcctagcattgatgagcttttaaagacaaatgctccaccaaatgagttctcttcagagttctgttcatttgtctcagcctgcctacagacgagccctgaaaagagagcatcatctttggacctcttgagtcaccccttcatcaaaaagtcccaacacttcaaccttgtgtattttgtaggttggctggaatctccattgaattacccaagacgaagataatttttggtcttttgttaccaaaaacatgttttgatcctaaaattg

SEQ ID NO: 4248 - DNA, 604 bp, Gossypium hirsutum
  unsure (1)..(604): unsure at all n locations; Clone ID: LIB3825-034-Q6-K6-B12
cggccgcgtgggcggncgcgtgggtttagaaaaaaaacctatgctcccaaatctctttcccttttctctccaccgaaaagcttgttcaagctttcaaccgcccgcttgtaccggcgaagtaaggccctccaatggtgcgagcacgacgcgcgataagtttattctcctctctctgatccttcgcatgtgttgtggatccaaatgaaaaaaagaaaaaagaggaaaaatagaataaaattgcagtaaataatcaccttagaagtattcttggttgcttttctactaattttcatatgtattttgtattatcactcgtccgtcaaaaaaaacaaatgaaaattcgtggccttttatagccatttttacatctgtttcttctccactagttgcaggtatggcgaacgtggttcgaagtgcaaggatgtggggcgggcaatacgcgagtaaggggtcgtgtgtggggcgtgcgttggtggctgctggtggctgcggcgcaaggcaaatagaaccctagagcttgctatttctgaaaacgatttggggcattgggcttgtgtaatcaagtattgggccattgcaaagttttgggcctagtgtaactata

SEQ ID NO: 4249 - DNA, 515 bp, Gossypium hirsutum
  unsure (1)..(515): unsure at all n locations; Clone ID: LIB3825-034-Q6-K6-B4
ataagaacagttctgggaattattaataaaaaactggnaaaagaaaagcattggaggctgaaatagtgaggctgaaagaacagctaaaacaatccaacttggagaaggctgagatgacttccaaatttgaaaagttatctgcaatttgtcggtttcagcggcaggaaatacaggagctcaagcaaactctagctgctagaactccatctcctaataaaagtacttcaagatatcataactcaccaggaagtctgggagagaaggttgaaggaacattttcggaatttgcacaagaaaaagctggtaactggaaaactgctagcccagaagcaaagccatggcaggcttttccagaggatgccaaaccgcagcagcagcaacctctttcaaaggataatgtccagtcagttagaactagaaatggtcactcaaacatgcatgctgctcaagcaacttttggtatggaaacatggggttttggtgcagataactttacagctgcccctacggccagc

SEQ ID NO: 4250 - DNA, 592 bp, Gossypium hirsutum
  Clone ID: LIB3825-034-Q6-K6-B5
cggccgcgtgggcttggacaaacttgttgtcttaaagcttaatggaggtctcggaaccactatgggatgtactggtcccaaatccgtcattgaagttcgcaatggcttgacttttcttgacctaattgttattcagatcgagaatcttaattctaaatacggatgtaatgttccgttggttctgatgaactcattcaacacccatgatgacacattgaagattgtcgacaagtactcaaattcaaacattgagattcatacttttaatcagagccaatatcctcgtctggttgttgaagattttgctccattaccaagcaaaggccagcatggcaaggatggatggtaccctcctggtcatggtgatgtgttcccatctctaatgaacagtggcaagcttgatgctttcttatcacagggcaaggagtatgtcttcgttgcaaattcagacaatttgggtgctattgttgacttgaaaatcttaaaccatttggtccaaaacaagaatgaatattgtattggaggttacacccaaaaccctagctgatgtcaagggtggtactcttatttcttatgaaggaaaattcagctc

SEQ ID NO: 4251 - DNA, 604 bp, Gossypium hirsutum
  unsure (1)..(604): unsure at all n locations; Clone ID: LIB3825-034-Q6-K6-B6
cggccgcgtgggnaaaagctcagcttcaaatcggcaatggcatctgtagaacaacaagtccctgctggaattgctactcctacttccgatgttgtcggtaatgcctttgttcatcaatactaccttatcttacatcaatcccctgagttggttcaccggttttaccatgatagcagcaaacttggccgccctgaagaaaatggcggcatgagtattacaactacaatgcaagccatcaatgagaagatactctcacttggttatggagaattcactgcagaaataacaactgtagacgcacaagactctcacaatggaggagtacttgttcttgtgactgggtatttaactggaaaggacaaagtgaagaggaaattcactcagagtttcttcttggcacctcaagacaagggctatttcgttttaaatgatgtttttagattcgtcgatgatacgaaacatcaacctgggggccaggacccagttaatggttttgaggcttctcttactcatgagcaaggccattctcctgttccagagaatcacattgagcaaccggctgcattgcctgaagaatgtaatggaccagaagtgtacaattctt

SEQ ID NO: 4252 - DNA, 543 bp, Gossypium hirsutum
  unsure (1)..(543): unsure at all n locations; Clone ID: LIB3825-034-Q6-K6-B8
gtaaaaagaagtggtcgccgcttacttgctcgccgtactcggnaggaaacgcttccccttccgccgatgactgtgaggttattctcggatcagttggtgctgaggctgatgatgataggatagagttgctattatccgaagttaaaggcaaagatattaccgagctaattgctagtggaagggagaagttggcttccgttccttctggtggtggtgctgttgcggttgccgctcctgcaggtggtggtggtggtgctgcacctgcagccgaggccaagaaagaagagaaggtcgaggagaaggaagaatccgacgatgatatgggtttcagcctcttcgattaagcaagcaaagcaaatatcaaggctttctagggtccttcgtacgtaagttttcaatgttttggattctgtaggtggacatggttttaactcttctcggattttgtttgagaaagttttagttaatgacattaacattttggttataattgcggctttctggaaaaaaaaaaaaaaagcaaaaagaaaaaggaactatatg

SEQ ID NO: 4253 - DNA, 607 bp, Gossypium hirsutum
  Clone ID: LIB3825-034-Q6-K6-B9
cggccgcgtgggttcacctctgattctaagagctaacaaaagcaatccagagaagtttccttgtttctgctgacatggcacatgcccttcacccaaattacatggacaaacatgaggagaaccatcagcctaagttgcacgggggccttgttatcaaacacaatgcaaaccaacgttatgcgaccaatgcagtcacgtctttcatattccgggaaatagctatgaagcataaccttcctattcaggattttgtggtgcggaacgatacaccttgtggctcaaccattggtcctatcctagctagtggtgtggggatccgcacagtagatgtcggtgctccccaattatcaatgcatagcatacgagaaatgtgtgctgttgatgatgtgaagcattcatatgagcatttcaaggcctttttcaaagaattctctcagcttgataccaagatcaccggtgacacttagatcctcttatccttgatggaaggtacacaataaaccaaaaataacacttccacatggctgctttcgtaagttatttctcaaaaatggacttgttttagttggtgcatatttctggatctacaatttgtatggtggcttgg

SEQ ID NO: 4254 - DNA, 581 bp, Gossypium hirsutum
  unsure (1)..(581): unsure at all n locations; Clone ID: LIB3825-034-Q6-K6-C10
nganatgtgtattctcttttccaaaaaaacttaaccagaggacttctttgttctttaaccgtcatattgaccagatcatcctttgttgtttctatgtagttgcgaaggtctgtgcttcttatgagatcattttagccgcagttaaatttatctgcactatttcctcttacttcctgaacgaatgacttgcagatttctcagttgcgcctaactttcaaagaaattatttgcaactataggaagcaaccacaatgtaagccacaggttttccaaagtgtatttgttgacaggtcatctgcacgaagaaatgggagaaccgggcaggataatgttgatatcattgcattctacaacgaaatattcgttccttccataaagcctttgctgggagaacttggttctgctggaacaaccacaagaacgagtagagttgctgaagccaacaatagtaatgatggtacatgccccggatctcctaaagtttctccttttccaagtctccctgatatgtccccaaagaaagtatctgcaacacataacgtatatgtgtctccgttgcggacatccaagaaaaattgaat

SEQ ID NO: 4255 - DNA, 592 bp, Gossypium hirsutum
  unsure (1)..(592): unsure at all n locations; Clone ID: LIB3825-034-Q6-K6-C11
cggncgcgtgggcaccagtttcctcttcctggctaattattgcagtctctttggggttattcttgttgtaaaagctaagttttttttcctcttattatacttcatcttattagtagttcaatcaatgcaaggcttaatttagttatcgttgagaataagtactgtgatggagaaagagcagaaggatgataggtttggctgcgaagatgaacttctgagagagcttcttgatgatgagtctcctctctttgtcctacagcaagggacggttcaagccaaatctaaaacttctggagaagattccactaagcgactcatctgtgcagggccgaagattgaagatatcgagaatgctttgtcagtgaaaacatggaacggtactcaatatcaaaattaattcgatacagcaggaaagaggtttgactaagattgagaataagtatactttaaagataaaaaactatggcaattgcatggcagatgatggatataaatggaggaaatatgggcaaaaatggatcaaaaacaccccaaatccaaggagctattacaagtgcaggaacccaagatgcagcgcaaagaagcaggtgga

SEQ ID NO: 4256 - DNA, 611 bp, Gossypium hirsutum
  Clone ID: LIB3825-034-Q6-K6-C12
ttttgtcccaaagccaatggatagggttagattctctgggaagcagatccctcagagatattcgcttgcatctcgtaacagtttagataatgctgaaaggaacttaaaactaaggaagccaattgaacatttgaaaaggagttggtaatgacatcagatgaagcatcgatgaagaattcgcggttaccaaaaggatattgttacgtccccgttgattgtcttcctaaggagaagcagcacgcacaggatgcttgttctgatggacaattggagcacaatggataaggctgagtcaatacctggatgtttcgattgcctatgatgagtgatgacaatctatgccactttataactgctttccacgcaggtgacttgcttatcagattatgaaggcggtaactaaggcagcaaaatcagtgctgagatgttgagtgggggagctgcattgtgtggctggtgatgggggtggatatgtggagttctggcatcttcgaaaggccatagctaagcaagaaagacttaaggcttgtccaccacggttggggaaatacaaattccaggctgctcccccacaagtcctcttatccgaagaacttactggatctctccga

SEQ ID NO: 4257 - DNA, 76 bp, Gossypium hirsutum
  unsure (1)..(76): unsure at all n locations; Clone ID: LIB3825-034-Q6-K6-C4
ttcgnattttgtattaagaatcgccctttggtgtttttctaattcaatcagtgagggtgaagaaaaatgtcttgct

SEQ ID NO: 4258 - DNA, 610 bp, Gossypium hirsutum
  unsure (1)..(610): unsure at all n locations; Clone ID: LIB3825-034-Q6-K6-C5
gngctttttaccaagttctaccatggattctgtaaacaacatctgtggcctttatttcattacatgctccctttatcaccagatctcgggggtcggttcgatcgttccctatggcaagcttatgtttcggtgaacaagattttcgctgataaagtgatggaagtgataagccctgatgatgattatgtttgggttcatgactatcatttgatggttttaccgacatttttgaggaagaggtttaatagggtgaaactcggattcttcctccatagcccgttcccgtcatctgaaatatataggacacttcccgtgagagatgaaattctaagagcattactcaactccgatctcatcgggtttcatacttttgattatgctaggcacttcctctcatgttgtggcagaatgcttggtctttcttatcaatcaaagcgtggttacatagggcttgaatattacggtcgcacggtcagcattaaaatacttccggtcgggattcatataggacaactccaatccgtgctgaaccttcctgagactgcagctaaggtggctgagttgcgggatcaatttaggggtcaaaccgttatgctcggagttgacgaca

SEQ ID NO: 4259 - DNA, 632 bp, Gossypium hirsutum
  unsure (1)..(632): unsure at all n locations; Clone ID: LIB3825-034-Q6-K6-C6
tgcatatgttacgttcttggccggaatggggactacgtngaaggcgttgtagggttagccaaaggttaaggaaagtgaaatcggcgtaccctttagtggttgccgttttacccgacgtgcctgaggagcataggcggatcctggagaaccagggttgtatcgtccgagagatcgaaccagtttacccgcctgagaaccagacccagttcgccatggcctattacgtcatcaattactccaagcttcgtatttgggagttcgtggagtacagtaaaatgatatacttggacggcgacattcaggtatacgacaacatcgatcacctgtttgatctgcctgatgggcatttctacgcagtaatggattgcttctgtgagaaaacatggagccacaccccacaatacaggatcggttactgccaacaatgccctgacaaggtgaagtggcccgccgagatgggaaatcccccttcactttacttcaatgctggcatgttcgtgtttgagcccagccttgtgacttatgaatctctcttgaagactctcaaaatcacacaacctaccccatttgcggagcaggactttttgaaaatgttctttaaggacatttacaagccgattcctttaatttac

SEQ ID NO: 4260 - DNA, 582 bp, Gossypium hirsutum
  unsure (1)..(582): unsure at all n locations; Clone ID: LIB3825-034-Q6-K6-C7
cggncgcgtgggtcatagggcattctcggggttgttgagatctgatgtcacttgtacgacttgtggatttacttccacaacttacgatccttgtgttgatatttcactcaacttggacacagttaactcatctgcagctgagaagacgggtttgtctactctgtcaggttgcctgaatttgtttacgagagcagagaggttaggttctgactcgaaactccattgtcagaattgtcaagagctacgggacacatcgaagcaactgtctattagtagactcccattggtgctttgtttacacataaagagatttgaacactctttaatccgaaaaacatcgaggaaaatcgatcaatatttgcagttccctttcgcattggacatgaccccatatttgtcatcctcgattgttagaagcaggttcgggaatagaatgtttgctttcgaatgtgaaaacaccgatagttcagcagaatacgagatatttgctgtgattgctcattcgggaatgctggaatctgggcattatgtgacgtatctgcatgtaaacaaccagtggtataaatgcgatgatgcttggat

SEQ ID NO: 4261 - DNA, 581 bp, Gossypium hirsutum
  Clone ID: LIB3825-034-Q6-K6-C8
atccgctgccccccggcgtgcccccccctccggccgggtggggtgcgtctagccccccctgggggtcgggtcgtcccgcaacgactcaccacgggggtgagtcggtcgccggcggtggtggtcggggtgacaattttccggccggtcaagcccgcccatagaaatgtagccaacgactccaggaccaagttccctattcgggcaaagatctcttggggtggcttatgcattgctatgggctcgagcttggcttgccgttttgcccccgtcacgtttagggatgccttgtgcatcccaagtcggcgaccacacggtgccttggccttgccaagcccttgcccgcattcgaaactgcccgcgaccccagtaccaagtccctttgacggcaacggcccactggggggtgtaagttgagtttgtaggctcggtcttggctcgaccaagtcccggtgggacttttcccctcgtagttctcgtgccaagcggttgtggtgcgccctcgttcgttgttccttccgctcccctaccattcggttgggtgggctgttgggcggtgtgcgtgggcgctactactagtacgc

SEQ ID NO: 4262 - DNA, 166 bp, Gossypium hirsutum
  unsure (1)..(166): unsure at all n locations; Clone ID: LIB3825-034-Q6-K6-D10
gccctacnacgggcgacggccgcctgcgagggaccaagctaacggacgcaagcttgcgaccgcgtacctgctacatagtggcacctaaatagagtcaactgaacgcagttcacacgaccgcgggactgcaaaaacccggctgggacaaaactgaagcgacccgaat

SEQ ID NO: 4263 - DNA, 592 bp, Gossypium hirsutum
  Clone ID: LIB3825-034-Q6-K6-D12
gggcgcggtggtgtatcctctccgcctggtctcaagtctccaatctctagactctccatctcatggtcacgcggtaactccctccgagtctcggttttcgccgctccttcttccgatggctccgtcaatgatggtgacggaggaaaagtagtggaagtgaagctcggcggcggagacggcgagatcagcgaggctcattggcggaggatcgcctacggttcggtctctccttttgctctactccaaagcaggaaaaatgctgtctccagcttgtccaaaatgtccatgaattcttcaccttacgatggtgactggtgggattacataatggagtacagcaaggacataaatgcccttctagttaatcagaaatcggcttcagttccggttctcgatgacacgaagtcagtcataactaaaggagaggaaccaactagtttgaaggctgcgtgggagctattggaaatgttttatgcagaaaagccatctcattcatggttacccgaacgccttgttgattggttagctgttgtggaggatgatcccaaatattgggaagttatgtcatctgcacttgctgttgggtggctga

SEQ ID NO: 4264 - DNA, 361 bp, Gossypium hirsutum
  unsure (1)..(361): unsure at all n locations; Clone ID: LIB3825-034-Q6-K6-D4
gctaggtcatgcagctgccataataactgatgtgctcgagagtgctngaaacaaatcatgtaattaacgcatctcagaagcgagctcttcttcaagaaatggcattaaggctgacttaatggctttcttctatcacggtacttgctggtcagttagtcggtggttctcgttgcaccgaatttttctcaaaaatgtgttattttatatcaatatatgatctttctgctgctttttatcttctttgccaaagcttcttgttgaagcgcgtgtttgtatatgaatctttttaaaacattaataccaaagaatcccttcaaatanaaaaaannaaaaaanaaaaaaaaannaaaaaaaanaaaaa

SEQ ID NO: 4265 - DNA, 603 bp, Gossypium hirsutum
  unsure (1)..(603): unsure at all n locations; Clone ID: LIB3825-034-Q6-K6-D5
naaaaaaaaaaaaaaaaaaaaaaaatagagaggaaaaaaaaaaaaaaaaaaaaaaaaggaggaggaaaaaaaaaaaaaaaaaattaaaaaaagaatgaaaaaataaaattaatttaagaaaataattaaaaaaaaatagagggggggggccttttttgggggtccctttttttgggggggggggtggccccttttttttttttttttggggccctttttttttattccttggcccgttttttccccccgtggttttggggaccccctggggttccccctttttttcgtttgggggccctccccttttttccccgttgggttttttggggggggggcccccccgttggcctttcccaacatttgccccccttttttgggcggggggcccccccttttttcccccctttttcccccgggggtttggtgtttcccccccggtttaccttttttttttcgcgggnttttgcccccggttttttnnttttttttctttttttttgccccccntttgggggtttcccccgggagctttttttcggggggcttcttttgggggtcccctttttggngttttcgggctccttctcccccaaattttttttt

SEQ ID NO: 4266 - DNA, 609 bp, Gossypium hirsutum
  unsure (1)..(609): unsure at all n locations; Clone ID: LIB3825-034-Q6-K6-D6
gtcgttttaatccattacccaagnacccatcggnaacccaccatcgtcaccgtcaattgccccgataagcccggtctcggctgtgatatttgccgtacccttctcgaattcggactttcaatcaccagagcagatttttcgacggatggaagatggtgttacatggtgttttggttggttccaaatgtttcgaattcatgtgaaattgattgggaaagcttgaagaataggcttgtttcgatgtgcccttcgtgtttggttccatttttttcctttaattatcagcaaggaggagatggaaatggaagcacaacccatcctctgatttatttgttgaaactttgttgcttggaccgcaagggattacttcatgatgttacaaggatactgtcggagctccagtttacaattcaaagagtgaaagttatgacaacgccggatgaaagagttatgtacttggttttcatcacggatggaatggaactcttacatacaaaagagagacgagatgacacaagggagcatctaatttctgttttgaagaattattgcatcagctgtgagcttcagttggcagggccagaatatgagaaatctgaagccttgcct

SEQ ID NO: 4267 - DNA, 593 bp, Gossypium hirsutum
  Clone ID: LIB3825-034-Q6-K6-D7
cttctagaaagtatctttgaaaagattgaatgggatccgtcaattttggatcatttgtcatttgctctctcctgtctggggatttgagagctttggctaaccaaatagaagaactgcttccaggggttattagccgcaaagagagatacaattttctagctctctgttattacggagcaggtgaggatttggttgctttgaatctattgcggaaattgttacagagtaatgaggatccacactgtgttccagcattgttaatggcatcaagaatttgtgggggaaaacctaatcttgcggaagaagggattaaatttgctcatagagctcttgaaagcctggatgaagaatgcagtgagttggaaggtactggtaaccttctattgggtgtggctcgatcgacacattcaaactcagccttatctgattctgagagggtgtccagacagtctgaggcccttcaggccttggaacgggcttggaaaattacaagtatgaaagaccctaacattctttactacctctgcctggaaaatgctgagcagagaaagttggaagctgcgctatattacgcaaagtatttgctaaaacta

SEQ ID NO: 4268 - DNA, 591 bp, Gossypium hirsutum
  unsure (1)..(591): unsure at all n locations; Clone ID: LIB3825-034-Q6-K6-D8
cggccgcgtgggcggncgcgtgggttttacccgtcctggcaacatcagttaaagtggagctcaataaagagtttgctngaaaacggacatcatgcaatcctgacacagatgattgcaaataagcttggatgtcaaccagatcaaatatgtgattttgagttgcaagcatgcgatactcaacccagtatagttgccggtgctgcaaaggaatttatcttttctggaaggcttgacaacctttgcatgtcgttttgctctctgaaggcattgatcgatgctacatcctctgagagtgaccttgaaaatgagagtggtgttagaatggtggcattgtttgatcatgaggaggttggatctaattcagcacaaggagctggatctcctgcaatgttagatgctctatcacgaataaccaattccttcacctccgattctaagatgctaacaaaagcaatccagagaagtttccttgtttctgctgacatggcacatgcccttcacccaaattacatggacaaacatgaagagagccatcagcctaagttgcatgggggccttgttatcaaacacaatgcaaaccaacgatatgcg

SEQ ID NO: 4269 - DNA, 599 bp, Gossypium hirsutum
  Clone ID: LIB3825-034-Q6-K6-D9
cttgttttagcagtatagtagttgtttatttttatatatacaaaaccaaagttctatccatggctgcatctttctcagtgccttcaatgataatggaggaagaagggaggtacgaagctgaagtaacagaggtgcaagcatggtggaactcagagaggttcaagctaacccgacgaccgtattcagctcgagatgtcgtggctttacggggcaacctcaaacagagctatggctcaaatgagatggcaaagaagctatggagaaccctcaaggcacatcaagcaaatggcactgcttcaaggacttttggtgcacttgatccagtccaagtaaccatgatggccaagcatttagattcaatttatgtctctggttggcaatgttcctcaactcacaccaccaccaacgagccaggtccggaccttgccgactatccttacgacaccgtccccaacaaagttgaacaccttttctttgcacaacaataccatgaccgaaaacaaagagaggcaagaatgagcatgagccgcgaggagagggctcgatctccttatgttgattatctgaagccaattatagcagatggtgatactggcttt

SEQ ID NO: 4270 - DNA, 589 bp, Gossypium hirsutum
  unsure (1)..(589): unsure at all n locations; Clone ID: LIB3825-034-Q6-K6-E10
ggnaaaccgatagaattactgggnaanactaaacaaatttctcctgttcctattcatctcagtatctactctccaaatgttgtcaacttaaccctgatcgatttgccgggcttgacaaaagttgctgtcgagggacagccggaaactatagttgaagacatcgaaaccatggttaggtcttacgttgagaagcctaattgtatcatactagctatatctccagctaatcaagatatagcaacttctgatgctatcaaattggccagggaggtagacccctctggtgaccggacatttggggtgttaactaagcttgaccttatggacaaagggactaatgctttggatgttcttgaaggaagatcttaccggctacagcatccttgggttggaattgtgaaccgttctcaggctgatataaacaaaaatgtggacatgattgtggcaagacgcaaggagcgtgagtattttgccactagtccagactatggccacttagcaagtaaaatgggttcagagtatcttgcaaaacttctatcacagcatttggaaaatgttattaggtctcggataccaagtatcacttctt

SEQ ID NO: 4271 - DNA, 568 bp, Gossypium hirsutum
  Clone ID: LIB3825-034-Q6-K6-E11
cttttaaccactgtgaaattttcagaattggactgaagcatattagtggtctaacgaacttgacatccttgagttttaaaaagagtgctgcaattacagctgaaggaatgtgtgccttttccagcttaataaacttggaaaagttggacctggagaggtgcacagggattcatggtggatttgtacacattaaaggtttgtccaaacttgaatctcttaatatcagatgctgtaaatgtatcacagacttggacttgaaggctatttcagggcttaataatttgaaggagttgcaaatatcaaatagtaacgttacagattttgggctgtcttatttgagaggtttgcacaaacttgttatgttgaatctagaaggatgtaatgttactgctggatgtttggattccatctcagctcttgttgctttggcattcttaaatctaggaagatgtggcctgactgatgatggatgtgacaagttttctggacttgagagtttgaaggtattgaacctggcatttaacaatataacagatgcatgcttagtgcacctaaaagattaacaaat

SEQ ID NO: 4272 - DNA, 572 bp, Gossypium hirsutum
  unsure (1)..(572): unsure at all n locations; Clone ID: LIB3825-034-Q6-K6-E4
cgacctttattattattattatttattttcctctgtcaaaaccctaaccctaaccctcaaattcgcttaaaaattcccccccctttgttcaaatcctttctctaattacactaaaagccccttcaatttttgataaattcaatttattgtaaaaatttccccattcctttttttttaatttgagaaatttccatggccgccgttgtagaagaaaccatacaatgattgaattattggggtttcgtttcaattgtatggggtttatgaaatgcctgagttgcgaaaaggtgtttgtagaggccgtgccaagttagcgcagcctcagcagccacaagaaacccggaaacaaacgaggaatcaaggtcggaaacgtgcggcggcggcggttattgaggtaggtaggccaaggacgagattggccgccaagagactaaaggaggaggaggaacaccctncagtcgttgtgatttctgagagagagagcgatattttgaaggagttggtaaaagacaataaagaaanagaagctgtgatggnggacgatagcggtgggttgagtgctaataaggctg

SEQ ID NO: 4273 - DNA, 577 bp, Gossypium hirsutum
  unsure (1)..(577): unsure at all n locations; Clone ID: LIB3825-034-Q6-K6-E5
gnactatcctgtgacttgtggagtgtgggttgcatactggttgaactttgctctgtaagtgaatatgtgcagtacaagctattaccttattggtcttactgaatgctggagcaaattacagttgtgtctagaaagaggaaatgagagtcttttttagttattagttgatgagattaaaaatgatgcaagagatgtatcaagtggataaatctcattaggtatcatctaccctctagaagataaatctcattataaggtaactagaacgtggtctgttccgcaatgttcattgtaaaataggaagcccacttaaaagtttcatgattgacgtgttagaatccagagcatgttgtaatttactttcaagagtggttatgaccttaagtgttgtatattgttcatgagcagggtgaggcactttttcaaactcatgagaacctagagcatcttgccatgatggagagggttttagggccattaccccaacatatggtgcttagagccgagtaagagtgattatgctgcttattctagttgtgaatctgttgctgaagaaagtcttacattgtgcctgata

SEQ ID NO: 4274 - DNA, 625 bp, Gossypium hirsutum
  unsure (1)..(625): unsure at all n locations; Clone ID: LIB3825-034-Q6-K6-E6
cccagcgtccgcaacaaagcacccaagcaccattgacaagtgaaaggaaggttagagcagaccttgaagaatatatacccaaaccctatttggcaagggcattggctgctccagatgtggaacatccacatggaacaccagggcatgacaaccatggaatgagtgttcttcagcaacatgtttccttttttgatcaagataaagatgggattgtttatccttgggaaacctacacaggttaatatatattttttccagttccaatcttttttctccaacttattttcattttttatgaaaaatatttatgtatactacagctatgagaaatcttggtttcaatccattttcaagcctttttattgcaatctgtatcactgtgggaatgagttatcaaactctcccgggatggctaccaaatctatattttcccatatacatagatagaatacacaaatgcaagncatggtagtgattcttcgacatttgacaatgaaggaaggtttatgccaatgaactttgagaatacattcagtaaatatgctcgaactgagcccgacaagttatcattcggagaagtgtggcacatgactgaggctaatcgaaactcgtatgatttcattgg

SEQ ID NO: 4275 - DNA, 590 bp, Gossypium hirsutum
  unsure (1)..(590): unsure at all n locations; Clone ID: LIB3825-034-Q6-K6-E7
aaaaatcaanaaaatgctcttaaagcctgcctgccctctgagctccgatcgaactctgatcatcgggcttcgccgtcctctgtcgtctccgccaccgttcacgatggtcagagttcccaaaagcgagttttacgctccttaaagcttcccaaagcctaatccgacggtgatattccctttcctttctattttaaaagcgccttttgcctcaaaaacgattcaaatcttcgaaataaaaaaaatagaaaagagaacgaaaagtaatctctgaaaatcaccttagatctaattttattcctggtatatgtgtaatacccgtgtctgttttacactgttttttgggtaaaaaaaaaacccccctttacaatgctttccttcggcttttatagccttatacagtattttttacagatttctatttcatttcttgctatgtttgtttcgtttctgctgcttttctttctccttttgcaggtgttcgtgagaatgatggcgagtactctgactttgatacgtgcgccaatctcggcgcgattcagaactagagtcatggcgctgatgggggctactggaatggcgcgatttgaaaa

SEQ ID NO: 4276 - DNA, 574 bp, Gossypium hirsutum
  unsure (1)..(574): unsure at all n locations; Clone ID: LIB3825-034-Q6-K6-E8
gttagatgttagattcanaaggcttctgatgggcagcaacagcaggtacctcctcagaacaggatgcacaagccaggaaaagaacatgtcatgaatcctatccctgagtactacagcaccaactaccagccttccaacaagcttcaagggaaggtggcattagttactggaggtgattcggggattggccgagcagtttgccacagctttgccctcgagggagcaacggtggcctttacgtacgtgaagtctcaagaggagaaggatgcacaagacagtcaggagatcctgaggaaggctaagacctcagccgccaaggacccgctggctgtatctgctgatttggggtacgataagaactgcaaacaagtcgttgatgaggtcgtaaaagcatttggtcggatcgatattctggttaacaatgcggctgaacagtacaaggctagcagtgtggaggagattgatgaggagaggcttgatagggtgtttaggaccaacatctattcccaattcttcctggccaggcatgctctngagtacatgaaagaagcagctccataatcaatactacatc

SEQ ID NO: 4277 - DNA, 599 bp, Gossypium hirsutum
  unsure (1)..(599): unsure at all n locations; Clone ID: LIB3825-034-Q6-K6-E9
cggccgcgtgggcangaagtgatgatccttcgccagaaacttgcgtaatgatcggaacataacttcaagtgatgcacttgctgaggctgaacaagtgaacacgcttgatgcctcaggtccgtgcgatgtaatgaatgatttgggtgggttgaggatttcaaaaacagttgtggctgaaactgaaggttcaagcaatgatcccttacctttcggaaatggaagttcatatccgcctccaccgcctgttccacctcctaaaccttcagcagctaattcgaattcaagaagatttgcctcaggaagttcaaatcctgttcgtgctggatcatctagaagagctgttgcctggcccactgtttcaataaggacatcaccgtctgggtcacgtccatcttctcctagatctcatggtgagagtgagggttacaatagtgctgatgagcagaatccatgctttgtatcctcctacaatgatgcagaaagagaacgccaattcgaaatagatatcagacgagcaaaaggcttagaagttaaacggatgctagaagatgggaactgcctcttccgtgctgttgctgatcaagtgtatggggactctg

SEQ ID NO: 4278 - DNA, 606 bp, Gossypium hirsutum
  Clone ID: LIB3825-034-Q6-K6-F10
attcgaacaaaagaaagaaatggcgtctcatgaacagagttacaaagctggtcgagctgaaggccgagctcatgaaaaggtgagcaaatgaaggagagcatgaaggagaaagcagaagcagcgaagcagaagacaatggagaccgcagaagcagcgaagcagaagacaatggagaccgcagaagcagcgaagcagaagacaatggagacaacagaagcagcgaagcagaagaccagaggagccgccgagacaaccaacgacaagacaaaacagacggcgggagctgctagagggaaggcggaggaaactaaggagacggagacaagcggagggatactgcagcaggcgggggagaaagtgaggaacgcggcacaaggtgcgactgatgcggtgaaacatacctttggaatggcggatgccgatgaggatgaacataattatccggctactattactaggaaggattagggtagcatgtagagttaagatattaataacagttgcaatttgtacgtgagtggttttagataacgtacggttgcaaacgcttcgttgttatgagcattgtcttactttgttgtttcagcttttttttttaataataaa

SEQ ID NO: 4279 - DNA, 629 bp, Gossypium hirsutum
  unsure (1)..(629): unsure at all n locations; Clone ID: LIB3825-034-Q6-K6-F4
tatatccataggatttgaaattttgggattaaaaagaatttgttttattaatttgatcagtctacattccttcattcagacgattgagacaaaagatagctacttctccaataatccccaaacatttctgataaaataacgcgggaaatccatcttccccaggttccttagtgggccctaattctgacaaagcctgctgaatttattccttcgtgtatctctccataagcattgcattatattctttcgatatacatcgaggaactcacgacaaaacgtactcaaattttgccttgctgcttgcgtagaaaagtttttggaaatacattctggcaatcatttccatttcttgtaatttgtccgtttcatcttgcattttacgaatcaaatttctttgtctcttctgtgtggcttgttcgnggaagaaagctgtgtttttatcccctaatcttaaccagntgactcttgttctttgtctcttcgaatttgtcttgaccattgctccagccccattttcgtactgtntagcttgcataagagatctncctcagattgttcccagatgtttttgacctcattaaaaaacgaatcctctaatacccaccatgcttaaaacttgaattcttttt

SEQ ID NO: 4280 - DNA, 597 bp, Gossypium hirsutum
  Clone ID: LIB3825-034-Q6-K6-F5
ctttcctaaccattttgtttcttttagctaattccatacttctctttcaagaaacagtaattctttaaacccttctaatggcttcacgtgatgccactgttgagccaattacaagctcggtttccgatacaatgctcccgtctgaaaccggagaaaccaagcttccggtgagagaaaatcccaggtgattatgggttacctttcattggtccaatcaaagaccggctcgattatttctacaaccaaggtcgggacaaatttttcaaatccaaaattcaaaaataccaatcgacagtaatccgaaccaacatgccaccaggtccattcatcgcttcgaaccctaaagttattgctttacttgacggaaagagctttccaatccttttcgacgtatcaaaagtcgaaaaagaaaaccttttcactggtacttacatgccatcaaccaacctcaccggcgggtatcggattttatcctatcttgatccgtcggaacccacacacactatgctcaaacaactacttttttttctcttgaaatcgagtagtaaccgagttttccctgagtttgaagcgtgttacactgagttattcaaaacg

SEQ ID NO: 4281 - DNA, 615 bp, Gossypium hirsutum
  unsure (1)..(615): unsure at all n locations; Clone ID: LIB3825-034-Q6-K6-F7
naaaaaactcaggnagtcatttaagggaactaactaaatggtggaagaacgcacttgctagtgataatgttgatgaagtgaaaataagcaaccgtttggacaacactccttgtgtggtcgttacatcaaaatacggatggagtgctaatatggagagaatcatgcaatctcaaaccctatctgattctagcaagcaagcttacatgcgtggcaagaggatcctagagattaacccaagacacccaatcatcaaggagcttcgtgagagagttgccaaggactctgaggatgagggtgtgaagcaaacggctctgcttatttaccagacagctgtaatggagagtggtttcaatctacccgatcccaaggactttgcttcacgcatctacagctcagtgaaatctagccttaatatcagtcctgatgcaacaattgaagacgatgatgatgtagaagaaaccgagatagagtcggagacaaaagaaagtgcaggcaaagatgagttgtagattgcctgaaacctcggggatatattgcctgaaacctcggggatatatactctntgagtttgttttaccctctgtagacattcacgattgaactgaaacatgcatt

SEQ ID NO: 4282 - DNA, 279 bp, Gossypium hirsutum
  Clone ID: LIB3825-034-Q6-K6-F8
caattagtgtttttaactcctaaggtatcttatgtgggtgtatttatctacttaatctgtttatatagaatataatattactgagataatattctggtttgtgcgtgttgagtgtgtcatggttttgaatctgtacaaagtatagagagaggactaaattagtgatagtagtgtggggatgaatctgttgcaagtattggtctctagggttcctttgacagcttaagatttgctaagcttttgtgctgtatacagatctgtatgacggatttttcttct

SEQ ID NO: 4283 - DNA, 502 bp, Gossypium hirsutum
  Clone ID: LIB3825-034-Q6-K6-F9
cgctgtgttatcagatctttcttgaatcgggcggaaccaaattgaatttcacgggctatgtactaagcatgcctgatggtgatacaacggtggagagatcaagacctggtggtgctccagggaacagactttttggtggaccttcctaattttaggtgtcttcatcattcttcaattgtgcattaacattcaaatgcttttattatgcacttcctatattacaatgccatggtggatgtactgcttgttatcttaacgcattaatactcacgttttgacgcgccaactaacgagactcagtgcacttactaccaacttttacagcttacagatgctgaaaggttgctgatgagatacttaaaaacaaacaatattttaaagtggacctatccatgaaaaataaaatctagaactgcgtacaaagcaattctgccaattataataaacaccgttactatgaacctcacacccatattggattatgcctacatcacagttaact

SEQ ID NO: 4284 - DNA, 612 bp, Gossypium hirsutum
  unsure (1)..(612): unsure at all n locations; Clone ID: LIB3825-034-Q6-K6-G10
cggccgcgtggggngaattatgatgtatttggaattaatgagcaagatcatgtnntctggaaaaactcagccaacaatatgcaggnggaaaagttctctaacatagcactcccattactgcgtactgttgcttctgatactggagattatgcttttaatgttattacttccaaggagtttcagtctatgtttcaagattccaaaccatggttacttcaggtgtattcatctggcagcaatcaatctgctcaatttgctaattcgtggaaaagaattgctgctttattgaatggggttgcaaacattggcatggtagaacttggtgaggttcaagttgcagcctacctttctgagagaaagccaatgggccggttcttcttcaggaatggtcttccttcagtggttgctttcccatcagggtgtaaaacttcagactgtcttatccggtttgagggagagctatctgttgatgcagtaacagattggtttgcaatggccgtacttaacttgcctcgcatcttttactattcaaaggaatcattggggccaaggtttctggcaaaaagcagtccccataaggtaaaagtgattttcttctcaaaaacaggggag

SEQ ID NO: 4285 - DNA, 593 bp, Gossypium hirsutum
  unsure (1)..(593): unsure at all n locations; Clone ID: LIB3825-034-Q6-K6-G11
gcgtttctgtaanagtggtcatgcggctagggttttccctttttactttttttggctaaaaattagttaaggctgtgggctgattggacctctagagttttaatatttaggctgtaattgggttggcaactttggtttaagtttcttgtaaatggactggtacattgggcttatttattatgttgatggggggactttattttgtaaattaggccaggccaaaattggcctattacaataatcttttggatcaaaaaaaaaaaaaaaaaaaaaaaaaaaaaaaaaaaaaaaaaaaaaaaaaaaaaaaaaaaaaaaaaaaaaaaaaaaaaaaaaaaaaaaaaaaaaaaaaaaaaaaaaaaaaaaaaaaaaaaaaaaaaaaaaaaaggggggggcgttttttaaaggaaccaaatttaattaccggggtttggcaaataaaaattttttttttggggcccctaaattaaatttactggccggtgttttaaaaacgtggggactgggaaaaacccggggtttcccccaatttaaacgcctttgggagaaaatccccccttttttccccccttggggttttatagaaaaaaggaggc

SEQ ID NO: 4286 - DNA, 587 bp, Gossypium hirsutum
  unsure (1)..(587): unsure at all n locations; Clone ID: LIB3825-034-Q6-K6-G4
gntgcttttagcagatctctccgttaccctccttaccttgcttcagttctattggatatctcttgggatattccttgctgtcctgcttattcttcctctatcactgctttctccattccctgctggattgaatgccttgttcagtaaagagcctcgtagagcttcgcttgcccgtatatattccctttggaatgctacatctctgtcaaatattgctgtcgctttcatttgtggcattattcattatggattttcctccttcctgccacctgacaagggaaatacttggaatactagaagcgaagacaacaaatggtggcttttgccaaccatccttctgatattcaagtcaatacaagctcgatttgttgattggcacattgcaaacctagaagtccaagatttctccctcttctgtccggatccagatgctttttgggctcatgagcctactgcttgaatttaaagtgaagactgactgcactccatcatcttcttccatggttctagctgtgatgcttagcttnccaccatcatcttcttccatggntctggctgtgatgcttagctttccagtgtaaattttg

SEQ ID NO: 4287 - DNA, 603 bp, Gossypium hirsutum
  unsure (1)..(603): unsure at all n locations; Clone ID: LIB3825-034-Q6-K6-G5
ggtgattgatgcattccgcttngacaacccacaaaccagatgcttggccaagaaccacgtcagacaacatctaatctcgggcatcttaataagccatctattcaagcattaatacatgggctaaacagacattactactccatagccattaactaccggaagaatgaactggaggaaaagatgctgttgaatcttcacaagaagaagtggacagatggactgacacttagacgtttcgatactcattccaaaactaatgagcagactattcaggaaatgctgaatttagctataaaatacaataaggcagtgcaggaggaaggtgaattacctcctgagaagctggcgatcgcaaatgtcggccggcaagatgccaagaagcacttagaggaacatgtctcgaacttgatgtcgtcaaacatagttcagacattgggaactatgctcgacacggtggtgttctaaaactcttttagcacctgtatactcttttttcatattcaggaactatcatagcttgttggtcaaaaaactgccattgtattgtcaaatttgaaagggactgtcatgttgtctcattaatctctctgttatcccctcttt

SEQ ID NO: 4288 - DNA, 630 bp, Gossypium hirsutum
  Clone ID: LIB3825-034-Q6-K6-G6
tccacgccgtccgaaaacagtatcttgtctttacagttttttgtctgaaaagagaaaatggctactgtaggaagaacgcggcagctcctttgttgttccttaacttgatcatgtatttcattgtgttgggatttgctagttggtgtattaataggtttatcaatggccaaactgctcatccaagtatgggtgggaatggagcaacaggtttctttttaaccttttcaatcttggctgctgtggtgggtatagtatcaaaatttgcaggtggtcatcatattaggtcatggagaagtgatagtttggctgcagctggttcttctgcacttattgcttgggctctaactgcattagcctttgggtttgcttgtaagcatataaatataggaggatggagaggatggaggttgaggatacttgaagcattcataataatccttacattcactcaacttttgtatgtgttgttgatccatgccggtgtgttcagcagtcggtacggaccagggtatcgagattccgactatgggatgcatgcaccgggggatgaaccagggcacaagaccagcaccgctgtaactggatctagggtctgaaagggactatagtttaaaactagctaaaatatgt

SEQ ID NO: 4289 - DNA, 606 bp, Gossypium hirsutum
  Clone ID: LIB3825-034-Q6-K6-G7
cttcctcaccccaattttaaacgccctttggaaccctagatttttccgtgcagaacttttcttaaacgccccaattcttaaacgccgcttatcttgctttccttcatttcactgcgccccctcttcctgaccctggttcttcaaatgcaattgcaaattttgatagtaatattgctaacagaagcctgcaaccagaaaaacaagaagcatgtcgagattctcatttcagtgactgtgcttctatttgcaacaataatgaaaaatttaaaggcatttattccaaacactgggcgcggtattcaaggtgcaacctccccttgtttgggccaaaactttgcaaaaatgtttgagataaactttgaaaatgaaaaaggggaaaagtctatggtctggcagaattcctgggcatatagcactcgaacggaggtgggagaaagatgtgaaagctcgaacaaggggtgagatgggagcagctaagtctctttgtaccccattcgaacagcctgaactcccagaagatattgaaggtgtagcagaggattcaatctcttcaagctggaaaagccaaggcttagcacttcttcaagtggaatgttatttaatgtt

SEQ ID NO: 4290 - DNA, 585 bp, Gossypium hirsutum
  unsure (1)..(585): unsure at all n locations; Clone ID: LIB3825-034-Q6-K6-G8
cccagcgtccggnaaaaaaatattcctctctttctaaccttcggaagctcaccaatttctgcaaaatggcgacgatggtgcctgacaacctaagccgtgaccagtacgtttatttagccaagttagcggaacaagccgaacgctacgaggagatggttcaattcatgcaaaagctcgtcctcggctctactcctgcttccgagctcaccgtcgaggaacggaaccttctctcggtcgcttacaaaaacgtaatcggatctctacgcgccgcgtggaggatcgtttcttctatcgagcagaaagaagaaggtcggaagaacgaggaacatgtggtgctcgtcaaggagtatagatcgaaggttgaatccgagttgtcggatgtttgcgctagtatcttgactttgttggactcgaatctgatcccatctgctgctgcgagtgagtcgaaggttttctatttgaagatgaaaggggattatcatcggtatttagcagagtttaaggttggtgatgagaggaaagctgctgctgaggatactatgctgtcttacaaggctgctcaggatatcgcactgacggatctag

SEQ ID NO: 4291 - DNA, 600 bp, Gossypium hirsutum
  Clone ID: LIB3825-034-Q6-K6-G9
aaaaaaaaagagaaatgcgcaaaaatgagaaagagaagaaaaaaggtaacctcgaccttcttcatggtttttttttcttaccatcaggaacagaaatcagaaccgaatgaagttaggttatgaaaaaggattttttcaatgttcaagattgattgatcaaatggagctatttgaaatgtaatgattttgaccccgtgtttcttattaatatatatttgtgttctatttgaaaaaaaaatcctagcatatggattctgcatttttgcagtatttataatgcctgtgggatgtgcataggattataagtttgccatttgcttcattgtgccaattattgacgagctcctttaaaatattgcttgcttgtggaagtgagttcgatgtatctttctgtcagcttaggatgtaaccaatttcaggccaagttttccgtcattggtgatgcgctgtatatgtgcaaatggtttgtgtattagtttagcagagaatagggattttttattttacttctcatatccgtttttacagttcatggtcggggtatgtgactgaaggaatagggactttaataaaatatttgtaattgcaagttggctcttg

SEQ ID NO: 4292 - DNA, 124 bp, Gossypium hirsutum
  Clone ID: LIB3825-034-Q6-K6-H10
gttttttgcagtgccatatgctgtcataatttatcgcttagtatccaatgtggtaatgttatttttccatctactatgttaggtcatctttttgacaattatcaataactaaattgcttcatct

SEQ ID NO: 4293 - DNA, 222 bp, Gossypium hirsutum
  Clone ID: LIB3825-034-Q6-K6-H11
atttattttaaattcatttattatcattttaaaatttgttttacattttatttattttaatttactttataattttttttaaattgttatatatattgtttaattcattggtctttgattgttaatgttagtatttaaatggtgtacattgtgagattattgccattgcatgtactatgatacatttatttgtatttatatattattatcattcacttgtgt

SEQ ID NO: 4294 - DNA, 598 bp, Gossypium hirsutum
  unsure (1)..(598): unsure at all n locations; Clone ID: LIB3825-034-Q6-K6-H12
tccggnagcccctcctgatatgatatgtagagataagttcttaatccaaagcacagttgtcccagtaggaacaactgatgaagacattacatctgccacatttgtcaaggacagtggaagattattgaagagaacaagcttaaggttgcccttgtcagccctccagattcgccagtgctatcaccaattaatgggacaatgaatcagggaatggattatgatagagttttgacgattgaggaatcaaagatgagaaatactgaggatttaaagccaacaaaggatgtagagtggaattcaaggaaagatacgttatatgaggagaaattaaaaccaaagaaggatgcagagctgaagcccatgaatgatacttttggtgacaatttaaatataataaaggacactgaaccgaagccaaagaaggatgcagagctgaagcccatgaatgatatttttggtgacaatttaaatataataaaagacactgaactgaagccaaagaataattctttcaatagcaaggagttaaagtcagtgaaagatgaggagtcaaagccaatggaggatattcttgataccgaggaattgaagccaatga

SEQ ID NO: 4295 - DNA, 587 bp, Gossypium hirsutum
  unsure (1)..(587): unsure at all n locations; Clone ID: LIB3825-034-Q6-K6-H4
gggnaaaacagtgaggttttcngaggcgttcattgtactgataatgagaaagtattatcaagattctcaaacctgtaaagaagaagaagattaagagggagattaaaattctgcaaaatctttgtggagggccaaatattgtgaagttgctcgatatagttagggatcagcaatcgaagacgccgagtcttatatttgaatacgtgaataatacggattttaaagtgctttatccgacactctcagattatgatattagatattatatctatgaacttttgaaggcattggattattgccactcacaaggtattatgcaccgagatgtgaagccccataatgtgatgattgatcacgagctgcgtaaacttcgtcttattgattggggccttgctgagttctatcatccagggaaagaatacaatgttcgtgttgcttcgagatattttaaaggtcctgagcttcttgttgatttgcaagactatgattactctttagacttgtggagccttggttgtatgtttgctggaatgatattccgggaagagccattcttttatgggcgtgataattatgatcaactagtc

SEQ ID NO: 4296 - DNA, 459 bp, Gossypium hirsutum
  unsure (1)..(459): unsure at all n locations; Clone ID: LIB3825-034-Q6-K6-H5
cccgggtcgcccagctccgggcgctgggttttctggagggacctcaagttgtgggagaagagttgttgagcctcggggtggctggcagtgaacctggcattgaaggagaggagattgctcctcttgccagggnaaaatgttgccacaccctgagcataatcagaaggcaactatggataaagcttagtaacctgttttcttagacaaccaagtccaagtacctgtctactctcgatagctattggcttgaccggcggaaaacaaactgatctgccatacgtgaagtcagtggtgctatttttgagagtgaaaagtcaggagatagtatgatataaatacatagttatagcagctaatgggtgttagtaatgttgtcaagaacttaaaggagaatcagtttctctgtgtagttttatgagttgtgagcaatgtgaaataagataaaatgttccaacttct

SEQ ID NO: 4297 - DNA, 593 bp, Gossypium hirsutum
  unsure (1)..(593): unsure at all n locations; Clone ID: LIB3825-034-Q6-K6-H7
ngacgctctccttctgtttctggtcaagccaatctcaaaagatccccttttagctcacagctcctctcttgagtactataatgggtaaggagaaggttcacatcaacattgtggtcattggccatgtcgactctgggaagtctacaaccactggtcatttgatctacaagcttggtggtattgacaagcgtgtgattgagaggtttgagaaggaggctgctgagatgaacaaaaggtcatttaagtatgcatgggtgcttgacaagcttaaggccgagcgtgaacgtggtattaccatcgatattgccctctggaagtttgagactaccaaatactactgtactgtcattgatgcccctggacatcgtgacttcatcaagaacatgattactggtacctcacaggctgactgcgctgttctcattatcgactcgaccactggtggtttcgaagctggtatctcaaaggatggtcagacacgtgagcatgctttgcttgcgtttacccttggtgtcaagcagatgatttgctgctgcaacaagatggatgcaacaactccaaaatactccaaggcaaggtatgatgaaattgtg

SEQ ID NO: 4298 - DNA, 375 bp, Gossypium hirsutum
  Clone ID: LIB3825-034-Q6-K6-H8
tccggcgacttttagtgctctgctactgccttgtacctgagcttgatgcttgtttgctcactactttctttctttttcaagatcatactgctgggccatataaagaaaagggggacctgtggcaatgttcactgatagccacggcagccctataaatcaataaacgtagggaatcattagagaacctttttattaaatagaaaattttttttttcacaaaatcatggtttatcattagagttgatgacctttaattaattcaaagtaaaaagatggtgttaaaaagaaggagggggttccctttaaaaaggacatttttttcactcctaatattgccaataataatttattttaaagaaaaacaaaaaggcagtt

SEQ ID NO: 4299 - DNA, 595 bp, Gossypium hirsutum
  Clone ID: LIB3825-034-Q6-K6-H9
aacatgtttgcctttcatttctttctctattccttgttgcttcctcggcagcctctcggtttctgagtaatataaaaaagatggggctgtcttttgctaagctgtttagtcgactgtttgccaagaaagagatgcgaattcttatggtgggtcttgatgctgctggtaagactaccattttgtacaagctcaagctcggtgagattgtcactaccattcccaccattggctttaatgtggagaccgtagaatataagaacattagcttcactgtttgggatgttggtggtcaggacaagattcgacctttgtggaggcactatttccaaaacactcaggggctaatctttgttgttgatagcaatgaccgtgaccgtgtggttgaggccagggatgagcttcatcgtatgctaaatgaggacgagctgagggatgctgtgcttcttgtgtttgcaaacaagcaagatctgccgaatgctatgaatgctgctgagattactgataagcttggccttcactcccttcgtcagcgccactggtatatccagagtacttgtgccacctctggcgaagggctgtatgagggactggactg

SEQ ID NO: 4300 - DNA, 328 bp, Gossypium hirsutum
  unsure (1)..(328): unsure at all n locations; Clone ID: LIB3825-023-Q6-N6-A1
aaaatactaatacttanaaggctcaattataatgttttgaagtctacttgaaggaccaatttaagaatataaacaataacttaatgagtttagcgaaattatcccttagtaatattatcaaatacatgggttaagaaaactgatatcagttggaccaagtatttgtaagaacaaactgatgcaaacaagtacaaaattgaatctacaaggaagatattttccttctacttgttgtcgaccaataatgaggagggtgtcgataaaccgactattcgatcacgtaaccgatgaagaaatcaacaatggtttcccttaaaaggttttttcg

SEQ ID NO: 4301 - DNA, 554 bp, Gossypium hirsutum
  Clone ID: LIB3825-023-Q6-N6-A10
aggaaaattcttttgacaaaaggcctactaaacgaaatgaattacagaatacaaagatgaaaactgtacataagaatgagaagaaaggggcacaagaaaatgatgttttggaatgatttttcaccaactacccctcttaacccaagggtagctgccaaactaaaattgacaaatcattccaaaaacatttacaaccgcatttggctaataatatcctactgctccccactaaactcaacccctacaacaatgtcctcatctatcccacattgcctggaatttcgcaggtctatgcttcaaccattgcaccatctctctgtccagtgaactattgttcaaaactgcatctagcattggactcccaaagattctcggactacctttgaatgtccatattcggtccttcggccatggtctctgagcttgcttctccatccatgacagcataaatttgacagtctttgggccataaacacgatgccttgatggcttctgaaccttggcgtagaagcaaccaatgtcaggtaatgataagcaacccctacttgctctaa

SEQ ID NO: 4302 - DNA, 553 bp, Gossypium hirsutum
  Clone ID: LIB3825-023-Q6-N6-A11
cccatcaaacgatgccatagaagtgcactgttcagcaccattaaaacataaaaaaggtctttatacacaaagttagtcaaatttcagtgtcagtgtctgatatgttcgaaagcaaagaaagccccaaagtaaaatgtccttttcatacaaattgcacgcttatatatgaaataaactccacagttctgtcactcttcccccttcaagttcaccactcggatttgagtgtcaatgtcagatacccttatgcttctcttcaattttttaaaaagtttttccatatatttggtcggtcctgtaataatcggggtttggaacatatgttgtggcattgagaagaccatagttgccaccaattagtgtttgccgacaatatactttagtatggtacttggaagccattccaagctgatctaaataccaaaagctgttgacgaatgtgtcagacacgtgaggaccgccgctgttataagccccaccggattctccgacccatgcggaagaccaaggaccatgcgtctggacggtgcgtgcaagattgatgaaagtattt

SEQ ID NO: 4303 - DNA, 551 bp, Gossypium hirsutum
  Clone ID: LIB3825-023-Q6-N6-A12
aaaatatatacaaataaataaataaaaactcacagtccattacagtccaattacataaacaaaatagtccattaatcaatgccctacagcccaatatcaattactagcccgttaggcccagtattttgagaaaataccctagagcttcctcctcactttcgcgccgcaaccacagacgagccccaactccagactccgtacaacgcttccagcgaccacgccaagcctccgtacgccagctcagctcccgtacacacgccagcgcacctgtacctgcgaagaaagggacaaaccacaacagccaatacgtgcaagaaaacaacagacaaaaaaaattgtatattttattttcgtttttttcttttctcttcttctctcggttataaagccaaaagagaatcacttgtaatgggttatgcgaaaatacgcaacaaaaacacgaaaatagagataatatacatacaatagcaatcgaatacagagaagttgaatattcttcaaaaggtggttccctttttttatttttacgccttttttctttttattttgaa

SEQ ID NO: 4304 - DNA, 561 bp, Gossypium hirsutum
  unsure (1)..(561): unsure at all n locations; Clone ID: LIB3825-023-Q6-N6-A3
aataataaaatgggaatgcattatcatggnaaaaatccatattaacacaaaagactttcacagctctaatttgcattctcaagggggggaatacacatggtttcaaaaagcaacaaaattcaagtataatgtcagaaatggcgtgccccatatataattttcaatcaactatgctatagagaacctaaacatcctccaatccactgaaactcaaccatcatgactcagcagtaacaaaacgcaagtctcacatggtagcttctacttcagggtcagtctcagccgacacagtgggtgtgttgttgctgcctcgcaatcgtgaggatacattatcgatggccgcattgagttggctgattttttcattcagggtctccctggttttctctaaacctccatcgtagtataatggtcgctttgccttacggaatccgtattcatcttcatttagaagggatcttctaatctgaggtgcaaaaacgtatcccaaagttccgaatatagcacctcctaaaagaaaaccagtaacaaaatcacttnctccacccctgctgccattgc

SEQ ID NO: 4305 - DNA, 552 bp, Gossypium hirsutum
  Clone ID: LIB3825-023-Q6-N6-A4
caacaaaaacttctaaaaaaaataataataattaaagatttcacatagatgttacaaatatgcaataaccctagtcaaaatccccacaattaaaaacacttcaaaatcgaacttttttatttcaaaaacattacatgcttccattgacatttaatcccttaggaacatcaaagatcaacaggttgttgctgctgcaataactatccctttcaatatcttcagtactgctaccattgttcaaaggagtcgagcttgaagatggtgtggataaaagcgatccaaaaggcaccaaatttggtattttctcagaaaagtacatacctgttgcaggttttgatcacctaaattaaacccatggttgtagccattaatgttttgcatggtggtcggcaaaaagccctttgaatcactaacattattgtctatttgccacaaatttggcagaccaggatttgcagaaaactggttcaaatcagcttgtgaaacctgggttataacaggaacctggtttccctggtaaggttcataagggttctgtatttgttggatatc

SEQ ID NO: 4306 - DNA, 476 bp, Gossypium hirsutum
  Clone ID: LIB3825-023-Q6-N6-A7
ttttttttttttttttttttttttttttttgttttttttttttttattttttttattttttttatttttctcattctctttttttttcttccaaccagaaaaaaaaaaaaaaaaaaaaaaaaaaccccccaaaaaaaaaaaaaaaaaaaaaaaaaaaacaaaaaaaaccaaaacaccaaaaaaacccccaaacaatttcacccccccccccccacaaaaaccaaccaaaaaagggcccccccccccacccaaagtccggcccccccaccaaaaaaaaaaaaacggggccccgccaaccccccaaattggaaaaaaaccccgaaacgggaaaccgcccgttaacccccgcccccaacccggaggcaaaccacccccccctatagccccccaaaaaacagcccggcacaaccaagggcacaaccctctcctaaaagaaattgcttttcggtaaccagtccacaaaacaaaccaacctt

SEQ ID NO: 4307 - DNA, 552 bp, Gossypium hirsutum
  Clone ID: LIB3825-023-Q6-N6-A8
ccacaacatcaattgttgtattcttttttattaaactacctgcaaagatgggggaactttacaaagcatgaaatcagcccattatcttcactattatactcacctgaaagagcaaagcaatggtagaatgcaaggaatgaagaaactaatgactactgttaaagaaacaaagaaaagcaaaaaacaaaaactaatgactacaggcaaatattacatatgaagcacatcagccccataatagaccttgttcgacttccaatgcactccaaaggaatttcaccaacatctcacaaaataaaataaaaaggaaaaaaagaagtttgtgtcacatacagtaaagcaaggctgcctgaaatacccagaatgcttatttcttaacttgcctgaccagaagagacggctgccgtcatagcatcttcaagtttaacccttgcaactttcgaaccatcagaagcagaacttgttctctcaatggcggtgccatctttattgccatcatccaagcacacaacttgagcaaagctctttgacatctgcttcatgaagtcgttg

SEQ ID NO: 4308 - DNA, 537 bp, Gossypium hirsutum
  Clone ID: LIB3825-023-Q6-N6-A9
cgaggagaaggcaattttatttaagagaaatagctacagcacggtagaggaccccaattacgtattaccactagactagactagactagaaagccatgaaatctccctcaatacaataatgacttttaatatgatggcctaataaaataacctgaagctaaacttagacttgaatttctacgtgccatctgtacatctcctccgatggcactggcaatgtaagtgtcaccaatccggtggctgagtcatagttgaagtgagtgtcggcattgtccacacaacacttcaacggatgctgagatgagtatgcaccaaacctcccacaaccccggactttgagactgatcgctgctgttggattccggttgttgctgagtgaagttgtcaactccgaggaaacctcgccatcaaagaactgcagtttctcattggatgtcatttgtacttcgaacttctccacggcaccgctgctgttgaacatgtcaagaaggccgattggtgcaaatgaaatggtgttggaaatttccttgacgggac

SEQ ID NO: 4309 - DNA, 569 bp, Gossypium hirsutum
  Clone ID: LIB3825-023-Q6-N6-B1
tcgcgatctacaacgactcttctggtatttgctgcaattatactaatcctatacaaggaatggattggcaaggcgttatctgcaggcttgcttctggtggtagcaaatatgatacgagctagacaagaaaggctcaaggacaaacaaaaggaaatagttgtgtgcacaggttccgaccatactctgagtacgagagagaacatagtttcagctcaatatggatttttgacggttcgtgagataataaaggaagcgaatgtaacaatactgaaattgcattcggttctggtttcaagggcacacaagcatgcaaacacggtaatgctcgcaatgatcggattggcaataatatttgcagtgattcctttcaagtatctcataattgctgttgtgtttcattccatgatcacaacatcaccgctagcaaagcatatggtaaacaaccaaggaggagatcgtgatcgacgattgaaagagtggtgggaatcgatcccgcctacccctattcgggttattaacgaagcccctgtcagtccgaaatagtcgtgcatttttggtgtaaaatgctc

SEQ ID NO: 4310 - DNA, 538 bp, Gossypium hirsutum
  Clone ID: LIB3825-023-Q6-N6-B11
aaaacgaacaacccaaacaagggaacacaatttattaacccaacaactgctaactgttttgaagttgttacgcatcaacatgttgcactaatattacttctttaacatacgtaaaccagactgtccttctgattatcattattagataatgaacaaagcgtgaagcagaaatttattatacccttcttccaccatacactacgtttgtcttgtacctactacatctttgaccagaatcggctcaagctagcttcaatcgatccgtgaggttcgtccgtcggaagatatacatcatcattgaactttacaatgctgccgtgatccttgcttgatatattaacaggtaagaaatggatattcggcatttttagtttaactgatgatatgtcaccaaacctgccaagtacagcctttgccatctgcaaaagagtgctttgaacagatgcactatatacaccccgttcaggaggaccaaagaaagtatcaaccaaagcctttttcacattcaagtattgctcattgaagtagagcgactttt

SEQ ID NO: 4311 - DNA, 564 bp, Gossypium hirsutum
  Clone ID: LIB3825-023-Q6-N6-B12
aataataaaaatccaataaatattatttattaacagtccatcagcccattttacaatcctaaacctaaaattaaatacataacccaagacccaattaaaatccattagctaaaaccctagcccaaaatacccgtcgcccaaacggcccaaaactaaaacaacttcagctaaacagaaacctagggtttccctagtagccgcaaccctccagcatggcccccgtacccgcgccaacacagccccgtacgcctcacgccaagggccagcgcacgcccgtactccgtacctgcaaacaaacgaccacacagcagcaacaaaaacaacaaaaagaaaaattgtttttttttctttatgattcggctataaagcctatggtttctgattgtaaaaactcctttttttacacacgggtaatatacaaaaaagaatagcaatcaaatacagagaagttgaatattcttcagaggttgttcccttttttatttttacgcctctattttcttttttattttgaaatcaatcataaaaacagaaaaaagaaagcgaaagagaaggttacctcgc

SEQ ID NO: 4312 - DNA, 553 bp, Gossypium hirsutum
  Clone ID: LIB3825-023-Q6-N6-B2
gttccaatgtaatctgtgattcagtgggctcgatatactggtagctcaacttataaaacgtttgttacaatgagcaacagagaacaggcgtttagcaatggccatgggcaaaacattatcgtctagcctctttcggctaaaggttagagaaatgtagcaaaaattgtgagggaaagttaaagaaagattcagtggtgtggtggagtggagagaccaccaagcgcatgtcctacagcttctctgcctgtagaatcctgagttgccacattaaaggctccattttcagcagtgtctaaagcaacatctgcatcacttggtgccccagcattgcctgttcggactgggcggagtagaccttgcaatctcaataaatagctctggctgagaggctgagttctcacgtattgggttgttgtgactatgctggcagatgaccgttccgaatcagcacttcggagattggataaggcacttaagtcaagatttgggaacacagaacatcggcatcgaggacacttcacattcagtctaagccactggtcaatgcactcta

SEQ ID NO: 4313 - DNA, 508 bp, Gossypium hirsutum
  Clone ID: LIB3825-023-Q6-N6-B5
ccagaaaaaaccagattcaagtacccaaatcataatcaacaaataacataagctcattggcacacaactacacgcacattaaatgccaaatccaaaactaaacataaaccatagaaataaagctaccaaatacaagataaacaccacatcatgcaaatgcagactaggctatacatagagaagttggagcataaacaccaactctaagccactttcccatgcctacccatgttcattcttgcacaatactcgaacaagctcccatcaaaacatcttcgtactgcttctttcgacaacataccgtcctcatcccgtgccagaacatatagaacaccccactcgaacttacccgcaagccagccgaagaggtcgaatgcgtctcggttcccctcagtcattttccaaagttctcctaatgtgaatttgtcaggtaccgtacgcgcgtatttgctaaacatgctttcgatgtttgcaggagtaaacctcccttcattatcataaatacccg

SEQ ID NO: 4314 - DNA, 546 bp, Gossypium hirsutum
  unsure (1)..(546): unsure at all n locations; Clone ID: LIB3825-023-Q6-N6-B6
gaccttaaaagaanaaataaaaccaattctacttagctgaaatgaagccaaanaatatttacatctattcctcgtaatgctgctcccaaactacaacaattcccggggccaaacccatattactcaaatctctcctaacagtccttcagaaccaagtgcaaacaatcctaaaactcatttcgactatctggtatcgatatacagatatctcgatatcaaaactggcacgaagtaccgagcctctgtatctgcttctgacctaaagtaaccgattttcgtttttcaaatcccgggtagagcaactcctggaacttctctaggaaaagattccattcctcctcattcatgtccgccagcttcacaaagctcacatttcctgggagctgctcatttgcactcctatgcccagatgagttattaaggtaaccattttcttgctttgttccagaaaattttgaatacttctggctcttgtcacctaagctggtatttttgaatgacattgacagctttgaagtggatgggatcctttcaagagctttgaaa

SEQ ID NO: 4315 - DNA, 530 bp, Gossypium hirsutum
  Clone ID: LIB3825-023-Q6-N6-B7
ggaacttgagttaaggggatgtgcttgatcgcctttaacttataaattccactttatttgtacataaaccacatttttaacaataagcttggattttgtacaccaccagaaaacaccatcaaatctcaaaactccttctaccaaattatccaaatcattctttacaattgagttacgctgaatgttcttattctttactaaattaatcgtctttgtcatcgtcctcatcataattgaatggtaatggtacagacttgaatgctcggtacttcccaacgttgttcaaatgctcattttccaacctgaagaaattccatatgccacgacgaatgatctcaagactagccacaatcgtcgtcagggtttgtggatgcaatggcaactggaaattcaacactgtttggagccaggcaaatctgagtaaaatattcaagcccatggctccaaaatatactttcttgtgaggaacaaggagtttgtctctcagccaacggttcttggagtgcctatttagaagcccccagtcataa

SEQ ID NO: 4316 - DNA, 499 bp, Gossypium hirsutum
  Clone ID: LIB3825-023-Q6-N6-B8
atcccctaacaaaatgggcagatattttagccattttgagttcttacagacaggacacacgtttatgcagaaggggggaaggacaaaaagtttaaccaaagggtaatatttttttaactggttttttctgcattctaaatcaggcttccgattacattttgggtaaaaatagaatggggcaaaaagaaaaagcaaaatctcatgggaaacccacaaataccaattcccccttaccctcaaaccctgggatttctcgtctctaggattttgctagggcttgacccatacccccctcctggctggaagtttcatctcatcatcgtttattgcctcagacgacaaataaaaatgctcatagaagcgctgatggttatactttcaaacattttaagggtttagtcgcacttgatgtttctgtagatcctccttacaaacagattagaaccgagataaccaacggccccacagagaattcccaaaccaagacaaaacatcaaag

SEQ ID NO: 4317 - DNA, 354 bp, Gossypium hirsutum
  Clone ID: LIB3825-023-Q6-N6-C1
cccgaaattcggataaaattccattttttttgaaaagggggttaaatttaagatcaattttttatttaaaagattaaacccttaaaaatttttaaaatttaatttttaccgctttttggcttttggaaagttaacaaattggctgataataaaatttaatatttggttttaaaggtaaattttaatgggggggttgggggttaaaaatttggaaaaataaatccttggccttgaaaatccctagggatatagcttggggttaatgacctttttcccaccttggggaaaatgttggataatacctcccccccgcttgggggaaaaaaagggaaaaagagaaacccaccctttcca

SEQ ID NO: 4318 - DNA, 492 bp, Gossypium hirsutum
  Clone ID: LIB3825-023-Q6-N6-C10
ccctcacaatattatatcacaaaagctggggggaaagctaataaagccttctaagaatagcatttattttttgccacagttgaaaccatggcaaacagagaggacaatgataaggatcaaggcaataagtattcctagaacaatcagcttgatcttcatgttttggagccacatttttcttcggatttttgtccctgtacttcgaaaggcttgagcctgattatgaaaattctcggtcttatccactagcagctctatcttttcccctctatctaacaccttttcgatattctccatcataacacctttaacttcaaaaacctgagctttgaccttagccagcttgcttatttcttcaggatgctccatacagtattgcatatgttctttcagttttggtccaaattccttgttcaggctgttggcaggagctgtaacagccttcccgttatcatatttcgacacgaaatcatccttgatacgctccaaaaa

SEQ ID NO: 4319 - DNA, 533 bp, Gossypium hirsutum
  Clone ID: LIB3825-023-Q6-N6-C11
gaaaacatgttaaataccttctgacttaagtttataccaaagatgattaagtggcagtaaagcaagattacaaccttaaaaaactaaaaaactaaagcttaaatcttccagctgaacctgaaaataacagtctgaccttggaacaaaacacaaaaaataaagcattcaaaacaaggtagtcgccaactgcttagataattccgattttgtttgcaacatccaaggcatcgtaatccggcgtcaacctaacatatgccttctttgtgccatcgggcctgatcaaggggttcactttcttggcctgaatatcatacatcttcttcacagcatctttgatcttcttcttgtctgcacggatgtcaacaataaatactaaagtgttattgtcctcgatcttcttcatggctgactcagttgtgaggggaaacttgagaatctggtaatggtcaagcttgttccttggtggggcactaatgcgtggatactttgggttcctatctttcttcaaggtccttggcctgtgaaacgtaacc

SEQ ID NO: 4320 - DNA, 557 bp, Gossypium hirsutum
  Clone ID: LIB3825-023-Q6-N6-C12
attaaacaaattgttatataacgggcaatcatttacattactgaactgttactagatactatatttttgattgaacagttaattcttcaaagacactctacaccatatacatattgcgcgactatggtttaagaaaagagtggtccaaacatgctacgtattgccaacagagttgcttttgttcacgcctagctccgtaggagaatttgtgatgctgttaactgagccaagggtctggaagctcaactgagggctagctggacaagcctccggattagcagcactcagcgcatggatagcacctgagctcagtcgtggactcataggagtcctttgattcatttcttgaggagtcatggcagtctgctgctggaccagctgctgttgctggttcaattgtgaaattccgactgttgatggagagactgcttgtgacggtgaaacaacagcctgtagtggcaaggtagtttcttgctgttcctgtaattgctgcagctgcagctgctgtaactgctgctgattctgcaactgctgcggctgcaattgcaattgctgct

SEQ ID NO: 4321 - DNA, 534 bp, Gossypium hirsutum
  Clone ID: LIB3825-023-Q6-N6-C2
agacaaatggggaaaatttactaggcttgcaaaatatataaaattgttggggaaaattctagtacaaggcatataataataaaactgggagattcaacatgctaattaattaagattttgtagcagaacaaagcttaatctaaaccaaaaccatttctttttggtacatgaccaaaaacaattaaacatagctaattggaacctccaacttcattaatcctcatcattaaaaggagtcttccttcctgtgccagcagcagcaaggtttggcttattataaggggttccacgtccacctttgccaccaccaaaccgaccaccaccggcacgcctaccaccgggggcaccaccattcctttctccccgaccaccgcgacctccacgggcactgccatccctttcttcactccattcaccacttctaccaccaccttttccactgccaaaatcgcctttaggttttgcctcatccacgggcaaggattgattattaagttttgatccatcaagttctagagctttgttcaaactacc

SEQ ID NO: 4322 - DNA, 522 bp, Gossypium hirsutum
  Clone ID: LIB3825-023-Q6-N6-C4
gaaacttatactgtattcaaactgtaataacagattttgcccgggtacaaataataaagggccccaaataaataagtagtccatttttttacaaataggcctatagagcccaaaacccgaaatacaacaggggcccaaagctcaatggcccaaatcatttgcagaaaccctagggtttctgaagaagacttttgcgccgcaaccgcaaccatcaccaagccgaatcttcatgatcttcacctgcaaacacaagaaaggaaagaaaatcaaaccaaatcaaatcaagaatatttcttgtttctatttcttgtattttcattcggctatataaagccattgttaatactgtaaccaggagccgaattcgaaatcataaaaaataagtactttcaatcaaaaagagaactcaatacgaaagcaaagatcagttcaaaggtttattttttacaggtttttttatatttgttttattttatctattgtttttttcttttctttcttcattcgtaaaataaataaaat

SEQ ID NO: 4323 - DNA, 516 bp, Gossypium hirsutum
  Clone ID: LIB3825-023-Q6-N6-C5
cacaaaaaaacatccataaactctttccaacggggaaaaaaaaaagtctataacgtcctcgcatggaaacaaaaaaaaagggctccagttcacccttatttaaacaatgttcaaaacaaatgtcagccgccctcccaaaaataaggggttaaataaagaaaaagaaaaaagaaaggccgtcaaaatttaagcaagtttaggctgaaaatctcttctaggggctcttttaactccctatttaactcctaaaagtcctcatttggggtaatcataactcccaaagggaaggagtttaccttcaagggattaatattaataaatctatcggcgaccagcccccgtttttttagcagcagctgctgcaagtgtaggaaaatcctcatcatcatccgaatccacatttccatattgccaaattccacccctaccagtttttgcctccttctgaaagttctctaagttgtcaatcaccgattttctatccttggattcccatctcttccttttctccaacct

SEQ ID NO: 4324 - DNA, 504 bp, Gossypium hirsutum
  Clone ID: LIB3825-023-Q6-N6-C6
aagctaaaaattaaaagcggggactttttatttagttttcacaaagcagcaaacagctcacaagcttgcaactcaatttgaagggaaaaattgcccaaagttcgatacaaaacataaaacttttacatttcctaccaaaacaacaaacatttgatcttttcacagaccatacaaatcaaaatttctaccggatttaaaaaactagatttgtttttggggaaaactacttttaagcctcacaccaaaccaactggtgaacaagtccgtaatatcaacaggctcaaggggtaatttaaaaaaacgatttttttacaatctatagtctactaaactattgaggggatcgtaaagtcacttactatagcagttagcaaattctcgaaagcaatttcatattttaaccatgctaaacaaacaagttccacccacctaccaaaacccaaaaggaccttgcatttataaatttgagttgctggcctgggcttttcatttatttctggcctg

SEQ ID NO: 4325 - DNA, 518 bp, Gossypium hirsutum
  Clone ID: LIB3825-023-Q6-N6-C7
aagcaacccaaaaacaatacttatagatagtgactgctaaacagccttcaaaacgagtgcatatcggaacaaagttccgagttccatctcactttgtaaacactagaaactcaagctcttctataagagcaagatgattcaaaacaaggtccacaagtcttcataacatggcaataaggtcgtatataaaaacattggaaacatcttacataatcagaccataactaactcatcaaatactaaatgcggcaaagtagtactcgcttcacacagtaccaccggtttggtgaagcatagcatcgatctcatcaccatcctccatctcaagctcgtccggagtttgctcacctcgcaggcggcgaccatcgaacaagaaggcaatcgagttgaaatccacagattgtcggtcgcaatatgcattcatgagcttcttcaattgtgtgcttcttttgatcctgaagaaaattcattcccgtcctggcctttgactttgaggttgatgtgagcggcggactgat

SEQ ID NO: 4326 - DNA, 539 bp, Gossypium hirsutum
  Clone ID: LIB3825-023-Q6-N6-C9
gtccaaacaacaattttcatttatgaaagcttacgaaagagagattcaagtttttttggcattccttgcatgaatccattggaatataggatacaacaaaaagttcttttttttggttcttttttcaacctatggtttattcatatgagccatacatttaaacctacaaaaaatttactcaagtttcttactgcaaaaactctcttggatcggggacataaccggtcaaagctgatgcagctgctgtatacggagaagcaagatatatctggccttctttgtgccccatccgaccagggaagttccgatttgttgttgagacacagacctttggttcgttcatacgtgcatatgtgtcttttgggccacccaaacaagcaccacagctagggcttgcgggtgtgtcacagccagcttcttcaaatatctgggagcatgtcttcccaccagatctgggtacaggggagagtatataagtccaaccaaaccttttgtgtagccgggacaaggaatgtaggaaccttgaccttctttcctga

SEQ ID NO: 4327 - DNA, 545 bp, Gossypium hirsutum
  unsure (1)..(545): unsure at all n locations; Clone ID: LIB3825-023-Q6-N6-D1
aaaaaaagatttaactgtggtaatttttattggtctcatatggattcagagttatgtcggcagtgaaatgcacaggacagcttacttattactcatcaagnagtgacatgcatatatatatatatttatacccaatgggctttgcttcattatagacattacaactttgtgctctatactcttaacatgatcatctcagtggtcatctaaagctttgcaatgacatatggtggcaagttgaatttggatctagttggaggcttaagatcttcccaatcttcatccttcaccttggagaaatacctgtctattgtagtatcagcaatatgctccaatttcgacggctcccactttgggttcttatctttatccagtagcatagccctgcaaccctcgaaaaatctttgctgaattctccgcgcataacatggcaaaccattctatattcacgagcgaggcatgcaccgacaccttgaactcttcctactctaattgatctaagagaaattttaagactagtcggagaagcctttttcagtgtttga

SEQ ID NO: 4328 - DNA, 536 bp, Gossypium hirsutum
  Clone ID: LIB3825-023-Q6-N6-D10
aattattctttatctatcacattcaatcaaatatatattattacattcagacacttgggcaaaaacattacttgaccagaaatatttattcataaaatactgctacaagcctacacaaacagtacaaaatacaacactactagtaggaatcccctacattttttttcttctttttaatgttaataacaacaagatttagatgcctaatcatttagttttggaacttgccaagttataacttactcatcctgacgggtcccaactcttttgccttggctcttagcacatgcttctgaatcttacctgtggccgtctttggcagcggaccaaatatcactgattttggaacccagtatgcaggcatcttggacctgcagaacttcattatgtcttcagctaaccgctgttcatcggatttgcctaccccaggcttcaaggtcacgaaagcacaaggtgactctccccaccgctcgtccgcccttgccaccaccgatgcctccattactgcagggtgcaaatagagattgttttccact

SEQ ID NO: 4329 - DNA, 458 bp, Gossypium hirsutum
  Clone ID: LIB3825-023-Q6-N6-D3
aaaaaaaaaaaaaaagttttttttttccttggccccaaaaagacccaaggggctatttaaaaaaaaaccccccgttaaaattaaaaacaacccccaacttgggatttttccgggatttaaaaaaccccttaaaaacaaaatacgggggggtttacatttttttcaggctaaaaaaagggggctttaacccctttaaaaaaaggggaaattttgttgggccaaatgccccccagtgaacaaaatgaattttcaaattttggcctcctttgcccaaccccaaacctttggaaacccttttaataaaaaaaaatttttcccttttcccaaaaacaatttgtaccccccttggattttccctttaaaaaaaaaattttccgttaacccttttaaaactaaaaacgggggttttttttttgaaacccgttttggggggcccccccattttttttattttttaa

SEQ ID NO: 4330 - DNA, 514 bp, Gossypium hirsutum
  Clone ID: LIB3825-023-Q6-N6-D4
aaaaagccaaacgacaacaattttataaacctagtgacttgaatgaaaactttcgaataatacattataaaaccaacactggaaataaaacatcatctacaataccttattgaaccatttcccttaaaaacccacagggaaaatgacgattatgattatttgcttatttagcaatggcactattttttttttcactcaaaccccatagttctaagatttcatggaagcttcatcaaagcttaaaaaaaacatcctttggatgatgaatgacaatgtaattataagcatcaagtgtcaaaaactcatccaaagttgaagcagtgcattggcgagtaaaaatcttgcatgcttctttatacattcctttcttaaacttcttttttccgacctcacgttcgatccgagccatttttttttaaaccactcgcccgaacacatggttcactcgaaccccaagtccatcaccgtctaattcaacaccatatttcaaccactgccagatttgaaccctact

SEQ ID NO: 4331 - DNA, 556 bp, Gossypium hirsutum
  Clone ID: LIB3825-023-Q6-N6-D5
aatatagtaagtgagttgtggctctctaaccacttcacaccaaagtatcattaccttaaaaaacacagtttatctaatggctaaacatcatgaaataaaaagaaaacaagaccacaccaaaggcagaatggcaaaaggacccaaatcagaaaccaccacggaggcgaaggacaagatgcagagtagactccttctggatattgtagtcagctagggttcgaccgtcctccaactgcttcccagcaaagatcaacctctgctgatccgggggaattccctccttgtcctgaatctttgcttttacattgtcaatcgtatccgagctctcaacctccagggtgatggttttcccagtcaaggtcttgacaaatatctgcatccctcctctaaggcgcaaaaccaaatgcagggtcgactccttttgaatgttatagtccgcaagagtcctcccgtcctcgagctgctttccggcaaaaatcaacctctgttggtcaggtgggataccctccttatcttggatcttggccttaacattatcaaccgtgtcggagctctc

SEQ ID NO: 4332 - DNA, 545 bp, Gossypium hirsutum
  Clone ID: LIB3825-023-Q6-N6-D7
aatgatagaactgcatcaaatttattcaaagcactgtaatgtaaacaactggttccatcaagttgcttccaaaagggaaaaaaagtaaactccaaatccttcaaactcagatgcgaaagtttataacaaaagccaaagcattggaccaaacgttatgttttcgacatgccgccattatttaaccaaatggaaagcgagtccaggtgctgctttcgacatcacaaaaagttctttttaaagatcacctccggcacttgttttcccaccaatccataaatttggcttgtgcagccattgtgtccaacctgtagagttgatatgcgtgatttgcgatttcttgtccaaatgtccaaccaaaaacggctcctcctacgaaagacagtccagcaccatgtaaactcttcgagtatttccaggcaaaacctgcagttgtgatagctccgattgcacttccgtataaggcgatgttggctgcttccctggcagtcttcaagatgggtccatgcaccggatcagaagcgatgaactcgttaacatcggattca

SEQ ID NO: 4333 - DNA, 523 bp, Gossypium hirsutum
  Clone ID: LIB3825-023-Q6-N6-D8
atattccaagcccttattatcaaaactaaatacgtacaagacccacagccccaaaccaacgaaaacccacttagcctcatccggacgcaaccagttaactcagtcaatttgaacctgaatcacatcattcctctcctcctccttcatctttggaacaaccactttgagcacaccgtttttcatctcagccttaatctgggcagtcttggaaactttttcaggcaaatggatcctgctggggtacctcccgccattttcctcctctttggattctttggcctcgcctttgatcaccagagtgttctgttccacagacactttgacttccttttttccaagccctggcatatcaatcctaagggtcatggagtcatccgtttccttagcgtcccagcttcgggggagaccacctcccatgccacgggaagcggagagaaatgggctctccatgaactgatccatcatgttcaggacttggctcaggctccttgttggagcaaaaggatcgcggacgcgtgggcgg

SEQ ID NO: 4334 - DNA, 522 bp, Gossypium hirsutum
  unsure (1)..(522): unsure at all n locations; Clone ID: LIB3825-023-Q6-N6-D9
gattaataccctngaaataacagtaggttgtattctattaagaaaatttgatggtttggagatctaaatcacattattccaaaaaggcaacgatcattctacaacaacattcttcaaaatgtcataataaaagtaacttaaatcttcttttttcctttttgtttcgaaatcaaatacattcgccaacaaccgggtgatcccgtctgttgatagagctttgaactcttagtttcaataacctcaaatatataataaaaaggaaacaaaaaaaattcaaatacattcaaagcacaaaagttatgtgaaccccaaataaacatctagccatcaacctgagctggatttggattctccgtagggagggattctagattcgaaaccctagcttctaaagcatcgaatttctccttcatatcagatttaagggcgtaacgatcagtccaaaggtctctatatatgaattgagagattgaagccgctgtcaccgaaaaccctaagctgaaccatagcaaccgacttcgc

SEQ ID NO: 4335 - DNA, 521 bp, Gossypium hirsutum
  Clone ID: LIB3825-023-Q6-N6-E1
cacaaggaaagaggagcttttttacgtaataagatccacgtgtcattaaaccaaaagagggaagacagcagccggaatttaaaatccctatttttttaaaggggtggcaaatttaaaacacattttctaagccaatcccatcatatatatgggttggggtcccacgttgtttgttggggcgtgctgggtgcttattaccgccagccacaacggtgggcgctctgagtattgggtttggccgtcgggtccgataacaaggtccttggggttttgggcaatttccactttggtttcagcaatggctcccaatacacctgttgggttttcctcctcctccttttctttaacgcctgaaccctaaactgttttttttaccccactctccatttttttttttacgccctccatgggcactttttggattctctttttttccacctggctttttttctcagtttcctgggttaattcacccggttttggtaggctctggagacccctgaaaggtttttttcggggca

SEQ ID NO: 4336 - DNA, 341 bp, Gossypium hirsutum
  Clone ID: LIB3825-023-Q6-N6-E10
agcatcttcaatcgtaaattgatatattttacacatataaacaattattatcctgctacatttgtcgtaacaatgcagttccatcccactgttaaggctacccaattacatgagatgacctagacaacaactatcttctgttttaaaataaaatttgaaaaacaaataccattttgaaacaaaataattacctggtgtggcctgcgcatcagaactacaactacaacaaggcacttttcaccgtatttgctctttcctttggaagggagatcagtttagaaatctgatttcacgagttttgctccagcctttatacagatgttgtcgaaaggtttcacctg

SEQ ID NO: 4337 - DNA, 519 bp, Gossypium hirsutum
  Clone ID: LIB3825-023-Q6-N6-E11
aaaataaacgaagggaataaattcaattgatggtaattaactttaaataaatatccagagattggtgcttaatttatttttaagatacatctaaccaaatagctgagtctatttgaaaataaataaatggaagcgttggaaggcagcagtttaagatttgggagcgatgctacgtcgaatttttaaatatccaaacttgccaacaccagggggatgaaccttcaaaaatgaagggcaaatatcctgttgcttttttgtacctttgctgaatctctagaatgtgttggctgcttcggagacaatttcttccaactacgcaaactgttccaccagagccgccaccagtaattttagctccatatagagttccatcatcaactctagaggctttaccatgctgcatctcctgcaccaactgtaccagtctatctgtcccatcggaaccaagaccacatgcactatagctgtagtggcactgatacaacagctttccaagtgccgtaagttgctcatttgaac

SEQ ID NO: 4338 - DNA, 542 bp, Gossypium hirsutum
  Clone ID: LIB3825-023-Q6-N6-E12
ctggggaggagaacattctggcgaatttacagtcagaaatgcctataaactattacaataggcaactacagatcctaatgattatttaatgcagatcgaaacaaaaaatttctaaaggaaattatggagtctacgccttcctttaaaaattgccatcactatctggcgtctttcatggaactttatccctaccttaaagaatttaagactaagaagaatggcttcagatagctcatgtccccagtgtcgaagtgcagaagaagatagcaactaggtttttaccataggcaacagtcaacagtgtcggcttttttgttgtgctgcatggatgatatagagctccaggaaccaacttgttcatgaggggtgtaaacgggtcaatttgcccaggtccataccaaagccaaaataactaggtgtagccaagctagcaaaccctagcagcctccaacgccgactgccctctccatatctccatagcagcaccgtacggcctccttgcgccataaccacgcccacgcctctacgtcaacgagccgtgc

SEQ ID NO: 4339 - DNA, 310 bp, Gossypium hirsutum
  Clone ID: LIB3825-023-Q6-N6-E2
caacatggcatgcattcaaataatccaaagtttgaacactaatatctgacacttctaaccaaaaaaagtaaccctacgaagcaccaagtttagccattatcttggttgcatgtttacggctgaaccgaaacgagacaagtcccgagatcaatggaaacatgaaaaaaaatgcaacgaaaatgtgacacataaactgcatccgacgaacaaaggaacagtattttactctctagtcttacccgagtatggggtttacttataattcagatgttgaagtttttaactctcgaaactggaccccacgcgtccg

SEQ ID NO: 4340 - DNA, 501 bp, Gossypium hirsutum
  Clone ID: LIB3825-023-Q6-N6-E3
gggagaaattatttctggatttaaactacttatcttggcctggacatcgggactataatatttataggacctacgagtaacggctcctataacaactgggaaacagactaactggggatcaacgggtcgtataacaacttcaactaaccaattcattaacatcctagctctgccaatggcttccttagccacttccctcactttcaatacattcatcccatccacatgaatacggggcatcccaaaagccgggcctttattataaagttaagggttagaagtagcccttaaatgagacatctcaatagcccataaattggtctcaacaacaaacacgaggggtaatttccacaacgctgccatattcaaacactcaaagaactggccattggtacaaggcccatccctgaaaaatgccaaagggacgtaatcggaatccgctttttttttaaaaccttcttcttatacttagagggaaaagtagcaccgggggctatagaa

SEQ ID NO: 4341 - DNA, 558 bp, Gossypium hirsutum
  Clone ID: LIB3825-023-Q6-N6-E4
agtggtgaaataatgtgaaagatgcgaaattgtcgaatagtgatgaagaatacaaataacaaacctaattgttttcttcccaactgctataaaaaacaggcaccatcttttggttttccctatagtaaccaaatttcagttatagaaaaggtcatagcaacatacttttttttaccatcatattagaccacttgcctccaaaaagcacatttcaacttggccacaacctgtagtttggtgaatgttcatcgttttcatactttcagagcagctttgtgaaccatggtttctttgtgtatttggtggcaactcttctcaacaagatcaagaagtttttccaagttcgaagcccacgaattgagaatttcattgctatcctttgctacctggaagcagactattcccattggtcggtcaatctttgccaccagtgccttggagacaaccatttcagaaagatgcttctcagcttcctggatagtgagacacaacaactctgcaagtctcttcaatgtaatcctcgagtagtactttgaaacaacaaggatattatgttca

SEQ ID NO: 4342 - DNA, 548 bp, Gossypium hirsutum
  Clone ID: LIB3825-023-Q6-N6-E6
caacttaaacatattggaattgattaaggcatcaaaatcacaaaaaataaaaataaaatcttacaaatggacactatttcttcaaaatcacaaaacagtccattacaagccctaaaacaacaaaaaacaaaagcccaaataaattaaaaccctaacagcccaaaaacccacaactttaactttcagcaaagaaaaaagaaaccctagcctacaagctgccgttgctcctccccaacacaccaccacagccacacgcgtttgacgtttctgttacctggtggtcgatcctccgactccgcaagcaaccgaggtcgtcactgtcgaggaacagtgacctcctttttatatagaaaggtttttttagaaccctaaaaagtcgaaaggttttctctttttttctggcgacttttgggcaatcttctaaagaaactgaccccagatcggagtttggggagtcaaaaagctaaaaaggccttttttttggaactccagccaccgtgtacggcagcggacgggaggtggcccgatgaccggagttcgaccggacc

SEQ ID NO: 4343 - DNA, 550 bp, Gossypium hirsutum
  Clone ID: LIB3825-023-Q6-N6-E7
caaataagttcaaacaccatttgttttattcgtctcttagtagcacaaacacaagcttacagcagaaaataagctggttcatcagattagtacacaatcacagaatgtatcactctttagttaagaacaactcatttttagaagagttcatctaattgtaaaccctaaataaataaataaaaaactaggacatcatcttgaaactttatcttcaacacttctatattactacaagaccatcatgtatttttattttctcaattttccgtttcgctgacaccatttccagaccaccattgtgctcttctgatttcccttgctttgttccatttctcgatgtctctcaaccttacgtacatctttcgaatacgattaagtttctgagattcttgagtgatgaggtcgacagttgaggtgccttggctcatgattacctcatacccatctccgtaagagtccattccttcggctaacagttgccagaatagcccaccgatggctgcacctccacccctggctgatgagtaaatcgctgtgtaaacagtgttgt

SEQ ID NO: 4344 - DNA, 154 bp, Gossypium hirsutum
  Clone ID: LIB3825-023-Q6-N6-E8
cgatctatcggtcgcgaaaacacgaccaactatttccggtccgtaacccgtaggcgtaccagctatacctaaatgtgacgaactaaagcctgacgtgatcagggacctagctgaaaactgagagcaatagcctttcgatcacacctgcaacgca

SEQ ID NO: 4345 - DNA, 559 bp, Gossypium hirsutum
  Clone ID: LIB3825-023-Q6-N6-F10
aagaatcttaaaaagtaagactaattcttgaaaataaaaataaagataaggagtatgaaaagttcaagcataattcaaactaaataaaattcatgataatgggccggtacgtacaactgtacacaagttcacacagtacagcacacaccgctgataaatcattcaaagcatatttacagaaatttgattattcttctttcatctaaaaaccgcggcccttaaagaaagtgaccatttcagcccctccctttaaatttactaaagtaaattaagctgcttccttaactacctttcaatcaccccatatgtacaaatatgtcccaacatctgctcaactttttcacatatacagatagcagtgttcccctccccaataaaagctatctacagaacatatcaacgccaccataaacataattactactcggggcggaagtttaccagattagggagaccagctgactgaagcctccttatgtcatttgctgtgaccttgcaagcctccaagtcagagatcttaagttcttcaggggctttagatgtctcaatcctgcacttg

SEQ ID NO: 4346 - DNA, 547 bp, Gossypium hirsutum
  Clone ID: LIB3825-023-Q6-N6-F11
atgcaaaaaatacattcattcctaccaaccttatttcaacattttcactacaaacacagtaatgaactgtagatttgcaagtttgcttgccggggggctcttcatcgtcaacccaatttccccatgggattcaggttcacgattccattgcagcaaccgatttgaacccgagaacgctgttttataaaatttcatcaggcattgtggacaacagcagcccttgaacaaactcgcatctttttgccttctcttcctgatcctttaccgaaaggggagacgacttcacatttctttctgacttattcacgtccgaacttttcttagttgttcttgtttcacgagaaaagttaggctggacactaacaaagtcatcaaccatgggtaaaataaatgaagacaacaacggatcaggtgctgaattggaagacactgtacaagaagaacccccgaagaaggactgtagatttccttctcgcagctctttcctcagaagagaaagcgtggaatgagatccacctttacgtgatttcctcttgcgctgcatctt

SEQ ID NO: 4347 - DNA, 410 bp, Gossypium hirsutum
  Clone ID: LIB3825-023-Q6-N6-F2
ggggggggttcccccccggggggggggcaccccccctttttttttattccccgggggggccccccccccccttttttaaaacccaaaggggggcccccccgggggggaaatttttttttttaaaccccccccgggggggggggggggggggccgcggccccccccttgggggtttttaaaaagcgggggggccccccctttaaaggggggggggccaaaaaaaaaccccttggggggggggggggggcccccccctgggggggatttttcccccaaaaaagggagggggggggcccctttccccccccggggggggggttcctcccgcggggggtgtataaaaagggtttgttccccccccgggggggaaaaaaaaaaggggggggggcccctttttttgttttttgggg

SEQ ID NO: 4348 - DNA, 494 bp, Gossypium hirsutum
  Clone ID: LIB3825-023-Q6-N6-F3
aaaatataaacactcccttttaataatggatgaaaataagtaatataataataacaaaatttgatcctaatttatcttaagcatgcaagtcccatgcattattaattaccataagctttacatacatattttcagaaacagaacagagatgcattcacttggagtactgccatcatgattgggtttaaactagcaaattcctgattgctcaagttgaagcctgttaaaaatgatgagaaacgatttttttgcaaaagatttatttaagattaaaacctgttgaaactcgcatcaaatcccagttttaactttcagggctcccctatcctatttggataaaacatgtagcctccctgagggggagtacaaacccaacctcggggggctacatttgcacttttgaaacaacttggtgcagtactacaagagatccattacagcagaaccaaaggcatatgtatcgtatcttaaaggaggggattattagactaacc

SEQ ID NO: 4349 - DNA, 553 bp, Gossypium hirsutum
  Clone ID: LIB3825-023-Q6-N6-F5
gagcaaacctacaaaaatgattttattttttccttcaagaaaaagcctaatcattacaggtatgactaaatccactaaacaaaatgtctaaaccagactacaacatcatgattgaattcacaatttcttttacatgtacatgtacatacataaatataaacaggttacacaaggcactcgcacgagggaaaaaaattacaaaaatccattaatacacgggttgtgtccacaagcaaaggagcattcccatattaccatcatcatcttgctgtaagtgaccaatgaaagatggcatacttaaaaaacccaacttcaatggcttattatctcctatgcttctttggtaatggctctgcttgtgcttcattaacatttgaaagctgctcttgaatgtaggccattgatctcaacattgcacctaatgtatccctcgatacctggaatttaacctctgattctccggtagtagtctcactgtcttgaagcttcaaattgatgacggcaaccctgttagctggggtggaaagctgttcgctaatataagccatagacc

SEQ ID NO: 4350 - DNA, 538 bp, Gossypium hirsutum
  Clone ID: LIB3825-023-Q6-N6-F6
ctcacacaagaaatttattacaccccataaattatagattgtgaacaagaacataacaagtctgcaatacaactcttttacttccctatactagaaatgttaacaaaaacccacttcatcaaatgcaagatgcaaataggagtaatatttttcattctcaattccttatccttaagaaaaagaaaataaccaggaaaacagatgagaaatgaaagacaaaaaagaaaacctcacgctattgagcagtcacattcagtctaaccatgctgctaattgctattttgcctacaatgctgaaaggtgttgctcattcctacctccatggaaaaagctatagaccagtcccagccaatcagaggctctgatctgaatcagctaacttgtcaataaccaaccaaaaggacaacactatttccaaatctaagaaggcaattagcaagcactcgcaacacaaactgagttggggccatcttcagttgctgtaactgatccattctcttgtacaggtttcacatcgacattagcctttactacttct

SEQ ID NO: 4351 - DNA, 415 bp, Gossypium hirsutum
  Clone ID: LIB3825-023-Q6-N6-F7
gttcggttcctgcagggggacccgggggggggggggggggggggaggaggggggggggggggggggggggggggggggggggggggggggggggtgtggggggaggggttcatacgggggatgacccggaagcaaaaagaggaagggcggggggggcgaagggggggggaaacggacaggaaggggggggggctaactgggggggggagaagagggaaaccgggggcgggaggggcattaaagaaaccggcaaagcggggggagggggggggggcggggggggggggaggggggggggtgttttggggggggggggggggaacaaggggaggggcttcaccgaagggccctggaaaagggggagcaaggggaccacgctggggtgccccagccggggaaaaatctgtaggagggg

SEQ ID NO: 4352 - DNA, 574 bp, Gossypium hirsutum
  Clone ID: LIB3825-023-Q6-N6-G1
ggcagaaaaaacttccaaaacttaaaatagtgtttgtttcgcgaagattaactaacgaaaggaaagtaagggttgtaagagcccaaatttgcttgggcccaagaccattaaccagcccaaactaaaagcccaaatatatcaccagtccagagtccaaaacacaattccaaatttttgcaaacccaaaattaaaaaaaaaagaagataacaagcccatgcacctaaacttttgtacagaagcctaaaccctaatgtgtgccgcacctatgctctcctcggccacgtcgcccgtacctcatcccgaggcgcctcatcccaaggctcgtctgtaagtttacaccgaaatggaagaagaaacccttctttcctccgttgactaagcaccggcccgaaatcgtcccgtgaccgcttcgtcggagggcttctcgtgccgttctcttcgcgctttcgaggattgggagcgttttggctttcgaacacgccttgaaacggggctcaatacccaccctcgcgcaccgttggccgccggttatggcgatggtacgatggacggcgatttgggtgtccccctggc

SEQ ID NO: 4353 - DNA, 529 bp, Gossypium hirsutum
  Clone ID: LIB3825-023-Q6-N6-G11
gaattgtaaacttcacccatttcatttagtactaaagatcaaacagcaagtcaaaattttctaaaacaacaaataaagataaacatccttctactcagcagctgtaatccaaataaagaggtaaaacaacaaaaaaccatggtaccaaagaaattactatgacagaaaaataacatggcacccataactatgacttgagataacaatcattcctcttcggcgatcctgcccttttcgctaacatagataccgtcaagaaactttctaatatccttgttcttcacatgacatttctggtttatcaaagctgctgagcgagacacgagttcaatatcattaccatccaaaacgatctcatccttaaccttctcggatcgagtaatggaaaccccttccaacatatccaccttacgcaccttcttctcgccaaggaagttacggatctcgatggacttgttgccgccagtgattgaggcgttgatcggaaagtgagcgtagacgaacctcatcttgtaccggtaacctttgg

SEQ ID NO: 4354 - DNA, 301 bp, Gossypium hirsutum
  Clone ID: LIB3825-023-Q6-N6-G12
acctactacacttgcccttggtggacagagcccgtatgacattggcagaggcaacatgtgaaacaagagttcaactatagctggcagcatgctaaaaagcgatgaaatacaagtcattgcatcatgaatttaacacaaaggatggggggaggggggaggtacctacatagaacctaagggccctgtaagataggctgtatcacaaaccgctagacctccatatccatggtaacagtaagcttgatcccaaacatcctagcactcacataaaagggactaaagggggtgcaccaaagcggca

SEQ ID NO: 4355 - DNA, 488 bp, Gossypium hirsutum
  Clone ID: LIB3825-023-Q6-N6-G2
gaaaaaaaagaagtatttaattgacttctatctttttcctggccaaaaagaagggtttaaaagcaaccccttactggccattttaggagcaaaaaatctggtcaaaaacttgctgctgattcgccactttcaaaaccacctttactggtaacactaaccctaattgggccattaatcctgccatttatccaataagtcgaacactcgggactggcttctgaagtattgatgtcccctggaagatcatcatttgggagccccttctatattcgtttagctcttcctgggttatcttgctgaatctgaatttctttgcccaaatggattctgcttcatcggccgctgggagcacaagggttttcacttttaaaaaccccagcagcttctcaatgcaactgaaaaggcattgaaaataaccctgcccttgactttctgtacttggtgcaactaagggaatttcagccatttcttgcccaaaaacccgaaaa

SEQ ID NO: 4356 - DNA, 521 bp, Gossypium hirsutum
  Clone ID: LIB3825-023-Q6-N6-G3
aaaaaataaggggtaactttctttgctataaaagtatttacagacatttggcagttactcttgagtaaccaaatttgttcaaattcccaaacaaagtaatagacccatttctattggtgcatggaatttagttagaaagaaaataggagaatagcaagtcaatgggaatcctcaaattgaacactggggtagaacatactccccactttccaccctgggaccattttcattcacctttgtccatgaaaccttccatgtcttcaggaggcttatcctgtttgtttcagtcgtcctctttgccagcataagtgtcaaaaacaccggaaccatggcagcacacaagtgcttaagggggtgtcccctcacaatatgagggggccatttggatattactttatcctctgcttcttctaccttaactaaaagataaaatcctgctgcccaaagccaatatgtagaatgtgtgtacatcggaggcaacaagattgccatgagggggatgacaatgcgaggaacaaact

SEQ ID NO: 4357 - DNA, 552 bp, Gossypium hirsutum
  Clone ID: LIB3825-023-Q6-N6-G4
aaagaagcctagttttgcatttataaagcaaacatgttctcacacagaaaacaatggatgtatcagattcctaaattggttattctgtcaacacatctttcaaaagttttctatttctcagctccattgtcaacttcccatcaactaaaataagcagatagccaatggccatatgaaagatctcaaagagacgatagatgatttttaatcccatgaagaatttgaagagtctagcatgcaagttagttacatcaactttaacaaagtgcggtccaaaaatgcctcaaagatcttcaatatcggcgcaaacatttcctcacctactcccaaacctttgaatcttgagcaggaaacatctcctccagtcaacaatttcataattccacatcagatactcccactaagaaagaacttggatcgctggaccctagaagtggaatgtactctgatcctctcacacgaacactaaagcatgcattctctattttcacaacactttggagcattggatccatctttgtcttcatgtcagaaccgtcatccataagtggg

SEQ ID NO: 4358 - DNA, 282 bp, Gossypium hirsutum
  Clone ID: LIB3825-023-Q6-N6-G5
ctaatgcttatgttagtaaagtttggatacccttcaagtatgaaaatttgccaatattcagttttgaatgcggaagatggggcatgggatgagtaattgcacccagctactacctttccggaggatgtagcagagatgatcctcagtatcccactagctgaaagtccgcatgaagatttccaagtttggagcgttgaagcgacgggtgagttcacaacacggagcgcctataaactattacaaagcattgaaaataaccctgaagcttatgctttacaaaac

SEQ ID NO: 4359 - DNA, 360 bp, Gossypium hirsutum
  Clone ID: LIB3825-023-Q6-N6-G7
gattaaaggaatgttttttgtttgttgggggggggggtgttttgggggggggggggggggggggggggggggggggggggggggggggtggggggggggggggggggggggggggggggggggggtagggaaagtggaagcattagtgataaagtgaggggagttgggggggagagggaggagaaaaaaaggggggggggaaaagggggcggggggggggaaggaaaaggggggggggagggggaaaaaaggagaggaaaaagcccggggaggggggggaaggggagggggcgaggggggggagggggggggcaccggtgagaagggaaaggggggggagttggtgggccaggggggggg

SEQ ID NO: 4360 - DNA, 526 bp, Gossypium hirsutum
  Clone ID: LIB3825-023-Q6-N6-G8
actgaaccagacagataatataattgaatcaacacaagaaagaaagcaatttcatctttctgcttgtaaaaagcttcaaatctctgacaaaactttcagtttactttctcaacacttgcaaaattctacaaacaacagggaaaaatgaaaaatggcccacctactccttagttacctgtaggaaacctacctttatttggttttaccaaggacttgcagaatgaagaaaaagctcctttcagctcatccggaatagggatagaaaggggtagtgctaaaggacgaggtcctttgtggtgtgcactctcgtttctcgcagaaaatgaatgtgccaatgctggctgctgcttgttaagcccttcgatgataaatgagaatgccccaaaggtgagacagctctgtagaagtgcctgaggtgcacctgggaaacttagagcaagtccagtgcagcatccagctacaccggcattaataacatcatcttttccccgaagcctcttcaaaaagcaaacaaccaaactgtgaa

SEQ ID NO: 4361 - DNA, 539 bp, Gossypium hirsutum
  Clone ID: LIB3825-023-Q6-N6-H10
accatgccaatgttcatgctattaaaatattattagcacataaggaacgtgatttgatttattactacaaatattgtgagcaaaaaaagttgaaaatgtagccttttctttcttatctcaaaatctatggatcttttacaacaaacttaagccaaaatttaggaggaaacagacaaagctgggaagtaaaaaggcaaaaacaagaggctaactggcacaaaagcttatcagatcctcagtccagataagcatcttccccatgtaaagaacatggctaatgtcaagtgccatgtcatttaatcagaaaatggaagttgtattgcaccttccactttgctaaagcactaatttttttaactttcttccatatcttcctcggtatccgatttatcatcttcatcgctatcctccattaggccatcattgttaccgtcttccttttcattacccttattgcctggctgtttcttattgccaccattgccatattgactgaacataacttcaccagaacatacttcacccttaattatggtgag

SEQ ID NO: 4362 - DNA, 533 bp, Gossypium hirsutum
  Clone ID: LIB3825-023-Q6-N6-H2
gaacatcaaactttattcgatacagtaactaaagatgtggttcactgaccatttcagcaccacaaaacacagtgttcattatataacacccacagttccatagaaatgaaaattacgacaagaagcagaagacacccaattagaaaccaccacggaggcgaaggacaagatgcagagtggactccttctggatattgtagtctgctaaagttcgaccatcctccaactgcttcccagcaaagatcaacctctgctggtctggaggaatcccctccttgtcctgaatcttagctttcacattgtcaatcgtgtccgagctctccacctccagggtgatggttttcccagtcaaagtcttcacgaatatctgcatccctcctctaaggcgcaaaaccaaatgcagggtggattccttttgaatgttatagtccgcaagtgtcctcccatcctcaagctgctttccggcaaaaatcaacctctgctggtctggaggaatcccctccttgtcctgaattttcgctttaacattgtca

SEQ ID NO: 4363 - DNA, 411 bp, Gossypium hirsutum
  Clone ID: LIB3825-023-Q6-N6-H4
aaaaaaaggggggggggttaaaaagggaaaaaaaaagggcccaaaaaagggaaatttaaaggcccaaattaaaaaaattggcccaaggggggaaaaaaaacgggtaaaatttttttaaaaaaaaaccctaatttttttgggggggaaaatggggggcccataaccccggggggggccttttttaaaaaccttttgaaaacccccggggaaaaagtgggggccttgtccgggaaaaaaaaaccccaagggggggggttttaaaaaaaaggccaaaaccccgggggggggggggaaaaaattttaacaaaaccgggaaaaccgttttaaaaaaaaggggggtctttttgggggtccttgcaaaaagggtggaaaatttgggaaaaaaggggggaaaaatttgccaacaggggg

SEQ ID NO: 4364 - DNA, 541 bp, Gossypium hirsutum
  unsure (1)..(541): unsure at all n locations; Clone ID: LIB3825-023-Q6-N6-H5
caagtaaaacatgctactttaaagttacaaaacacaaaaatttacattggaaattgtgttatctttcggtgaatacacngattctttcacaaaaaaaaaaaaaaagaaagacagtccaaaaaattggacttacagattctacagaaacgcgcaaaaagacaagacgaggagagcccccatcgatggcttcatcactggtgagttcagttactcgatagggtttcgcaattttggggttagtgcacgcgtttctgacagataataaagtcatttcgttttgttgaggagtgttgaggtcctgaacacggcatcgtccctgacaaagctccagcaaatgtatgcgagggggatattggctgcatgccagagagcatgagcatcgataaagcctttataaggtggaaaatcgtatatttccaatagcaatgcgatggttccccctacattgaacaaccagaccttccaccgtgaaggatggctcgttataccggcccaaactccccaanatgaggaggttggctacacccatggccatacaaac

SEQ ID NO: 4365 - DNA, 558 bp, Gossypium hirsutum
  unsure (1)..(558): unsure at all n locations; Clone ID: LIB3825-023-Q6-N6-H6
aaacaaagtgcatcattngaaaccctcattatcaacaccttacatgccaatcatctgcatcctgaaagtaaacaaagtgtcatccattgacaccctcgttattttccatattatattatttctagattcggcgcttcagcaaggaatgcttatataaatcctaatcgcttaaagcttagaccttcccatatcatcaaatacaatcatcactttccctatggcttttctatctctcagtgcagagaatgcaaggttggcctctgatatgctgtaagtatgagaaatgtgaatggtaatcaatcccttttccatccaggagatactctcctggatggaatcctcgagcacagctggtcgatgtattgagtagctaccccagtagagtccgtgcacagtccagttcttaacaagagtgatattagctgggatgacagggatttcaccactggcaaaaccaatgacaagaatttgagcaccccaattcaagagcttcatactttctttagtaagcttgccaccaacaggatcatagagaacatcaaccccttttaatttcct

SEQ ID NO: 4366 - DNA, 536 bp, Gossypium hirsutum
  Clone ID: LIB3825-023-Q6-N6-H7
gacttaaaaaaaatattacttttaattgaaaaccattaggtggctgtattaaccctacttacattcacagcttgaagaaaaaggggttgaaacatcttatatgtacataggaagggggggggggttgcaaaagcaaggccggtggagccatgcatgaaattcacattcgggtatacatatttatatgtatatataaaaataaaaatgaaaaacaccattcgctattgatgccacaacattatccaaaatcggatcagaccattcgtgcttatatctggattctgatttgtgaggcaaacttgatgctaatagcatcgcaaaccaatttttaacttgagtagttcatgttctttccaacaggacagaaattttactatgccactcctcatgtctccatcaaaaacctatagagttaccctgaacaattctttgcactagatgctgatggacagttcacttcttttgcaactgtaccttctgtgggaactggaatgtcctcaaactttgaacccaacgaccctggcttcatcttctgg

SEQ ID NO: 4367 - DNA, 170 bp, Gossypium hirsutum
  Clone ID: LIB3825-023-Q6-N6-H8
ggggggggggggggggggggggggggggagatgggggggggggggaaaaaggtggggggggggggggggggggggggggcattaagggaaaggggggggaaagcggggggggaaaaagaggaaggagggggttaagagggggggcacaggcccgggggggggtaaggggg

SEQ ID NO: 4368 - DNA, 520 bp, Gossypium hirsutum
  Clone ID: LIB3825-023-Q6-N6-H9
aacaaacaaatgttggctagcttttagactaaatatgaaagaagaacaacttgaatacaaataattatattattcatgaccatttaaactaaccaaactgggttcttttacacccccagataaagaactcaatggtgaaataatcaaatgccatcagctatgaacgctattcattcccataacttctgctgctacaatgcatcatatttgaaatactttgctgcttttgaagttggaacatggcagcaacaaagccagtaaagttatcaggatgactaaaatggcagtcctcggggagaatacagatagcaaacattttgggggttcctccgacttccatttcttgggcgagatcccaccgatgccatgttggatgatatctgctttagttcttggcaatctgattctccggtttgctccgccctggaaaagggatacaccctgggtagggggggctatcataggcaaaacctcaggtgttgaggctgacaatgaagcttcatcaagcctgattatatca

SEQ ID NO: 4369 - DNA, 540 bp, Gossypium hirsutum
  Clone ID: LIB3825-024-Q6-N6-A11
aagaaataagaataaattgatgctattagtcatgatgatacaagtccaaatctgtatacagaatgataatctggcaaggcaatgtatatgcagagtttcacttggattcgatcccaatggccaattccatttgggcactgcatgttctgacatagaatggccacatagctgattgaagggtccaagataattttcaactgttagtggtcattattcttcaaacgtttgatggaggcttgtaatcaagcatctcccttatgtttaacttgatcgaaggacccattgatgtgcatatatgtgcacttttccagtacactccttttgcacctttcggcttgtttgtttcgattgattttactgcagcaagtaagttcacaagaaggtcatcttccaagaagtctactttcccgaaaggtatgtgaacaatcccagttttatcagctctgtattcaactttaccccttttgaattcttcaatagcctgaggtatattgggtgtgacggtaccagctttaggatttggcatgagccctcgtggtc

SEQ ID NO: 4370 - DNA, 383 bp, Gossypium hirsutum
  unsure (1)..(383): unsure at all n locations; Clone ID: LIB3825-024-Q6-N6-A2
ggggggggggggggttccccttttctttttttgttttttcttttgggggggggggtgatctttttttttcttggtaggccttgcccttttttggtttttttccttttgggtttcccgcccttttttttttttgttggttttggtttggggtgttcccggttttttctgggtggttggtttcgtttttttttttcncntttctttcccccccttttcctcttctcttttttttttttttttcactctttttttttttttttttttttttcctttggttctgcctttttttttttntcgtgtatttcattccttgcattttttccttttttggtgttcttttttccctttctttttttttttttttgttcttttttttagttttt

SEQ ID NO: 4371 - DNA, 555 bp, Gossypium hirsutum
  Clone ID: LIB3825-024-Q6-N6-A3
atatgtaaatatattatatcttaccagccaataaattgtcaaaccaaaagaaaaaagaaaacatacacataaacttcctatttatatacaaaagtttaagcagctgcctgcctgaaccaattctccacaaaatccgccttccattttcttttctgcttcttcttataagtcatccagaatttggggggcctatggacgcaaattttggatgatccaccattaaagtagaaacggagctttgccaatgccactaattgtatggaaacatcagtgaagagagaaaccattatttgagcaaaattaatacgccacttggaaatatcaaaaatgatcgcagcaggtgagataagttgaccccacattgtgttgttcagaactatactacacaattgtatgttttggttgcgaacactcactcatgataaatcaaaagatccttgcccttcgtagattgcatatagcaatttcttatacataatttccttggaagaatatggaggaagcttcaagtaattagcacaagtcatgacactgggcaagtcatcatctgctgat

SEQ ID NO: 4372 - DNA, 522 bp, Gossypium hirsutum
  Clone ID: LIB3825-024-Q6-N6-A6
aaacattcaaaagggacctgtttccaaaacacaacaatcacaggggctactgatagagtatcccaaaaaggaaccaaacggtttaaatcccaaaaaacatacgagaacccaatagagaaaccagatgaagaaaatcaatgttttagtcaacttcctcaatcttaggaccagcaccacttccaccagccggaacatcctcatccatgccaccacccatgtcaccgccggcaccctggtacattttaacaatgatggggttgcaaatactctccaactccttcatcttggcttcaaattcatcggattcggcgagttggttgctgtctaaccattgaatggcttgttcaatagcatcttcgatcttctttttatcagttgctgggagtttggcaccaatcttttcggccttaactgggttcctcatattggatgcatagttttccaatgcattctttgcctcgaccttctttttatggtcttcatcttcggatttggatttctctgcttcttgaaccatctttt

SEQ ID NO: 4373 - DNA, 518 bp, Gossypium hirsutum
  Clone ID: LIB3825-024-Q6-N6-A8
cctaaaaacaacttgcttgtctaggccttcaggggaagatccagcgatctgaagctggctgctcactactccattaccattaatcattgtttgagtatcgtttccttctgggctattcacatatcgctgagctttggaaaccatgaaatccattttcctttcagttacatcatttgcaactacagctccagagattttgtacctttccccagtagctactgcagcaagcttctcattctttgacttcaaagggagctttctggttttcttgaaaacagagcttaaagtttcatcatcagcgtcatctgatgcttccctttccatgttctgtcctggaaattcttgattgaacaatccgccattatccttctttctgttcttaaatgatagcaatgtctcattgtcagagtcatgcatttcatttgcagataaatcatttagttcctcatccctcaaacgcatgatttcttcaaactttttctgcctaggaacatataaaccgagttgcttgagttttg

SEQ ID NO: 4374 - DNA, 552 bp, Gossypium hirsutum
  Clone ID: LIB3825-024-Q6-N6-A9
caaaattcaaagatttcttgcttaaaatttcaaatggaccgaaaagataacaagtagaatctcgtaagtaaaacaagttttcgacttccttttccaaacataacaaaaattttaacagctataatttaagtcttatatcaggacatctcactagaacaacaaaacacaatctagcttccatcgtagcatccacatcgaacccggattcccccaaaattgcaccaccccacatgcctagcttaagcaacgagagtgctggctgttgtagattcgtatttccagacagggggaagcttctttgttttcttgtagtagcgagcaagcctgtgaatccggctctcaacaaggatcaacctgaacttggaatccttatccttcctgtttctctccaaatgctttcggatggcaaccgccttcttgataaggtgatacaaatcctccggaatttcaggggccagaaccgtgagccttgaggatacgcaagatcttgctgccagtaacgctcctaacttgagcaataccatgagaatcacggagaatgacaccaatctg

SEQ ID NO: 4375 - DNA, 554 bp, Gossypium hirsutum
  Clone ID: LIB3825-024-Q6-N6-B1
cttaacggcgcctttttttttttttttttaaagaaatacatattccattgcagaatttttagaactgcagagctgctaagtgcatccattctaggccgaaaagctctcttcctttatgtacaatacgacaaccatcgaacccaagtcttaagggggacattaaaataaagcatatcccatgcccctcaatcaacctttcactctaataataattaaaagacaaattacgaaacacagaataacaccccttgacttgctcttttaaggcaactgctgcaatacgatggcgactacagttttatctaacaaaatcagaaatcaaattcgcctgttgccttattaaagagaatgtctttattgtttatatgcatgatgccatccttaagtgtgcacttccatctgctctttgtacgagtcaccttgtcaaattgagccaaaactagatgttgtgtgttcagctcctctccctggtccacatcatccaaatcatcttcatcatcatcatcttcattcaatggttcatcatcggcatcatctactatatcattttgggg

SEQ ID NO: 4376 - DNA, 527 bp, Gossypium hirsutum
  Clone ID: LIB3825-024-Q6-N6-B10
gatgaataaacgaaaaaagtaaaggaaaaacatacatgaaatattcaactcatttgtgaagtgaatttacattcaaatagaatgataattacaaagcttacttccattattggtagggatgatgaacatcttggcttgagccacttgaaaaatggtcctggtgaaagggatcatcaatagcattaacacaactcaacctgggtgagaaactatatgctccactcatctgttccatttcatagccattagatctcacactggtttcatctttgagtttgaggaagtacatggatgaccagaaatcttttgccaagttcattttcatcaactgtagaagttcatttagtgcattggtaaagagatcaggatgtgttagatcagtggtggataaaatcgcttgccggcttctatgagatatgttaacttccattgctgaacctgcaattatgtatttattaataatatgtcttgccatgtagatccttcttacagggtcatctatcggaattttgccaagctcatgcacc

SEQ ID NO: 4377 - DNA, 567 bp, Gossypium hirsutum
  Clone ID: LIB3825-024-Q6-N6-B12
atcatcaattctattaaaggaagaagggcatacatctttcacgaagcatattctttggggaaacaaacgcaagtacacaaaggaagccgaagtactatcctttgaacaccattactaccttcctcaagcaccctcttcttttgcgcaccacatccgagaagccaagtaaagatcttttcctcctcagtggcccagtgggatttgataatcatgaggtagaaaacaataattaaggcaagaatcaattacatctaatgaagagaaatattaaaactatccttcaaaaaacaagaatcaaaaggatttaccttccaactagaatcctattgccatcttcccaagattgtaaaacaggcagtcgagattgatgtgcttagtttgctacttgatccaagaatcctaacagaaaacttgtccaacacctatacagcaccaccataaacccaattagtgttcccatttataggagggcaacaaggcctgtcgctttactaggggctctccccatagctgatgcctcttcagtgttcagaaaccgagaccaactgcatttcacgccatacatgt

SEQ ID NO: 4378 - DNA, 547 bp, Gossypium hirsutum
  Clone ID: LIB3825-024-Q6-N6-B2
cttaaaattagaatgcaaatttgaagtgttaaaatcacatgaatccatacatgatgtgttcatgccgcccactgttattatctgatctacctaaaatacaaaatgtcaacacccattatcataaatatgacaaatgttatcggcttgaggacatctagagcgcatgcttcaaaacatttctcagttcaacgccaacttatcgcataacgactgatatgctgagttacaaagcttgaatttctcctctgcaacagccttggaagagccatgatgacgatctagatgccatttcagtgcgcaggctcgatatgcagttttgacatcttcaagtgttagaggaccagatgcacttagtccaagggcctgcctatctgcaattgtatcttggtctgaactctcagcattaccagattctgttgagtctgaatcttcatcaaatcgagaactccacctccaagatttctcatagttatccgaaatatctggatctcctccactgagggtactcatcattaatgaaggaccaataaaagaaccggcttccacc

SEQ ID NO: 4379 - DNA, 544 bp, Gossypium hirsutum
  Clone ID: LIB3825-024-Q6-N6-B6
ggaaaatatgatgttgttttgagtaataataattttgagctatcgagtgagttcgactacaaatcatcacatatccagtatttcaacaacacttttattgtatcactgctacaacaatggtgttttacatggatgatgatttctcaccaccttcgacgtctcctcccgtaccaatatgcaaatccagctattgatgctgccagaacaactcccgctgccgcataccaagcatacatcggtttttccaaaacaaggccagaagtagaatggctgacatcaatgggtagtgccggctgaggtttcttgctaattgtcaatgcgaagtttaggccctgctgtcccaactcagccagatcttcaaccggcggtttgagacttgtggctttcgctatggcttcgtactcctctttggttcccccttcaaggaaagacccaacaagatgacccttgcttatccagtaagccccaaaggtaccactcaagtaatccccgaaatgtactgcctctcctacattgtccccgtaaaactgccaagacaatccaa

SEQ ID NO: 4380 - DNA, 519 bp, Gossypium hirsutum
  Clone ID: LIB3825-024-Q6-N6-B7
aaaaaaaaaacaacctatatagttcgatatattcttcatgttacagcatgagtaaaagggaaaacacacaagttttatgagtatgagagcgacatactaatgataaatctaaaagagtcactgagagtaggaagcttgatctctcctttctgagagagagggatagtgaagttccccacgataggaagatcaatggtgagacccaattccaattcatagtcaatgtcccaatctgcaccaatatcctttaccaagcttactaagatgttatacggtaccttcactggcacgtccagcatcgttgtgtcgctggctttcaatgaccccgggtctggtattgtccctgatgctatccctcttccagcacttctgaaattgtaagagatctcacaaatggggatggaatggctgtaggggttggagacagagaccttagcgccatactcgacgcactcacggctcacatgtttcagatcaacgtccgagacactagcctccggcttctttatgttggccacc

SEQ ID NO: 4381 - DNA, 486 bp, Gossypium hirsutum
  Clone ID: LIB3825-024-Q6-N6-B8
aaccaacaagattcttcagtttatataccatgtaaactttctgcactaatagtacacctgtacatttgttcgagccacctaaattcaccaaaaagtatacgactttggtacaattatctgtgttccatttttgtacagagggaagcagataccagaacacctttgtgtctactgcagcatatgcaacaatcatagtctccgaattctacttctttccttcagttcttgagaatccatgtaaaagaatggcatgccaacaatcttgtatttaaatacaagattaaagacccaaatgcagcaacatgagttgcaacagcaaaagtcacttctggtatgatggtatagtgcataacttcataatcagctcagcttgtacaagtctagcgcacggcaagaaaagaaatctgttgccactcaagacttctttacaaatttcttagcttccctcgagaaacttttcaccataattctgtcagagaacgtaag

SEQ ID NO: 4382 - DNA, 299 bp, Gossypium hirsutum
  Clone ID: LIB3825-024-Q6-N6-B9
aaagaatcgcgatcgaggtacgttgataccaatagcatgatcaaagaacttaatcacgtaagggaaaacacatgggttagactgatctttttacattttaatacattttaaccataattggtacaattttataccctaattgctgcaccagctgcaatttccagttgaagaaccttgattccattgacctccttcgggtttggaatgatctccatcttgagtgcatcagcttccacaagccttttgatagcattcaggtttacccacaaattgtttgtattgaaaattttaaacttttc

SEQ ID NO: 4383 - DNA, 240 bp, Gossypium hirsutum
  Clone ID: LIB3825-024-Q6-N6-C12
gcaaacattattagtttcgaaaatggatctaatgaaacattggcttcttatttaattaagacttaaacctgagctacttaatttttgctgagttatttggtctaactgtgtggccattttaggcgtcaaataatttttggggggggggcaaccttccctttccgaaaataaatcttgttttgaatctccaaattcccttgcccttcacgatgtatcccacttttattcacttccaagttg

SEQ ID NO: 4384 - DNA, 556 bp, Gossypium hirsutum
  Clone ID: LIB3825-024-Q6-N6-C2
caaatgaaacgtcacctaattgagttccatgatgtaccgacgtggctccacgtactcaacttcttccaacccttaaaaaaaaaaagcgaatacagtaaacaaaagattaaatgtcaagaaacagatagatgttattctggctgggtatcagacatgtctaacatgtattgaaatttttcgacaaaaaaaacactactcaaaattcctagttttctatttttactgaatcgaccatagaccaattccctttttatttgggagtattgaatcaatactcccataattttgagcttcatgttaatcttcccaagagacatgtcagatccagggcatcccaattcgattgaatgggatgacagtttctcattcctaatcagcaactttatcagcctcttcctcactcatgcgggcttcaaacagatgattagccttataccaatagatgcttttacatgaatcccatttaagcacatctagcagcaaagctttatgataatcctggtttttgtcatctaacaagcttacttcataccaccttttcccagatgcatcaaac

SEQ ID NO: 4385 - DNA, 304 bp, Gossypium hirsutum
  Clone ID: LIB3825-024-Q6-N6-C3
ggggggggggggggggtttttatttttttaattgggccttttgggggggggggggggaacgcctttatttttaaagccagcgggttaaaaaactttttgggaaaaaaattttttttaaacgcttttgggttttgagattttttttattggggttttggtttttgggttttttccgggggggtttttttttcctgcgatttgccgccccggggatttttggcagcccccgggggccttagggaattttcttttaggtgggggggtttgtggttggggcacattttgggggaaatttggtctcggg

SEQ ID NO: 4386 - DNA, 233 bp, Gossypium hirsutum
  Clone ID: LIB3825-024-Q6-N6-C4
gggtggggggggtttggttgtttaggtgtgattgtaaatttgggggtttaaggggggatggaagggtgggggggggggtgaggtggggggaaggcggggggggaggggggaggggtgggggcgggggggggggtacagggaggttgggggggggtgggggggggacgggttgtggggggaaacctttttagaatttttttcggggggtcccggttttggggttagggctgtgg

SEQ ID NO: 4387 - DNA, 556 bp, Gossypium hirsutum
  unsure (1)..(556): unsure at all n locations; Clone ID: LIB3825-024-Q6-N6-C5
cctcataaaaagtgaagcaaagcatttgattatttcagattgcaatgttaatatactagaaagtagatattatataatcactatgtatttgcagtaattgtctaaagctctctctgcattagcaaccccccttggtaaaaggactgccacaacagacgcatgaatcataaaagctctaaactagngaaaacatggcaacagccaagcatacaatactacatacatatatataagaggaaaggcaatgccttctgcaccacaagatcatctccgtgttaactcactccaacttagtccctacgtttcccttgagagtgagaactcttatctttaaaatctgctgatcctttcatcctagtgtgttggctacgcaaaggccctgacctgtctcttgcatctaccatcatcctcccttttggttgagaagactcagtagagggaagtgcccatcctccccgacctgcctgcccgttctgtccactgctgccagtccctatgttatcatggccaataaaactcccggaccagccaggcagacgcttttgggcttttcctt

SEQ ID NO: 4388 - DNA, 550 bp, Gossypium hirsutum
  Clone ID: LIB3825-024-Q6-N6-C7
cagaccaccaaaaataatggttatcctgatatacaaaatattcccatattttcatcccctaagttaaagagttcctccacttattggtgtttgttcccacagcacaaggaaaagaaagggaaatactgtccaaagccaggatatgatacagcgaatctgggttatcaaaccaccctaattcctctgctacaatgttccataaaaaaaacattgcgtcaaaaaaatcacttccgccccagcctaataaaatgctcttgatgttctgcagcagctgccttatcagcagcctcacgcttcagtgccctttttgcccgtcgccccattatacttttcgaaacttctttcttcttgggctcacttgaagatgaagcatcagagttctgggaactgctggatgatcgttgaacaggcctggcttttcggcgccccgatcttacatatccattgtcaccccatctccgattgccgatgcggagactaggcgaacttctgtagaaaacttcatcttcttcctcatcatcatcatcttcacaagggtaaggataataat

SEQ ID NO: 4389 - DNA, 147 bp, Gossypium hirsutum
  Clone ID: LIB3825-024-Q6-N6-C8
tttttttttttttatcttttaaatccgatgtaaatagttttacgacagtaatccgtgtttgcaaactgaggaaaactatgatccattatctgagatgattttgtttataacctctcgttcaaaaattaaccactcttttttactttt

SEQ ID NO: 4390 - DNA, 419 bp, Gossypium hirsutum
  Clone ID: LIB3825-024-Q6-N6-C9
agcaaaaagctgaataggtaggttggcaaagaagggtcaaacaaaatattcaaccaggttcccatgcaaccatatccagatagcttcaaaaagtactgatttgcaattgctttatcctaattaaatatgataaaaccatttaacagagtagcttattgaagttcagcaacatgcacgcaaacagtttagaaaaagaagtcaactaattttgaaacatgttccaggttagcgatatgaagggacttttagctctcagcgatagggcaaagatgcaccaccaaaagaataccgggatgaaactgatgtaaaagcagatgcagggttaacatcttgatgacgctgcatccggttatgatctactaaaacgtcagaaggatattgagaatacaatctctctgcttggttgctttctatcctcc

SEQ ID NO: 4391 - DNA, 559 bp, Gossypium hirsutum
  Clone ID: LIB3825-024-Q6-N6-D1
actagtacacataaaacggcatttattaattaggaccataagcgtaaaacttatagtatatgagactttatttcagttatggcacacagatcaaaaggatcaacaataagtttatgcttccgaaacaactagatgatgggctttctacatttcactcctttactcatcctccgcaactccatgtctaaatgctgggtctcacattgaggcgagatgctaacttctgacccagtgatttatcagcctgagaccagtatgagatccatatgctgcgaatttcatgagtcacacgtggatcagacaaggcctcaacccagcggcagatgaatcgctcttgcctgtctgctgcccaggacctgtatctctctccgggctgtttgaagttgttctccttctcaatgatgcacttctcacgccttccagtgcaaacagcaggtgggatagggaacatctctgcatgacgaacaggatcgtaccttgaagggaagtaatttatctcctcatccctgtgcatgaaattcataaaaccttcgtggtgattgttgtgatgagcacactt

SEQ ID NO: 4392 - DNA, 587 bp, Gossypium hirsutum
  Clone ID: LIB3825-024-Q6-N6-D11
tcgcgatctaactcgacgaagcaagagaggatcaacagcggatttgcaaggtcaggtctcgttttcccttttttttttttttttaagaaacaaaaaagccaaaatagtccattaaatgtccaattacataacaaaacccaaaaaaataactagcctaattacaaatccctaacccaaaaccctgatggcccaataggcccaatgcctaaaccaaatctcagccaaggcaaaccctagcctaatgcttgcgccgcaaccagacaacacctccgtacgctccagcatttcagccacgcctgcgcctccgtacgccagcacaccccgtactctcgccacgcacacctgtacctgcaaaaaggatgaacgcacagcaaaacaaagaacaaatattgtattttttatctactttttttctttctttcttttcggctataaagccaagatttttaatctttgtaaggggttacgaaatatagacacactacgcatacgaaacgatcaaatagaaaaaagcaaagaaaggtgatttctgttttgagtctctggatctattgcgttctttctttatttccttccttcattttttc

SEQ ID NO: 4393 - DNA, 158 bp, Gossypium hirsutum
  Clone ID: LIB3825-024-Q6-N6-D2
aataaataaaaagaagccattaatgcatcaaatcaaactcgttggtaacatcccaaattcatgtttggagtagtagataggtgtcttagcatatttaatcccggccgtaataaaactatgaatggtacccaatcgtagcaagggtgagggagaaatgg

SEQ ID NO: 4394 - DNA, 367 bp, Gossypium hirsutum
  Clone ID: LIB3825-024-Q6-N6-D5
cttctaaaaatgagtaaattaatctttatatcttactccgaatacaaggtctctataatacttttactacctatgggaaaaaaatataataaactaacaaatatatatatttgatagttgaggtggtctaggcttgatcttgattcactaaatatgtattccattattgatccatggttccctggaatgttggagcagggaacctgggagcaccggcaatgatggataacaaagtatcttcatcattacccacacactgagccctgccttgaaccacaacctgaggtgtaaacatggtatcaagcctcaaagcctccacataagccttttgtcgaacagttgataggcttgaaccataagggtcttt

SEQ ID NO: 4395 - DNA, 433 bp, Gossypium hirsutum
  Clone ID: LIB3825-024-Q6-N6-D6
actagaaaggagatattatataatcactatgtatttgcagtaattggctaaagctctctctgcattagcaaccccccttggtaaaaggactgccacaacagacgcatgaatcataaaagctctaaactaggaaaacatggcaacagccaagcatacaatactacatacatatttttaagaggaaaggcaatgccttctgcaccacaagaacatctccgggttaactcactccaacttagtccctacgtttcccttgagagggagaactcttatctttaaaatctgctgatcctttcatcctaggggggtggctacgcaaaggccctgacctgtctcttgcatctaccatcatcctcccttttggttgagaagactcagtagagggaagtgcccatcctccccgacctgcctgcccgttctgtccactgctgcc

SEQ ID NO: 4396 - DNA, 555 bp, Gossypium hirsutum
  unsure (1)..(555): unsure at all n locations; Clone ID: LIB3825-024-Q6-N6-D7
tttttttttttttttttttttttttttttttttttttttttttttttttttttttttttttttttttttttttttttttttttttttttttttttttttttttttttnttttttttttttttttttaaaaaaaaaaatttcaaggcttttggggggaaaaaaggggcccaaaaaaaaaaatacaaaaaagaaagggggaaaaaaaggaggggggcccactatttggaaaaaaaaaacatcgggggggggggttaaatttgggggaaaaaaaaagggggtttttcacccctttgaaaaaaaaaacccggggccggggggggggggaaaacctgggtaaaaaaaaaaaacttccccccctggggggggtcaaaaactccccagggaaaggggggggccccccttcaaaaagggccaaaggggggggttttaaaaaaagggttttggcccccccttttaaggcccagggggggggggaacacccccccccaaaaagaaaagttcccctcaaaaaatggggggattcccttggggggaaattttccagacccgaaggtg

SEQ ID NO: 4397 - DNA, 563 bp, Gossypium hirsutum
  unsure (1)..(563): unsure at all n locations; Clone ID: LIB3825-024-Q6-N6-D8
aatcaaaacttacataagtatttttatcatgcttgcatatatatatatatggtaattgattgctgacacatactgttaattacagtagctgatacttatcaagctggtataatatattacagattgattcattatagatgtaaataaatgtctttgaagggtttcttacttcttgttgaactaatacggcaaagcgagtacaggtcaaccgagatccttgaggcgagaactacgaaccatccataaaaacagcaccatgtccgctggatttcatgaacttcttgaacaaaagaaccaaaattgctatcgtaagtccaacggcagcccatgtaaacaagcggtcatcggcagatctttgaaccctcatctctggcctttgcagtggctgattacttgattcctcggcaggaatctctcttgcagccctcactcccattacagcagtacctggattagcattggccagaaccagaggctcttcttcgacagccctgtcacctactactggngttcggtagcccattcccagcaaccatggtaacagaatccttctgattagcctg

SEQ ID NO: 4398 - DNA, 570 bp, Gossypium hirsutum
  Clone ID: LIB3825-024-Q6-N6-D9
actcaattaatctatatggttattcttgtttccatacaataagaaggaaccatgtaagtaagatgatcaaatcctaatgacgctattaaatacatacaaactgtatataggtgctgtctaagggcctttacaacaaaactatagtcagcaaatagaaacatatataacagttaaaatctccagggatttccattttgtaatggtgggaaggtccctcacatccatagagatctacaaactacttctcaatcagaaaggctagttttctatttgttcgcaatagcgagaaactttatggaattaatcataaaggaactaatatctacaaaccaataagcaaaatgctcccgaaaataccttgccaaaaactgacagctgcatgcctcctaactttttaagaactaagaagcattgttgaatgtttcttaaacacaaaagtcttggggggggggggggcacatacttcttctgctactaagtctatcagtaatgtttttgctcatgaactattgcaacccaagaaaatttttggtgccacccctcatcaaggttgccattaaagttaaatgc

SEQ ID NO: 4399 - DNA, 552 bp, Gossypium hirsutum
  Clone ID: LIB3825-024-Q6-N6-E1
atagtaaaaactatgcaatacatttatttatatagtagaaaactacagtatcatagtaacagtaaaaatgtaaaattactacatgaccaaagaggtgcgggctacattttaagccgcttcagctcccttttacgacttttttaccgctcgctgcaatttttactattaccacccaactcaatgacaaaacaaaaactaaaaagaaacattgccttacccccaaggcctaagcttaggaaaaaaacaaaaattaccacacataaattcactttaatcacttttgtatctatcactgtaaaatcctaacaaaaaggtaaaaacccacagtttttacctcaaccttaacttttaccgccgcttcagattttcccgggaaaatgaaggacaattgaagggcagggaacaaaagattaaaaagaaaaaaagggagaaaaggatagggtagcagtctgtgacgggtctgttatttaataacggaaattctttccagtgaaggtttgaccaaactgccagttagtcggtgccacgttccaagaggtggaagttcgtttg

SEQ ID NO: 4400 - DNA, 564 bp, Gossypium hirsutum
  Clone ID: LIB3825-024-Q6-N6-E11
aatccaagtaaaacaatagatttcagaaagaactgtaatgtgataaatgatagttaaaatataacataaaccaaatgagtaactaaactaaattcatagaaaaaaaaacattaataaaaagcaaatccgtaaaaccctacagaagctaggacaggaccagccagcattcatccaacaagtctttcgacaaaaaaaaaactctagatatgataggtttaagcagcagcctgagcagcaagcctcttcctcgcttcctcaatgatcgacaacttgatacccttgcccttgggaagcgaaatccatggctttgttcctttaccgattgtgaagacattgcctagacgagttgcaaactcgtgtccagcagcatcttgtacatggattgtctcgaagctacccttatgcttctccctgttcttaatcactccaacacgtcccctgttccttccaccagtgaccatgacaacattcccaacatcaaacttgatgaaatcaacaattttgttgctctctaagtcaagcttgatggtgtcgttggctttgatcaaagggtctgggtaacgg

SEQ ID NO: 4401 - DNA, 556 bp, Gossypium hirsutum
  Clone ID: LIB3825-024-Q6-N6-E12
gaattcagcattttacatatctatttaacagagctttaaaaaaaatatcgataaaatgcctgcattccaatatcatgtaagaagctttcacttcgtgtcaccctctgggaggaaaccagaaaaacaaaaacacacgggaggaaagatcaaaaaggttaagagatgggcaaaaagaaacgagtcatagctatgcttacaataacaagagttgcttataaaacatagaaagctatcttaaagatggctatcttctctataaccttacgtagctatgactaggagacagctttacaccagttcttacttgagcaagagaacatactaccatgatttaaggctgttaagtgatttagtcctcgtcgtcgtcgtcgtcctcatcatcatcgtcgtcttgatcatcatcagagtcatcatcatcatctttaccctcttcatcaccttcatctccatcaaaatcctcctcatcggcctcattgttgaaataagtgagaggattgggccataaatcctccttgataatctctgctacttcatcatgaatttcatccatgtcatc

SEQ ID NO: 4402 - DNA, 550 bp, Gossypium hirsutum
  Clone ID: LIB3825-024-Q6-N6-E4
gtataaaaaatctaaaaatttagaaaatggaatttaattagatacaaggtattttaagagccgacttaagcagaaaatataatacaaatcaaagtagttttgacttttttttaggaaaaaaaaaagaccagtctaggttggcttcaaaaccaatatgcggccaatgtctgtacccaacaaatttaaagttgcaatcacgggtccacagaatcgcacaccgggtgccacaggcagaagagaagtgcatagaggcccccggtcatacaatagctatcctacacaggcactctgccagacctcacagctgccttctccagatgaaataccaagctagtaacgagactccgttttgacacctgcttttgccttacgctggcctgccctgcccttcttccttaatctctacattcaggccatctcacagtgaatgccattagtcgattttctgaatctcgtcgttcaaccttttggggttgattgattacttttgcccactgggtattttgttttgtgaaggttgttcatagttgcataggtggctttaccccgt

SEQ ID NO: 4403 - DNA, 540 bp, Gossypium hirsutum
  Clone ID: LIB3825-024-Q6-N6-E5
cactcaaagccaagttcaaagttttgttagtcacagcatattttacaaaaagttttacaatttccgtgggcgcacttgcgccattgcccccatagatatgtaaatccatgtctggtaacaggcaaaaatcacgtccaagttagtctcggtaccccttcaacaaaatcaaactatcaaaattggtcatttgtagtatgcaaagatcggtctattaaaaccagttctagttcccgacaaatctgaagttacaacttcaacccttctgaatccgatcttgtctagaagcatttcccgaaaaaaatcaggtcggtacttgatatctcgataattacttcttgttgtctcagagactctgcggttcctttcatatgatgaccaaggttgaggttccaatacaaaaacgccacccggacgtaaaagtctccaaatcttcccaaacgcggtaatcaagccatcatcaccccagttcaggtgaatccactttgtcacactcaaacaaagaattgtatcgtactgcttatcatgcggacgactcctcac

SEQ ID NO: 4404 - DNA, 557 bp, Gossypium hirsutum
  Clone ID: LIB3825-024-Q6-N6-E7
aaccgacaacacataatattattgttcttttttatgatccaaattgcaagcataatgaaagaattacaatccaaattctatgaaaaatttgaaacgaagacacattagaccaaaactgctacaagaacatttgacttctcaaacctcaatgcacttttttgacacaaaaaatatgctcaccaaccacacgaatcaccactctcgcttcttgttccataaatagatacttttataatatacacattctataaaattttatatatctagggaggaaagttcatttcaatcaccgagggagtaaaaagaacatgatgcaaaaacgaagggaaccttctccgtgaaaagaatttggtatataaaataaatatatgcattgatgcacaagacagatgagtatcgagccaatgttaactaggaggagaggatggattgtaaagcaagctgttgttgcggctgcaaagatgataaagttgaagccaatgctgctggtggtaaagtctgttgaagttgcctcagtagattcaccatcctacttgcggtttgttctgtggctaaat

SEQ ID NO: 4405 - DNA, 572 bp, Gossypium hirsutum
  Clone ID: LIB3825-024-Q6-N6-E8
cagactgaaatagactcgacatttcttttcatcgaaattgaataaaactcaaacacaaataaacttgcaaaaatttcagactcagtaaaaggaattccaaaatcccacaaagatagaagcaattaatacgtctgaaagtatcctactaaactcaacggtaacgacgaagggaaagggtgttgtttctcttccaggtagcccttcgagacggccgattcttgtggtgcaagtgaccctttccatgcagacccctgtttttcttacctgcagatgtgagtcctcgaagttccctgtgcttgtgaacgggattgcagatccagttaattctcgggtcgttgcggatcgcattgtgtgcaacatcaacaaggataacctcaaagtacttgtaagtagaatcctcgttgatccagtatgagttaacaactctgagacctcctaattttcgaccagctcgctcctctgcaacagaccgcttgctgcgctggaacttcaattgggtaacaccctggtttgtgggcttaccatagacaatacctttgggaacaggcctctttcgaccaccccttctaact

SEQ ID NO: 4406 - DNA, 537 bp, Gossypium hirsutum
  Clone ID: LIB3825-024-Q6-N6-F10
gacttgaaacaaaaccaacgatgtcaaaaaacatactcataatattgtcaattttatcctgaaaaatggcttctcctaactaggaaaagggcccaatgtcacccaagatagtctaattcacgcataaatgaaaaatgaaaatgtaacaacttgctaagatctaaacaggcagtaaggcagtaaaggagcttaatcaaagagagagaatcccatatcgtcatcactctcctctttctcttcctttttctcctcagctgcaggagcttcagcggcagcggcagcgcctccagccggagcggcagcagctcctccacccccgatgaaggctccgcctacagcacctccaataaccacctggaaaacggcagaattaggggtaacgacagagaaagaggaggtgacaccaccagaggagtcgcaggcggtggcggcctggacaagtttccgctggagctcgtaagtggaagcagcagagctctcaatctctccctccaactgcttggcagaccactcaccgcctttgctcctgcaaacaaa

SEQ ID NO: 4407 - DNA, 544 bp, Gossypium hirsutum
  Clone ID: LIB3825-024-Q6-N6-F11
agtcaaagttgagggcttatataccccctttagccaaaaaattgaagagttccacaacattttgtccaatttaagattcaaggatcaaaatccattcaggaactacaagtgtgcaacataagaacagagcaaagcatacttgaatctaatcagaaaattgtttcaaaagcaaagagaattcctaatgtcaaaccgccagcagcagcggctgagtagcagatatgaagcaaagaatcacagccttcttccgcgtctgccaccctttctacgagtactatcggtgggaatgggggtgacatcctctatgcgtccaattttcatgccagaacgagcgagggctctaagtgctgactgggcaccaggaccaggtgtcttggttttgttccctccagtagctcgaagctttatatgaagggctgtaatacccaactccttgcagcgttgagaaacatcttgtgctgcaagcatggcggcataaggggaagactcatccctatcagctttcaccttcataccacccgtaatgcgaaccattgtttccctt

SEQ ID NO: 4408 - DNA, 555 bp, Gossypium hirsutum
  Clone ID: LIB3825-024-Q6-N6-F3
gcatataacttattttaaatacgaaagaacaaccaaaatatttttacagctttctataaaaaagttatggcaacttaatctaccagcaaagataaagatcacaaattggcgagttttccagaacttaatttctacttttaacaatttacattacagaaaaatagttggttcaataacttgtcccagatgctccaatggagttgaaaaacttagaacatattttcccagattactccaatgcaaaggaaatatagcatgagtgtaacacccatactcggcctggacgccaagctgaatatcgagatgccacaccaccgtctcactacttgttcatctaaaacgacatgttatttctcatgcaattttttcgatcaataataacgtagcatttcatgaattataaaccatacattcactttttgttgataaatcataccaagaattcataaaatagcataacataggtattaatcgtgtgttaggaccacttatcaaaatttcccaaaaatgttacgtcggtatcgataccgtctctatgatatcgatattttcttt

SEQ ID NO: 4409 - DNA, 294 bp, Gossypium hirsutum
  Clone ID: LIB3825-024-Q6-N6-F4
aaccatcaaccataaatcttgaaaattatcttacaagtgacgatacaaaaatccaactgaaaataaataatctcgagctttttcggatcattcgggaagagaccacttgaaccatgcaataatctagtcagcaacatatcaaaattgcaagggtccagtgaacaagcatctcagacaaggaggctttttcgatctctgttgccctttgattcaaggggaaaaatgtgcagaaacttcgttaggagttggactgaaatctacttaaaaccggaaacagatgcagcagaattgttt

SEQ ID NO: 4410 - DNA, 582 bp, Gossypium hirsutum
  Clone ID: LIB3825-024-Q6-N6-F5
agagctaaatagaagtgcttgaataataagtgccaattgttacataataaagtaaaacaaatgggcgatgatttgaaactagtacaaaataagaagctaaattaaagtgcttgaaaagccccttctacccccaccacttctcaaagagtagtttatctacattttcatgaaacccttcaatttctataaaattttccaacttcctcgaagggaaattttgaagaaaaagggacagttaaacatacacaagtcataacaagcaaattcccacattattttcacaatttatatatatgtgttttttttggagggttcttctagaaaagtgtcaaggaaaggcaaatgaatcaaacatgggtttggcttctgaatgaaccaagagccttagcagctcctgccctcaagatgaattggtggtagaatgctgctatggctgctccaatcatgggaccaacccagaaaatccaatgatcatcccaagctttcttgttgttgaagataacagcagctccaatacttctagcagggttgatgccagtgccggtgattgggatggtagccaagtgaaccatgaatacagca

SEQ ID NO: 4411 - DNA, 553 bp, Gossypium hirsutum
  Clone ID: LIB3825-024-Q6-N6-F6
aacaaaacagctatgtacttgttatttagaaataacgttctttatagttgaaagctccaacaaagcatgctctacaaaattagtctaaagaccctgcccctgccactgccagccataaattaaaacattactccacttcatcatctttcttaaaagtctagaaggtttgcagcagtagaaagagcagctccactaatggcacaatgcagaacctgctcgtgggtagtattatcacacgtcagtgctactgccatccctgttatcgcccctgccactgcactatttgtccaatcatgagatccacgagcctcttttagcccaaatgtaagccctgaatataatccagcagccagcccccactgtagagattcttttccagtgtgcttcaccattgcttcaagagaatttcgactggtttcccctctgaggccagggaagccttgcttcttattcttgacaccagtgatatcagtcgatttaatgggtccagttccttcaaaagctatatgacaagcctccctggcgatagcttgaagtgctccaataccagcag

SEQ ID NO: 4412 - DNA, 552 bp, Gossypium hirsutum
  Clone ID: LIB3825-024-Q6-N6-F9
acatacaatgcaaaagtccaatagattgataagaagataccgcaactcaaaaacaccctacaacatttcgcatatatattgacactagcatcgccttacattatatatcaaatagctttgcctgcaacatttatggcaatcaccttctcagtaccttgaacggcttcttaccctgggtgaacgggaatttgagcgtgaacgtgaacgagagtaagagtgggacctagatcgtgatcgtgaccgagaataatatcttctagaactcctactcctacttggacttctactccgccgatatcttcttggaggagagcgactgtaactcctactgcggctgcgatgcctttgacgacttaaacggcttgtttctgcaagtttttccagtctttggcgctcctgctcttgcttcttagccatttccgcagcagtgtctttcttaatttgcttgtttaactgtctgttcataatcctttttagccgctcttgaggagtttctttcttctcaatctgcccctgttttgagggtcctccggaggcacttgcttttgtcaa

SEQ ID NO: 4413 - DNA, 535 bp, Gossypium hirsutum
  Clone ID: LIB3825-024-Q6-N6-G1
aacgaggttcggccaatttagcttacgtcctcgggcactaccaaattaatatttcctctagaaaatattacaaaggagaagattttgggatgatacaaccaaagggggaggggttctatatataacaaaccaaaccccctccatttctatcttttcctaatgggggatattgccaatattcaacaatcatgactcttgatcttgacctaatcactttgatttgaaaggaatggctctgatcacaacaacgtggtaaagtgctgctagtgctgcaccaatgaatggtcccacccagaaaatccaatggtcatcccagcccttgtccttgttgaagatgatggctgcaccaagactacgagccgggttaatgccagttccagtgattgggattgttgctaagtgtaccaagaacactgcgaacccaattggcaatggtgccagaatctagccatacaaaaataaattcatccgtttgtaacaacatacataacttaatccgtaattagattttattatgaagtatgggatgcttaca

SEQ ID NO: 4414 - DNA, 557 bp, Gossypium hirsutum
  Clone ID: LIB3825-024-Q6-N6-G10
aagacgatcaatgttgactcaaatacatttcatcgaaacaataaaaattaacaacacagatggagggcgaagtacattgtaaaaaggcgtctaaaaaagactgaaatgaccttgcatgataagattgtatgggtgaaggcaccccaaaactactaacaaaaacattaagagacagacaccgaaacaaaactaaattgcagcagaaaatatagcggcagaagctgagttattctcaaccttacagcttgtcctcgtactcagaaagtggggtcatctgctccttcaatcccttcctcttacggatctcagcaacatggcctgctgcctgggaacccggttccaatggatctgatgacatcatatcccagtgatcaaacacacattgtgggaaagcctgtccggaggttgcagccctcagagtgctggagaatccaaaagactcaataactggaaggtaggccttgatgttgtaaagtggagtaccaggcctctgcatctcctcaaacacatgtccacgcttctggttaagaacactgtaaataccaccaagtgcctgc

SEQ ID NO: 4415 - DNA, 577 bp, Gossypium hirsutum
  Clone ID: LIB3825-024-Q6-N6-G11
attctaacgacaaatattattccttattcactcattaaatatagggcattggtcatctacttactacatcaatcaaagctaaaaaaaacataagacatgcatatgtttttgcatcttccatacccacatacaaaatcataggaaaatgggtcactcgacccactcaccaatcatataatttttttccaactacgactaatggctaatagccacagaaggaaaacctgtcggccatccaacaccacttataacacacatctccctaccctcctataacattgcacaaagtcgcacgattatgtagcataaatttcattcatgcagtattaacagcaactggcttccctcgacccatagcaaatcctcttgtgccatctggcatacgaggaccagggggctgctttgctccagtagcttgctcattgctgacccaattacttgaagctgaagggggagtgcctacatgatttccgtgactactatgatggttattatggtattgagtccgcccacgtcctttaccccggcccctgtttctcccttttttctgcccacactctttctcattagaatgctc

SEQ ID NO: 4416 - DNA, 550 bp, Gossypium hirsutum
  Clone ID: LIB3825-024-Q6-N6-G12
aatacaaatgaaattttattagtgataaggttacattatttttgtaatggcaaaatataaccttatcaatacttaaaagatatatcttttgaatcaaataattaaagtaggctttgattttaagctctaggtgtgcataaaagttggataattttgtcaagattcatgtaagacgagccatcagccttgacagtcgccgcctttgcttttctctcccactctacagctttcttcttcatatctttactcttttctcctttgattagctctctaacacggctctctactttatccctcttaacattattgtcgatttccatgccgattccccatttagtacatgaataccaacagtttgtttgttgctccgcgaaaaacggccaacatgtcatgggcacgccgccggatatgctttcaatcgtggaattccatccgctatgtgttaagaatcctccaatcgaagggtggttcaggacttgttcttctgggcaccatgttgccaacatgcctctatctttggtctccgctacgaactctattggcacaactg

SEQ ID NO: 4417 - DNA, 552 bp, Gossypium hirsutum
  Clone ID: LIB3825-024-Q6-N6-G2
gaaagcaaataaatgatccattatttattataaatgaaactgaaactccaacatcatattccattagggttcttcccacacaccagaggtattaaaatcaaaagacaagacggcccaaaaagcactcaaaaaccatgaatcttgatttgctctttcttcactattccagcattaacaaggaagtgtgctactttcttccgctgatcaccttgtaattgaatgattttgcccagctctttgtcgtgcacaacattcccgttacagcagaactttttcagagacttaaggatcttatcggaactcagttcttgtttcagaccttcaacagttgtcaagcttttcctgccattcctctgttggattcggatatgaacatagtctttggttccggttcttccgaattcctcggcctcagcaaaaggatcaaaagtagttgggatttgaatgtctaactcaaccatgtacttcgttaaataagaactttgattgatctggacttgcttgtcttgttcctcgagctagtgttcttgagggagaactaggagagttgtt

SEQ ID NO: 4418 - DNA, 430 bp, Gossypium hirsutum
  Clone ID: LIB3825-024-Q6-N6-G3
aagcacaaccagaaaaaaattccagaccccggcaaaccgaactcaatacagacaacaaaaaccatggaaggcacaacacaacagcgagcatgtacgccaggcgtagctcactatttgatctaaagaacacgaccaagtcccacacactgtaaaactatagccacggtagagaaaattattgcactataaatagcacgtctggcataaaaggcacaataaacgactataccaagagcttgagaatcactcctcttctggctcagactcggcattctggagccattcgatgaagggcttggagtacttccatatctgagaactcttattaccaccggctacacccttctgataccattccatgatgaactcttcttccaagatgtaattgccatatagcgctttaagaaccaaagccacctacttagctgcc

SEQ ID NO: 4419 - DNA, 563 bp, Gossypium hirsutum
  Clone ID: LIB3825-024-Q6-N6-G5
acaaaaaaataatttatgtgaaacaaatgcacccgtaatatcatttacatgaaaggggatatttgaattatgtcaactaaaacctgacactacattatccgaacagtattagtaacaaagatcttatcatgatggtggtgtggaatcaagatctcttcaaattcgttttacaccttttgaagttcatggctgtcaaaaacccagcattatgtgtgaccatgtagttacaactttaggaagacaaactcttccacagctgtaatttctcctattttctttaatgcatctctactaggttcctcatccagaccaattgtcattacagcttgtttccctggtgcaatcctaccgacactcatgaaatttacatttacattttcttcacttaatatattccccacttttccaatgatcccaggttgatcactttgcctacaaagtacaatacttccttcaaggcttacatcaacaccaaaggatccaactttggtcaaatggggtttcccatctttcacccttccttcaactgtgatctcacccgagtttgaaatcgcactagcgaa

SEQ ID NO: 4420 - DNA, 579 bp, Gossypium hirsutum
  Clone ID: LIB3825-024-Q6-N6-G8
aaaaaaacaaaacaaaatcgcctcattatttgcaattttgaacagtttccatagcaagtgtgtattgagatttatgctgtacttattgctaaagaatactatctagaatacaattgactgataaacaaaaaagaaaaggaggaatttcctcttttgagggtctaattgtacgagtttatgacctcttctgcctaactgcaaccatattcaccctgtcatgtgatcatgcgtgggattccgctgttgcaatttcagtatcttcattctcacattgagatgacgagactgtaatgtccgaggcggcatcatccatagtcaagcttgagatttcaccacacagcgaggacctttcgtcttcaccgctaatggatggtgccggagatgtatctgatgtgtaagtgcttccattgccattagcaggggataaagccacctcaccctcttccgctgcgtgttgaaggcaccagtacattatgctggctgttaatgtaaggatcattttctggttcacctccatgatgtcttcaggcaacaagaaaatggaacacccaagctttcgtgccacacttatgatatatg

SEQ ID NO: 4421 - DNA, 540 bp, Gossypium hirsutum
  unsure (1)..(540): unsure at all n locations; Clone ID: LIB3825-024-Q6-N6-G9
acaaaaaaaaaaactatggctactgaatctaccttcaaaagtaaaaattacaatctggaaaatatcgtggaattatctacatatacgagttaacatgctacaaagagaggtaacgaacactacaatatgtccccggtgtggaataggaacagagaatatggaccatctcttccgtgaatgtcctgggtattttcgcagaacttgccatcccagtgtaggattttttactgtgcattatgggcaatttggggagataggaatgctagagtgcataaggaggttagcaaatttggaaaaaaaaaaaaatagtgagtttcattaatagctacatatcagagctaaatgagattgataaaagaaacccacaaatttctctagctgttagtaaatgggagacagccacctgatcaggttgtgaagattaattttgatgcagcatacgatgggagactttgctaactggcagtggnggatcgtggccagagatagtgagggcaatgttcttttatcatgcttagagatccatcaacgagttgtatc

SEQ ID NO: 4422 - DNA, 543 bp, Gossypium hirsutum
  Clone ID: LIB3825-024-Q6-N6-H1
aaatctaacataggttgctattcttttattcaagaaaagaaaaattgtatggttcataatacagttacaaacaaatcagagttcaagcttcagcatattgttctttcaagtttcacgtattgttctttccaacctaggctatcaacctgggtttcaacaactgcattaaccttaacccttaatttaatctggcaaaagaatcaaatatattaaaaaattctatctaattgtgggaaccacttgtttgttcctcctatttttgggtctcaattagaaccccacaagctgtgtgtactgagaatatgcttctgactgcattgcgatcggggcccttaaaatataaggcggaagatcaaatgcatcaataaattccccggcaatatttcgaacttggaaactcaagtactgtgtgagcttgttgattgccttagctttgtttggtgcaacataatcaacattacggtatgttcctatgtctttccagatccgatccagggcatacagatcgcataaaagttttagagcagcttgactgcttgcatc

SEQ ID NO: 4423 - DNA, 538 bp, Gossypium hirsutum
  Clone ID: LIB3825-024-Q6-N6-H10
acttgtacaaaaatttaaatccctaaacattaagttaaaatcccccttttacaataaaggtctatatatgaagtttttgcattcacttttttttcttgggggaagtcaattcccgaacctctaactcttgaacaaatgatgaacttgcttaggtcagtttcttggctcccaaacagaagtccaacatgtcaaagaggctcatgcaaggtgcgttcttgacttctcccctccttttctataattccaagatcgaattcctcaaccccatcgttcttaatgttaatttaccttccctttcttactgcttaagttaatctctagctaagatagctacgatttaaagctgtggtaagttcatgcattatcgcatgacagagatgcctttatcctttcaacggtgcatgcaatcaaattgtttactgttgcaacggatccgagagaaagttttgccgtcggcacagaatcgaccaaaatctgaaatgcaacagttagaagagatccactagacccgccggaatcagccattcctacgtcagtc

SEQ ID NO: 4424 - DNA, 485 bp, Gossypium hirsutum
  Clone ID: LIB3825-024-Q6-N6-H11
aaatagaaggattttttgccactagtattcacaagataattaaacaggcaaaaagttgattgataggcaatttgaatgcatgatatctaaaaactggaatgtaatgaataggccatgtacgccactcttacattcgcattagcacgtacagcaatcttttcgattgttttcagcctatcaacattttggtgaatgctagcggccaaggtggcactttggcactgcaccgtagatgctctatttcttcttcccattcttgaaaaacagatggtcgggatgctccttatcccaaactccgtggcgatgttggggcttatatcagtgaccagcttggaacaagcaatcattactgcatatactaacgccaaatttgcgcacactggctcaatcttgcggaacggttctcaccatggtgcccaaaactccaccaagactggggtatcactacccaacacatgctctgcccagattgcttctgtcaccgc

SEQ ID NO: 4425 - DNA, 430 bp, Gossypium hirsutum
  Clone ID: LIB3825-024-Q6-N6-H12
acaaaagggtttatctaagccattcaactttaaatcaaaaagtacatttagaagcagattatcccatctacaactattaatttcagaagggcaaaaggaaccaacaggattcaggggggcatttctcccttagatgggatgcgcatctaaaaaaaaacatggaaacatcgaaagcattaacatatgggtttgatcaaacactatcacagcctacattggttatgctatccaccacggaccttcctactcataatcttcttcggctccggtgccttcttcatcatcatcctcatcattcacctcagacactgatttgtcagactcaacatcttcgtctttaggaccctcagcctgtctcttattgtaggccttcatgttcttttcatactcgacctttcgcttttctgccttggctacataaggggctttt

SEQ ID NO: 4426 - DNA, 558 bp, Gossypium hirsutum
  Clone ID: LIB3825-024-Q6-N6-H2
cgatcaaaacttgtaatttcatatataatattatatcgtaacataggagatgcaacatctcctaagctgattagtacatctgacggaatttgtatatatacataatggtcggttaaccgaatagatcaaaatgaaagaaggcatatgattaagcaacagaagaggaaaaagcttattctgtttagtgccttatccgcttgctttaggtgccttctgatcctaggggtgctcccggtaagattgtatgaattcggatacgcatataagttcgtaattgactccccaaatacccttgcgtataccatttcaccgaatattcgggtcactggatccggcacgttcatcattgtgccgccgggactaagcatcggcgaagacggataatcggacacttgtggttgatatgaatagccatggtgatggtgatgtatttgatgtgtaaattgtggactagtggcactattaggtgatcttggtgtgccaaaatcaggaccaacaggtctctttggaatgactatgccaagttggggagccttgcctcttgatgccatactcatc

SEQ ID NO: 4427 - DNA, 507 bp, Gossypium hirsutum
  Clone ID: LIB3825-024-Q6-N6-H3
aagcaatgcagacgcagcaaatagcagcctcagttcctgctgttatagagataaaactaaaagatagtcccataactactgggttttagtttattagctctttagcagagaatttgattcggggaagattgatatttttcaaagggaaaacccttttagaggagcaaatttagcaagtatttcagcttcgcgtttgtctgcgctctctttctttatctcccattctggtttcctggcattagcgagctgaacttcgtgtacgactttgggaatggagttcgccaccaacttttgattgtacgttaactcctccttggctttcttcttggtttctatcaatctagtgagctgtgcgcgatgggatttcagttgcgctatttgattgtcgatttcttgtactgtcaatgtgttggcttctacttccgactgcaggcttgttacttgctgtcttaactcgctgtattcttgcttgagtgaagtgaccttggtcttattgagctgaagggt

SEQ ID NO: 4428 - DNA, 539 bp, Gossypium hirsutum
  Clone ID: LIB3825-024-Q6-N6-H4
acatatatattatattcttacaaatatcatttcaagaatttgttttacaacattttcctgtgagaaaaaatacctgtatccgttccacttttgtacaaactcccaagttaatacaaacagtgattggcaacatgattgagataagctgagatggtaaactaatacatacattacatacatacatacatacatatgtagaaaaatccgaattttcagaatacaattttaaccttcccttttaccagtgaaaaagatggagaaatgaaatccagtccatatttttattcatcctcaccttcgttgttaatagatttttacggaccggttagtattcttcccatgctctgtggaaatgcataagagtgatttaggggtgtaatttcaacaccacggccttcgctcggattttctctagaaacatactgattcatgctgccatttagagcaccgtaatatgccatcatagttggttgaacaaatttgaaacttgaaccaccagcctgtgggcggctttggaccagttcagaatccaattgttg

SEQ ID NO: 4429 - DNA, 529 bp, Gossypium hirsutum
  Clone ID: LIB3825-024-Q6-N6-H6
aaaaagaaatgagatagatataaaaatacataccaaatgtatgctatctatagagcattttggttcgtgtagaagatgaaggtgtcatcaggatggcattgagacagctgcttttgtgggacaccaatattcattcaagcaaagtctaattgttgacccactgacagcccatctgccattgccaaacttgccaatcagcagcaccccgtcaatgaacataatctcacaaagagacggagaaagaggtgaaatgaacactataagacactaaaatgaatccacaaggacaaatacacaattaggaacaagtaattccacaaatacaaaatcaaacctcactcttataccgcaccacaccagctctgttcttcctcagagcacaaggctcaaaacatttctccccataaagcacaacattgagggagcatgttaagcaaccttagcaatgatttccatatttgccactcgatatttcatcattggttacgtctaaagcttctaagttgccaagctcctgctgctactccca

SEQ ID NO: 4430 - DNA, 537 bp, Gossypium hirsutum
  unsure (1)..(537): unsure at all n locations; Clone ID: LIB3825-024-Q6-N6-H7
gaagaacaaanaattgacacttattatatagctngagaataattttatgaaagataatagccagaacgtctgaatactactcttttctggggtaacatgatcggtgacttattacattgctttattaaattttccaactcgatttaggatatttttaacaagaaaactaggtatcctatcgggcatccttagataagagattgtgagtttcaacttttcgggcattgcacagctcatcaacacaatcacccctttcgaagaccgctgccgcccccattcctgtgcctatgcacatcgaaaccactccgaatcggcagtctttgccacgacgcttcatttcatgcagaagcgtagcaacacaacgagcacctgttgcgcccaatggatgtccaattgccattgcgcctccatttacattaatcttttgtggatcgagctccaacttcttttgacaatatacgaactgggatgcaaatgcctcatttatctcaaaaagatcaacatcatcaagttctagaccagcagatttaactgctg

SEQ ID NO: 4431 - DNA, 567 bp, Gossypium hirsutum
  Clone ID: LIB3825-024-Q6-N6-H8
ctctaattattcccaacttttattgatttatagaactgccctggctaaccctataacattacaacaggaccaaacttctttttatatggtacaacagtacgatcttgaaaaagaaaaaagtagaagcaaacaaacaacaaacacagactcaaggcagtagcagagcacaaaaactcgctcctttcatttaataggatcgataataaggatcatcctgggtacctccgcgggtgttccttctagtcccagcattgttagacgccgcatttgggaagtcttggttccccgttgtaccgtaagcaccctctgtatctccgccaaaccccatactgctgaggtcatcttgcctgcctgtatcatacccactacctgcggtggggtacccacggttgtcatgtccaccggtaccgccatagccaccagtgtcgcctatgttgtacccagctgtggtgtagccagtgccaccaataccaccaccaccagcatggccagctgtggcgttatgatggcgggcctcttgtttcctcagctctgcatcttcttggctctcttctttcctttccctcg

SEQ ID NO: 4432 - DNA, 566 bp, Gossypium hirsutum
  Clone ID: LIB3825-025-Q6-N6-A1
atagtaaacatatagaattctcactttatatgtacaaaagaagcttaaatccagaaattcatggataatccaacaatgcaaacttcacatgcaaactaatcttaccaccttcattcactagcttggctgctgttaccagccaatggcccggagcatcgtgtggaccccggatgacctccgatacatctacatattttagcaactttttggcacgaattggtgctggtggaccttccggaaacacgcctgaattaagtgtggttggaggtggtttttgttgtccggtgactgcccgttgagtgaatgagaaagtcgtgctgagatttgtgaggaaaccagccttacgagaagtttcaggtggagcagcccactcagtcttccggattgtgcagttcggtatatgtgtgtaaagcagacggagatgcaaaactgtctttggccacttccctttactaatgagctgtgcaccggttacgataaaaacacatttgagacttcttgtaaccagttagggtcatgttcaacaacagacctgcacacatttgagtatcttttccaccgaaccg

SEQ ID NO: 4433 - DNA, 525 bp, Gossypium hirsutum
  Clone ID: LIB3825-025-Q6-N6-A11
atccaacggtctcaaatatcatctcaaaaaccaaaacaaaactattcataaaatacaagcaggaaaaccaggaaaaactaccaaaaatctgttcttaagccaaagcacaaagaaaaccaaaaatgggaaacattcagaaactagcaatgggcaatgggcaataggaagagcactactattcaatttctccaaacactttattcttccccatggaaaaaaatatcccatcatttttacttactggtaatacataagctgctgctgggatgtcgcaacgttttggtatccgccattgtacatcgcctgactagcttcaccaccactcattcccatggctgcctgtgccttaacggcatactgaccttggggatgcatcatgttcattacttgagcaccaccagccatatgtgcagctgttggtggaggaagaggaccagagcttgttcccagtgcggttggtttgctaccccatgagcacttgattggtttactgcaaagaattcgagcatttcccatctgaatggc

SEQ ID NO: 4434 - DNA, 488 bp, Gossypium hirsutum
  Clone ID: LIB3825-025-Q6-N6-A12
ggaaaaaaaactggggggataatttccccattccttcaaaaaccatagctttgggggggaaaatttaatcaaaaggaagaagggaggcccggggtgggggggaaaggataccctcccccccccaaaagaggtcaaataagggggctaacaaggccccgggggcgggggcttccttccaagccggggctaaaacagggggggtttttgaaactcgacccccgaccccccttaggagcaggttatcgttggaaaaccgccgggacattggggatcccccaatttgggaaccccctccggggggagaaaagccgctaaccgcccctgggaaaacaattggcggggaatttatgggcatcatacctatgggcccctcaggggctattttctgggcgggggggtgctactgcatcaagggggcccgggcttgcttttcgtttattgggcgcaactttgggggggcttttccaaacggaacgagttcggggggc

SEQ ID NO: 4435 - DNA, 515 bp, Gossypium hirsutum
  Clone ID: LIB3825-025-Q6-N6-A2
aacaccaccttaaatatcctcatatataaaacaaaattcaagttgttgcgaaaacacacaatgtccctaaaacttgccaattcgaaccaccgcctgccttaatttgattcactgcgtctggtagacgcatgattatcatcatcatcatcatcgtaaacagggctcctgtcatccctagggggtggactaaggctgcggctgtggccattttccttcctagagctcctataagccccatcctcagccccagcatcagcatcggggcttctgctccttcccctaggacttgcactataatccgaaccattcgcatgcctgcagtcctttggggaaggaccgcccccctcttggggccttctttcatcgggtgctggactatgcttcctcccttgagatggtgatggagaacccttgtggcgcttagggctccttgatattctatcctcgcgctcgtaacttcggtctctcttcacaggtgatcttgatctactgtcgctgcgtcccctgctgtaact

SEQ ID NO: 4436 - DNA, 516 bp, Gossypium hirsutum
  Clone ID: LIB3825-025-Q6-N6-A3
gggagcactttaacatttcaattaacaacatttatacaactcaattacagggataaaacatttcaatttccagcaactaaacacttcaatttgcaacacggaaacacttcaattgacagcatttaaacacttcaatttacagatccaccaccttttagcatcatttgcaaaactatcataagtttatatgctcatagccgcaaacatataatagaacctataaagctaaaatattagagactggccttcttttccttttccaaaatttctcttatgggacaagggagggctgcctctttgcttggcgttgaacagttttactagcagatttctactccatctggggaaacctaatctttttcgtaacatcagtcttcccctcaaaacttgctccttggcatcagagagttgcaactgaatagacttgattaaagagtccttttttgcagcatcttgcttcaatttaccaagttcagcacgaacatcattgatctggttttttgaaagctctgctga

SEQ ID NO: 4437 - DNA, 377 bp, Gossypium hirsutum
  unsure (1)..(377): unsure at all n locations; Clone ID: LIB3825-025-Q6-N6-A4
aaaaaaaaaattttttttttttttttaaagaaaatgggtcctttaaagggggggggggtgccctttaaaattttcccccttttggggggttttttgggggggggtaaacccgaaaacattttaaaacttaaaaccttttgggttggggcgggggggttatttttgttgggtttggtgggggggttggggccccctttttggaggggggtgttttgggttttnaggggggccaaaaagtttggaccccgttttcgggccccaaaaatttttgggtgggtgcccttaaaaagaaggggggggttttcttccttttaatgggtgggagcaaaataaaagtattcttttggggggggttgggggtccgggggtctttatcc

SEQ ID NO: 4438 - DNA, 525 bp, Gossypium hirsutum
  Clone ID: LIB3825-025-Q6-N6-A5
gagtcgaatccaaatttatctttttaaaattaaatcggacttcgacaaaagaataaatttattttttgaaccaatccaaacccgcagctcagtccatcgagtgctctttaacaaagatgctgaatagtcgtagtcatagagcagaattaagttaaacgatagactttcataccctaatctgaaaagtgcatcaaaagctagaatagtcttaaaatggcggtctttaatcgtaaaacaaaggagatgaagaactaaacattgccatgaaggaagctgcaaaagagacaagaaaatggaaaacccattaagaaaatcacccaaaatcttcttgtcagttaacgctgttagaaattagaacaaagaggctcccccatccatggacaactttacaaccatccttctatgccttttagaatagaagacatgcgaaatagtcaggcattgctatacatttgttatcatcaactaaaaagctgaaggaatcatggtaatgtgtcttagtggatgtgaaacatcagtaccccc

SEQ ID NO: 4439 - DNA, 515 bp, Gossypium hirsutum
  Clone ID: LIB3825-025-Q6-N6-A6
gacaacaaattaatatctattgatgggtaccccaaaagataacttgggtttcactaaattgtagtaaacactaaaacactagtatgtagtattcaacacttcaaaatatattatttcataacactgactttttactcctccataagaacatgacaaagggtctgtgcatgtgaagataccaaactcgaaaaataacagctaatttggagatagaaaatgcactcgagcaagtgtgtactcttttccagctatccaaacccctgtttgcgaccactgcacatcttcccagtcaacattctccaccaatacctctacgtgctcgagtggcaagggaattccaattgaacgcatgactttctgggaaaggggcttcttacaccgagaccatctgaaaacatctatcagggtgttctcagagtcgttcttttcaccatttgaggaatgtgagtggtgattttgagacttctctgtatctgcttcatgtgcttgagacgctactgtagctttcaccattt

SEQ ID NO: 4440 - DNA, 540 bp, Gossypium hirsutum
  unsure (1)..(540): unsure at all n locations; Clone ID: LIB3825-025-Q6-N6-A7
aacagnaaaagtcaaacgactacaattttataagtctaatgacttaaatgaaaactttcaaataatacattataaacccaacattggaaataaaacatacctttattgaaccatttcccgtaaaaaccacaattatgattatttgcttatttagcaatggcactattttttttcactcaaaccccataattctaagctttcatggaagcttcatcaaagcttaaaagaaacatcctttggatgatgaatgacgatttaattataagcatcaagtgtcaaaaaatcatccaaagttgaagcagtgcattggcgagtaaaaatcttgcatgcttctttatacattcctttcttaaacttctcttttccgacctcacgttcaatccgagccattttttttttaaccactcgcccaaacacatggttcactcgaaccccaagcccatcaccgtctaattcaacaccatatttcaaccactgccaaatttgaaccctactgatctcggctgtcgcagcatcttccattaggttataaagcgggac

SEQ ID NO: 4441 - DNA, 523 bp, Gossypium hirsutum
  unsure (1)..(523): unsure at all n locations; Clone ID: LIB3825-025-Q6-N6-A8
gagtaagattctaccaaatcaggttcataaaagttgaagctactgttctgtaggaaaaccaaattagaacaaaggagaatcaatccataactaaagagagctcaacgtttgaaggattctagtgctaaatgaaaattcaactcaagcccaaagtagctgtcagaaaaccaatagccatcactggactcccccctgcatggctggaactattccttccaataaagcaaaacctgcagacctgcaaacatgcaattatgtgacagttttcttaccattatctaacatacagaccaaccgataagaaaaccggaagagcagccagggataaattatagcctgatctctacagcttgatgtttctgccatgtgctgcttgcttggctgcaacttgctcatctgacaaaggcaaatagtagatccgaggagttgctttggttttccaaaatagatcatccagagtgaccaatgggaggatctggtttctctggaggtggcggcggaagaggnagacgttctctaactg

SEQ ID NO: 4442 - DNA, 553 bp, Gossypium hirsutum
  unsure (1)..(553): unsure at all n locations; Clone ID: LIB3825-025-Q6-N6-A9
ataagaaaactaccgattattaagataaaagattttgaactcaaaaccaaaacaaaatacaaaggcacccaaacatctgcaaaacattctggctctgctctgctacggtgatcacatgcggtggcaagtttctactgtgatctaaccctgtgattcaacatcatctcccggagatccgccgcatcgatctcagccccacagttctccggccggtaataccccgtaacagggtcaggcgcccaagctgaagaataagcccttgtctccgacgacgacgactctttcatcgcatatcttcgttccactttccccatcgctccaggcctaccaaagctagccgtcactgccgccggcggtgcacctgagtaacctctccttgatatggagacataaagagcatcaaaaacagaagcaccaaggaacttaaaggaagaaacagagcgagccatatttatttttacttgcttatatatggnagtcgtagggtaaaaaggatgtataaaatttatataatatataacgttattattagctactgcagaagctgttctga

SEQ ID NO: 4443 - DNA, 543 bp, Gossypium hirsutum
  Clone ID: LIB3825-025-Q6-N6-B1
catcacataaaaatttttattatacaattttaattgactcaaaatttggtatacattattgaacataaaatataagggtgaagttattaaaatactaattataaacaaaattatatacaagttgcgtttaagggcgcgcagaaaacagaagcgtgatgaggatttgaggatttgagtcagccagccagccatccatacacaccctggcctcttggtccattatcaagaatcaaaggctttaacgtcgccaatatcagacccgatcacagttttcaaatggaagattagacgcatgtgggatccgtgatggctacaccattctctttttttaataatgaacccactgctccttgtccaaaatagacttcccaaattcatgctttctccattagcatcctctgtagtatggtttgtttgatgtaaataaaagggaaatcaatcatatacattaggaggataaaaaaaaaaaatgggcacatggtagggataaccttaaaaccactttatctttatcccccgaaagatgataacataggatcatca

SEQ ID NO: 4444 - DNA, 587 bp, Gossypium hirsutum
  unsure (1)..(587): unsure at all n locations; Clone ID: LIB3825-025-Q6-N6-B10
aataataataataataaattaaaaagtccaagtccttttacaaaaataaaggcctaaaacactaacccaaagtccaatttattggcccaaactataaaaaaaacctattaacttgaaacccaaaacaacccaaataaaatagcactccactaagcccaatcccagaattggtccaaatggcccgtgcaggggaagcctctggtaaacacacagtgtcatccagaattggctctctactgacgcaactggtcctaccccgacgaagatgatgttcgttctcacgtagcgcctaccacagtcaacacgaaactacggagaaggaaaaaacaaacacagcaaaaggaatacacgagaagcatcaaaatataatggaaaaatagcaaaaagaaaaaatagatttttaaatttttatttttccggctataaaagccaccgagtgtacctgcaaatatttacgcatactgaaatacaccaaaaggccaccaaaattcaaaggtgattttcgatttaaatatctggatactctattttttttcctggttttcgctcttttgggtttatcattnttatatttgaaagcaaataaa

SEQ ID NO: 4445 - DNA, 524 bp, Gossypium hirsutum
  Clone ID: LIB3825-025-Q6-N6-B11
ggaatagaaattaagcaataaacttcagttgaaggttacatcatcatcatcatcatcaccaccaccatcatcaaagtatcataaattttgagatggcagcaacagaaatctaatttaggaatggggaagaaaaatataatgaaaagaaaaaaactggtcaatttctttaaacatgatggatattattctcatcctgttctaactcttttgttggaataataataataaatgaaaattgaagcctcctttcgtcaaactgacctcaatctctttgccttcaccttgttcctctttaccttcaacattaaatcaccaacagaatccgaaaatccgaagaaaaaatacaaatgttatttaccaaaacctttttttgatgaactacctcaggagggctcagctaaaacatttttcagttttgctgagccacaagttgatcgagctgcatttgctcaagccaagctcccagcatggcattatcaactgtatccgagttcctgctagaaccctcacctgagaccggtgct

SEQ ID NO: 4446 - DNA, 545 bp, Gossypium hirsutum
  unsure (1)..(545): unsure at all n locations; Clone ID: LIB3825-025-Q6-N6-B12
atcccagacgaaaccaagcacttaaacatagaaaaccaaacgttcatacgcttaattacatgatgcctgcctgcctacgttctttctgctaatattattcctgctaacgcattgcggactaatttttcagtttcggaataactaaagccagcagttatcggatcccaaactacaatcatattatctacactttcttacgaggtagaaccttgtttaaatgcaggtaagggatagaacacaggcaccctttattccaaggttttcaacagcctaaataaacccgctgcctctctaatccttgaaaactcgatgcagaaggcttgaacttcgataaacagatccctaacatcaataattctgtttcggattaaactctgcaagaaaacacatacgagtcgcacaagcctattctgcatgtacttatcctgaattttacaatgattgtaatatgtgaggcacaaaactttgttttaaagaagagggaactaatatgaaacanaaaattgaacattttaactttgtataaattctcaacagttattcta

SEQ ID NO: 4447 - DNA, 501 bp, Gossypium hirsutum
  Clone ID: LIB3825-025-Q6-N6-B2
gggaaaaaaaaaaaaaaaacttcgtaatttttttcataacatatgcaaaacatcaatagagagaaggcgtcatgggacaaatctaatttaacctggggggggggggcggctccaacgatgagaaatggaaaaaagccctctccataactacaaagctcaacctttatccccgcccatacctatatatatataaacaaaacaggaaggggattttaacaaaaggcagaaacgggtaaatacaaaggagcagcccccaaaggggaaggccaagggggacccccagggaaaaagcccggaacgaagcccccactaggaaaaaaccctaacaaccttcttctccttcttcttcagcatcccaaaaaaatcgggcatatgaggctagcacaaaacagacggcaggggcggggttaaaagcttgaccgaagaaagggggagctctccgatcatattggggaggggggcatattaaccgggggtacatagacaaaacattcccaacat

SEQ ID NO: 4448 - DNA, 534 bp, Gossypium hirsutum
  Clone ID: LIB3825-025-Q6-N6-B3
gaaagttcaagcttttgagtttcattaatacaccaaaaatttacagaaatgggaacatgtcaagcctgattaagtacaacaggctttctcgcctgtgttacaatctgcatctccgattagtctcgacatcagaaatccgaaaagcagaaccacaaagaaaaatggaaggcatctagtgtttttgattacttttaaacccgacagttctccggtaaaggcaacacaccgtcgaagaaatcaccaaagtacccgtgaggttcgtgcactaacctcgatatgatgtctctaagtgttattactccttccaaattcccgtcatcgtccactacgtacatacgatggatcttttctgagtcgagcgtctggatcaattccttgacggttttatctctcttgcaagtaaccgtgccgcttaacatcggcgatctcttgtcgtgtttctccaagtagtttttaactgctatcaagaagttcttcgccgtgatagatctgtaatcgcggtagatctctggtgcagttagaaggaactgtaca

SEQ ID NO: 4449 - DNA, 498 bp, Gossypium hirsutum
  Clone ID: LIB3825-025-Q6-N6-B5
ccatcacagctccaggggtgaatttctttaaaatcaggggtcaagtttaggaccttgctgaccaaaaatttccccacccaatcatctctaccggggcaggggggaaaggaggtaacccctggaaaaagttatttgaagggggcagtatatcttttgccgatgatagagattgaatcaactcatctaatggccgggcaaacatgcaaactacatcggctacattccgggttatccaatcttcatgtcccctcggctgaaatgcaggagtttccccccaatcagaaaagaccaccttgataatagggagtaaatctaacttcaaaataaattcacctgcactagttgggcccaaacaatacccaaaacagccccaagagtttggatttaccaaaacaatttgcaacaatggaaacttggttttaaaatctctaatcaaagttcgaaaggataattcatctttggcattccccactagctgattagggaacattctttcca

SEQ ID NO: 4450 - DNA, 547 bp, Gossypium hirsutum
  Clone ID: LIB3825-025-Q6-N6-B6
agtaaatatctatttggccatttcacaatttctcatgttcgaagcaaataaaaaaaaggggaaaaaacccaaagtacagttcataataaaaacaaagattacattaaaacagtgcgtgccttgtacatgcagatgtatgccatgtgccaatcacctcccccggaaagtttaacaatgtcctcctctcgctgcgggatagggttatcatcgtcaaactcaatccatttcccgctttcttgcttgacccacgcaacataatgccctgaatcggcacttcggcccttgtgggtcagcacagcaaccaaatcataaatcccagttaaacgtgtttccttgtcagagggaaccccttcttgagatgtagtcacagttgattctccacttgcattggatgacccctctccatcaatcatcttgacatcatcatcttttgagctggagcttttctcattagctttcaaaccgagctttttaccttcctcatccctcaggatctgacgaggaccttccaattgtttgcgaagttcatctgaacatagatcataaa

SEQ ID NO: 4451 - DNA, 557 bp, Gossypium hirsutum
  Clone ID: LIB3825-025-Q6-N6-B7
gtagaaatcattcccccacacaccactagtagacaattcccattatttgatcccataaattgggtatgagaataaacacccttgaccaatgggccaaacgatgaggatcaaaggaaccaatactagaatatgagttattcattctatgtttaacattcaagaattaagtcaaccttaattggagcaaaaagaattacagcttctccacaggaaaaccgataacaggacttatctctgatgccagtgagcgtagctcgtccacttcttcgttgcttagtctccagccaagggcacctgcaaattcctcagcttgtgcagcatttttggctcctgggattggcacaacattctcctgtgctattaaccagttgagtaccacctgtgttggagttttcccataattccctcctatttccttaattctgataaggagaggttggagcttagttaaaaactccggagtgtaaatctggcctctaggtccagatggcggattttctggtttatatttcccggtaagggcaccttgtgcaataggacaataagcaatcaacgtg

SEQ ID NO: 4452 - DNA, 527 bp, Gossypium hirsutum
  Clone ID: LIB3825-025-Q6-N6-B8
cgggaatctttaaacttaatttatctgcaatgttccagaaagtatccatgacaaagaactaaaggttgggaaaataggaagactataaagaaaacaaacatcattcgatgttttgaagtttaaaattgctactgctctaactgtatgatctaaagtgctaatagaactttacagagtaagatgtcatttaggcctcaccaggtaggatgcccatatgtcatcagctggaggaggtggctggacccagtggcttggaatgcggcttcctcctggtctgatataagcatcccatgtccttctaatctcaataagtgtgcccatgtcagaattgcttccatggtaatagtgatagaactcaatcggtaaattagtcaaaggatcatatgtccaagtgtaaccatgtccttccaatttatttttaccagattccatatcagtgactgtaccagagccctttttgtcctcatttggtgttatttggccttttctctccttgttttcaagttgatcagtcataggatcatttg

SEQ ID NO: 4453 - DNA, 538 bp, Gossypium hirsutum
  unsure (1)..(538): unsure at all n locations; Clone ID: LIB3825-025-Q6-N6-B9
acataaatgctctccctttttatatattatttatcaaacaaggtccataagaaggtgattcaagtgaaagaaaaggaaacaaaaaacaaaaaacaaaatcaaagaccttaaaagaagaaataaaaccaattctacttagctgaaatgaagccaaagaatatttacatctattcctcgtaatgctgctcccaaactacaacaattcccggggccaaacccatattactcaaatctctcctaacagtccttcagaaccaagtgcaaacaatcctaaaactcatttcgactatctggtatcgatatacagatatctcgatatcaaaactggcacgaagtaccgagcctctgtatctgcttctgacctaaagtaaccgattttcgtttttcaaatcccgggtagagcaactcctggaacttctctaggaaaagattccattcctcctcattcatgtccgccagcttcacaaagctcacatttcctgggagctgctcatttgcactcctatgcccanatgagttattaaggtaaccattttct

SEQ ID NO: 4454 - DNA, 543 bp, Gossypium hirsutum
  Clone ID: LIB3825-025-Q6-N6-C1
gggggggggtgtggttttttttttttttttggtggtttttttttttttttttttttgtggttttttttttttttttttttttttttgggcttaaaaaaaggtttccttttaatgggaaacccttttggggggtggtttaaccctttttggggggggggggggggaaaaaggggggggggacccttttttttttccctggggggggggggggggtttcaaaagcagggccgggggggccttgggtgaaatttaggttcggggttccctttttttttggttttttgaaaataaaaagggaaaacccccttccctttgggggccccaactttttccaaaatggggtcaaacgcttggggctttttttggggttctggtttgggggggaaacttggtgcttatgggtttgcaaaccattttttaacttggggagggtaggttttttcccacggggcaagaaattttacttgggccctctttcatgggtccttgcaaaaaccttttgggtgccccgggaacaatttttttggccctagaggctggggg

SEQ ID NO: 4455 - DNA, 325 bp, Gossypium hirsutum
  Clone ID: LIB3825-025-Q6-N6-C10
acgggaaggtaaccaaccaaaattgtttaccgaagtttcaaaaccaaacatatttaaacaaccaccgtaacaaagcataaaaaaacccaccccccttaaaattggaaaaacataaacacccctaagcagtggaggaactcacagttgctcaacacggtaaagacctcgcccttggaccccacgggaaaaaaagttatctttaaggtcttgggaattctgggtagccgactcggagcccaaagccatgggaaccttggcagaggccaagggccccccaggtttggttttggccgcaacccacccccggggagctttccctttaacc

SEQ ID NO: 4456 - DNA, 526 bp, Gossypium hirsutum
  Clone ID: LIB3825-025-Q6-N6-C12
atggcaacatggcatcaaagcctattaaaaaaagctgcccttaaagagatgaaacaaaatttatgttttttgggtttacaattgaactttttgccagtagaaaagaagggatctaactagtttaaatcttcaacttggcctaactacatgataacatttttctaaccactattttattgcacatcttgaacaaatatgaaccgcgttcttcccgagtattattacatcgactgtattttctgttaccaggtgtatgtcaggatgctagccgtgcatgaattttctgaatccgtttttgggggatgaatctacttggaaattaccttgaagttgaaattacttgatgctttggttataaaatggtttggtgcgcgtatctgcccttgccatttgtcatttgacttaaccgggtgctgcgagaaagaagcagcagcggcagctggttcactcttagatagtccctcagctcccgatgcctgactggtagaagaaattggctcacaatctgttttaaaaatctggtatg

SEQ ID NO: 4457 - DNA, 526 bp, Gossypium hirsutum
  Clone ID: LIB3825-025-Q6-N6-C2
atgaaaacgaactatttatcgcttggttatattagttttcacatttgctaaaaagtttcaacttttaagaagatttaacaaagctttgcaaataggataacaaatctgatcgtcttctaatccaaagtccaaggggttcaggtcagctcataattatttagcttcaaaaagaatggaagagtatggagccacattataggtgctgccaattccagggactccttcacccacaaaatcatccggcgacgcaagattggtgtccaccacacggaaccaacgcctttttggtggtgccggcggtatagaaactttaacgaaaaagtcatgagcattgaatgccagatagatttctccaccacctttgtcatgaagcgtaaatgcgaggaatttgctgtctgggttgtcccagttatcctcatgccaagtcacatcacttctgtcgagaaaattcttcatgggaaaatactcgatgcttttgccgatagtgtatcacctcagagaaaaacctgaagtggtcactcttcct

SEQ ID NO: 4458 - DNA, 550 bp, Gossypium hirsutum
  Clone ID: LIB3825-025-Q6-N6-C3
gaaaaaacaacaaaatcattgtataaaactctaattctgatccatgtctttgtacatgtaaagtactgacctgatctttagtacaatacctaaatctctgtaggtacaataactgctaaaccaaaatccaccaacaatcaactagagtgatactttacttatcactaacattcagacacgtgtagtgtatactataccgtcaaatatttgagaacggctgcacggatcttctccatgaaagccgctgcttgcttctggttatccatgtttgcatttgctatgttttcatctagaagtgtcaataaggatctatttagttcattgccttcaaccatctcgagcaactgcatgacaatacaataactcagctgacctgcataaaattagaaatataaaacggactcaatgataaacaggcagttacggttgcttttatatctttggatgacaaaatcttggtgaggcttttcttcgcagttataagttcggcttgcattttatcatatgcttcggtgccttcttgtaaggccttttgtaatgcctccagttc

SEQ ID NO: 4459 - DNA, 505 bp, Gossypium hirsutum
  Clone ID: LIB3825-025-Q6-N6-C4
aaaaaaaagcatcttgtatgtttccagtttgcattattcagatcataagctaacatcaaatgtacatgcgagcctgcatgcatctctaaggcatacagtcatccaaaacaaaaacataggaagtacaaaaaagaaggggaaaagaaacagtagggcaaagctaaggctacatactgcacgaaagaaggaaaacgtcgcgcaatgagatgtctccacgtgtgaatcaaaaaccctcacatctgtaagaaacgagctagctgggtcgggttgacgataccaggtatatgggctccatcagtcttgagcaaactcgccacttccacgtacctttgatgattatcctccctcggcttcgactcgaagtcgcctgctctggatctgtcgcttggctcggcgtcttctttgattcctctcctggaatcagtggctggttgttgcagttgggccgggtcccacggttggccgaacagtgtttcacgagtgaggaactcgtcggacgcgtggg

SEQ ID NO: 4460 - DNA, 534 bp, Gossypium hirsutum
  Clone ID: LIB3825-025-Q6-N6-C5
aaattaaaactgggtggccaatctttttattgtcacaactatttacccttcattaatacaaacattaaagtcttaagcataatcatatcaaacataacattaccctaatttaaactttttaatttctaataaaagagctgaggctgttgttgatgatgtgtcacaaggtgatcaagcatccaaaggttcactgactcaggctcagcgcttccactcaactcagttgtcatctcatcaggctccaaacccaggaaggactccagactcgagatttgctccttcagctccatctcgctttccattgcttcactcggcctgtaaactccattctcgtaaccaaaacccataaaaggttgtggggttggtgggctcttggtttcagaactcggtggagtcaactcaggagccatcatacaccttttcttagcaggaggctgagttaggcgtggagtttgagggaagttgagcttggctttgtccccgcggatgcgcttggcggcttcatcgtaggctcgagccgcttcttcagccgtg

SEQ ID NO: 4461 - DNA, 475 bp, Gossypium hirsutum
  Clone ID: LIB3825-025-Q6-N6-C6
ggaaagaaactttttctttattaaccgggaatcgacattctgaacatattacaaacgggggtttagctccaaccaagctggcccaatctatcaccaaaagccgttttattattaaatctcacaaaaaatttattctaaaaacaaaggggaggccttacattagggccataactcatcttgaaaattggattgatttgaacaagtatgccctcatttaagggttccatgaaaacaaggggggggtttcccattcatagtagggtgcgacagggccaccatatcgggcccccttcactgaatgggctgaagcaatggattctaactttgccatcttttcgggggttaatttcacggacaaagctccaatgttctgattgaagttttcgatcttggtagttccaggaatgggacagacatcgttcccttggggagggacccaggccaatgcaagctgggatggggggcatcccttttt

SEQ ID NO: 4462 - DNA, 552 bp, Gossypium hirsutum
  Clone ID: LIB3825-025-Q6-N6-C7
atattgccttaaaactgaaatattaccctggccgttaacatcgccgtaaccatttttagctttcggcaatgacttcatccattccgtcgccaccaacaccttcttcgtccagccaccgctcgaccggcgcgcactcggctttgtggcgtagtttccaatcgagcgcctggcaagcgcgtgaacagtaattcacggcaccacaaaccgaacaccggcggaactcgtgttttctcgtctccggcctcccacaaccaacatgcgagcatagcctcaaacccgggccgggaatcccgtcccgagagccgaaccaatccgttaagaacttgttcgccgggtgagcctccggtgccggtacattgcatccaaaatcactcagcaacgggcatcccggcacgttcggataacggttggtcgggtgggggatcgggtgggggctccaggtgagccaagagcacgtagcgatatttgaaacagatgctgatgataaacccgccgcaagctctcgggcgttggcttggacgagaaaccgacgaccctcggtgatgttttgtc

SEQ ID NO: 4463 - DNA, 431 bp, Gossypium hirsutum
  unsure (1)..(431): unsure at all n locations; Clone ID: LIB3825-025-Q6-N6-C8
accaacacaaaaataaagacgagataataaaaattatntgaaaaggaaaagcaaaacagtaatccatagcacaacaagaaactagttatattgttattctcttttttctatccaaacccaaataaaacatcaaaaccgcatttagaactaccaaagtcttttatggttccatctaagatttgcaataaatgaatttgaaactacttaaatttgaaactacttaggaccaatgtctttgagagcacagatctgctcttcccccattgcagacataacagacacaaccaggtctttcccctcagcaaaaccatccttgatctgtttcaacaggttctcatcagttgggagcctcagatcatccttagtgtctccactgtcagtcagcaaactcacaaatccatcctcagaaatgtcgatcaactggtagtcag

SEQ ID NO: 4464 - DNA, 544 bp, Gossypium hirsutum
  Clone ID: LIB3825-025-Q6-N6-C9
agaaaatccagtgtcttgctgatagtgaaggtagcaaacaaacttcaaaaatcttattacaagggtgaaaagcaaggaaggattagatcacttccatcctttatttacaatcttacaagaaggcatagcttccgctatatagtttaagagttttaccaatacaaaacctatattctggtagcttcttatcaaggaatacaaacatttagtattccaattgtgcttcaaagcgaagaaaatatgggaacaccgggtaaggtagacccggcatcaacgatgaatatgttacctgttacgtattccgaagaatcatggattaagtatctaactagcgaggttaatgcgggatctgccgtaccaaatgttcttaaagggttgatttttgtagccacttcttgtagccaagccttcttcagaaggccttctgtgatctcagatttgaaaagcccaggtgatattgagttcactcggattttatgcatccccagttccatggccatggtctttgtcatggtgtttaggcctgcttttgaggaagcataag

SEQ ID NO: 4465 - DNA, 292 bp, Gossypium hirsutum
  unsure (1)..(292): unsure at all n locations; Clone ID: LIB3825-025-Q6-N6-D1
ttcaannnatcaaagnatttnnncaatccnnagtaaccanntcgggnatccnnttaatgaatgcgnnnatccctttcattcttgcgctttgcatctanaatttcttgacnnaaattctactcccaaggcgttcaaatctcttcgcnnatgccttattcanncatcatccaccgtgatgccaatatnngaccaaagccacgaggttctgaattcccggtgtngaatatcctttngaactcagnnggtcactttcagtacccccaattatgtgnnttaattcaatggntagctg

SEQ ID NO: 4466 - DNA, 561 bp, Gossypium hirsutum
  Clone ID: LIB3825-025-Q6-N6-D10
agaatataagaaattcctggaaagttaaaaaactcaagactcaaaaacaattcacttgtttgatggaactttcgtcttaaatgtttagctcaatccagctagaatttaaagcttaaaggattactcatagctagagaagaccaaaatacttaaccctaatcagttattgcaatacaaatcgaaagaaatcaggcttgatgagagtatcctgccacaaaagatgcacaaggctcttctcatcgagtaatttccgaaaaatgttgcatatgtaactgtgatgtttgttttgacgtcaaaggggcaaaattaaaaccccatccgtaacaaaattgatctttggctctttttgagagcctagacggcaaaacacccaccacattgggggtgcagttatacaggtgtatgcaagaagaagacatgtattgtgacaacagtaatgtttccctacacatatccgtttggtctctctccactttgtgcggatctcttctgcatgcttgcttcataatgttgaatagcagcatctagagcctctagctgtggatagatatttgacatggc

SEQ ID NO: 4467 - DNA, 562 bp, Gossypium hirsutum
  Clone ID: LIB3825-025-Q6-N6-D12
aaaaaaaagaagagtatgaataacataggtaataataacaactaccaagcttgtcattttgtatccccttacctcactctctccccaaacttcatccattatagaaggtagccacaaagatattacacatttcacatgacagagacctattccagctatgagacctagaaaattatttttgtcaaaatattttgcaacagtacaggggaaaaaaacctatggtcttacaaacttaaataagcttcttcttctcgaagaaagttttcaaatgccaaaattgtaatcccgctactgataggcaaagaaacagtgagaggaacgacaaccagaacattttggaggttgtagctttgttcagttcctgcatttcttcttctctctcacgcaaataaaacatttcctcatgaatggattgaatggtatcatacagattcttcagctcaagttccatcgcatcgacttggcctttcttggcaacgttagtccagtccttggtgtggactccagtcctccaatcgaaatcaacggtgaccgtgatcggcggcgaatgctccggcgccca

SEQ ID NO: 4468 - DNA, 522 bp, Gossypium hirsutum
  Clone ID: LIB3825-025-Q6-N6-D3
tcgtgatctagaaccggtcgcgggggtcgactctgccagttatatatcgggtccagaaagtgtataagtgctgaataatacagagagctgagtagcaaaaaggaagtacagcatggaacacagtctaggttcctggtgtggaaagtgcaagcggctcactattactgagaagagtacgaaccgcgatgcataaagagtataggctggggtgactaatgagagaactatctaacattaatagcgttgcgttcactagcccgatgaacagctatgtaaacctgtcctgtcaaacgaataaatgagatcctacacaaattctgtatgaaagcaagcgtgaattggttgctacaatggattttttttcatgcatctacaatgccatcacttgaaggatcttcacatccactgatttgctaatgtataactagctttctactaggtgtatatttaaactggattatcaaatgtgatacgggtctgattaacataagaacttgtaggagaggtatcataatgctctaa

SEQ ID NO: 4469 - DNA, 531 bp, Gossypium hirsutum
  Clone ID: LIB3825-025-Q6-N6-D4
gaaaaaaaatatcaaatttcaaaatcgttaatgactaaatcaattttgatgagcaaataataatacccaactataggtgactatccatgtagggttctttggtcaatatggctaattccaagaccaagacaaacccttgattcaaccgtagcaacaaggaaggaacatggaaaagggcagaaacatgagactgaaatcatattttggacaacaacaaaaaatggttaaaatataaacacggatggaggtgaataaattggaaaccgaatgcccttactttctttttccttctatcttacatttcttggaactaagacccttctatgttacaaatcaaaattgcagtggagttttcattcaccacagcttgtcgtcttcttcttacattctcaattacaaactgccttctcagccttttcaagcaattataataagaattgcagaagctttatacctctctttcttggaaggcaccatctcagccgagactccgttgccatcgtgtgtttcaaataaatatgtgattgttga

SEQ ID NO: 4470 - DNA, 571 bp, Gossypium hirsutum
  Clone ID: LIB3825-025-Q6-N6-D6
gtagcaagtctgtaatccaaatttttttatttttcttttttgagaaatcaacatgcatataataataataataataaaaaacctaaaacccatcctccctgagaagaaaaacggtaaaaagaaaaacatagacatcataaaatgacttacgaattcttagaaaaccctacaccgcttgcctacaacccacccccccaacccaaccccgccttggattattcatttatatccccttgaagatggtcccatggtactgtaaaatctataataaaattctaaagccagtaaaaaaccaccaagcattcattatattttacaagaccacaaacacatccccaaggggatccatagaaaatgttagcaaccgtttgataaaaagttcttcactgtttagggtatcctgaaccatcttctgaaagaaggccgttcgagtgaggaattggattggcttctttgatcaaatcaccatttgttgttgctatatctttcttttcatctccaggcttttcttcccatacctgcttttgcaactgatgtttagcctttttctcctgaattgctttctggcgaa

SEQ ID NO: 4471 - DNA, 545 bp, Gossypium hirsutum
  Clone ID: LIB3825-025-Q6-N6-D7
gcataaccaggaaatcattaatgattttatctagctgcagttcaatgttaaattgttaagaaatatagctcgggttgaggatggataaaaagatagctactaggcaacagaaatcatctaccaagcaaaattccctacagcaaaactacaacatgattgaagggcattgttaaaatgttgtgcaaactaaatttggacagtcgtgatgggaatttccttcgatctttaacacatggaccttgatatatattgcaagtctttgacatgacctagttggtctcccagaagatgatttcaccttgctctccaactagaccaagatctttgagccttctttcctggtaatattccaactcatccaattctgattcccgtcctttaaatatctcatcaatttgctggagcaccttcttttctcctgccctgattcctacagcaattttcagcctcgaatcaagattttcgtcttccatcagcttttcatcctcttcaatggtggtatgatagccagagagagcagatttgcaggcatcacggacaacccg

SEQ ID NO: 4472 - DNA, 218 bp, Gossypium hirsutum
  Clone ID: LIB3825-025-Q6-N6-D8
actaaatactatcatcatcatttaaaaaaactaaaaatagcatatcccagaaaaattggggcaagcccaatttttagttcggaaacactcaataccctaataatgattggtaaacacctagacctacctgaaatgattatagatatgtgtagtctctaactttaactgctcatacagttttgttcagatacaaataacctcaaagattaactatttag

SEQ ID NO: 4473 - DNA, 522 bp, Gossypium hirsutum
  Clone ID: LIB3825-025-Q6-N6-D9
ggggcatatcaaatctcaacccacatctctcaagaatataagaattacccaacaattgatgagaaagaaagataacaaagaaccaaaaagaaaattttgggctaagggggtaactttttctggggggggtaggagatatattttgattggttaagggttagtacactggtgcaaaggggatcccgcagtcaaactattatacataggcaaggcaactctttgtttgaagaacaaagatggtacacgtcaatggcaatatcaaagacagctttggggttttagttcagtctgacaaataacgcggcttggccggggcatgtgaaatattcctacttcacccccactagagctcgtttcagtccttctctttgctctgggggcaactttgtagggaacttcacctcaaatttgatcctaagatcacccctattacctgtctcctttgcaattggcattccttccctagcaatgacgagctcataacctgggctgataatatcggtcacaggcaacgacaagtta

SEQ ID NO: 4474 - DNA, 508 bp, Gossypium hirsutum
  Clone ID: LIB3825-025-Q6-N6-E10
aatgaactaatgattagtgaactaaaaggatacaatactcctgtttgaactacacctaaaagcaaacaaatcagctcacattacaactgcatagtccttttataagcatcgatctcaaacgctcgaaagcggaatagcaaagtaaatattctagagggattagtgaatcaaactggtgtttgctgataggggtggtgaacaccgtggtgaattcagataacttggtggaaattttcattcgatccaaagtgctcaatgggacagttctttgcttgtggcatttgatgttccccgaaccaataagcaataatatgcaggacaggagttagaaattagaagcctcgagattggtatgaaaaagtcaacaattcaaaagagccctgctcaagtgcttccaagagaatcccctcccatagacttgcgattcaggtaacggattacagcatcttcaatccatggttggttatagaattcagatcgccgctccttttcagcattatggttagct

SEQ ID NO: 4475 - DNA, 551 bp, Gossypium hirsutum
  Clone ID: LIB3825-025-Q6-N6-E11
ttttttttttttttttttttttttttttttttttttttttttttttttttttttttttttttttttttttttttttttttttttttttttttttttttttttttttttttttccaaaaaaaagaattttttttccttaaaaatggggggggaaaaaaaaagggcaaccccttaaccggccctttaaaaaaataaaacctgggaaaaaaaaaaaaggggggaaaccccccaaaaggggggaccccggggaaaaaaaaaaaaaaagggggggggccccccccaaagggccctaaaacaaaaagggggaacattacaggggcccgggcccctttaaaaaaaggggggggaaccccccccaaaggggggggggaaaaaccaattttttaaaaaaaaaaaaagaaaaaattggaaaacaaaacccacccccctttttaaaaaaggggaaggggaaaaagcttaaccggggaacccaaaaaattttttcccaaaaaaaaaaaaattttggggaaaaacaaaaaccaaaagggatgcccgttttcttttttaaggggg

SEQ ID NO: 4476 - DNA, 566 bp, Gossypium hirsutum
  Clone ID: LIB3825-025-Q6-N6-E12
agaaataaccaacagaataagggcttatacttggtcatttttgtcccacaatgcgggcttacactcaactaagcagagaattttgttttaaactgaaataaacagaaaaccaaaaatactcaacgagcacaaaggctcccaaaccttatttgtaatttgtctgattccacagactaaagtcgatgagcaacggcagaaactcaaaagaagaagaaaaaaacactagaaccctaatatcaataccggaatttactctgctaaacatcacatatttgaccacaagcctaatttcttaatatttgtagtccttgacatgaaggctctctgcggcaccctcacaaagctctgcatcacccttgtatgtacccaaagtggcttctgagttagccttgcacctaacgagcaaagcatcttgtgccttcttcacattctcctcttttcctgcccaggtcttgagagtgctctgctgaagggcgcgtccgaatgagaatgagagtgaccatggtttcttggtctggagcttgttcatggcattaaggtttagggtagcctcctcctcactttgc

SEQ ID NO: 4477 - DNA, 544 bp, Gossypium hirsutum
  Clone ID: LIB3825-025-Q6-N6-E3
aagcaaacagcagttgtatttatatacactgttccagggttttacttaaatcactccactaaatacacaacaaattcccttcttgacttgagactctttacaaaacccagaaacaaagaaaaaacacccaagccattatctaaacattaacctacgctcctctcctctcctctctccttatttctattcaacttactctcctatacttacaagacaccaagttcttttttcattacatacaaacaaccctttatccatatatttacactaacaaaggggtctttgcttttttctcttcaggcgcttacaatttcaaaattcccttctctggtttatctatggactcttttggtgattgaaatgggttctaagccagtgcaaaacaatcaaacccctccactctcactggtggtttggtaccaaaattggcccgaatacaccctcctttccttgaagatgatgacggagacgaaggaggaggcggatttggagacggcgggttgaccatcttctcatccccaaatcgagcatcctgtattaatgg

SEQ ID NO: 4478 - DNA, 538 bp, Gossypium hirsutum
  unsure (1)..(538): unsure at all n locations; Clone ID: LIB3825-025-Q6-N6-E4
aaacaaaacaaactagtgctgtatttaaaaaaaagaactattttccttatacaactctgccctgtccaccatgacatattcatacaagtttacatggtaatacaaacttgtcgaaatgttgaggtcaaatccggaacaaaaaacagaaacaagaaagaaaatatgataaaaacctttaccttacaatctatggaaaacacacatatatgcatctcaatgggtactccatgggatataaaagctagttgaatgagataccaagccagcttgctattctgtccacgaggctcaaggtcagtggtgccagcatacgggtaacctttggcagtgctggataactgagtgtcccaactatgaaccaattgaaactcaatagggcaactgcatcagaagcaggtttgttctttatactgaagaaaaactgaaccacactttngaagtgacatgccaacaacagtaaagagagccaccacaagaggcatgcaaggatcttcagcttcccagacaatcattccaaccaagagtgataatattgcac

SEQ ID NO: 4479 - DNA, 475 bp, Gossypium hirsutum
  Clone ID: LIB3825-025-Q6-N6-E5
gggccccaaaagggggggggggggtaatggcaaaaacggggaaaagggggttccattttcatatcgaaaaaaccaacccaaaaaaaaaggggggggaactgggatctttttaaaaaacaaaataaccttttatcaggaaaatcccaattgggggccccaactaaacaaagggccctttcataacaaatttaagaccaaacaatcccccaaaagcccaagttcatgaaagtatcgggggaaaaaaagacccagtaattagcggcccgacttttaaaacttcaaaaaaaccaagttctaattttcaaaaacaaaagagctagaacttatccttttaaaatttatcctgaaacctttgacccaaggccagctttagcatctctggggattcctggggaagacctttataaccccacaacttatttaaaaggttttaaacattccccccattgccataaaccggaacgggattttcggg

SEQ ID NO: 4480 - DNA, 339 bp, Gossypium hirsutum
  unsure (1)..(339): unsure at all n locations; Clone ID: LIB3825-025-Q6-N6-E6
aaaaaaaaacctgggaaaaggggggaaaaaaaaaaaaacccccaagggggggggggaaaaaaaaaaaaaaaaaaaaaaaaaaagggggggggggggggaaaatttgggcgggggggggcccccgaaaaatttggcgggggccccggggggaaaaaaattttttttaaaggggggggaaaaaaaaggggggaaaaaaagaaaaaaaaggtgccccgggaaaaaaaatttttccctaaaaaatnccaaaaaaaaaaaaagggggggaaaaaaaggaaaaaggggggggggcccaaggggggggaaaaaaaaaaaaatgggggggggaaaaaagcccccctt

SEQ ID NO: 4481 - DNA, 537 bp, Gossypium hirsutum
  Clone ID: LIB3825-025-Q6-N6-E8
gcctctgttgcatacatacattggaacattgggattgagaatatctagttttatgtacaaagaagccagttttgactctacacgtaaccgcaccactttactatatgcacaaaagttggacagacaaaaactgaacttccatcaccagagtgacactaagggggggtcactaaccacctatcaccaccataagcaagtaccattctttttaatcaagattttcgagttgaggaggtcgagttgctctgcgaaaccatgtattgaaagctgtgattaagtgggggcaatcttcaacatttcgggttgagaagctgagacattgttgcaacaatacttgtgcatctgacatcggcagcgttgagatgattctcaagaacgtttcctccaattccaggtgcagtggtttatggctgggtagcataggtgacacattgtctttgcacacaagcagaacaggaagccaatctttcacaagcttcattctaacctgtctagcagccaatattgttccagcagcaacagcattggcaagcttac

SEQ ID NO: 4482 - DNA, 406 bp, Gossypium hirsutum
  Clone ID: LIB3825-025-Q6-N6-F1
aaaaaattgaaaattgggtgggggggccaaaaaattagggcaccaatggtttttaaggggggggggggcccaaacatttttggggaaaaaaaaaaaaaaaaccgggttattggttccacccttttaaaagggaaaaaaaagcccccttaaaaaaaccccccctttttttttgcatttaacccccttaccccttaattttttttggggcccacccccaaaaaatttttttaatttaacccctgggggtttttaaaatgggggaaattttggcccccaggggatcttgggattttgggcccccaaaaaggggccaatttgaaaccattcctcttttttgggggggggggggctcccatttttctttaaaaaattggggaaaacgccccctttgttttaaaattagggg

SEQ ID NO: 4483 - DNA, 376 bp, Gossypium hirsutum
  unsure (1)..(376): unsure at all n locations; Clone ID: LIB3825-025-Q6-N6-F10
gggggggggggggttttttttttttttttttttttttttttttttggggggggggggaaaaaaaaggggggggggggataaaatnagaggggggggaaagggggggaaaaatttaaaaaaaggggggggggggggaaaaaaaaaaaaaaaagggggggggggaataaaaaaaataggggggggggggggggggtgaaaaaaaaaaaatggggtgaaaaaaaaaaaaaaaaaggttttttttgggattttttgaaaaaaaaaaccccgcaaaaaaaaggggggggggttttttttttttgaaaaaaaaaaaaaaaaaagggcctaaaaaaaagggggggaaaaaaaaatttttttaaaaacaaacccgggggggggg

SEQ ID NO: 4484 - DNA, 554 bp, Gossypium hirsutum
  Clone ID: LIB3825-025-Q6-N6-F11
attccaaaaagataagctcttcttattaaattgcaacacagaacatccaaatcgagttcttgaatacacccaaaattacagaaattggaatctctcaagccacaagtaacttttaagtacaaaaggctcaccgatgttgcggggggcgtatccaattagtatcccaacacacaggcaaattaaaaaccaggaaatcgcaaagaaaaatggagtttcatcgttcatgtaggaagcgtaaggacttgtttgattactcttttaaaccctgctattttctggtaaaggcaacacaccatcgaagaaatcaccaaagtagccacgcggttcgtgtactaaccttgaaatgatgtctctaagtgtgatcactccttccaagttcccgtcctcgtccgtgacgtacactcgttggatcttctcagagtcgagcttttgaatcaactctttgactgtttcatccctcttgcaagttatcatgccactcaacattggcgacctcttctcgtgtttctccaagtagtttcgaaccgctattaggaagttcttggctgtgattg

SEQ ID NO: 4485 - DNA, 574 bp, Gossypium hirsutum
  unsure (1)..(574): unsure at all n locations; Clone ID: LIB3825-025-Q6-N6-F12
gcatgaaaacatcaatatatatataggtaggtaggtaggtaggtaggtagttcaagaaaacaaaaaccagaagaatcggcagaaactaagttctaatcctacaaacaactaaacaacattccataccgataatgtctgccaaagcatacgcatactcaacaaaccaaaatgaacttgagtttaagaagaataaaccttgagagtaaagcaaaagctaatatgataatgaatctctaaccagactcaaatagaaacttggaacttgccagatatcccattcatagaggtccactgccagttgcaatatccttctttattgctccttgaatccatttgagaaccaaccactgaaccccaagaataacaggtatccataattttcccttgtcgtttgcgtcagacccatcaaccaacttcttgctaactacaattgctcgactcttatttgttgcaacacctgtgatggcttttaccaagtttggaacccaagcttctccattggngaagaatcttttcgtctatgtcatttttattacatctcccagtgttttcaaccagaacaacaggaatgaca

SEQ ID NO: 4486 - DNA, 565 bp, Gossypium hirsutum
  unsure (1)..(565): unsure at all n locations; Clone ID: LIB3825-025-Q6-N6-F2
gacaaaattgcagatacattgatctacattttgcattgtctaacctacaaaaagaaaaagacttacangagggaacaatactattgncctgcatttatttatttacttattcactatttaacttctttccgagtccaaaagtttagcatcactgcttgaacaagctccttccgagtcactagatccgacctgctttgaatcgggatgttttgtaaagctatctgacatggaggtggatgacagtgtagcgaaactcacggtggcaatgccactggcaagggcacttatgtccctagttccgctgtatagacctctgcttccggtaacaaggatactttttttgtcaactgccggtaatacatcaattaatggagggttgctgtgtgtcgaaccactaatgagtagccggagagtttctcttgcacctttttccactacggaatcagttgtatccggtaataatgggtttacgaggtttggatgtaatggagggattgaggatgaaatagtaggacctgcactaaccaaataaccttgtcctgaagagcaaacatcaatgactgga

SEQ ID NO: 4487 - DNA, 536 bp, Gossypium hirsutum
  Clone ID: LIB3825-025-Q6-N6-F3
ataagaacgaacatgtatgatgttatattataggtagagtgagaagtagcatgtacaggtaatataagttgcggaagaaagggagaggaaagcaaaatgcacacttgccatttacatatatttatatcaaaactgaaggggtttaaaaacctctttttctccatttcaactatgtgaaatgtgagttgacttccgtaaatccagttaacccgaggatctccggctccatacacttaggtccgactttttaaccccactggcccttttattatgagattgctttgaatttaaaaatggtggctgcacatttggttgaaaagaggtgttgttaatctgcaagttgtctccaggaacaggtttgaacttcaagttgactatcaatacgtgaggcttctctgcctgttgggttatacaacttccgaaactacgcaacttctcctcagctgcctggttaggtattagaatatctggcttgatattttccgacgaaaacgcgagcagacactgactcatgttcctgatcatatctgggagag

SEQ ID NO: 4488 - DNA, 526 bp, Gossypium hirsutum
  Clone ID: LIB3825-025-Q6-N6-F5
aaaaactggtatagtaacccagataccaccatataagagctgggccacttacaaacttcttatgggttttaaatgaacaatttgctaatgacaagcatttaagagtgtatgcaacagagataacatgatgatagcacaattcttaatgatacagtactcttacctgatctttagtaattgatataattttttttggactctatattttctgcttgggctgggtttagatgggcgaaccaccggtttaccaactaaatttgcatttaggcaaaagtctcaacgccattgagttttccacagggttactctaagttctgctcttcccccctccaattactgattgggaaagcaattcctttcttgaagatcaggaataagttctaccatgcaaatgctggaaggacgtatgttggatatgcatcatatttggccgcaagggcctttacagaggatatatctgcaacttgtccaaaactatccagtccaagttcagttgcatggatccctccagtggtaaatgctgact

SEQ ID NO: 4489 - DNA, 554 bp, Gossypium hirsutum
  Clone ID: LIB3825-025-Q6-N6-F6
ttttttttttttttttttttttttttttttttttttttttttttttttttttttttttttttttttttttttttttttttttttttttttttttttttttttttttttttttttttttttttttttttttttggggggggggggggggggggggaaaggggggggggggggggggggggggggggtttttcttttggggggggggatggaagtggggggtatgaggggaaaaagggttttccgggggaaaagggaaaaggggaaaagggcaaaaaaaaaaaaaagggggggggaaaaagggaaaaggggggggggccaaagggggggggaaaaaaaaaaaaagggggggggggaaaggggccgttttgaggggggaaaacggggggggcggggggaaaaaaaaaaaaaaaaaaccccggggggggggggggggggtttttgggcacaaggggggtttttttttttccccggggggggggaaaagggggaggggctttcacccctgggccctggagaagagaaaaaaaggggcaccagggtttttcccccagggg

SEQ ID NO: 4490 - DNA, 434 bp, Gossypium hirsutum
  Clone ID: LIB3825-025-Q6-N6-F7
gggcaaaaaaaccagaatattctaggctaaaaacccccccttacaaattacaaagcttaaaacatatgaccggggaaggcctgtaaagggaaaccccccccaaacaaagcataaaacattttaaaccacccaaacacacccgcccttatttttaaaaccctaaattcaaaaggctggcccttgagtcaccttttgggctttatgcggcacaaacgggccatattccttagccttctttggaaaaaccctagccgaacttgccagcttggtttttgggtaaacgagctgaccagctccggggggggggttcccttgcccggaattggatatcccccacaaccctgttaaccccgccaccccaaacccggccgaaaacaaaaaccccattgtcaccaaaaatatggttatcccggccgggactaaaaccgggctga

SEQ ID NO: 4491 - DNA, 127 bp, Gossypium hirsutum
  Clone ID: LIB3825-025-Q6-N6-F8
aaaactacttgttttcatcacaaacttcatcttccaaggcaaaagaaaaaaaataaaaaaaaaaaagatttcagattagcaaacccccggtgctactgctttcacctttagcacgatctagccaccc

SEQ ID NO: 4492 - DNA, 556 bp, Gossypium hirsutum
  Clone ID: LIB3825-025-Q6-N6-F9
aaaaggataaaattacatttttactatcgtaaaaatatataatttaattctatactcggctctgccactgagttcatctattatgagttcacatatttccgacaccgataaacatggcataaggaagtttctcaaaaccagcacacagaaaacacaacgcttaaaaatgcatcaagacatagttgaagtacaaaattcaaacaaaagattcaaaattttctcaagaataaataaagataacatccttgtactctgcagttgaattcaatcaaaacaaaaaccaagttctcaataaagcagaactacaactatgtctcaagagaaaatcccatcattcattcctcttcagcgattcttcccttctcactaacatagataccatcaaggaactttctaatatccttgttcttcacatggcatttctgatttattaaagctgctgatcgtgacacaagttcaatatcattaccatccaaaacaatctcatccttcaccttctcagatcgaactatggaaaccccttccaacatatccaccttacgcaccttcttctcgc

SEQ ID NO: 4493 - DNA, 361 bp, Gossypium hirsutum
  Clone ID: LIB3825-025-Q6-N6-G10
gttgggacaaaatgttttattcgttttttcccaaaaaaaaatctttgggggaacccaaagggggggaaaaacccgggccccaaaaaaaaaaaaacccaaaccggcccgtaaaaaaaaaaaaaaaaccccccttgcccccaggggaaaggggggggaaaacccccaaaaaaaaggaaaaaccccccgggggggggggaaaaaaaaaaacccccaaggcccaaaaaagggccccaaaaaataaattccggagggcaccttaaaaagggccgcccatggaaacccaacccaaacaatgtccggagaaattctgggggaaccccccccaaccgggggaccaccaaaaaaaccaaaaggcccaaaa

SEQ ID NO: 4494 - DNA, 542 bp, Gossypium hirsutum
  Clone ID: LIB3825-025-Q6-N6-G12
tttttttttttttttttttttttttttttttttttttttttttttttttttttttttttttaaaaaagccggctcattatcattattagtatttccacttctttttaatatccctaatagtagagagagggttgtttggcgtaacactggtactaacactagccggggaaatataaaagggtttaaacccctttcttttacgggatttctttggcttaatattctatgattaaaccccccatcggggctctggggggaatcccttttcttcgtttggcaattcgagttggagggggggttgatggtctaaagccctgcactttggtggtaatcttctcatggcaactgctactggatgaatccccaaagtctaatgctgccatgttcatacctagctgccttttctttttggggaaattctttgatgttccaacaatcttgccgccaaaaaagcagaaacgggaggaatcgacaaggctgcgatcacaaacctcacaagggttggtaacaccttttccaggcctgggttggggcctttcatt

SEQ ID NO: 4495 - DNA, 517 bp, Gossypium hirsutum
  Clone ID: LIB3825-025-Q6-N6-G2
ctcaaacacaaaatcgaaattgtaaaataacatattaataaagttctaaaaacatgcccaaaagatataaaaacaaaatccagctacaaaacttatgtaatctgaacatcaagctaaagcagcaatgagagggcgatcctacttaaataatgaataaccttttctgcaattttttcagattacatgccattgttaaaatttccatacctcaccactcttatgaagcactaggaacggcagctgcagcagcgtacatgctaggacctggacttggtggtgttgcatagccataaccataaccgtagccgtaaccaccatagccttgccgtcgataataacctccattccactggtttccagaatcagctctccgctgtttgtttccaatacttcgaccccaagaaagtcggacagtctgcttgcctatggttgttccgttcaagctctggattgcttcctcagcgtccttcctgtttgcaaatagcacaaatccacatccttttccaggtggtatttt

SEQ ID NO: 4496 - DNA, 550 bp, Gossypium hirsutum
  Clone ID: LIB3825-025-Q6-N6-G3
agcagttcaacaactcttaacaattaaaatgggcaacttcagttcaatatgaattggtgcaagttaaaaactgctcttctacttcttcattgaaggaaacatctaaaatgccttctaagactagagcatgggtcattgctacatcattgattgtcattgggcagatgtagttaaattacaagtatacagtacatgacaatgacatgcccaataatagctttttatcacaatgatatggtaatgatatgaaaatataactaccaaatataacccatttaaatgaatcatacttttgttaatgcaaatacatatctttgatctgctccatgtgatcagaaacgcgcggctcatgtgttggagaaagacactgtagatcactcatatctatattatattctttacagtaccggtcactcaaacttattggatcttctccagtctcattggctcgacgaattatcttatcatcaacatcagtaaaattcctgacataagtaacctcataacccaaatgcttaaggtacctgtaaaggacatcgaaggaaacggc

SEQ ID NO: 4497 - DNA, 547 bp, Gossypium hirsutum
  Clone ID: LIB3825-025-Q6-N6-G5
aacccgaacttgaaatatcttcaaaaaaaaaaaaaactcgaaatacaaaatcatccaagcctaaaattgattgaaattgatctgccagccaaataaactatcttaaatatgaacctgtttcgttcaaaaggcgtcaagggaagggattcgaggattgtttcttctactctcccaagtaacttattcaacctccctagtttcagggggcataacaataatatgtaaaaaacttatctaacagcaagtaataatcctcgcacaaaaagccatagatgcccaaaaaccagatattacagggtcttacgccttaataggtatagcccttaacaaacattcctttcttggcttcttcactttcaccctcggcagagtattttccgagttgagccaaagagtttgcctttgcacgcaccaaaagagccttctgtgcagcttcaacattctctggacgtccttgccatgtcttaagcacagtgttctgcaatgcacgtgcgtaagagaaaaaaacgtgccatgggttggggctctgattcattgcatgcaagtt

SEQ ID NO: 4498 - DNA, 555 bp, Gossypium hirsutum
  unsure (1)..(555): unsure at all n locations; Clone ID: LIB3825-025-Q6-N6-G6
ataaaacttaaacatccactaattgctgtgacaggatacaacatcaattttgtcctctcttgacaacttactaaaatagatatgtngaaaaagtaaggaatgatctctactttaaataataaaatgacaaatgaattaactgaataggtcctcaaccttagctttcatgtaatgagacatgaatacaacacttgggactacaagaaattaaaagtaattcacctaaaaatttagcacacgtaggcgcattgaaggagagcaaaagtgggatcttttcataatttgtgttacccccacttgaacctcccaataaaattaatcatctgtagccactaatagctgacttcattttggccttacaaagataagaccctagggaaatgacggtacaaatacattggctactcgttttatatacacctcagatggtatcccgggatgtgtgtgcagttctggacattttgactatattttcttggagcttatgttttaactctaacctgaagaatgagatgcacctcccttttgaagatagaccttagctcctcgttagct

SEQ ID NO: 4499 - DNA, 549 bp, Gossypium hirsutum
  unsure (1)..(549): unsure at all n locations; Clone ID: LIB3825-025-Q6-N6-G7
gattgacaaagcataaactttaattcattaaaacattaaaatagccaatacatagaggatataaaattagagccaacatgcagggaccaaaacataaaacaaaataaacaaagcctcactacactaaagtggagactaattttggattttgaaaattccatcccaaaatccttattcattcttcttcttcttcttctttttaatcatatattttatctcctgcaagctgctgcaaaaccctctcttcatccatctcacttcacatttttgcagttagtggaagtgctgatcttgtaagggatgttgacactacatttggctgggagggtctcagccaagttgcctttaattttgacagccttagcggcagcttgcaagcacccacacacggtttggcggtcaggggtggttcgagccatgttgttcagggaccggatcccgtcgcagcaagccttcggcacgttccctccgttctgcaagtatgataagcaaccggccactttgcttgtcacatcgccgcnatgttatggtggttgtggcaatgggctc

SEQ ID NO: 4500 - DNA, 557 bp, Gossypium hirsutum
  Clone ID: LIB3825-025-Q6-N6-G8
gaactgataatagatttcttaacttacactgggcctataataatgcaaccaaacataaacttggtggtctccgatggccattcctaggaaaaatggaaccagcaagaccaatcccgtaaggagatacctctctcttacgcattcacataacacatcctaaactcacgacacctaattaaaactatgtagcagctctacaaatgtaaaaaaattcattgcggaggctacttgagatggactaggaaaccctaaatgacaaaaagaggcttggacctatgaaaatacaaagaaaattacatgatagtagctgcaatttaagactcaagacagttccctgatggcttcccaatcaatttccactgaagagtacttttccaaactgaaggcctcatcatcatcccactttgaatcaaagaaatccaagaaagtgatatcagattctggctaagaagatccagccaatgattcatcggataaatccggagttgttgatgatgataccaatggattctccactttagggtcagagaaccttggagactgatcaaactcctcac

SEQ ID NO: 4501 - DNA, 528 bp, Gossypium hirsutum
  Clone ID: LIB3825-025-Q6-N6-H10
aacgtaacttaagaaatatcatatcattactacataccatatccatgggagctttaagcagcacataacaaggacgagtacaaactacaaccattgacaatgtaaattaggaaataatgaccaagactactttaaaaaaaatcaatcaattttgttttccaccattgaagcctttgtgttaccagaggagtttgactgactaactgaatttacatccagttcttcatttctcttaggagatgatagtctagaactagaccattcttctaaagctttgtagtggagagagttcattttaatacaaggccgcctttctcgtatgtatttttcagcggctttccagttttccacaacgcctaaagccaccagtaatgcacacatcacagcaacacttcgaccatggccaattgaaccaggatccagtagcctcttcagtttggatacataagcacgatggacgtaaacaggctgatttcgagctctctttcgacatgcccacttcacagctgattctatctggcctggctg

SEQ ID NO: 4502 - DNA, 564 bp, Gossypium hirsutum
  Clone ID: LIB3825-025-Q6-N6-H11
aaatctaattccaaaataaattgtgcaaaataaaacctgaaaattgtgccataaagggcaatgttcttaacatatacaccaaaaaatttcaagtcgaaatgtatgctcggagtaaaaaaataattcttgaatttgctttgggtaatttttaaaacagaagtgaaaaaaataaaaagtttggagacacttttccccaaccatgaccaaaatcatggaattcagcagaaaacatacaagtatcccattgtctgcagaagctatttcactaatcgattgtttgctgaggaaacaattttattgttaaaaatgggtgcaccttgttgcaaaagaagtcgaaggtattcggatgcataacactgtaaaacaaggtcggatacatgtcaagtttgacacaggaaagcaatttcatttttcacttgaatttgcggctaactgaatcgtagcttgggacattaataacatttccatatgatgccattgtgagaggagacgatagaagcttttgagctatcgaagaaatatccttcagtgtaatctcatcaacaaccttcaagaatactccac

SEQ ID NO: 4503 - DNA, 472 bp, Gossypium hirsutum
  Clone ID: LIB3825-025-Q6-N6-H2
aaaacaagaaaacattttggttaaaaaaaaaatcggcccagacgtcaacctttttaaaaaaccccaacaaagaccggggatttgatgggggaaaaaaaccggtggccctaagagaagcataattaaacaaggacctgtttgggatatgtggggggacaaactatttggggcggggtaaactatcacaggcaaaagcggggtgggccccccagtttgatttatgcaggggggaaaactaacggccggggtatacaaaagccagccagttgggccaggtgaaagcctacgtaaaattatcctacatccccctgggtaaattaactaaccataaaccccaactttttggccatcacttatccccacgggggaaaaggaaaagccgcccaatcccccaccaaacccataattttccccatttccaccggaatttcactacccaaaacctccaccatttaaaaactaccggggcccc

SEQ ID NO: 4504 - DNA, 552 bp, Gossypium hirsutum
  Clone ID: LIB3825-025-Q6-N6-H3
ggaacataacatgcacaatttggtaggtcataacctacaccaacatgagctaatttccatgtccatatacaagtgaatatgtattgtagtgggccaaatttgcccgggcccactagaaacctaaatatacaataaataaataaataaacctcagtccattaaataaccctatcagacccaaacccaattttaaaacttggcccaaatttacaaggcccgataggcccagaacactaaaccaagactgaagccctagcagcacgtgtttggacctcagcatcctcggtctccgtaccacctctgtacccccatgccactccagcctagacccataccccgtgcgcatgccaacagaccagtacctgcaaaacaaaaagcaacagcagtagagacaaacaaaaagaacagcacaaacacaacagcaagaaaatttgtatttttgattttcttttcttttctcggctataaagctgaggatagtcaaatgtaaaggaggaccacgatatctgtacacacgcacagagaatagagaaatagcaattttaaatcagc

SEQ ID NO: 4505 - DNA, 116 bp, Gossypium hirsutum
  Clone ID: LIB3825-025-Q6-N6-H6
gggccccggggggcgccccgggaattcggggcggggcccggggggggacccacttttccctttaggggggcgtttaaaagctgggggaaaaaaggggaaaaggggttcccggggga

SEQ ID NO: 4506 - DNA, 447 bp, Gossypium hirsutum
  Clone ID: LIB3825-025-Q6-N6-H8
gggcccaaacccccccgggggtttgttccctttcccccaaaaagttgaccccggaatttaaccccaccccacgggcaaagggacaacaaaactggcccctccaaaaacgggggtggcaaaaggcaaaaatcccccccccccacccccggggttttttgaaacccgttcccgggtctttcttctaggcaggtttcaaaaaaaacccttcccaaggttaaccaacgaaaaccttgtaacaacttctccttccttaaaaaaaaaaggttaaaggaacttctcccaacatcgggggcaaaaaaccccccacatcgccggaatccaaacacttaaccggaccattaaattggtaaaaacaacggccggtgtttacaaagggcagggacctattcaacccaagctgataacccccccttacaaaaaattcctcgttaaaaaccaacaattgca

SEQ ID NO: 4507 - DNA, 436 bp, Gossypium hirsutum
  Clone ID: LIB3825-025-Q6-N6-H9
caaaaaaaaaaaagggggggggggggggccccaaagggaaatgggaaaaggggggggcaaatgggtccaggggtaaaaaaaaaaaaggggaaaatcctgggggggggaaaaaaaaaaaaaaaaaggggggcccccttttttttttttttaaaaaaaaaaaaattttggaaatttttaaaaaaaaaaaaaaaatttaggccccccccaaaaggggggtttccccaaaaaaggggggaagggggggttttttcgggttttttaaaaaaaaaaaaggggcccccaaaaggggttttaaaaggggttttaagccccaaaaatccctcccccccccaaaaaaaaaaaccccccctccccaaaaaaattaagggggggggtttttccgggaaaacaattttttgaaaaaaggggcccccccaaaaaaaaaaccccctaaaaa

SEQ ID NO: 4508 - DNA, 557 bp, Gossypium hirsutum
  Clone ID: LIB3825-026-Q6-N6-A1
ccaaaacaaaagggcatcaaaagccatttaaataaaataaatccttcgctaaagtagtacaagtaataaaacactcaagtaggtcatctattccagctttatccgatccatgtcattgataactccttgagggtggacaatctgtcgaaggaaataatcaccatatcttttcactgccttggattcaacaacatgaatcatgtcatcatcaatgtagaagtccacatcagcattagagataatctttccatcagaatcaacagcatgagttttgtgcttgtatgtcaataagatggtcctcagagtgggctcatccacttccatgtaatttgcgagcttcccaagagatatagttgaatacactttaagaaatgtccgaacacctgataacaactgctgttgcttcacttcatatagaaacagtttcaactgaagtctataagcatcctggttgtaatttacaaggggcgtcctaaaagctcggagctgaaggtgtaatgaacttgggacatgcatttgagaagagcttttcatagatgaccaaagcttcatcatca

SEQ ID NO: 4509 - DNA, 405 bp, Gossypium hirsutum
  Clone ID: LIB3825-026-Q6-N6-A11
aagttccaaatctaaatcgttgcatacttagtatcaggtttcagaacatataacaccattgcaattactaaaatacttgcactattaaaaacaaaaaataaaggacctgaaaaaagccaggcgcgaggaagaagcctgcggagggagaagaaagccgtagctgagaaagccccggcagagaagaagcctaaggctgggaaaaagcttccctggaagtgatggggggtttcttgttgtacctcgcgagcctagaggcttcttgagcaagcttctcgaagatatcattgatgaaactgttcatgatccccatagctttgctagagatcccgatgtcagggtgaacttgcttcaggaccttgaagatgtagatcttggaggtgtggacgctcttcttaactctcttct

SEQ ID NO: 4510 - DNA, 558 bp, Gossypium hirsutum
  Clone ID: LIB3825-026-Q6-N6-A12
aaaaataactcataaaattatacatttatacacgagttaaaaacaacaatggctgcccatatgtaaatagaaacatctctatttttatcattttatctaaaagtctcaaaactttttgttgctttcagttatttatttatttatttcactaatattcatcttcatcttcatttcttgatccaaagaatctccttacaacagctgcaactgcacccaaaaacataaacaagaggagtgtatcgaatccgcctccgacgccgaccgcaacgctagggccgggagcaaagaatgagaacggtgaccagccccaaccaccgtagaacggcacgccgtaaccgtatccgtagcctccgactagaggtggggcaacccgtggattaatgtaaatgttggtcctggaattgttgttggctcttggtgctgagcgaggagccgccgaccggaatgcttggccgccaactctaccaccggttttggcggctgatgcatcacccaccgaacccagagtcaataccccggctgccagtgtcaccattgctagctttgctaactgtttct

SEQ ID NO: 4511 - DNA, 522 bp, Gossypium hirsutum
  Clone ID: LIB3825-026-Q6-N6-A2
agatgaaaatgaaattgtacatcataatcaatatgttcaaaagttttacaacatcaaaagtttgaacattgatatttaatggtgagaaagaaacttctgacccattccaatcgggcaacagaaggtaaactgggggaaaacgatcatttgagttggatgatcgggaattttactcaaagcatcataccgctgatcgtcggttaaattttatctcttaagaaccttatcaggcgcattcccggagttgagcccaaagtaattcattctaggcttgcatctccctatattgttggattgtagcctgcaaatcttctctcgctcatgtattttagcatttccattcatcttgactatttatcaaaatggtggaagaaaatagaagggtatgattgttgctctatcgttggaattatagaaaggatggattacaggtttctacagcatcacttttatttggtgtctagatctaccttagtgttaataatggatggaatcttggtctttttttctcctaatgatgat

SEQ ID NO: 4512 - DNA, 499 bp, Gossypium hirsutum
  Clone ID: LIB3825-026-Q6-N6-A3
cttctctaaaccaaacgatttaagagacaaaactatacattattggccctttcaaaaaaacgatgagagctgaacctgaataaaaactataaataaagataacaggggggggggaaaagacaaaatatccctaaatctactaaatatcagctcagccccatgaatgtttatggatttttgcttggaggttctttgtggggagattaaagcatatatcccccttgctggtttaaccgcaaaagattcatgctttaattcccactctgggcatccatgtaaataccaatttccttcggaatgtattggattcgggttccatttcagctcaatgtcgcaaacaataacaatctgagggatcatttatttcatgacagtttgctgcttttggggaaggtcttggtgccgcttgacggaatcttggttctcaccctctacacttgggtccttgtcttccttaggcaggtatttggcgacttgtgcagaagcttgccttccttcc

SEQ ID NO: 4513 - DNA, 567 bp, Gossypium hirsutum
  Clone ID: LIB3825-026-Q6-N6-A4
aataattaaaatgataaaaatcctaaaataaaataaaacaaaagataataataacctaattaacgaaatcacctaatataataaaataaaaaaacccaatacaaaataactactaatcttatgacatccatctttcttcaagtgcgccagccaacttgtgctccataccaagttgaatattatttcccatgcagttgcacaaaattggctcaagttctaacatcttcgtgacataaattaaacctgaaataaaatttactagaattagtagcctatcatatcaaatagttattagaattaatgattaaaagcatacgaattttacatgtgcaaacgattgcacacccacaaataaagctttataaaggtagaattatctatttcattgttctatcgaaacaattgttgtaacattacttctgcaaacaactttatttgataacaaaagcaatgcatatattttaaactagcaacctgcactcagcaaaccttattcttcccagccttgttcattttggcaacatactcgaacaaactcccatcaaaacatcccctgacagcttcttt

SEQ ID NO: 4514 - DNA, 570 bp, Gossypium hirsutum
  Clone ID: LIB3825-026-Q6-N6-A6
aaaatgattgcagttttaatttcatagatttcctcatggaatgaggttagaaaacaatgaagcaccaaccactaaaatccttacatgtatcacaatatagattcctccaggtccatgaatggtcgttcactccacggcgagggccgaaagcagacacgtacctcatgctcttcaggtcctacgcgatgcttgggcacgattatctcaagcattgttcctgtctcatcatggtatgcttccagtttagcattttccggaatgcggttcggtaggggaatttctcgaataaattcccccggagggcagtgctcaggtgctggatctgttaacttaaacgtcctatcttgtctcttaatgaatggcatgcaggctgtactcacacatgatatctttacgattccatgtgagggagtatttctccaagcaactttcacccttggaagatctgaaaagggcaagctgacaatgatcaaaaagctttcatcatcttcatatatcgttttcgctgctgttacaggcccgtatacgttcttcattaccccactaaattcattcatccatgttggctcg

SEQ ID NO: 4515 - DNA, 536 bp, Gossypium hirsutum
  Clone ID: LIB3825-026-Q6-N6-A7
ccagccactgaaaactattttaaagcacccatttgtgccaattcaaaggaccaagtgattaaaaagtctttgttggcacctcggggggtacggttcaaaccctagcaacatcatctttactccaatttgtaatgtcccaagaaaaaatgattaaagactacaaactttttagcacttcaaaactttctagcttttacgaaagtgagaaatctcatgcaaccataccatttggttcctgagtcctgccgttgccgctgcctttgcggttccaaataggagaggtttcaataagtttatgaggtacaagtcgtttttcgcgcttagtaagcttgcgaaatttgcttaccctcagtcgggctaactcagcctccttttcaggggtcatttccctcactacaacagttagtcggcactcgggtctttttttaattccagatcgccctttaccatgatatgaaactcttttcaaaaataatcccttcccaacaaatgcctcagcaactagcagacggtctgggtccaatccatgattatgg

SEQ ID NO: 4516 - DNA, 540 bp, Gossypium hirsutum
  Clone ID: LIB3825-026-Q6-N6-A8
gaacagaatataagctgccatgcctgcattccattgattccttttagatattatgttatccagattcggatatgtaagagtacaagtacatatttgacatttgagtacacaatttctcaggttccatgtcggaaaaattatttgtaaacaccatgtattgtttgtttgtggcgaaatatgtacaatgctgttaagacaacatttttgaacgcagcttgttttatctgcaataatcttatatttcacagaataattatgtgtacaactcaagtactgttacacttgccactacctataccttttttccatggaaataatagtcaatgtacaacataacattggagaccaacctggatatagacataatgtcaaggatggcggagacaagcttcaaagtgatcacaaggaaatagatcttcagctttaccactttatctacgtttcttctggtaagtgccatgagaataaaaacaatgaaaaaacttggtagtgttgaaaaaacaaaaaagctaaaattcaccttgttggaatatacaaaaa

SEQ ID NO: 4517 - DNA, 489 bp, Gossypium hirsutum
  unsure (1)..(489): unsure at all n locations; Clone ID: LIB3825-026-Q6-N6-B11
tttttttttgttttttttttttttttttttttttttttttttttttttttttttttttttttttttttttttttttttttttttttttttttttttttttttttttttttttttttttttttttttttttttttttttttttgggggggggtgtaaaaattaataaaaaaaaaaaaaaatataaaaaaaaaataaataaaaaaaaaaaaaaaaaaaaggaaaaagaaaaaaaagggaagaggagggaagtgggaagaaaaggggagcgggggaaaaaaaaaaaaaaaggatgggataaagaaagaaaaaaaagaaaaaaaagaaaagagaaaaaaaaaaaaaaaaaaaggaaaagaagaaaaaaaaaaaaaaaaaagaggggggaaaaaaaaaaaaaagagaaaaaaattagaagaggaagagagggccagaaacaaattaaagaaatgaganaacaaaaagaacacaaaaacaatttttgggagagtt

SEQ ID NO: 4518 - DNA, 546 bp, Gossypium hirsutum
  Clone ID: LIB3825-026-Q6-N6-B2
gtggtgtttttttttttttttttttttttttttttttttttttttttttttttttggggttttttttttttttttttttattattttatgggtttttttttttttattttttttttttttgttcattggttttcaattaaatttttttggggggggggaaaaaaaaaacgggggtttttttaaaaatttaaaaggggaaaggaggaacgggaacaaaaaaaaaattttttgggaaaaaaaaaaaaaaacagggggcctaccaaccaaaaaaaccttaaaaagggggggggaaagcaataaaaccatgtttggggggaagaaaaaaaccctggggacccccccaaacccaactttaaaaaaattaccctggaagaaataaaacttcctaataaaagtttttacctgccggaaaaaaagcccgagggttatttttaaatttggacacccaccgaaaaaaagaccttttggaaaaaaaaattgcccccggggaaaaacccgggggactttatcacaaaaaggaagcccgcgcaaaaaaaaaaggggggg

SEQ ID NO: 4519 - DNA, 538 bp, Gossypium hirsutum
  Clone ID: LIB3825-026-Q6-N6-B5
gaagagataaaagcaaatctaatatatttcttttagttgcaacagatcaagaggacagggatattgcatcagacatcacaaacgtgcatagataaaaataggagattaacccacaaaatcgtccgaaaaaacgagttgcagagatatgaatatatctaaatcataggcttgcaaaggatacatttttttctataattgtaactcggagggtgcaagctctatcttatgtaatagagaattgaagtcttctttaccgatcaaactgcaaaatacgagtaactcgataagagccctgcaaaaccctttgataggcaaccttcaattgcacagggagacttcgaacaacacacaggactactgtgtttagcaacttccatgcaatcatcagatgcatcaggggtaaccaatctgtgtgcaatcaacctacttctcttagaattcaatgagcaattcaggtctggtgtgtccgacaagtgcgaatccgaggactccatttcgtcatcatgacattcgagcaatttcctcttcatcccaggaa

SEQ ID NO: 4520 - DNA, 508 bp, Gossypium hirsutum
  unsure (1)..(508): unsure at all n locations; Clone ID: LIB3825-026-Q6-N6-B7
gggtacaacatttataaattggaattaagattgaaactataatatcccaaagaaattaaaccaacacaaccaacatataacatagnaaaagtaccaaaagaaaaaccaacaactagngatgaaaaacagaagaaaccccggtgtttgtctagagcatattcatggcatctctcttatgtttaattttgcttctctctcctctttttaaatactaattaatgggaatcccagtgatcagtccaattggttgcactgcccactcgtggaatgctattaactctactgtaaacatcaaccttgaaattagcaccacaaatcactccttcactgtctaccctcggcattgccctgattttgttcattggatgctcaaagctcatcagccccccttcactgtggaacatgaatccagttgggaaaggagcaaaggatttggcacacccttctttaatgacatctaaatcatcagatatgaccacagagccatcagctgcaatcccccaataca

SEQ ID NO: 4521 - DNA, 523 bp, Gossypium hirsutum
  unsure (1)..(523): unsure at all n locations; Clone ID: LIB3825-026-Q6-N6-B8
gcattgaagaatcatagaagagcaagttttacttttacatggcaaccttgacttattagttccaaaagtcaaattgaagtggtaaccgaatacaagcatcaaaaggaaactcacatttttcctgcagcaatagcagcttgcacaaaatcctcacaccgggnaaaatccacccgataaaacatcacccaaggcaccaatgatgtcgaaagcctcttgcaaatcacttgcagaagtcatgtcatcgagccatgagagcaactctttggagaaccctatcatttccttcacattcaacaacctctctttcatcaccacctcccaaccttccaacccttctccttcagttccggttgaggttccttcagatttgcctttggtggctgccaaacttgacgatttcttaaccttgaatatttgctgcaactgctcaatcaagcctgtatacaccagcatgggtcgaacaattgacagtagctcatcaccaccagtttctgaggtggaggtgggacttttgctgctactt

SEQ ID NO: 4522 - DNA, 479 bp, Gossypium hirsutum
  Clone ID: LIB3825-026-Q6-N6-B9
atagccctaaaatctaaatgcttttaatttattccttccaagttttttacataaatttacataatgccaagctaactttagcattaaaaacaaaactgaaagatgactcaataaaagggggaattcataggggaggggctcaatatgagggtcgcttttttatgtgatgactggaggtttctccctgcctgggaaggccttcagcttcgatacagacaatgccaaatctattaatggttttaatgccacttgggcgtccatgtcatgtttaaaagcatctggttcaaattgctcaatgtaaattcgaaccgttgcaccagctgagccagttccagataaacggaatataatccttgaaccatctgtgaaaacaaatcgaacaccctgctttgaggccacacttccatccacgggatcggtttatgaaaagtcatcagcaaattgaaggacataatttccatacttttcacctgccttac

SEQ ID NO: 4523 - DNA, 391 bp, Gossypium hirsutum
  Clone ID: LIB3825-026-Q6-N6-C1
aaccgaagaaaaacattaaaaccgaaaccgaagaaaccgaattcaatcaatctattcgaaaaagtcattttgctacccctatcgtctttatcttgccttctctaatggctaaatgctctccagatcatgcgtagtaatggaagcttgccttcttcttagcttgaacctgaattataccttcattgaaatcctcatgattcacctcagttgcatctcggcgaagtgctagcatgcctgcctctacgcaaacagctttcagctgtgctccattaaaatcatcggtcgaacgagcaagttcttcgaaattgacatccggatgaacgttcatcttccttgagtggatctgaaggattcgggctcttgcttcttcagtgggatgtgggaattcaat

SEQ ID NO: 4524 - DNA, 482 bp, Gossypium hirsutum
  Clone ID: LIB3825-026-Q6-N6-C10
ggaaactaataaatagcttatttaattgccccagaaaaccatacatttcagcatcaagaaaacatagttcctttttacacagaaccaaaaagggatttccaggtctaactaatatattacccacatgtaaatacataacaatccactccaaatatttggatggtatggatggtatgcccccagaaacacccccaaacacacttacccgttgattgccaatcaacgtttccgaactcgcctgccatttggattcatcggttctggtggtggaccttttggtgcaagatccatcccgtatacactggtgacactccttttccgacttgaaagcagactcgagctttcctcgctgggatgcaaaggccttcaacatttccgataacaaaaatggacaacattcctccaagggcttgaacccttttgattgcatcaccgctcccaagtttgacggagttgcagcaaattttaaacatatggcctta

SEQ ID NO: 4525 - DNA, 356 bp, Gossypium hirsutum
  Clone ID: LIB3825-026-Q6-N6-C11
aaaaaaagcgacatcctttgttaacaaacaccaccagggggaaaaaaaaaggggggggggggaaaaaaaaattttggttaaaaaaaaaaaaattcaaaacaacacaatgggtccgggggagccccccccaaatataaaaaatcggggacaaccaaaaaaaacccccagagggcgaaaacacaaaggggaaaaaaaaacttttttttttaaaaacccattttttctgggaaaaaaaaaaaaatcccggaacgcccccaaaaaaaaaaaaaggtgggaaaaaaccggggggtttttgtggggggggaaaccatggtaaaaaaaattgcctgggggaaacccccccccgggggcggggg

SEQ ID NO: 4526 - DNA, 450 bp, Gossypium hirsutum
  Clone ID: LIB3825-026-Q6-N6-C12
aagattgaaactgaaaggtaggttaattaagataggaagatacatttacaatttaagcccgtagaatacagagtatcctctatattttgatcaaacaaacagaaaagcaaggtcaaatgaatgaaagcttgatagaaatagtagtttaatcaggcatcaagtgagcgtcaacctcaactcgagctaccccatcacggtcctgagctgttttagccacttccacttcccccaccacaaacccactcacgttgtttttttcacccctcaaaatcctcccttcttcttcctcatccacgtagttaggatccttctcatcaatggctgcaggcaccggcgacagctcgttctccatcatgtcatcaggtccttcccacgtgtacttccctccacgtcccgatttgggcgggggccgaccaatcccaatcccactagccggatgtcggtccatac

SEQ ID NO: 4527 - DNA, 549 bp, Gossypium hirsutum
  Clone ID: LIB3825-026-Q6-N6-C2
gtacaaagtaaaaaaatgaattctatttattgaagagaatttaatccaaaagaagagagaattcccctatgatttacctcaacggtaaatctctgatggtagcctcttttgataccactcatcacagcataaacagtggggggcggaactggtcaaaagttatacatacatacatacatacatatgtatatatattgtgctctccaatataaagattcaattcaagacccatctccaaaaacttcttcaatcatactacatgtaggtaggaagtccatcttggttttctggcaagttgtatatccagaatcccaaactttagtatcacatggttctgaaacatatccatggctgccaccattgtttaacctgtttgggttaccttgccgctgatcaccgttgtcagcagtcactggtgtttcttgtgatgcagcccctgtatcagaagatgtgcacgaatcatcttggacctctagtttctcgtgctttgcttgctcatccttgagattgttttcataaagttgaaccatgggaccttgggtgctaaac

SEQ ID NO: 4528 - DNA, 501 bp, Gossypium hirsutum
  Clone ID: LIB3825-026-Q6-N6-C3
gggattaaaaagcccattcatatctatgagataaaaatgggggcgtgccaaaattctttttgaaaaatcacgatgaacttaaagcacaaaaacaaaatggggaacagaaaatagttaaaattcataacacaattttccaatttcttctttgggataaatggcttggtgtaaccatctttatctaattgacccattggtaatgggggaaactttgcaaatcccagcagatgggggcaaaggaatatttttataacaggccaccaaatttgcatcactggggagatccacttggagagtttcccaaacctttttttttgggtttaacacataatccggctcgcctgtgaaaccaggaaagggaactcgctctccgaccttggctgactttggggggtcaaccaattccaccttggggtggtcgttgttcgaagctgcaaaaaccattgcatgtgattttataccgcgcatgggtgcgggcttcaaattacaaagaacacaaac

SEQ ID NO: 4529 - DNA, 593 bp, Gossypium hirsutum
  Clone ID: LIB3825-026-Q6-N6-C6
tcgcgatctagaaccttttttttttttttttttttttttttttacagtaagttacatttcttttcattggtaattaacatttaatgatgttttacaaacaaaacacgtttgcacacatatatatgaaacaccatttgttcatataaaaagtaaaacctgcaactacagatcaattacaatgttcttctctttgactttctatccatcgtcaacaaactcaaagctatgctaatgatggcgacgcaagagcaaatattataaccgagcaatgacatgattgaatgcagaacagggacattatccttaaaacaacatgctcacaacatattaggcattgaattcagcgtcatcttccatttctcgaacagcttgaagaggaccactaccaaacatgaagcctcgatcagagagattgttcaaaggaccatctccatataaacatacctgtggttcaatccgattcaagcggttccactcatcatctgatagagaccagttaaatatgtcgatgttttgctttatcctgtcgggttttaggctacatggtagaacactagttcctctttgaaacccccaccgtagaattacctgct

SEQ ID NO: 4530 - DNA, 552 bp, Gossypium hirsutum
  Clone ID: LIB3825-026-Q6-N6-C7
caataatatcgaattaaaacttctcaaactaattgaatttcaatcactcctcatcaagaaatgcaaaatatccataaattaccattcaatcaaaaagaccagaatcttggtttttaacagggggcaaaaaagagtttccaaacatgaaaatcgaaacaaaatcacaactcggtttaaatagaatgtgagatcctgccctacaccttaatggcatacttcctcattgggaagtacatttccttcttcttctccctttcggtcttcaaagatgcctggtgcttggtaagccttctgcggatggctcgggtcttcttgggacggagatcaagaggcaagaatttcttattcttgtatgcctccctcaatgcagacttctgcttctgtgagattacagtcagaacttgagcaatggacagcctcaccacctttatcttagaaagcttgttaggtgcaccaccggtaactttagcaacgcgaagaaaagcaagttcagctttgagatctttcaactgagctaaaagctcggtttttgatttctgtcgcaactcatga

SEQ ID NO: 4531 - DNA, 499 bp, Gossypium hirsutum
  Clone ID: LIB3825-026-Q6-N6-C8
aagaaaggccttccatgattttatattataactagaaaagggggacatacaactcaaaaaccctactggtggataaaaactagaaataacatattaaacccaccacaaaggggtaggcaaaactgggttcaaggggcagatttgtttaaaaacatttaacttaagacgcttgatagggggaaaaataagaaacttgccaaaacaacaaaacaccttgcctaaacaatattaaaaaaggggggttaatctcatcaaaggagatcagcaacgtttgatggcagctcctcaatgaccacattataaaacttttggatggcaaaaagcatcctctcattatttggaggcacaaagttgatgggcacaccttttttcccaaaccttccactttgaccaatacgggggggggagttttctggttgagtaggcaaatcatagtttatgactagagaaacttgctgcacgtaaataccttaagcaaggagatcggtggggatgaaaa

SEQ ID NO: 4532 - DNA, 527 bp, Gossypium hirsutum
  Clone ID: LIB3825-026-Q6-N6-D1
ggaaagggggaaccaaaatttaattgcaattacttgggttataactaaacatattatttattgaaaaaaaagggtgctacaaaagaaaaaaccgcattccccgtaaaaaaaatacacagttctgagctttttttggcctccttaaactcggtctatactggtgcagaaaaaatatctttcaattgagtctattgctcccctgacaacaaagggcatcatgggttttctaaatgtctataacatataaaatgacatgtagtcaatcatacaattcggattcaaaattatacctgagtagttttaactgtcacaggtacaagttctcccatgttcaaataagttgagcctttttaaggtcaaaaacaacaccactgtcttcactgctcctttcatttacaatacctgcaaattataaaaattggaaaaatatatagtccaaaaatgcaagaaaattagtccagaacaaataaccacttcgagtttgaaaaccttatctatgatgccatattcaactgcttcactggggc

SEQ ID NO: 4533 - DNA, 476 bp, Gossypium hirsutum
  unsure (1)..(476): unsure at all n locations; Clone ID: LIB3825-026-Q6-N6-D12
ataggggaagtttttactgtatctttatctgcctcttatcatcagagatgtttgagatgattatgtacaacaaaagacatgaacatccctttacatgaccacgtccccccatactttaacaaccatcttccccaccatcccatattccaaaagtccagtgaaactatacaaaaacgatcagaaaaccctatctcgaattcccctccttcaatcctgggcgtccatcactgtatccttttcttcaaacttcactccgaccaagaacctcatgctcacctgtttgggatcatagactgtgtattcattatactcgagagggctatcctggtgttctgaggggatcaaacggccacaagggactttgatatcatctttccaatctatatattctgattcatctggtttctttctccccagtcccttcacacacactnttcttctcttccaatggcttagtatcctccggtgggttcttg

SEQ ID NO: 4534 - DNA, 539 bp, Gossypium hirsutum
  Clone ID: LIB3825-026-Q6-N6-D2
gatctataacctttctcttgttttttcctttttttagaaaaccggttccttaatgcggcccatttttgcctatttctacaaattaattggcgtgattgtatgttaaataaaatgcatgactaaaaggaaaaagcatcggttgtcattgcggggggcattcttgaagccttctttcaacataaaaaatttccctcctatgcgtggagctcctgactttacaacctttgaagcaaaatctactttttacatgctcgaaaccttttgtgctaaatgattctaatattatccctacgactaccattagacccaacctgaataacagagcgggggatccctttaattcatggcagggatagggccacaatatgcttgaaagttcatcccttacccctgataccgttaaacaatgtgacacaaggttgcctgcccaagatcttttttataatgtgagttgaacaataacggttgaatataaaatgaggtcacttgcgtctctatttttcttacttgctggttattcaaatcaacaaaagctccga

SEQ ID NO: 4535 - DNA, 509 bp, Gossypium hirsutum
  unsure (1)..(509): unsure at all n locations; Clone ID: LIB3825-026-Q6-N6-D3
atgaaaaaagaaagtatatatcactatnacacattaaacatgcattatctcctacataactccaacagcctaattttcttggcgaaacaattacaccatgttcatataatcctaatcctttgtcgacatcacgaaaaacaacgccaactatacacaacgcatgccatagatgtcatcttcatagcaaaggtaccctagaatgcaggacgagagaaatgaggtggtctttaattatgtacactactgcaattccctccaactggacatgcagtgcatcgtaaaatatttataaagttagttccatgtaccagcagatgtgttgtcatccgcttgtcttgtagtatcagctatgtccgtggtatattccccttctagaactaggcattggatcatcctcctcatcttcagaatctccattctggctcgtgaagaatggggtgaggtaattcctatctatttcagagaatgatgccgcacttctgtggaactctttcagtttcatccttaac

SEQ ID NO: 4536 - DNA, 498 bp, Gossypium hirsutum
  Clone ID: LIB3825-026-Q6-N6-D4
ataggggaagtttttactgtatctttatctgcctcttatcatcagagatgtttgggaatgattatgtacaacaaaagacatgaacctccctttacatgaccacgtccccccatactttaacaaccatcttccccaccatcccatattccaaaagcccagtgaaactatacaaaaacgatcagaaaaccctatcttgaattcccctccttcaatcctgggcgtccatcactgtatccttttcttcaaacttcactccgaccaaaaacctcatgctcacctgtttgggatcatagactgcgtattcattatactccagagggctatcctggtgttctgaggggatcaaacggccacaagggactttgatatcatctttccaatctatatattctgattcatctggtttgtttctccccagtcccttcacacacacttttttctcttccaatggcttagtatcctccggggggttcttgagctccataatttcttcacctt

SEQ ID NO: 4537 - DNA, 334 bp, Gossypium hirsutum
  Clone ID: LIB3825-026-Q6-N6-D6
cccacaacaggacaacagaacaatggttttacattttggcaaaaaacagcccaggcgaggggtttacagccgggaaaggggggctaaaaccaaaccggaaaacgacttgggactaaaagtttcgacagaaaaactagttggaaaagtgggggaattatggacagctctgggggggcggaggctgggttaagggaaccaagttgttaacaaaaatggttggggaggccccacaggggggcaaataacccaaagggttgggctccctttaatccatttaagaacaatcttaatgggcctttggctggaaagccctttaaacccaacctccggaact

SEQ ID NO: 4538 - DNA, 552 bp, Gossypium hirsutum
  Clone ID: LIB3825-026-Q6-N6-D7
aaacccaaccaaaactcctatgaaagaactcaactgagttccatgttaaaggtcataaaaggattatataatctcatgcctataaactgaaacataaaacatcacctaaatacatttaaactgcttaattgatgataaaattccacagaaaaaaaaaaagaaaaaaaagtggatgcatggcatacaacagctttaaacttattgacatgtatcatacttgtcctgagaaccttcgccactgaataccttcaattctagcattcaaacagttttgtcgaactgtgctcgagaatttctcctagcactttccaaaacagttttatctacggtaatgaagtaggccgcaattgatgctccactgatgataagagcttgagcagtatggttgaggtttgcctttgcccaaggaatcttacgtactgcaatcaaggtaggtacggcgctgacaacggcggcgaccgcagccgccttgacaccggcacgaattccttcttgagagaattgcttggctctcaaattcttctcgtcttcagcaggggaaggaattatgaa

SEQ ID NO: 4539 - DNA, 423 bp, Gossypium hirsutum
  Clone ID: LIB3825-026-Q6-N6-E1
aaaccaccaaagtcggataaacatggcatatatatctatatatatatatcatatgtcttccattaacttctgtttctgaactacataatccttattatcattgatcagacgcgggaggaaccaaaagcccctgttgaagattaccagccaccaaacagatggacagttcagcagtagatatgtacctcatccatccaccattttcatgagtgccctatgctgaaggagcatccggctgattctctggcttagcattttggaattctgggagctcactgtatgcctcatttaacctaaataacagggggaatttagccatgtcaacattgaatcgttcaatcccagccagaatctgtggggctagaaacagatctgccatggaaacttcatctccagtcgcatattttccagcatgatctttta

SEQ ID NO: 4540 - DNA, 538 bp, Gossypium hirsutum
  Clone ID: LIB3825-026-Q6-N6-E10
aaaagtaaatggaatttatacatctcagagaaacaaacatacagattagacattaaggactaacatcattaaaacctgcgtgcatattgaattccctatcctctatatctatccattgtgcctatttgtataaacaggtcggcgatagtcaaccacttcggattgaacaacagatgttggttagcatgcaagtttaggtatacctaaattgtaaatttgtaatgcagatccataaaaaaaaaagttttacttaaatctatgttagatcttacgagtgcacagagtcacaatgtcgtgcccaccaagtggtatagccattagaaagacaatcaccggaaatcaactcctgctgctgtgttctctcccagaattcttcttcaaacaggcagcaaataaaaactgaatttgtctccatcggttcaatgtagcaatttaactctcccttagaaagtaatgtgtgtcagacttcgggcaggtcaagcgctctgggtgatctgacagtaatttcttgttccctctttttgccgatatattgctg

SEQ ID NO: 4541 - DNA, 427 bp, Gossypium hirsutum
  Clone ID: LIB3825-026-Q6-N6-E11
aagggaaaaaggcaaagggttattctagttttggttcagataaaacaagccaaagtggaacttttctaaatgaggggttaatagcaaggggtaaatatattttccttacaaatatcccaaaaactggaaatttaaccttaaaaaaggggaaaaatggacaagttttttgggaaaaatgaaaaggaaaaagccaaccgccggagatcatgtttctaaatcctttcaacatcaaaagaagcccccccttggtctttcctctgcaacatttactcttattggtcttccatccaaactctgtccgtcaagagcagcaatggcatcattcaattcagtttccgaagacatagtcacgaaacccaaacccgggatcggcctgtctccctatcatagactacacgagcctcgactaccttaccatgttcactga

SEQ ID NO: 4542 - DNA, 556 bp, Gossypium hirsutum
  Clone ID: LIB3825-026-Q6-N6-E12
gtaaacaaaactaaaattcatttcaaaataaataattttatatatatctactgctacatctcaaaagccaaagaaaaaatttggttcctagctctatctgtcaatgtcataatttacacaagctacaccgttgaatgttgcctgttgttcatccaataaatcttgaatttctcaaaggactgggttcccaggttctaaaacagctcctttttcgcttctcaaccttggttacttcctctagtactcctgctttgacctttctgacctttgtcatgtgaaactggaacttttgagatgatcaatgagctttgtataccttccaagagtctagatgttggctgaatcttccgattagatctacgaggttcaacaacttcagatacaattttcatttcctcctcaactttagccaacttcccagaaactggagcaagtttccctttactgatagattcggatttagcatttgatgtggaagctttctcagggggtgcatctgatgagagagcagcacaagaaaataaaacctggccctctgcagctccatcagaacttg

SEQ ID NO: 4543 - DNA, 525 bp, Gossypium hirsutum
  Clone ID: LIB3825-026-Q6-N6-E2
aacaccaaataatcatacaatgagttcttagcagccactgaaaaaattcaacatctgctcctgtttttcctataattcttgaataatagacctcagttcatcacattcctagtgcattcaagtctcacattacaaaattcataattaatttctttcttctgccaaggagatgataggtcgacctgttgtaaacccgcctctgattaaaacaaaaaatgacaaatcatgtttcagatcgaagttattcacggccataggaattatagccatttgaattagacatgttgctctgaggcggagttcgttctggccgaggtcttgcatactctgcaaatataacccaaccatcgaggaacttgccatccattcccactcttcctttctcagcttcctctacagtggcatatcttacgaaaccaaagcctttagaatatcctgatacacgatcagtcactactctggcatcaattacacgtccgaactgagaaaagcttctcgaatttctccgactgagtgcgcttgtta

SEQ ID NO: 4544 - DNA, 485 bp, Gossypium hirsutum
  Clone ID: LIB3825-026-Q6-N6-E3
aagaaaaaaacaagggagcctgataatgatttttctcaagcctgtaaagcaaagttttaattaaacaaaattgaagagcttttgtcctcatgaaaattctcaagcctgtaaagcaaaagcagggaagggggaaaaccctaaaataacatagaaacaagctttaattaatttatcttctaccagcaatccttaataaaggggagattataccctggatttcctggaaggaaggcgggatccttaggtcttcctcgaacgaccggttaagggttttaatatgacccttcaatgggtccgaatttcggatattttaaaccctcgtttaaatcacctttttgggcaaccccatcaacaaactaaaataccttggcattggggcatttttactcaaaaacgttaacaataaaccaagctcgtttgaatccaaattcgatacgcatttaagaaactttttccttgccaccaattcctccatcaggggaacc

SEQ ID NO: 4545 - DNA, 515 bp, Gossypium hirsutum
  Clone ID: LIB3825-026-Q6-N6-E4
ttttttttttttttttttttttttttttttttttttttttttttttttttttttttttttttgtttaaatttatcttaatttttttaaattttatctttaaaaaattcaaaaattttcattaaaaatttcaaaatttaaaaaggaaaggaaaacaaaaaataaaaccaaataaaaaaggggaacaaaaaaaaaaaaaaccttcaaatatttcccaaacacctaaaaaactccaaaaattcaaaaaaaaccccgcagcggacgcccgaaacaaaggacccaccccaccaaccaccgcaccccccagaagagcgccaccaacaggccccccccgggaccccccgggccccccgagaaacccccaaaaaaccgggaacaggaaccaaaaagaaaggaaccaaaaaaagaacaaatgaaaccctttaaggcgtaaaaaaaaaggtaaaaaaagtaaagagaacgggtttttttttcctccaaaaaaagagggaaaaaaccaaaaaaacacgcttggggg

SEQ ID NO: 4546 - DNA, 516 bp, Gossypium hirsutum
  Clone ID: LIB3825-026-Q6-N6-E5
gaaaaaaaaaaagccccactagaaaaaaaaatccgtcatacagatctgtttacagcacaaaagcttagcaaatcttaagctgtcaaaggaaccctagagaccaatacttgcaacagattcatccccacactactatcactaatttagtcctctctctatactttggacagattcaaaaccatgacacactcaacacgcacaaaccagaatattatctcagtaatattatgttctatataaacagattaagtagataaatacacccacataagataccattaggagttaaaaacactaattggcactgattccagaattcttgttaaactttgaagtagcgaggctggcaacatggaactggggttggtaattgtttgtaggtcggtcaagaactggaggttcattcaagaatgcccaagtgctccttgtccaccacccactttgctttacgatattttccaggcttttttctgtgtccatgtctatgaaaccctggtttctatttggtataggcat

SEQ ID NO: 4547 - DNA, 562 bp, Gossypium hirsutum
  Clone ID: LIB3825-026-Q6-N6-E7
gataaaacaacaaacaattaaaacaaaaacatcaaaaaccacaaataatttatgtctttagcagagtactgaaaacaagagacaaaagcaataataaaaaggactaaattcttcagcaaccactttttttttctttgcttcaaacctcagcacttgacctccttcaatgcatatgcaaagtacaaaaatgttgggtcaacagcaccatccttgtagtaagcaaacaccaagcatccatcatcatgcatgctctctcctacgaaaaattgaaggtccttcaattttgaaagcaaaaacttggttgctccctcaatgtttttcttgaaggactcttgcttttccgcatccagttttggtgtcaagttcttgatgaacttcttgatgaacacgacaaactgcttcttgtcgaaagggggttgctcctgaagcctgaaagtgtcaacaatgtcaacaaccttcacagcttggtcatcaacaccttcatcctcatcagcaccttcggctgaaggattggcaccaatgtcaacatcgacagctccttgcacaacccactttccctcaa

SEQ ID NO: 4548 - DNA, 569 bp, Gossypium hirsutum
  Clone ID: LIB3825-026-Q6-N6-E9
gcttaaaagtaacagtgtattttacaatattatcaggctacatggcctcactttgtattcaatatatattataaaagaaagcaaagaacaaaaatacaaaataaataaagaaacttacatagtgctttaacttattacaaagggatttgtctccttagtatgtttctaccatgggagatcgccacttttatcccaaatatcaggttatcattacgttgccttggagacatccttacttgacctattgtacttcatatggctcctaactagttgtcctgctgaaattgcagacataagcgacagctccccggcaagaacagcagacgctacaatggttgccagcgtcctagagtttgctcccggtgtctctttgcttgcacccttcactccaagtaagttcaaacaggctgattgagatgcaagctgagttccaccaccaacagtcccaacctcgatggaaggcattgtgacagagatgtggagatccttgccatcattaacagcttccatcatcgtgatgcaatgcgagctctcgacgttttgagccggatcttggccggtagctatga

SEQ ID NO: 4549 - DNA, 544 bp, Gossypium hirsutum
  Clone ID: LIB3825-026-Q6-N6-F1
ggggggggggggttttttttttttttttttttggggggtttttttttttttttgtcggggggttttttttttttttttttttaaaaaaaccaggagggggtacctaaacccccccaaacaaaaggggcgggggcgggcggacaaaagggggggggggggggggaataaaaccccccccaggggcccaacgggaaaaggggggggggtaggccccaaaaccaccgatgggggggaacaaaaaggatccgggggggcacgggggggcagggaacccaaccgggcccaaggggggggggaaaccaactggggcccccccggggggggggggggggaagaaacccccccaattccaagggcaaaggggaggggtggcccagaagggggggggaaaaagggggcggtcaagggaagggaacacggggggggggctggggggccctgggcaccaccatacccaccaccaaagccccccgggccaccagggggaccatgggcccgggcccccccaaaagtcccgggaaccgggggggaaaaaaaccccccg

SEQ ID NO: 4550 - DNA, 477 bp, Gossypium hirsutum
  Clone ID: LIB3825-026-Q6-N6-F10
aaaaccaaaaaaaaaccatttaataaaaaaagaaaaaccccccccacccctttaaaaaccggggaaaataaaaaaaaccaaacagtcccccaacccccaaaaaaaggggcaaaacccaaccccgtgggcccccagggggaaaaaaaaaggaaacccacccaacccgagagggaaaaaagataaaaaggaaaggctaaaaaaaaaaaggacccaaaatccgaccttaaaaaaataaaaacccaaggggggggggaaatttccccactggggccccccacgggaagggttggggcgggccttaataaaaaaaaaactgaaaaaggggggggaaaggaaaaaagcccgaaccttttaaaggaaaaaagggggggggggccaaggggcccaaaaaagggggaaaaggcaaaaactaaaggggggggggccctaaaaagggaaggaaaaaccccccccaagggaccccggggggaaacccct

SEQ ID NO: 4551 - DNA, 556 bp, Gossypium hirsutum
  Clone ID: LIB3825-026-Q6-N6-F12
gaagcttgttgccaagtttcttttatttctctgttaccaaattgcttttacacgacgagtattatttggagctcgtatcttcatccgtttcagtagtcactacccaagcctgatgcgagagaactaattgctacgtaccgcatttggattccgaatcaatgacggaaacctattagatattgatacgagacatggcctcgactttcccagaattttaacagcatctaccaacctggcacgcaagctgaaacaaacactcgttgaatgcactaaacaattttaataccatgtcaggcatcagttgccttatccgtatctccagttttaccttccccgccaatatggaggccactctcaatcttacgggcaacctcatcagccacagccttcactttcccacttggttcgcttccaagtagatcactctcatcatgagtcactggacttgtctgccatattctaatggtaccatcttcagatcctgatgcaaaggacccccctcctggtgagaaacgaacacagtggacaggaccatggtgacccttgttgcaaccta

SEQ ID NO: 4552 - DNA, 495 bp, Gossypium hirsutum
  Clone ID: LIB3825-026-Q6-N6-F2
gtggttttttttttttctctaattattcccaacttttattgatttatagaactgccctggctaacactgaacattacaacagggaccaaacttttctttatatggtacaacagtacgaacttgaaaaagaaaaaagtagaagcaaacaaacggggggggcggactcaaggcagtagcagagagcaaaaagtcgctcctttcatttaataggatcgataataaggatcatcctgggtacctccgcgggtgctccttctagtcccagcattgttaggcgccgcacttgggaagtcttggtttcccgttgtaccgtaagcaccccctgtatctccgccaaaccccatactgctgaggtcatcttgcctgcctgtatcatacccactacctgcgggggtgtacccacggttgttatttccaccggtaccgccatagacaccagaatcccctttgttgtacccagctgtgggggagccagtaccaccaataccaccacca

SEQ ID NO: 4553 - DNA, 562 bp, Gossypium hirsutum
  Clone ID: LIB3825-026-Q6-N6-F3
atcgaagtaaacactagcattactttaaatcacattgcaaaaactatagctagatctacctggagtacaataaaaccatttgcatcaagtaccaaaatatttaatcgtcttaaaacaaacttgtccctaatcaagttcgcggtgatgcatttccagctccaccttgctgcccggtttgagcagctggcgctgcctcataagtcccacgagtgcccccacttgcattgctgtcagaaggatatgctggaggctgtgaataactgctataagaggcgttatattgtgctgcatagggtggggcaccatatcccggctgcgcagctgcagcaccaccataagcagatgattgaggccgttgcaaacctgattctgcttgtccatagccagaagatggaggctgtgattgatatcctgcctggccatagcttcctggggtggtaggagactgctgtgtctgcccataggcagggtgattgaccagtggtttctgcccttgtggtggtccatacccaggtccatagcccgactgagctggtggttgactcccatagccactctgact

SEQ ID NO: 4554 - DNA, 562 bp, Gossypium hirsutum
  Clone ID: LIB3825-026-Q6-N6-F4
agagggtcaataaagcaaccaatttattcattattgtttcaatcatggtgaggattcaaacctcaattggacataagggcaaaaaaagaaactacaaatacataaataaaacgaaaacaagctgaagaaataacctatctgacacttttgcagctcaaagacattcagctctccttgaagataagttttaccaatgttgcggagagaaagtatggcacttcttacttgggaagtccagtttctgggtcaagaagagccagtttgtcatttgaaagcagaatagggcctttcccaggtcttgtacagatgaagtaactgacatccccagggtatttctgagctgaaccattttcaggaggtggggacaaagcttccacatccttcaatccctcgagtccagcatctttaagtatcgtcttatcaccgagaaggtagctgtccagatcagtatcagactttggagggaagtagaatagcagccgctgaattaattgagcagctgcctttctatctcgtgcaattaaaactgcattcggcccagcgtcaaatgtatatgccacct

SEQ ID NO: 4555 - DNA, 502 bp, Gossypium hirsutum
  Clone ID: LIB3825-026-Q6-N6-F6
gtaacaaaataatgttctataagccaaaaattccaggcaaagttatacaatttaagtatctaaattagtatcgatttgtcaactaaaacctccatgttaaaaccataattcacctcatagtaaccgggaaaacaaaaaatgataatctctttaattccaactggaaggccagaacccatgaatcccatacccggtcttccaattgtccaacaaaatcacttttttcactgcccaaaaggaaactaaaagcgtaaaaagcatcgccaaacgtttggctgttgcatccttaacataaacaaggacatgggtcacgacagctagcaataaccccacaacagtttacagaaaaccaaccgcgaacccttttgctccaagctgcattcctgatccttggtaaaagaaaaccaatttgtgttgaaacgttcctatccaccaaaaacatgggcattttccttattatgttatgcattgcacccgaaacactgaagaaataaacaaaaac

SEQ ID NO: 4556 - DNA, 562 bp, Gossypium hirsutum
  Clone ID: LIB3825-026-Q6-N6-F7
gatgaaaagggaatgttattattataaatagggtttactgtatcagctcatgggacaacatgaatagaaaaccagcgttaaaatgtcaaatatcacaatgttacacgctaataacagtatactctcctactcactcactatattgctacaacagctcttcgatatggtaaacaatatcaggtaataacactagtaacaagacaaagggtgtaaaccactaaatttatttattattagggtgatgctggtgatctatcagttccagaaacatgggtggattgcaggtttctttattgagctcaattctacggcacctgcactcatcaaaacacacttcactcctcttcctacgatgccaagatgtgtgacagccgcggccccatttgtgtgagcagtggaaacagttggagagtcaaaatgatctacattgctgttagcaggagacatatgtgaagagttcactgcagcaggagatgcattattctcaccgccccttgccttgccagatgccattccctggatttctgcaataatcaacgttgggtcggagatcagctgctct

SEQ ID NO: 4557 - DNA, 544 bp, Gossypium hirsutum
  Clone ID: LIB3825-026-Q6-N6-F8
aaaaacataaaatgtaggacccatatttttgtttttatagattacattgtatggtacaaaagtcagtaaaaacaatgcagcaccaaccatagcaactacccttttataattcatgtcaacatgagatcattccccacatgtttaggccgaagacaaacccggatttcgtgttcttcgggcaccattcgtagtttcggaaccataatctcaagcacggatcctggcccatcgtgatatgcttctatgtgggcatcttcagggattcgagttgacaatgggatttctctaacgaaatcgccgggagggcaatgctcgggagcgggatctgtaagcttgaatgtccggttgtgtcgtttgataaacggcatagccgatgtgctcaaacaagatagttttataataccatgagtgagtgtgttcctccatgagacctttaccctttgaagatctacaaaaggcaagctgataatgatcaagtaaccggcttcgtcctcgtagatggcttttgcagcggtaacaggaccgtaagtgcttttcattaccc

SEQ ID NO: 4558 - DNA, 494 bp, Gossypium hirsutum
  unsure (1)..(494): unsure at all n locations; Clone ID: LIB3825-026-Q6-N6-F9
gtactatcaaagaagaggttgacagtccatttataattttcccacttggggcaacatacgaaagaactaacacataatacattagcatctctgctcacatctttgcaggctttgggaaaatgtcaggagtgaatttctgagctgcgctcaagctccccttaatcttcatcgcacccctcataaaagcaatctgtggattcatctttccagtggcaaccttcataaaatcatcatccttgaacgaaaatatagcatcaggctttcccccttcatatttacctttggtaacctctcctttcttgaggtcaacaaagtaagaaacctcatcaaatccaattttcttgggggcaatattgatttggtaaacgaggccgatcttcttggtgagctctttaccagcatcactagccaagtgagccttcatcatctcaaacaaattatcggatttcaactcggtattcgccattattaaaccaaaatcgnacgcgtgggcg

SEQ ID NO: 4559 - DNA, 568 bp, Gossypium hirsutum
  Clone ID: LIB3825-026-Q6-N6-G1
atataatgaacccaaactccaactcaaaacccctgaacttaacaaattcaaaaagcccgttcataaaatctagaataacttgttaaaatgattatatacttcatgaacctgaactcacaatgctccaacccatacccagggggcgttgccgtttcccacctctaactatgcttattttcgatgaatccaatcaacaaatgcaaacacagtggaacatatttcacattataaaagggattttgatgatcctttttgacaaatacaaatgcaaataaaatgtacttttattattactattaaacacaagattttgctgaactttgatgccaaaggatccacaagttagataaccccttttgctcacaactctgacattgcataatccaaagcatcaacaagataatcggcatcatctttggtgaaacacattggcggctttattctgaaaacatttccatgcagcccacctttcccaagtaaaactccgagttctctcattttctcgaacaggatggcagtttctgccttggccggtgtcttctccttcctgtcggtaacaagttccaca

SEQ ID NO: 4560 - DNA, 76 bp, Gossypium hirsutum
  Clone ID: LIB3825-026-Q6-N6-G10
ttttttttttttttttttttttttttttttttttttttttttttttttttttttttttttttttggtttttttttt

SEQ ID NO: 4561 - DNA, 541 bp, Gossypium hirsutum
  Clone ID: LIB3825-026-Q6-N6-G11
ggcacaaacattttatttctgtatattcaacactcggagtcttgtcaagttgcaatatctcttctatttccaaagaaccaattggggacaatccgaaacataataaaatgatgtcaaaacttaacccatattgcgataaagattccaactctttctaacccaagatgtcaaaatttattgagtttgcgaatctcaacaatgccttctctgctgaaataacaaatttattgagttactcggccttacctttgctagtttacctgttattagtaatttaacacaaaggcaatgttagaacatccaagaaaagaaaatcactatttaaggtaattaaaacgaatactattgctagcagcgacaggttaacatccttcattacatcactttaatctgacagaacaaaatatagctacatttggcgaatatgatcgttaatttgttaaatagccagccccagccaatatatctaaatatgctactccccctcccctccctacttttttctcagattaaaaccggttgccattgattcagattaaaa

SEQ ID NO: 4562 - DNA, 254 bp, Gossypium hirsutum
  Clone ID: LIB3825-026-Q6-N6-G12
aaacaaaacgggaagccttttattcaaagaatcaacttcattacaataaatttaacgaaaaaagaagggggtcataaatccctccccccctccctttttttaaaaaaaagcccccccggggggggagcccaacaagcccttcaatttaatgcttgaaaaaagccagaagggaaaccatcaaagagaagcccacgggggggggagaaacccccactggaaaaccagctccagcgtctggcaacggggacggcccc

SEQ ID NO: 4563 - DNA, 543 bp, Gossypium hirsutum
  Clone ID: LIB3825-026-Q6-N6-G2
aaaatcgaataccaaatcatacaacatgcattttttccctagccactgcataggaaaaaaagtgaaaggaaaaactatatcatttcagaatccttgaggaactgttattaatacaaactctttactaagctacgctaatgcataagggcaacggcggcctcctgaatgaaaggctgcgtgacatgcacgaattgttcggcttcccgctccacctcttcccaacaccgacgagctccttttccctcattcatcttcttcacgaatgcaacaaaccgtctccaattgcccggatgaaagagcgatgggttcatcctcaagtacgtaaatgcacacatctctctatcaactgctgagccatcgacattcaacgatgaagctcgtaagatctgctcgtgggcgtattcatcataacggggaagtgcattctccccggcaagtggaacttgtgctgctcctgttgctaaagcaacttgcttcactagcttctccggtgcacacaaggcatcttggggctgctcatgatcccgcatctctatgcaagtg

SEQ ID NO: 4564 - DNA, 463 bp, Gossypium hirsutum
  Clone ID: LIB3825-026-Q6-N6-G3
gggccccaaaccccagaatttttcaacacaaaaaaggggctaacataggggggggggccaaacaaacttccaaacatttaaaaaacatccccgggacgggaaagcacatgtaacaaaaaaggcattctttggcatccaaccaaaaaaaaaaatggccaaaaaaaaaaggatttccgggttccaccgggcagggttaaaaaccggggatttggagggtttcctttttaactatgccaccctaaaaaaggaagggggaaaaatttttacccggggcaccttgaaggtaaaaaacccggccaaaataaggggcctggaccacgggcccattgaaaaaaaactcctttttaagggtttaaaatattttggtaaaactaaatttttttttaaacccctggaaaagtgtaaggcttttgcaaccattcctttggtgaatacaaatatgcccatacttctttgcaccccc

SEQ ID NO: 4565 - DNA, 514 bp, Gossypium hirsutum
  Clone ID: LIB3825-026-Q6-N6-G5
ctctaattattcccaacttttattgatttatagaactgccctggctaaccctataacattacaacaggaccaaacttttttttatatggtacaacagtccgatcttgaaaaaaaaaaagtagaagcaaacaaacaacaaacacagactcaaggcagtagcagagcacaaaaactcgctcctttcatttaataggatcgataataaggatcatcctgggtacctccgcgggtgttccttctagtcccagcattgttagaccccgcatttgggaagtcttggttccccgttgtaccgtaagcaccctttgtatctccgccaaaccccatactgctgaggtcatcttgcctgcctgtatcatacccactacctgcgggggggtacccacggttgtcatgtccaccggtaccgccatagccaccagtgtcgcctatgttgtacccagctgtggtgtagccagtgccaccaataccaccaccaccagcatggccagctgtggcgttatgatggcgggcc

SEQ ID NO: 4566 - DNA, 560 bp, Gossypium hirsutum
  unsure (1)..(560): unsure at all n locations; Clone ID: LIB3825-026-Q6-N6-G6
aacagaaaagtcaaacgactacaattttataagtctaatgacttaaatgaaaactttcaaataatacattanaaacccaacattggaaataaaacataccttattggaaccatttcccgtaaaaaccacaattatgattatttgcttatttagcaatggcactattttttttcactcaaaccccataattctaagctttcatggaagcttcatcaaagcttagaagaaacatcctttggatgatgaatgacgatataattataagcatcaagtgtcaaaaaatcatccaaagttgaagcagtgcattggcgagtaaaaatcttgcatgcttctttatacattcctttcttaaacttctcttttccgacctcacgttcaatccgagccatttcttcttcaaccactcgcccaaacacatggttcactcgaaccccaagcccatcaccgtctaattcaacaccatatttcaaccactgccaaatttgaaccctactgatctcggctgtcgcagcatcttccattaggttataaagcgggaccgaacctgaaccggttaacca

SEQ ID NO: 4567 - DNA, 565 bp, Gossypium hirsutum
  Clone ID: LIB3825-026-Q6-N6-G7
gcaaaagtaaaagcccaatccattaaaattcttcaaatcagtaaaacaagtaaattggggggtttagcggatttaatgcggaaacaccccccccattacaaggtgaagtttgcgtaataacaatttacaagtgggtttataaatgaggtttcagctacagttcgggaaaattttgcctcctcacccattgtcatcctagatcctctcatctcctctatctatacgtatataacaggcacactcaccacaaaaatgaacaaaaggaagccagtactaatactatgcaggggaaatattactgccccattctattagttagttcacaaatctaaatggaacaataaaagttctttttttctctttaggaaaaaaggggaaaaagttaaaacagacaatgttttagttgatggagcggcgcaaagcatcaggcaggcctggtagatctatacatgttcttcccctccgatgaacatttcagaattccaagctttcttcgcatccggctctttcttgtgagttcacttttcctttggtagcccaagattgtttagtcaaccaagcacat

SEQ ID NO: 4568 - DNA, 523 bp, Gossypium hirsutum
  Clone ID: LIB3825-026-Q6-N6-G9
aaaaaaaaactcgaagcatccatacaaatctttctaattgtacaaatggaggcctaacagtgaaacatgtccataaacatgatactctggaatatcatctacatctaaaattccattctaacaagcgcattcgaaacatcagaagatccataatgtagccagtccttggcacaaattagtgcttccaccgtctccggtcgcaaagagctacgatattcatctagttgcttggctgtaatatcaaaaattgattcggtggcagcagcagacaccggaatcgacaaaatgtcgcgagccatcttggaaagagttggatacttcatcttgttcagcttccaccaacccaacacattaaactcttggacacgaggtaacagggactcttccaagtactgatccagctcaaacttcatctgctggctattagtctccataatgtaaacatcaaaatctgcaagcccatggtccgaaagaagataccttgatgagattcgttggtctttccattgtttgcaccattcac

SEQ ID NO: 4569 - DNA, 539 bp, Gossypium hirsutum
  Clone ID: LIB3825-026-Q6-N6-H1
agccgggaattcttttcgttattaacatcactaatacattttctatcatacgactaaactgctgtacttatttgttttttactcatcgaattcaggatgcgggcatgagttatgcgtaaggtgtgcactctatctatgctcaacaagccacattccgtccaacatggttgccccaacaggttctattccatgccctctctgtagacacggcatcctctcctttgtcaagttgccgagttcgccaataaaagaaatcaagctacagctttcctttggcctatgtacaccatgcatgcttcatccccgtgatgcagattgcccatcaccaacttcagagatcagaaagaatcgtatttcatcggtctcttcagacattttctgtccagttacctgtagcccatttccttctgtcgccatccctttatgcacctgcaacgacagtccttgcccctctttcgaacatcgagagacaacagcagaaacacaagaagaatcccccggacgttcacaagcaacatctatagaacaggataaacttg

SEQ ID NO: 4570 - DNA, 77 bp, Gossypium hirsutum
  Clone ID: LIB3825-026-Q6-N6-H10
tgcacctacgacacgtgcccttgggggccagaggcccctactgcggggtcgcaatcgggcgacgggcgcgtgcgtcg

SEQ ID NO: 4571 - DNA, 545 bp, Gossypium hirsutum
  unsure (1)..(545): unsure at all n locations; Clone ID: LIB3825-026-Q6-N6-H11
aattaaaaacagatttcattttccttcactcacaaacaaaaattcctttngaaaaataaatttaaggaacaagtgtaattttctacagcaaacgaaagcaccagccacggttcacaaaaaatccaacattcaatcccagattttggtcattcggatgccacatctaaataggcaccttcacattttggcccttaaaatggtagttcatctacgacgtacaaggaaataaaatttgataacaaaaaaatgaaacagctatctcaacgcctcctcattcctcgtccacggccagggaaaccacctccacgacctctgccacccatggcacttgcagcagcttctccctgtgcactctccgacttgggattcttaacagtctcatcgacacttagaataagacatgcagcctcagttgcagcattgattgcattgatctttacaactgatggctcccacacaaagtttgcaaatgaatctgctattccgccagtgttgatgtccactccgtaaggtgcaccctcaccagatggaagtgcatgcttgtg

SEQ ID NO: 4572 - DNA, 566 bp, Gossypium hirsutum
  Clone ID: LIB3825-026-Q6-N6-H12
agcccagacattggagacattcattattttctaaaacagtgaaatgttgttaacacaacagcttaggagataacaaataaaacacttccacaacaccagatgcctgagagtcacctattctccaagttttgggtacttcaattttattccataatggccacttgcacaggtaattccctgagcagagattaagcagaagcctccagcaactccctttctgcacgctctctaatccttctctccagctctggcctaaaatgccgtataagaccctgcacaggccaagctgctgcatcacccaaagcgcaaattgtgtgcccttcaatctgcttggtcacctcctgaagcatgtcaatctcttccaactttgcattcccaactttcaatctttccatgatcatccagagccatccagtcccttccctgcagggtgtgcactgtccacaactctcgtgcttgtagaagtatgaaagccttgcgattgcatctacaatatcagttgatttatccatcacaattactgcagcagttccaagtcctgactggacagccttgagtgcatcgta

SEQ ID NO: 4573 - DNA, 546 bp, Gossypium hirsutum
  Clone ID: LIB3825-026-Q6-N6-H3
aagcaaaagagaaccaacaccgaaatcttattccgacaaacaacggccgaaccgtactattacaagctctatatacacaagtaccagactacattcttgcatacatcaccccatactacactattaagttacacatttgaaagacctaagcatgcaaacagtaccaaaacccatttgatttgtcgccaaatatgggagaggactcatatctcacacgtcgtaaggaggaggacaagggctccttggtccaacctcgttagccttctcgtatgcatccgatgtggaccttctccgaaaccgatatgattctctgcctccggaaaaaggagataccggaggggtcgatccggccggcgaaaccggaggcgatccgctctggtaaccaggcggctttacgatcataatactacgtgtcactctcgtcgcttcctccggcgcttcatcaccgtacgatcttacactcccgccatcagattccttggcagagttaggccggaaagtgaaagtggagtgctttcggagcttgccaaggccattatcgggtcg

SEQ ID NO: 4574 - DNA, 546 bp, Gossypium hirsutum
  Clone ID: LIB3825-026-Q6-N6-H5
gttaaaatgattgaaaatcattgaactaattatgaaaaattcctcagtatattagaaattgatagtacgttctatatttatagacttttactaactaactaactaacttatacataactgattctaaccactttgccaaccactttacttctcaatttctcaacactccccctcaagttgagggttgatatatatctttaacccccaacttggacactaaatactcatgctgtttaacacctagagcctttgtcattaaatcaacaagttgttcagttgttcccacatgctgcatttgaatcaatccatctttgattttatctcgtacaaaatcacaatcgacctttatatgcttagttcgtcaatgaaaaactggattggctgcaatctgtaaagctaccttgctatctgaaaataccacagacttagctggttgattaagacttatttcttttaacaatccattcagccaaacaacttctgccactactaccaccatacttctatattcagcttctactgatgatcgagagactgtggtttgtt

SEQ ID NO: 4575 - DNA, 562 bp, Gossypium hirsutum
  Clone ID: LIB3825-026-Q6-N6-H6
aaaacgaagaacccaaacaaggaacacaatttattaacccatcaactgttaactgttttgaagttgttacacatcaacatgttgcactaatattacttctttaacataagtaaaccttctgattatcgttattagataatgaacaaagcatgaagcagaaatttattatacccttcttccaccatacactacgtttgtcttgtacctacatctttgaccagaaccggctcaagctagcttcgatcgatccgtgaggttcatctgtcggaagatatacatcatcatcgaactttacaatgctgccgtgatccttgcttgatatattaacaggtaagaaatggatattcggcatttttagtttaactgatgatatgtcactgaacctgccaagtacagcctttgccatctgcaaaagagtgctttgaacagatgcactatatacaccccgttcaggaggaccaaagaaagcatcgaccaaagcctttttcacattcaagtattgctcattgaggtagagcgacttttgagggatgctagagacagattcataagaatacctcca

SEQ ID NO: 4576 - DNA, 544 bp, Gossypium hirsutum
  Clone ID: LIB3825-026-Q6-N6-H8
gaatcaaatagcacttaataaaaacaaaaacttgggaaatgatccaaatcctgtgttacagaatgacgtaaaagaacaagtcaaatgaacgaaattgaagcaatctccctagattacatctttagagcagttcttgccatcactagagcaccctcataagtttgatttccaccgataaacccgctcatgtggacaaagacacagccggaaattcttgtctcctttgagagctcatcgtccctcaaacctcgccactgtgcagggaggggcttccggctctcaaaactatcaggagatgctgctactgcctgcactcgccattgtttgccccgttcatccccataaagaacatatttaataagaggctcaaccttcagctccgcctcaagctcaaataagtgaagcttccactgttggatgtgaaatgaaatcagacttagttgtaaataaaatgatgtatgatggtaagtcaataataagctgcagtcatttgcaacaatatattcatctcacatactaatggaagtagcaaaggttatttgat

SEQ ID NO: 4577 - DNA, 555 bp, Gossypium hirsutum
  Clone ID: LIB3825-026-Q6-N6-H9
aatccaattcaacctaaactatcttttattaaagtattggcatataaatctactcatacatcactcaaatatgaaaagaaaaacaaaaaaaataactgaaactgcatctacacatggtttacaatcaaattccctgtaaaaacccttccaaagctctaaattcctgtgaaaataactttttgggtatagtaattatgacaaagccattggtcatcggaaaccagacctgaatcagtgttttgtgaacatcccttgcgtcaatgatgaaaaatcgtaatccttacctgtttgcgaaggatttgaggacggagctggggaagctgattgaggcttgcttgctccggtcgttgcaacaccatttgatggggcaacttgtcccaatccataaaagctggatgatggatatgcagatgagttcaccatttgtgtctgtcccatattcatagcctgcataagtttctgcagatcagcctgcccagcaacgggcatcatcattccagggaattggtagccactgtttggccaagcttgagagggtatgtttgttgccgttag

SEQ ID NO: 4578 - DNA, 566 bp, Gossypium hirsutum
  Clone ID: LIB3825-031-Q6-N6-A1
ctccaacttctaagtcttaagcaccccattgtgaagtaaacaaaactgttctcattacagagacaacaaaaagaaattgtaaaagcttccgactaacaatccatcactcagcagtttaaactgaagcaccctttgatttcctcggagccaactgagtctccggctcttttttgacggcttcctctttctcagacaggatcagttcaatgtgacacggtgaagacatgtaggggttaattcttccatgtgcacgatatgttcggcgcctttgcttctgtgcttggtttacttggatgtgagatacgataagtgaatctacatccaagcctttcacctcagcattgctctcggcattcttgagcaaatcgagaatgaattttgctgatttcacaggccaacggccttgtccattagaatggcgattcttagcctgtgcggttcgcccaactccaccacagaagcgcctgaatggaattgcttgcttgtgggcaataacatcttcgaagtacctttttgccttcgtcaaaggtagctttcggattgcaaaggcagtttctcgtgtattc

SEQ ID NO: 4579 - DNA, 495 bp, Gossypium hirsutum
  Clone ID: LIB3825-031-Q6-N6-A10
ttttttttttttttttttttttttttttttttttttttttttttttttttttttttttttttttttttttttttttttttttttttttttttttttttttttttttttttttttttttttttttatttttttttaaaaaaaaaaaggggggggggaaaggggggggtaaaaaaaaaaaaatggggggtgggtcggcttaaaaagcaaaaattacggtttaaaccattggaaaaaaaaaaaaatttttaaaaacaaaaaattcgggggaaggaacaaaaaaaaaaaaaaagaaaaaaaaaaaaaaaatgaaaattggggaaaaaaaaaaaaaaaggggtggggggaaaaaaaaaaaaaataacgcccgttttttgtttggggggaaaaaaacggaaaaaaaaaatggctaaaaaatattggaaaaaaagggggaggagtaaaaaccccgggccgggtgggtggcccccgaaaattccggacgagaaacgagggggg

SEQ ID NO: 4580 - DNA, 402 bp, Gossypium hirsutum
  Clone ID: LIB3825-031-Q6-N6-A11
ggggggaaactgggaaatacttttttttattaaacaccaacaaatcctgcttttcctttgcaaaaaaaagttcaaacccgggaagggtatcggcctaaactcggccattcaaaacgaaaaacgaaaatgttttttcccagcccacaatttaaaacaagtttgacacatttttcaaggttttggaaaaaaaaaaacctaacccggcttaaaaacgggtcacacaaccattgttaaaaagaaaggaaaacctcacctggcaactttggggggggcaaattcttttttttttttttgcgggtcaaaatgggtgggcaaaaaagcttacaaaacttttacttttggaacggtcggggcaaccccccggagccattaaaaaaagggtgacataaaatacttgtcccc

SEQ ID NO: 4581 - DNA, 439 bp, Gossypium hirsutum
  Clone ID: LIB3825-031-Q6-N6-A12
cccaacccaaatttaaaaaccccgggaaaaaacctttggtttttttttacccaaacccaaaaaaaggccccaaaggggggaaaacttggccccccgaacggggcccataaagggggaaaaaaaaggtttttccctttggggggggccctaaagggcccccccccccaagttttatgggggaaaccttgtttccccaaaggggaagaagggtttttgggaaaaaaccccccccttaaggtttcccagcccaaaaaaaaggccgggaaacctttcaaaccccgggggggaaggggagaaccccttttgggggatttgacaaaagattttttttaaaggggggggggtttttccccgcggggtttttggaaaaagccccccaatggaaaactttaaaaaaggggggcccaaaaattggggggaaaaaaaaacggggccccct

SEQ ID NO: 4582 - DNA, 467 bp, Gossypium hirsutum
  Clone ID: LIB3825-031-Q6-N6-A2
tttttttttttttttttttttttttttttttttttttttttttttttttttttttttaagcagaaattgaagtccttgaacgggataaaaaatcatacatccaaaggttggctccctaagacaacaagaagacaaccgaataattcaaggtgccactccctaataaacaacttgaagcaaaattttttttttacatccttaggactctttccaaagcaaaagatcccctgatctgagggtgtaagttttttcattaaaaacttcagcaccaggagcttcggcttacattttttttttaggaatcccaggacatttacttattttggactgaacaagctagcaaactttggacgaacaaaaacactttgggaaaaagacttcgatcacttttttaggagggtccttgaaaaaattttttgcaaaaccggctggtcaaaaagaacgtgtgtgggccaacccccttttct

SEQ ID NO: 4583 - DNA, 560 bp, Gossypium hirsutum
  Clone ID: LIB3825-031-Q6-N6-A3
aattagtgaaaattaatttttaattactcccaatcctattgaaaatcaaaagcaaattcttggcactccccaataccatattataaagaaaaaaacgccaatccacattacacgtacgagaaaaaaccataacacacgtgtgaaccactccccttgccatgcaacaaaaaggaaaagaaaagaaaaacgccatctgccaccggtcgccgtcgtcaaggccgccatgcactggcccaaaccaccacctgatctttccacgacaagaatattccggcgtcagggcattgtgtcatcgaccaaccatctttataccttctcaacaaggcgcgtacatcatcacagacttcatcactcaaacccacaggactgaacccacttgcatggaaccgccttgaccaacgcgcggctggttcacgccgctctatcgactctgccggcgaacaagccactaagtcaacgatggcccggccggcggctcgttcaagcatcaacttttcgttgcttgttctattgaaactttcatctaacgcttcaaaataaaccctgaaccatcttaaaca

SEQ ID NO: 4584 - DNA, 526 bp, Gossypium hirsutum
  Clone ID: LIB3825-031-Q6-N6-A5
gaactattcatatatatatatggtagatatgtttttgtttatttcctttgtggtgtgatttaagcagctgcaactgtgctagttcgaatagagtaaccttgagcttcattcggagatgtagactccctttggctcttctttctcatagctttcactgaggaagaaaggttcatgtccttttctttagcttcatctatctcgatttgttcttgtctgcagtcttcactgcagaaaggtgtgtcccctctgtacatgaagatgtcacggttacacccaagaggcttcttgcaaagaaagcaaacatccaagaaatagggttgatgaacgtcttcaaatctggcatcataaaagcgagcaggcctcggagaaaaaactgaaccagaagaagatgacgaagaaaaagaagatagattcctcaaactactccttctaaagtaacaaaaaggtcttgaaagaaacccattttggttaaccttttggtaatggcttcctgaatatccagcctccatatctacaatggaagcca

SEQ ID NO: 4585 - DNA, 521 bp, Gossypium hirsutum
  Clone ID: LIB3825-031-Q6-N6-A6
aacaaactaaaaaaaacattggtcgtatcagaagtatctttttgatccaatttatacatgtacaaatacactataactacaactacatgtttcagtttattattcgggcagcaagcaaagcaataatttcaattgggaattcaaaactaaaccccctacacctaacactacagctatcctccaagtagataataatattactacctttggggaccagtcagcagtccaaatcacctttgtcattgccaaccactgccactgccactgccactttgggttccggcactgccaccccaaccaccagggaaagcttccctacctggagagttttgaactttagcacctgggaaattaccccaaccatcttccccttttttgttacctgaatcccgtttcggagttccattgtatgatgaatcctgcccctcattatgtcccctgctgctattatatgaacccctaccacgtccccgtccaccatagggccgtggtacaccacttggatgcccatctcgactact

SEQ ID NO: 4586 - DNA, 541 bp, Gossypium hirsutum
  unsure (1)..(541): unsure at all n locations; Clone ID: LIB3825-031-Q6-N6-A7
aataaagcaaaanatgtatcatattaaaagaaaaacaacctagtatggttcgatatattcttcatgttacagcgacacacaagttttatgagtatgagagagacataataatgataaatctaaaagatgtcactgagagtaggaagcttgatctctcctttctgagagagagggatagtgaagttccccatgataggaagatcaatggtgagacccaattccaattcatagtcaatgtcccaatctgcaccaatatcctttgccaagcttactaagatgttatacggcaccttcactggcacgtccagcatcgttgtgtcgccggctttcaatgaccccgggtctggtattgtccctgatgctatccctcttccagcacttttgaaattgtaagagatctcacaaatggggatggaatggctgtaggggttggagacagagaccttagcgccatactcgacgcactcacggctcacatgtttcagatcaacgtccgagacactagcctccggcttctttatgttggccaccttatccacca

SEQ ID NO: 4587 - DNA, 419 bp, Gossypium hirsutum
  Clone ID: LIB3825-031-Q6-N6-A9
gggggccaacattaaaaaatgggaattaaaattgaaattataaaaagtttaaggttggtgttgggtcattttttacaaccccaaaaaaattaaaccaacccccccaacatttaacataaaaaaggccccaaaggaaaaccaacaactggggtgaaaaacaaaaaaaacccttgggtttggctaaagctttggaacaacaaaaccaggggattttttttaaggtaaaattggcttctctctttttttaaggggaaacccagggatcaacccaattgggtgcactgcccactcggggaaggctattaactttaggggaaacatcaaccttgaaattagccccacaaaaaactccttcactggctacccttggcattgccctgattttgttcattggaggctaaaaggtaattaacccccct

SEQ ID NO: 4588 - DNA, 494 bp, Gossypium hirsutum
  Clone ID: LIB3825-031-Q6-N6-B10
gcttaaatattttttaaaaaccttttcccccgcaaagggttttggccccaggcaaggattacaaaaaaaagggatttttcttacatttctagcaaaacaaaaaaaataaaacggggggggaaggcaaaacccccaggggttatcatacaatttaaaaaccaaaaataaaaataaaaaaatcccgattaacccaagtagataaaagggggcagggggacaaaacttcttcttcaacttcagggggggccacttcccccgaggaccctaaaaacatgggctgaagccaaagagttcacccaccatctcttactattaaaaagaccccccccacccccattccttctaacggaaaacccacctcggccaccacctttgccgccaaaaaacctgctaccaccaccatttttatcaccaaaaccaccccgcccaccaccaaaacttcctctggacaaggccctctggggcaaggggggcaacccattcttcaacacccc

SEQ ID NO: 4589 - DNA, 441 bp, Gossypium hirsutum
  Clone ID: LIB3825-031-Q6-N6-B11
cgcagccgcgtcgtaacttggaccctagacgccgcccttttttttttttttttttttttttttttggttttttttcttttttttccaaagacacagcagaacggtaaagaccggggacggcccgcctagccccccctgctgaaaccccgaacaaccctaaagggggggggagacccgcagccaaaaaaaacccccagagcaaagccgaaaaaaaacccaacgggaaattgaactggcagccggacggccccgccgaagaaacgggccccgagccggggcaagaacgggccccaaccggggggggggggtggcgaaaagggcaaccgaacttcagaaaaccaaaaaagggccacaaagggggcccaaaaaccgaccccaacccgggaaatccagaaagagccccacgggggggtgccccccgggggaaaccgccgggaaaaa

SEQ ID NO: 4590 - DNA, 515 bp, Gossypium hirsutum
  Clone ID: LIB3825-031-Q6-N6-B12
ggttataatatgaagaaacattaaagaatcactgtccttacaacactatagttccaagtacttcaccattgccatgcctaacagacaaaaggatttgcttgtctgaaacccagaaacaatgtttggacatggagcaaaatctttatatttaggatttatgtatacgctgactgtagttacggttaagtggagactattaacagttagggttgacgaagttctttatctcctccatgaggcaatagaagtgattgttgttcggcaagaagtagaacccgatcgtagctttctctaggaagagaaggttcacctcttggccggattttttaagcccttcaacatatgccaattgccaatcttgaatgaggtccaaaccggccacgacaacaagacttttggggaacttaagcccttcgaggcttcgaccccggggaccaaatggattacaagctggatggtctctatcttccccttccggtagatatgccctccaataccagtcgcggtcgtgcagc

SEQ ID NO: 4591 - DNA, 528 bp, Gossypium hirsutum
  Clone ID: LIB3825-031-Q6-N6-B2
atcaacttccaagttttctgctatggtatatttgcttttttgtgttattgaatcggataaaagttcacattacatatgtgtaaaactagaatactaatgaaatagcttttaaaactgtgtaacttcatcaaataaggtataaaattcacataatcaattttagatcgagtccggattaaatgtttggtggataagaagttgagccgcttcaaccagcttctttacaacttgtccggcaggtagaatttccttgatgaggcctacactttggcctgcgtacatcaccatgctttcaatgtcacctgttgttgttgggttcggaactgtaccggcaaaacgccgaatttctctttccacgccgtgtattattgttcgaccaatgataggctgattagtttcattttcttgagcattaaggcatttccaatcacagaagaagggtgtttgaaggacacggtgtggtgcaccaagccaccttgctctgccaaagactctgtatactcgggtttatcgaattcaatcagtttc

SEQ ID NO: 4592 - DNA, 557 bp, Gossypium hirsutum
  Clone ID: LIB3825-031-Q6-N6-B3
ctcttcaaacatgcttcaatcaagcaggctgggatccagaaaaaaaaatccagtagcctgcaactccaaaaggaagacgatacctaatggcttcacctccactatgttgttcatttcttacatgaacatatatatatttatatatattagaacatgaaaatcgaacatgtagatagtactatagtaactgtacagtgggaacggggttggcaaaaactatccctgacgatcatctccccacaccaaccaaggtcttctcctcgctttcttttggcctgaaggatgaaccggatggaacttcttccagcaccggcatttcttctggtgcaggatgaactggtttcggtgtgtagttgaaggaaaggtctttgttggcagctaatgccaaaagctccttctcctcgagaccttttgtcggcccaaggctgcatcggtctggtgagtgcttggccaatgcatctttgaattttttgatcgtggcattggtgcagctaaagctgcataaacgaccctgagctcctctatagaacctaaagaaaggcaacacatgtacatta

(The sequence listing continues in the following parts.)
